(19) United States
(12) Patent Application Publication
(10) Pub. No.: US 2008/0104729 A1
(43) Pub. Date: May 1, 2008

(54) Nucleic acid molecules and other molecules associated with plants

(76) Inventors: Timothy W. Conner, Wildwood, MO (US); Yijun G. Ruan, Davis, CA (US)

Correspondence Address: ARNOLD & PORTER LLP;ATTN: IP DOCKETING DEPT., 555 TWELFTH STREET, N.W., WASHINGTON, DC, 20004-1206, US

(21) Appl. No.: 11/976,388

(22) Filed: Oct. 24, 2007

Related U.S. Application Data
(63) Continuation of application No. 11/313,816, filed on Dec. 22, 2005.
Application No. 11/313,816 is a continuation of application No. 09/333,534, filed on Jun. 14, 1999, now abandoned.

(51) Int. Cl. A01H 1/00; A01H 5/00; C07H 21/04; C12N 15/87

(52) U.S. Cl. 800/278; 536/22.1; 536/23.6; 800/298; 800/312; 800/314; 800/320.1; 800/320.3

(57) ABSTRACT

Expressed Sequence Tags (ESTs) isolated from Arabidopsis thaliana are disclosed. The ESTs provide a unique molecular tool for the targeting and isolation of novel genes for plant protection and improvement. The disclosed ESTs have utility in the development of new strategies for understanding critical plant developmental and metabolic pathways. The disclosed ESTs have particular utility in isolating genes and promoters, identifying and mapping the genes involved in developmental and metabolic pathways, and determining gene function. Sequence homology analyses using the ESTs provided in the present invention, will result in more efficient gene screening for desirable agronomic traits. An expanding database of these select pieces of the plant genomics puzzle will quickly expand the knowledge necessary for subsequent functional validation, a key limitation in current plant biotechnology efforts.

### CROSS-REFERENCE TO RELATED APPLICATION

[0001] This application is a continuation under 35 U.S.C. § 120 of U.S. application Ser. No. 09/333,534 filed Jun. 14, 1999, the entirety of which is herein incorporated by reference.

### INCORPORATION OF SEQUENCE LISTING

[0002] This application contains a sequence listing, which is contained on three identical CD-ROMs: two copies of the sequence listing (Copy 1 and Copy 2) and a sequence listing Computer Readable Form (CRF), all of which are herein incorporated by reference. All three CD-ROMs each contain one file called “15404C seq list.txt” which is 14,348,288 bytes in size (measured in Windows XP) and which was created on Dec. 21, 2005.

### FIELD OF THE INVENTION

[0003] The present invention is in the field of plant biochemistry. More specifically the invention relates to nucleic acid molecules that encode proteins and fragments of proteins produced in plant cells, in particular, Arabidopsis thaliana plants. The invention also relates to proteins and fragments of proteins so encoded and antibodies capable of binding the proteins. The invention also relates to methods of using the nucleic acid molecules, proteins and fragments of proteins.

### BACKGROUND OF THE INVENTION

I. Expressed Sequence Tag Nucleic Acid Molecules

[0004] Expressed sequence tags, or ESTs, are short sequences of randomly selected clones from a cDNA (or complementary DNA) library which are representative of the cDNA inserts of these randomly selected clones. McCombie, et al., Nature Genetics, 1.124-130 (1992); Kurata, et al., Nature Genetics, 8: 365-372 (1994); Okubo, et al., Nature Genetics, 2: 173-179 (1992), all of which references are incorporated herein in their entirety.

[0005] Using conventional methodologies, cDNA libraries can be constructed from the mRNA (messenger RNA) of a given tissue or organism using poly dT primers and reverse transcriptase (Efstratiadis, et al., Cell 7:279-288 (1976), the entirety of which is herein incorporated by reference; Higuchi, et al., Proc. Natl. Acad. Sci. (U.S.A.) 73:3146-3150 (1976), the entirety of which is herein incorporated by reference; Maniatis, et al., Cell 8:163 (1976) the entirety of which is herein incorporated by reference; Land, et al., Nucleic Acids Res. 9:2251-2266 (1981), the entirety of which is herein incorporated by reference; Okayama, et al., Mol. Cell Biol. 2:161-170 (1982), the entirety of which is herein incorporated by reference; Gubler, et al., Gene 25:263 (1983), the entirety of which is herein incorporated by reference).

[0006] Several methods may be employed to obtain full-length cDNA constructs. For example, terminal transferase can be used to add homopolymeric tails of dC residues to the free 3′ hydroxyl groups (Land, et al., Nucleic Acids Res. 9:2251-2266 (1981), the entirety of which is herein incorporated by reference). This tail can then be hybridized by a poly dG oligo which can act as a primer for the synthesis of full length second strand cDNA. Okayama and Berg, report a method for obtaining full length cDNA constructs. This method has been simplified by using synthetic primer-adapters that have both homopolymeric tails for priming the synthesis of the first and second strands and restriction sites for cloning into plasmids (Coleclough, et al., Gene 34:305-314 (1985), the entirety of which is herein incorporated by reference) and bacteriophage vectors (Krawinkel, et al., Nucleic Acids Res. 14:1913 (1986), the entirety of which is herein incorporated by reference; and Han, et al., Nucleic Acids Res. 15:6304 (1987), the entirety of which is herein incorporated by reference).

[0007] These strategies have been coupled with additional strategies for isolating rare mRNA populations. For example, a typical mammalian cell contains between 10,000 and 30,000 different mRNA sequences. Davidson, Gene Activity in Early Development, 2nd ed., Academic Press, New York (1976). The number of clones required to achieve a given probability that a low-abundance mRNA will be present in a cDNA library is N=(ln(1-P))/(ln(1−1/n)) where N is the number of clones required, P is the probability desired, and 1/n is the fractional proportion of the total mRNA that is represented by a single rare mRNA (Sambrook, et al., Molecular Cloning: A Laboratory Manual, 2nd ed., Cold Spring Harbor Laboratory Press (1989), the entirety of which is herein incorporated by reference.).

[0008] A method to enrich preparations of mRNA for sequences of interest is to fractionate by size. One such method is to fractionate by electrophoresis through an agarose gel (Pennica, et al., Nature 301:214-221 (1983), the entirety of which is herein incorporated by reference). Another such method employs sucrose gradient centrifugation in the presence of an agent, such as methylmercuric hydroxide, that denatures secondary structure in RNA (Schweinfest, et al., Proc. Natl. Acad. Sci. (U.S.A.) 79:4997-5000 (1982), the entirety of which is herein incorporated by reference).

[0009] A frequently adopted method is to construct equalized or normalized cDNA libraries (Ko, Nucleic Acids Res. 18:5705-5711 (1990), the entirety of which is herein incorporated by reference; Patanjali, S. R. et al., Proc. Natl. Acad. Sci. (U.S.A.) 88:1943-1947 (1991), the entirety of which is herein incorporated by reference). Typically, the cDNA population is normalized by subtractive hybridization. Schmid, et al., J. Neurochem. 48:307-312 (1987) the entirety of which is herein incorporated by reference; Fargnoli, et al., Anal. Biochem. 187:364-373 (1990) the entirety of which is herein incorporated by reference; Travis, et al., Proc. Natl. Acad. Sci. (U.S.A.) 85:1696-1700 (1988) the entirety of which is herein incorporated by reference; Kato, Eur. J. Neurosci. 2:704 (1990); and Schweinfest, et al., Genet. Anal. Tech. Appl. 7:64 (1990), the entirety of which is herein incorporated by reference. Subtraction represents another method for reducing the population of certain sequences in the cDNA library. Swaroop, et al., Nucleic Acids Res. 19:1954 (1991), the entirety of which is herein incorporated by reference.

[0010] ESTs can be sequenced by a number of methods. Two basic methods may be used for DNA sequencing, the chain termination method of Sanger et al., Proc. Natl. Acad. Sci. (U.S.A.) 74: 5463-5467 (1977), the entirety of which is herein incorporated by reference and the chemical degradation method of Maxam and Gilbert, Proc. Nat. Acad. Sci. (U.S.A.) 74: 560-564 (1977), the entirety of which is herein incorporated by reference. Automation and advances in technology such as the replacement of radioisotopes with fluorescence-based sequencing have reduced the effort required to sequence DNA (Craxton, Methods, 2: 20-26 (1991), the entirety of which is herein incorporated by reference; Ju et al., Proc. Natl. Acad. Sci. (U.S.A.) 92: 4347-4351 (1995), the entirety of which is herein incorporated by reference; Tabor and Richardson, Proc. Natl. Acad. Sci. (U.S.A.) 92: 6339-6343 (1995), the entirety of which is herein incorporated by reference). Automated sequencers are available from, for example, Pharmacia Biotech, Inc., Piscataway, N.J. (Pharmacia ALF), LI-COR, Inc., Lincoln, Nebr. (LI-COR 4,000) and Millipore, Bedford, Mass. (Millipore BaseStation).

[0011] In addition, advances in capillary gel electrophoresis have also reduced the effort required to sequence DNA and such advances provide a rapid high resolution approach for sequencing DNA samples (Swerdlow and Gesteland, Nucleic Acids Res. 18:1415-1419 (1990); Smith, Nature 349:812-813 (1991); Luckey et al., Methods Enzymol. 218:154-172 (1993); Lu et al., J. Chromatog. A. 680:497-501 (1994); Carson et al., Anal. Chem. 65:3219-3226 (1993); Huang et al., Anal. Chem. 64:2149-2154 (1992); Kheterpal et al., Electrophoresis 17:1852-1859 (1996); Quesada and Zhang, Electrophoresis 17:1841-1851 (1996); Baba, Yakugaku Zasshi 117:265-281 (1997), all of which are herein incorporated by reference in their entirety).

[0012] ESTs longer than 150 bases have been found to be useful for similarity searches and mapping. (Adams, et al., Science 252:1651-1656 (1991), herein incorporated by reference.) EST sequences normally range from 150-450 bases. This is the length of sequence information that is routinely and reliably generated using single run sequence data. Typically, only single run sequence data is obtained from the cDNA library, Adams, et al., Science 252:1651-1656 (1991). Automated single run sequencing typically results in an approximately 2-3% error or base ambiguity rate. (Boguski, et al.; Nature Genetics, 4:332-333 (1993), the entirety of which is herein incorporated by reference).

[0013] EST databases have been constructed or partially constructed from, for example, C. elegans (McCombrie, et al., Nature Genetics 1:124-131 (1992), human liver cell line HepG2 (Okubo, et al., Nature Genetics 2:173-179 (1992)), human brain RNA (Adams, et al., Science 252:1651-1656 (1991); Adams, et al., Nature 355:632-635 (1992)), Arabidopsis, (Newman, et al., Plant Physiol. 106:1241-1255 (1994)); and rice (Kurata, et al., Nature Genetics 8:365-372 (1994)).

II. Sequence Comparisons

[0014] A characteristic feature of a protein or DNA sequence is that it can be compared with other known protein or DNA sequences. Sequence comparisons can be undertaken by determining the similarity of the test or query sequence with sequences in publicly available or propriety databases (“similarity analysis”) or by searching for certain motifs (“intrinsic sequence analysis”) (e.g. cis elements) (Coulson, Trends in Biotechnology, 12: 76-80 (1994), the entirety of which is herein incorporated by reference; Birren, et al., Genome Analysis, 1: 543-559 (1997), the entirety of which is herein incorporated by reference).

[0015] Similarity analysis includes database search and alignment. Examples of public databases include the DNA Database of Japan (DDBJ) (on the Worldwide web at ddbj.nig.ac.jp/); Genebank (on the Worldwide web at ncbi.nilm.nih.gov/web/Genbank/Index.htlm); and the European Molecular Biology Laboratory Nucleic Acid Sequence Database (EMBL) (on the Worldwide web at ebi.ac.uk/ebi_docs/embl_db.html). A number of different search algorithms have been developed, one example of which are the suite of programs referred to as BLAST programs. There are five implementations of BLAST, three designed for nucleotide sequences queries (BLASTN, BLASTX, and TBLASTX) and two-designed for protein sequence queries (BLASTP and TBLASTN) (Coulson, Trends in Biotechnology, 12: 76-80 (1994); Birren, et al., Genome Analysis, 1: 543-559 (1997)).

[0016] BLASTN takes a nucleotide sequence (the query sequence) and its reverse complement and searches them against a nucleotide sequence database. BLASTN was designed for speed, not maximum sensitivity, and may not find distantly related coding sequences. BLASTX takes a nucleotide sequence, translates it in three forward reading frames and three reverse complement reading frames, and then compares the six translations against a protein sequence database. BLASTX is useful for sensitive analysis of preliminary (single-pass) sequence data and is tolerant of sequencing errors (Gish and States, Nature Genetics, 3: 266-272 (1993), the entirety of which is herein incorporated by reference). BLASTN and BLASTX may be used in concert for analyzing EST data (Coulson, Trends in Biotechnology, 12: 76-80 (1994); Birren, et al., Genome Analysis, 1: 543-559 (1997)).

[0017] Given a coding nucleotide sequence and the protein it encodes, it is often preferable to use the protein as the query sequence to search a database because of the greatly increased sensitivity to detect more subtle relationships. This is due to the larger alphabet of proteins (20 amino acids) compared with the alphabet of nucleic acid sequences (4 bases), where it is far easier to obtain a match by chance. In addition, with nucleotide alignments, only a match (positive score) or a mismatch (negative score) is obtained, but with proteins, the presence of conservative amino acid substitutions can be taken into account. Here, a mismatch may yield a positive score if the non-identical residue has physical/chemical properties similar to the one it replaced. Various scoring matrices are used to supply the substitution scores of all possible amino acid pairs. A general purpose scoring system is the BLOSUM62 matrix (Henikoff and Henikoff, Proteins, 17: 49-61 (1993), the entirety of which is herein incorporated by reference), which is currently the default choice for BLAST programs. BLOSUM62 is tailored for alignments of moderately diverged sequences and thus may not yield the best results under all conditions. Altschul, J. Mol. Biol. 36: 290-300 (1993), the entirety of which is herein incorporated by reference, uses a combination of three matrices to cover all contingencies. This may improve sensitivity, but at the expense of slower searches. In practice, a single BLOSUM62 matrix is often used but others (PAM40 and PAM250) may be attempted when additional analysis is necessary. Low PAM matrices are directed at detecting very strong but localized sequence similarities, whereas high PAM matrices are directed at detecting long but weak alignments between very distantly related sequences.

[0018] Homologues in other organisms are available that can be used for comparative sequence analysis. Multiple alignments are performed to study similarities and differences in a group of related sequences. CLUSTAL W is a multiple sequence alignment package available that performs progressive multiple sequence alignments based on the method of Feng and Doolittle, J. Mol. Evol. 25: 351-360 (1987), the entirety of which is herein incorporated by reference. Each pair of sequences is aligned and the distance between each pair is calculated; from this distance matrix, a guide tree is calculated, and all of the sequences are progressively aligned based on this tree. A feature of the program is its sensitivity to the effect of gaps on the alignment; gap penalties are varied to encourage the insertion of gaps in probable loop regions instead of in the middle of structured regions. Users can specify gap penalties, choose between a number of scoring matrices, or supply their own scoring matrix for both the pairwise alignments and the multiple alignments. CLUSTAL W for UNIX and VMS systems is available at: ftp.ebi.ac.uk. Another program is MACAW (Schuler et al., Proteins, Struct. Func. Genet, 9:180-190 (1991), the entirety of which is herein incorporated by reference, for which both Macintosh and Microsoft Windows versions are available. MACAW uses a graphical interface, provides a choice of several alignment algorithms, and is available by anonymous ftp at: ncbi.nlm.nih.gov (directory/pub/macaw).

[0019] Sequence motifs are derived from multiple alignments and can be used to examine individual sequences or an entire database for subtle patterns. With motifs, it is sometimes possible to detect distant relationships that may not be demonstrable based on comparisons of primary sequences alone. Currently, the largest collection of sequence motifs in the world is PROSITE (Bairoch and Bucher, Nucleic Acid Research, 22: 3583-3589 (1994), the entirety of which is herein incorporated by reference.) PROSITE may be accessed via either the ExPASy server on the World Wide Web or anonymous ftp site. Many commercial sequence analysis packages also provide search programs that use PROSITE data.

[0020] A resource for searching protein motifs is the BLOCKS E-mail server developed by S. Henikoff, Trends Biochem Sci., 18:267-268 (1993), the entirety of which is herein incorporated by reference; Henikoff and Henikoff, Nucleic Acid Research, 19:6565-6572 (1991), the entirety of which is herein incorporated by reference; Henikoff and Henikoff, Proteins, 17: 49-61 (1993). BLOCKS searches a protein or nucleotide sequence against a database of protein motifs or “blocks.” Blocks are defined as short, ungapped multiple alignments that represent highly conserved protein patterns. The blocks themselves are derived from entries in PROSITE as well as other sources. Either a protein or nucleotide query can be submitted to the BLOCKS server; if a nucleotide sequence is submitted, the sequence is translated in all six reading frames and motifs are sought in these conceptual translations. Once the search is completed, the server will return a ranked list of significant matches, along with an alignment of the query sequence to the matched BLOCKS entries.

[0021] Conserved protein domains can be represented by two-dimensional matrices, which measure either the frequency or probability of the occurrences of each amino acid residue and deletions or insertions in each position of the domain. This type of model, when used to search against protein databases, is sensitive and usually yields more accurate results than simple motif searches. Two popular implementations of this approach are profile searches (such as GCG program ProfileSearch) and Hidden Markov Models (HMMs) (Krough et al., J. Mol. Biol. 235:1501-1531 (1994); Eddy, Current Opinion in Structural Biology 6:361-365 (1996), both of which are herein incorporated by reference in their entirety). In both cases, a large number of common protein domains have been converted into profiles, as present in the PROSITE library, or HHM models, as in the Pfam protein domain library (Sonnhammer et al., Proteins 28:405-420 (1997), the entirety of which is herein incorporated by reference). Pfam contains more than 500 HMM models for enzymes, transcription factors, signal transduction molecules, and structural proteins. Protein databases can be queried with these profiles or HMM models, which will identify proteins containing the domain of interest. For example, HMMSW or HMMFS, two programs in a public domain package called HMMER (Sonnhammer et al., Proteins 28:405-420 (1997)) can be used.

[0022] PROSITE and BLOCKS represent collected families of protein motifs. Thus, searching these databases entails submitting a single sequence to determine whether or not that sequence is similar to the members of an established family. Programs working in the opposite direction compare a collection of sequences with individual entries in the protein databases. An example of such a program is the Motif Search Tool, or MoST (Tatusov et al. Proc. Natl. Acad. Sci. 91: 12091-12095 (1994), the entirety of which is herein incorporated by reference.) On the basis of an aligned set of input sequences, a weight matrix is calculated by using one of four methods (selected by the user); a weight matrix is simply a representation, position by position in an alignment, of how likely a particular amino acid will appear. The calculated weight matrix is then used to search the databases. To increase sensitivity, newly found sequences are added to the original data set, the weight matrix is recalculated, and the search is performed again. This procedure continues until no new sequences are found.

### SUMMARY OF THE INVENTION

[0023] The present invention provides a substantially purified nucleic acid molecule that encodes an Arabidopsis thaliana protein or fragment thereof comprising a nucleic acid sequence selected from the group consisting of SEQ ID NO: 1 through SEQ ID NO: 18718.

[0024] The present invention also provides one or more substantially purified nucleic acid molecules comprising a nucleic acid sequence selected from the group consisting of SEQ ID NO: 1 through SEQ ID NO:18718 or complements thereof.

[0025] The present invention also provides a substantially purified Arabidopsis thaliana protein or fragment thereof, wherein said Arabidopsis thaliana protein is encoded by a nucleic acid molecule that comprises a nucleic acid sequence selected from the group consisting of SEQ ID NO: 1 through SEQ ID NO: 18718.

[0026] The present invention further provides a substantially purified protein, peptide, or fragment thereof encoded by a nucleic acid sequence which specifically hybridizes to a nucleic acid molecule comprising a nucleic acid sequence selected from the group consisting of a complement of SEQ ID NO: 1 through SEQ ID NO: 18718.

[0027] The present invention further provides a substantially purified antibody capable of specifically binding to a protein or fragment thereof encoded by a nucleic acid sequence which specifically hybridizes to a nucleic acid molecule having a nucleic acid sequence selected from the group consisting of a complement of SEQ ID NO: 1 through SEQ ID NO:18718.

[0028] The present invention also provides a transformed plant transformed to contain a nucleic acid molecule which comprises: (A) an exogeneous promoter region which functions in plant cells to cause the production of an mRNA molecule; which is linked to (B) a structural nucleic acid molecule, wherein said structural nucleic acid molecule comprises a nucleic acid molecule that encodes a protein, peptide, or fragment thereof which hybridizes to a nucleic acid sequence selected from the group consisting of a complement of SEQ ID NO: 1 through SEQ ID NO: 18718 expressed in an effective amount to produce a desirable agronomic effect; which is linked to (C) a 3′ non-translated sequence that functions in plant cells to cause the termination of transcription and the addition of polyadenylated ribonucleotides to the 3′ end of the mRNA sequence.

[0029] The present invention also provides a transformed plant cell containing a nucleic acid molecule whose non-transcribed strand encodes a protein or fragment thereof, wherein the transcribed strand of said nucleic acid is complementary to a nucleic acid molecule that encodes a protein or fragment thereof. The present invention also provides bacterial, viral, microbial, and plant cells comprising a nucleic acid molecule of the present invention

[0030] The present invention also provides a method of producing a plant containing one or more proteins encoded by sequences comprising SEQ ID NO: 1 or complement thereof through SEQ ID NO: 18718 or complements thereof, expressed in a sufficient amount and/or fashion to produce a desirable agronomic effect.

[0031] In accomplishing the foregoing, there is provided, in accordance with one aspect of the present invention, methods of producing genetically transformed plants, comprising the steps of:
[0032] (a) inserting into the genome of a plant cell a recombinant, double-stranded DNA molecule comprising
   [0033] (i) a promoter which functions in plant cells to cause the production of an RNA sequence,
   [0034] (ii) a structural DNA sequence that causes the production of an RNA sequence which encodes a desired protein.
   [0035] (iii) a 3′ non-translated DNA sequence which functions in plant cells to cause the addition of polyadenylated nucleotides to the 3′ end of RNA sequence; where the promoter is homologous or heterologous with respect to the coding sequence and adapted to cause sufficient expression of a protein in desired plant tissues to enhance the agronomic utility of a plant transformed with said gene.
[0036] (b) obtaining a transformed plant cell with said nucleic acid molecule that encodes one or more proteins, wherein said nucleic acid molecule is transcribed and results in expression of said protein(s); and
[0037] (c) regenerating from the transformed plant cell a genetically transformed plant

[0038] The present invention also encompasses differentiated plants, seeds, and progeny comprising said transformed plant cells and which exhibit novel properties of agronomic significance.

[0039] The present invention also provides a method of producing a plant containing reduced levels of a protein comprising: (A) transforming a plant cell with a nucleic acid molecule that encodes a protein, wherein said nucleic acid molecule is transcribed and results in co-suppression of endogenous protein synthesis activity, and (B) regenerating plants and producing subsequent progeny from the transformed plant.

[0040] The present invention also provides a method of determining an association between a polymorphism and a plant trait comprising: (A) hybridizing a nucleic acid molecule specific for a polymorphism to genetic material of a plant, wherein said nucleic acid molecule comprising a nucleic acid sequence selected from the group consisting of SEQ ID NO: 1 through SEQ ID NO: 18718 or complements thereof; and (B) calculating the degree of association between the polymorphism and the plant trait.

[0041] The present invention also provides a method of isolating a genetic region, or nucleic acid that encodes a protein or fragment thereof comprising: (A) incubating under conditions permitting nucleic acid hybridization: a marker nucleic acid molecule, preferably an EST, with a complementary nucleic acid molecule obtained from a plant cell or plant tissue; (B) permitting hybridization between said marker nucleic acid molecule, preferably an EST, and said complementary nucleic acid molecule obtained from said plant cell or plant tissue; and (C) isolating said complementary nucleic acid molecule.

[0042] The present invention also provides a method for determining a level or pattern in a plant cell of a protein in a plant comprising: (A) incubating, under conditions permitting nucleic acid hybridization, a marker nucleic acid molecule, the marker nucleic acid molecule selected from the group of marker nucleic acid molecules which specifically hybridize to a nucleic acid molecule having the nucleic acid sequence selected from the group consisting of SEQ ID NO: 1 through SEQ ID NO: 18718 or complements thereof or fragments of either, with a complementary nucleic acid molecule obtained from the plant cell or plant tissue, wherein nucleic acid hybridization between the marker nucleic acid molecule and the complementary nucleic acid molecule obtained from the plant cell or plant tissue permits the detection of an mRNA for the enzyme; (B)

[0043] permitting hybridization between the marker nucleic acid molecule and the complementary nucleic acid molecule obtained from the plant cell or plant tissue; and (C) detecting the level or pattern of the complementary nucleic acid, wherein the detection of the complementary nucleic acid is predictive of the level or pattern of the protein.

[0044] The present invention also provides a method for determining the level or pattern of a protein in a plant cell or plant tissue comprising: (A) incubating under conditions permitting nucleic acid hybridization: a marker nucleic acid molecule, the marker nucleic acid molecule comprising a nucleotide sequence selected from the group consisting of SEQ ID NO: 1 through SEQ ID NO:18718 or complements thereof, with a complementary nucleic acid molecule obtained from a plant cell or plant tissue, wherein nucleic acid hybridization between the marker nucleic acid molecule, and the complementary nucleic acid molecule obtained from the plant cell or plant tissue permits the detection of said protein; (B) permitting hybridization between the marker nucleic acid molecule and the complementary nucleic acid molecule obtained from the plant cell or plant tissue; and (C) detecting the level or pattern of the complementary nucleic acid, wherein the detection of said complementary nucleic acid is predictive of the level or pattern of the protein synthesis.

[0045] The present invention also provides a method for determining a level or pattern of a protein in a plant cell or plant tissue which comprises assaying the concentration of a molecule, whose concentration is dependent upon the expression of a gene, the gene having a nucleic acid sequence which specifically hybridizes to a protein marker nucleic acid molecule, the molecule being present in a plant cell or plant tissue, in comparison to the concentration of that molecule present in a plant cell or plant tissue with a known level or pattern of said protein, wherein an assayed concentration of the molecule is compared to the assayed concentration of the molecule in a plant cell or plant tissue with a known level or pattern of said protein.

[0046] The present invention also provides a method of determining a mutation in a plant whose presence is predictive of a mutation affecting a level or pattern of a protein comprising the steps: (A) incubating, under conditions permitting nucleic acid hybridization, a marker nucleic acid, the marker nucleic acid selected from the group of marker nucleic acid molecules which specifically hybridize to a nucleic acid molecule consisting of the nucleic acid sequence selected from the group consisting of SEQ ID NO: 1 through SEQ ID NO: 18718 or complements thereof or fragments of either and a complementary nucleic acid molecule obtained from the plant, wherein nucleic acid hybridization between the marker nucleic acid molecule and the complementary nucleic acid molecule obtained from the plant permits the detection of a polymorphism whose presence is predictive of a mutation affecting the level or pattern of the protein in the plant; (B) permitting hybridization between the marker nucleic acid molecule and the complementary nucleic acid molecule obtained from the plant; and (C) detecting the presence of the polymorphism, wherein the detection of the polymorphism is predictive of the mutation.

[0047] The present invention also provides a method for determining a mutation in a plant whose presence is predictive of a mutation affecting the level or pattern of protein synthesis comprising the steps: (A) incubating under conditions permitting nucleic acid hybridization: a marker nucleic acid molecule, the marker nucleic acid molecule comprising a nucleic acid molecule that is linked to gene, the gene having a nucleic acid sequence which specifically hybridizes to a sequence selected from the group consisting of SEQ ID NO: 1 through SEQ ID NO:18718 and complements thereof, and a complementary nucleic acid molecule obtained from a plant tissue or plant cell of the plant, wherein nucleic acid hybridization between the marker nucleic acid molecule and the complementary nucleic acid molecule obtained from the plant permits the detection of a polymorphism whose presence is predictive of a mutation affecting said level or pattern of a protein synthesis in the plant; (B) permitting hybridization between said marker nucleic acid molecule and said complementary nucleic acid molecule obtained from said plant; and; (C) detecting the presence of the polymorphism, wherein the detection of the polymorphism is predictive of the mutation.

[0048] The present invention also provides a method for reducing expression of a protein in a plant cell, the method comprising: growing a transformed plant cell containing a nucleic acid molecule whose non-transcribed strand encodes a protein or fragment thereof, wherein the transcribed strand of said nucleic acid is complementary to a nucleic acid molecule that encodes the protein in said plant cell, and whereby the strand that is complementary to the nucleic acid molecule that encodes the protein reduces or depresses expression of the protein.

[0049] The present invention provides Arabidopsis thaliana nucleic acid molecules for use as molecular tags to isolate genetic regions (i.e. promoters and flanking sequences), isolate genes, map genes, and determine gene function. The present invention further provides Arabidopsis thaliana nucleic acid molecules for use in determining if genes are members of a particular gene family.

[0050] The present invention also provides a method of obtaining full length genes using Arabidopsis thaliana ESTs or complements thereof or fragments of either.

[0051] The present invention also provides a method of isolating promoters and flanking sequences using Arabidopsis thaliana ESTs or complements thereof or fragments of either.

[0052] The present invention also provides Arabidopsis thaliana ESTs or complements thereof or fragments of either for use in marker-assisted breeding programs.

[0053] The present invention also provides a method of identifying tissues comprising hybridizing nucleic acids from the tissue with Arabidopsis thaliana ESTs or complements thereof or fragments of either.

[0054] The present invention also provides a method for production of antibodies targeted against the proteins, peptides, or fragments produced by the disclosed or complements thereof or fragments of either.

[0055] The present invention also provides a method for the transformation and regeneration of plants comprising sequences hybridizable to the disclosed ESTs or complements thereof or fragments of either.

[0056] The present invention also provides a method of modifying plant protein expression by inserting in a chimeric gene sense or antisense constructs of the Arabidopsis thaliana ESTs.

### DETAILED DESCRIPTION OF THE INVENTION

Agents

[0057] (a) Nucleic Acid Molecules

[0058] Agents of the present invention include nucleic acid molecules and more specifically EST nucleic acid molecules or nucleic acid fragment molecules thereof. Fragment EST nucleic acid molecules may encode significant portion(s) of, or indeed most of, the EST nucleic acid molecule. Alternatively, the fragments may comprise smaller oligonucleotides (having from about 15 to about 250 nucleotide residues, and more preferably, about 15 to about 30 nucleotide residues).

[0059] A subset of the nucleic acid molecules of the present invention includes nucleic acid molecules that are marker molecules. Another subset of the nucleic acid molecules of the present invention include nucleic acid molecules that encode a protein or fragment thereof. Another subset of the nucleic acid molecules of the present invention are EST molecules.

[0060] The term “substantially purified”, as used herein, refers to a molecule separated from substantially all other molecules normally associated with it in its native state. More preferably a substantially purified molecule is the predominant species present in a preparation. A substantially purified molecule may be greater than 60% free, preferably 75% free, more preferably 90% free, and most preferably 95% free from the other molecules (exclusive of solvent) present in the natural mixture. The term “substantially purified” is not intended to encompass molecules present in their native state.

[0061] The agents of the present invention will preferably be “biologically active” with respect to either a structural attribute, such as the capacity of a nucleic acid to hybridize to another nucleic acid molecule, or the ability of a protein to be bound by antibody (or to compete with another molecule for such binding). Alternatively, such an attribute may be catalytic, and thus involve the capacity of the agent to mediate a chemical reaction or response.

[0062] The agents of the present invention may also be recombinant. As used herein, the term recombinant means any agent (e.g. DNA, peptide etc.), that is, or results, however indirect, from human manipulation of a nucleic acid molecule.

[0063] It is understood that the agents of the present invention may be labeled with reagents that facilitate detection of the agent (e.g. fluorescent labels (Prober, et al., Science 238:336-340 (1987); Albarella et al., EP 144914, chemical labels (Sheldon et al., U.S. Pat. No. 4,582,789; Albarella et al., U.S. Pat. No. 4,563,417, modified bases (Miyoshi et al., EP 119448, all of which are hereby incorporated by reference in their entirety).

[0064] It is further understood, that the present invention provides bacterial, viral, microbial, and plant cells comprising the agents of the present invention.

[0065] Nucleic acid molecules or fragment thereof of the present invention are capable of specifically hybridizing to other nucleic acid molecules under certain circumstances. As used herein, two nucleic acid molecules are said to be capable of specifically hybridizing to one another if the two molecules are capable of forming an anti-parallel, double-stranded nucleic acid structure. A nucleic acid molecule is said to be the “complement” of another nucleic acid molecule if they exhibit complete complementarity. As used herein, molecules are said to exhibit “complete complementarity” when every nucleotide of one of the molecules is complementary to a nucleotide of the other. Two molecules are said to be “minimally complementary” if they can hybridize to one another with sufficient stability to permit them to remain annealed to one another under at least conventional “low-stringency” conditions. Similarly, the molecules are said to be “complementary” if they can hybridize to one another with sufficient stability to permit them to remain annealed to one another under conventional “high-stringency” conditions. Conventional stringency conditions are described by Sambrook, et al., In: Molecular Cloning, A Laboratory Manual, 2nd Edition, Cold Spring Harbor Press, Cold Spring Harbor, N.Y. (1989), and by Haymes, et al. In: Nucleic Acid Hybridization, A Practical Approach, IRL Press, Washington, D.C. (1985), the entirety of which is herein incorporated by reference. Departures from complete complementarity are therefore permissible, as long as such departures do not completely preclude the capacity of the molecules to form a double-stranded structure. Thus, in order for an nucleic acid molecule or fragment of the present invention to serve as a primer or probe it need only be sufficiently complementary in sequence to be able to form a stable double-stranded structure under the particular solvent and salt concentrations employed.

[0066] Appropriate stringency conditions which promote DNA hybridization are, for example, 6.0× sodium chloride/sodium citrate (SSC) at about 45° C., followed by a wash of 2.0×SSC at 50° C., are known to those skilled in the art or can be found in Current Protocols in Molecular Biology, John Wiley & Sons, N.Y. (1989), 6.3.1-6.3.6. For example, the salt concentration in the wash step can be selected from a low stringency of about 2.0×SSC at 50° C. to a high stringency of about 0.2×SSC at 50° C. In addition, the temperature in the wash step can be increased from low stringency conditions at room temperature, about 22° C., to high stringency conditions at about 65° C. Both temperature and salt may be varied, or either the temperature or the salt concentration may be held constant while the other variable is changed.

[0067] In a preferred embodiment, a nucleic acid of the present invention will specifically hybridize to one or more of the nucleic acid molecules set forth in SEQ ID NO: 1 through SEQ ID NO: 18718 or complements thereof under moderately stringent conditions, for example, at about 2.0×SSC and about 65° C.

[0068] In a particularly preferred embodiment, a nucleic acid of the present invention will include those nucleic acid molecules that specifically hybridize to one or more of the nucleic acid molecules set forth in SEQ ID NO:1 through SEQ ID NO: 18718 or complements thereof under high stringency conditions.

[0069] In one aspect of the present invention, the nucleic acid molecules of the present invention have one or more of the nucleic acid sequences set forth in SEQ ID NO: 1 through SEQ ID NO: 18718 or complements thereof. In another aspect of the present invention, one or more of the nucleic acid molecules of the present invention share between 100% and 90% sequence identity with one or more of the nucleic acid sequences set forth in SEQ ID NO: 1 through SEQ ID NO: 18718 or complements thereof. In a further aspect of the present invention, one or more of the nucleic acid molecules of the present invention share between 100% and 95% sequence identity with one or more of the nucleic acid sequences set forth in SEQ ID NO: 1 through SEQ ID NO: 18718 or complements thereof. In a more preferred aspect of the present invention, one or more of the nucleic acid molecules of the present invention share between 100% and 98% sequence identity with one or more of the nucleic acid sequences set forth in SEQ ID NO: 1 through SEQ ID NO: 18718 or complements thereof. In an even more preferred aspect of the present invention, one or more of the nucleic acid molecules of the present invention share between 100% and 99% sequence identity with one or more of the sequences set forth in SEQ ID NO: 1 through SEQ ID NO: 18718 or complements thereof. In a further, even more preferred aspect of the present invention, one or more of the nucleic acid molecules of the present invention exhibit 100% sequence identity with one or more nucleic acid molecules present within the cDNA libraries LIB9, LIB22, LIB23, LIB24, LIB25, LIB35, and LIB146 (Monsanto Company, St. Louis, Mo., United States of America).

[0070] In a preferred embodiment of the present invention, an Arabidopsis thaliana protein or fragment thereof of the present invention is a homologue of another plant protein. In another preferred embodiment of the present invention, an Arabidopsis thaliana protein or fragment thereof of the present invention is a homologue of a fungal protein. In another preferred embodiment of the present invention, an Arabidopsis thaliana protein or fragment thereof of the present invention is a homologue of mammalian protein. In another preferred embodiment of the present invention, a Arabidopsis thaliana protein or fragment thereof of the present invention is a homologue of a bacterial protein. In another preferred embodiment of the present invention, an Arabidopsis thaliana protein or fragment thereof of the present invention is a homologue of a maize protein. In another preferred embodiment of the present invention, an Arabidopsis thaliana protein or fragment thereof of the present invention is a homologue of a soybean protein.

[0071] In a preferred embodiment of the present invention, the nucleic molecule of the present invention encodes an Arabidopsis thaliana protein or fragment thereof where an Arabidopsis thaliana protein or fragment thereof exhibits a BLAST probability score of greater than 1E-12, preferably a BLAST probability score of between about 1E-30 and about 1E-12, even more preferably a BLAST probability score of greater than 1E-30 with its homologue.

[0072] In another preferred embodiment of the present invention, the nucleic acid molecule encoding an Arabidopsis thaliana protein or fragment thereof exhibits a % identity with its homologue of between about 25% and about 40%, more preferably of between about 40 and about 70%, even more preferably of between about 70% and about 90% and even more preferably between about 90% and 99%. In another preferred embodiment, of the present invention, a Arabidopsis thaliana protein or fragment thereof exhibits a % identity with its homologue of 100%.

[0073] In a preferred embodiment of the present invention, the nucleic molecule of the present invention encodes a Arabidopsis thaliana protein or fragment thereof where the Arabidopsis thaliana protein exhibits a BLAST score of greater than 120, preferably a BLAST score of between about 1450 and about 120, even more preferably a BLAST score of greater than 1450 with its homologue.

[0074] Nucleic acid molecules of the present invention also include non-Arabidopsis thaliana homologues. Preferred non-Arabidopsis thaliana homologues are selected from the group consisting of alfalfa, soybean, barley, Brassica, broccoli, cabbage, citrus, cotton, garlic, oat, oilseed rape, onion, canola, flax, an ornamental plant, maize, pea, peanut, pepper, potato, rice, rye, sorghum, strawberry, sugarcane, sugarbeet, tomato, wheat, poplar, pine, fir, eucalyptus, apple, lettuce, lentils, grape, banana, tea, turf grasses, sunflower, oil palm and Phaseolus.

[0075] The degeneracy of the genetic code, which allows different nucleic acid sequences to code for the same protein or peptide, is known in the literature. (U.S. Pat. No. 4,757,006, the entirety of which is herein incorporated by reference).

[0076] In an aspect of the present invention, one or more of the nucleic acid molecules of the present invention differ in nucleic acid sequence from those encoding an Arabidopsis thaliana protein or fragment thereof in SEQ ID NO: 1 through SEQ ID NO: 18718 due to the degeneracy in the genetic code in that they encode the same protein but differ in nucleic acid sequence.

[0077] In another further aspect of the present invention, one or more of the nucleic acid molecules of the present invention differ in nucleic acid sequence from those encoding an Arabidopsis thaliana protein or fragment thereof in SEQ ID NO: 1 through SEQ ID NO: 18718 due to fact that the different nucleic acid sequences encode a protein having one or more conservative amino acid residues. Examples of conservative substitutions are set forth in Table 1. It is understood that codons capable of coding for such conservative substitutions are known in the art.

TABLE 1

| Original Residue | Conservative Substitutions |
|---|---|
| Ala | Ser |
| Arg | Lys |
| Asn | Gln; His |
| Asp | Glu |
| Cys | Ser; Ala |
| Gln | Asn |
| Glu | Asp |
| Gly | Pro |
| His | Asn; Gln |
| Ile | Leu; Val |
| Leu | Ile; Val |
| Lys | Arg; Gln; Glu |
| Met | Leu; Ile |
| Phe | Met; Leu; Tyr |
| Ser | Thr |
| Thr | Ser |
| Trp | Tyr |
| Tyr | Trp; Phe |
| Val | Ile; Leu |

[0078] In a further aspect of the present invention, one or more of the nucleic acid molecules of the present invention differ in nucleic acid sequence from those encoding a Arabidopsis thaliana protein or fragment thereof set forth in SEQ ID NO: 1 through SEQ ID NO: 18718 or fragment thereof due to the fact that one or more codons encoding an amino acid has been substituted for a codon that encodes a nonessential substitution of the amino acid originally encoded.

[0079] One aspect of the present invention concerns markers that include nucleic acid molecules SEQ ID NO: 1 through SEQ ID NO: 18718 or complements thereof or fragments of either that can act as markers or other nucleic acid molecules of the present invention that can act as markers. Genetic markers of the present invention include “dominant” or “codominant” markers “Codominant markers” reveal the presence of two or more alleles (two per diploid individual) at a locus. “Dominant markers” reveal the presence of only a single allele per locus. The presence of the dominant marker phenotype (e.g., a band of DNA) is an indication that one allele is present in either the homozygous or heterozygous condition. The absence of the dominant marker phenotype (e.g. absence of a DNA band) is merely evidence that “some other” undefined allele is present. In the case of populations where individuals are predominantly homozygous and loci are predominately dimorphic, dominant and codominant markers can be equally valuable. As populations become more heterozygous and multi-allelic, codominant markers often become more informative of the genotype than dominant markers. Marker molecules can be, for example, capable of detecting polymorphisms such as single nucleotide polymorphisms (SNPs).

[0080] SNPs are single base changes in genomic DNA sequence. They occur at greater frequency and are spaced with a greater uniformity throughout a genome than other reported forms of polymorphism. The greater frequency and uniformity of SNPs means that there is greater probability that such a polymorphism will be found near or in a genetic locus of interest than would be the case for other polymorphisms. SNPs are located in protein-coding regions and noncoding regions of a genome. Some of these SNPs may result in defective or variant protein expression (e.g., as a results of mutations or defective splicing). Analysis (genotyping) of characterized SNPs can require only a plus/minus assay rather than a lengthy measurement, permitting easier automation.

[0081] SNPs can be characterized using any of a variety of methods. Such methods include the direct or indirect sequencing of the site, the use of restriction enzymes (Botstein et al., Am. J. Hum. Genet. 32:314-331 (1980), the entirety of which is herein incorporated reference; Konieczny and Ausubel, Plant J. 4:403-410 (1993), the entirety of which is herein incorporated by reference), enzymatic and chemical mismatch assays (Myers et al., Nature 313:495-498 (1985), the entirety of which is herein incorporated by reference), allele-specific PCR (Newton et al., Nucl. Acids Res. 17:2503-2516 (1989), the entirety of which is herein incorporated by reference; Wu et al., Proc. Natl. Acad. Sci. (U.S.A.) 86:2757-2760 (1989), the entirety of which is herein incorporated by reference), ligase chain reaction (Barany, Proc. Natl. Acad. Sci. (U.S.A.) 88:189-193 (1991), the entirety of which is herein incorporated by reference), single-strand conformation polymorphism analysis (Labrune et al., Am. J. Hum. Genet. 48: 1115-1120 (1991), the entirety of which is herein incorporated by reference), primer-directed nucleotide incorporation assays (Kuppuswami et al., Proc. Natl. Acad. Sci. USA 88:1143-1147 (1991), the entirety of which is herein incorporated by reference), dideoxy fingerprinting (Sarkar et al., Genomics 13:441-443 (1992), the entirety of which is herein incorporated by reference), solid-phase ELISA-based oligonucleotide ligation assays (Nikiforov et al., Nucl. Acids Res. 22:4167-4175 (1994), the entirety of which is herein incorporated by reference), oligonucleotide fluorescence-quenching assays (Livak et al., PCR Methods Appl. 4:357-362 (1995), the entirety of which is herein incorporated by reference), 5′-nuclease allele-specific hybridization TaqMan assay (Livak et al., Nature Genet. 9:341-342 (1995), the entirety of which is herein incorporated by reference), template-directed dye-terminator incorporation (TDI) assay (Chen and Kwok, Nucl. Acids Res. 25:347-353 (1997), the entirety of which is herein incorporated by reference), allele-specific molecular beacon assay (Tyagi et al., Nature Biotech. 16: 49-53 (1998), the entirety of which is herein incorporated by reference), PinPoint assay (Haff and Smimov, Genome Res. 7: 378-388 (1997), the entirety of which is herein incorporated by reference) and dCAPS analysis (Neff et al., Plant J. 14:387-392 (1998), the entirety of which is herein incorporated by reference).

[0082] Additional markers, such as AFLP markers, RFLP markers and RAPD markers, can be utilized (Walton, Seed World 22-29 (July, 1993), the entirety of which is herein incorporated by reference; Burow and Blake, Molecular Dissection of Complex Traits, 13-29, Paterson (ed.), CRC Press, New York (1988), the entirety of which is herein incorporated by reference). DNA markers can be developed from nucleic acid molecules using restriction endonucleases, the PCR and/or DNA sequence information. RFLP markers result from single base changes or insertions/deletions. These codominant markers are highly abundant in plant genomes, have a medium level of polymorphism and are developed by a combination of restriction endonuclease digestion and Southern blotting hybridization. CAPS are similarly developed from restriction nuclease digestion but only of specific PCR products. These markers are also codominant, have a medium level of polymorphism and are highly abundant in the genome. The CAPS result from single base changes and insertions/deletions.

[0083] Another marker type, RAPDs, are developed from DNA amplification with random primers and result from single base changes and insertions/deletions in plant genomes. They are dominant markers with a medium level of polymorphisms and are highly abundant. AFLP markers require using the PCR on a subset of restriction fragments from extended adapter primers. These markers are both dominant and codominant are highly abundant in genomes and exhibit a medium level of polymorphism.

[0084] SSRs require DNA sequence information. These codominant markers result from repeat length changes, are highly polymorphic and do not exhibit as high a degree of abundance in the genome as CAPS, AFLPs and RAPDs, SNPs also require DNA sequence information. These codominant markers result from single base substitutions. They are highly abundant and exhibit a medium of polymorphism (Rafalski et al., In: Nonmammalian Genomic Analysis, Birren and Lai (ed.), Academic Press, San Diego, Calif., pp. 75-134 (1996), the entirety of which is herein incorporated by reference). It is understood that a nucleic acid molecule of the present invention may be used as a marker.

[0085] A PCR probe is a nucleic acid molecule capable of initiating a polymerase activity while in a double-stranded structure with another nucleic acid. Various methods for determining the structure of PCR probes and PCR techniques exist in the art. Computer generated searches using programs such as Primer3 (on the Worldwide web at genome.wi.mit.edu/cgi-bin/primer/primer3.cgi), STSPipeline (on the Worldwide web at genome.wi.mit.edu/cgi-bin/www-STS_Pipeline), or GeneUp (Pesole et al., BioTechniques 25:112-123 (1998) the entirety of which is herein incorporated by reference), for example, can be used to identify potential PCR primers.

[0086] It is understood that a fragment of one or more of the nucleic acid molecules of the present invention may be a probe and specifically a PCR probe.

[0087] (b) Protein and Peptide Molecules

[0088] A class of agents comprises one or more of the protein or peptide molecules encoded by SEQ ID NO: 1 through SEQ ID NO: 18718 or one or more of the protein or fragment thereof or peptide molecules encoded by other nucleic acid agents of the present invention. As used herein, the term “protein molecule” or “peptide molecule” includes any molecule that comprises five or more amino acids. It is well know in the art that proteins may undergo modification, including post-translational modifications, such as, but not limited to, disulfide bond formation, glycosylation, phosphorylation, or oligomerization. Thus, as used herein, the term “protein molecule” or “peptide molecule” includes any protein molecule that is modified by any biological or non-biological process. The terms “amino acid” and “amino acids” refer to all naturally occurring L-amino acids. This definition is meant to include norleucine, ornithine, homocysteine, and homoserine.

[0089] One or more of the protein or fragment of peptide molecules may be produced via chemical synthesis, or more preferably, by expression in a suitable bacterial or eukaryotic host. Suitable methods for expression are described by Sambrook, et al., (In: Molecular Cloning, A Laboratory Manual, 2nd Edition, Cold Spring Harbor Press, Cold Spring Harbor, N.Y. (1989)), or similar texts.

[0090] A “protein fragment” is a peptide or polypeptide molecule whose amino acid sequence comprises a subset of the amino acid sequence of that protein. A protein or fragment thereof that comprises one or more additional peptide regions not derived from that protein is a “fusion” protein. Such molecules may be derivatized to contain carbohydrate or other moieties (such as keyhole limpet hemocyanin, etc.). Fusion protein or peptide molecule of the present invention are preferably produced via recombinant means.

[0091] Another class of agents comprise protein or peptide molecules encoded by SEQ ID NO: 1 through SEQ ID NO: 18718 or complements thereof or, fragments or fusions thereof in which non-essential, or not relevant, amino acid residues have been added, replaced, or deleted. An example of such a homologue is the homologue protein of all non-Arabidopsis thaliana plant species, including but not limited to alfalfa, soybean, barley, Brassica, broccoli, cabbage, citrus, cotton, garlic, oat, oilseed rape, onion, canola, flax, maize, an ornamental plant, pea, peanut, pepper, potato, rice, rye, sorghum, strawberry, sugarcane, sugarbeet, tomato, wheat, poplar, pine, fir, eucalyptus, apple, lettuce, peas, lentils, grape, banana, tea, turf grasses, etc. Particularly preferred non-Arabidopsis thaliana plants to utilize for the isolation of homologues would include alfalfa, soybean, barley, cotton, corn, oat, oilseed rape, rice, corn, canola, ornamentals, sugarcane, sugarbeet, tomato, potato, wheat, and turf grasses. Such a homologue can be obtained by any of a variety of methods. Most preferably, as indicated above, one or more of the disclosed sequences (SEQ ID NO: 1 through SEQ ID NO: 18718 or complements thereof) will be used to define a pair of primers that may be used to isolate the homologue-encoding nucleic acid molecules from any desired species. Such molecules can be expressed to yield homologues by recombinant means.

[0092] (c) Antibodies

[0093] One aspect of the present invention concerns antibodies, single-chain antigen binding molecules, or other proteins that specifically bind to one or more of the protein or peptide molecules of the present invention and their homologues, fusions or fragments. Such antibodies may be used to quantitatively or qualitatively detect the protein or peptide molecules of the present invention. As used herein, an antibody or peptide is said to “specifically bind” to a protein or peptide molecule of the present invention if such binding is not competitively inhibited by the presence of non-related molecules.

[0094] Nucleic acid molecules that encode all or part of the protein of the present invention can be expressed, via recombinant means, to yield protein or peptides that can in turn be used to elicit antibodies that are capable of binding the expressed protein or peptide. Such antibodies may be used in immunoassays for that protein. Such protein-encoding molecules, or their fragments may be a “fusion” molecule (i.e., a part of a larger nucleic acid molecule) such that, upon expression, a fusion protein is produced. It is understood that any of the nucleic acid molecules of the present invention may be expressed, via recombinant means, to yield proteins or peptides encoded by these nucleic acid molecules.

[0095] The antibodies that specifically bind proteins and protein fragments of the present invention may be polyclonal or monoclonal, and may comprise intact immunoglobulins, or antigen binding portions of immunoglobulins (such as (F(ab′), F(ab′)₂) fragments, or single-chain immunoglobulins producible, for example, via recombinant means). It is understood that practitioners are familiar with the standard resource materials which describe specific conditions and procedures for the construction, manipulation and isolation of antibodies (see, for example, Harlow and Lane, In Antibodies: A Laboratory Manual, Cold Spring Harbor Press, Cold Spring Harbor, N.Y. (1988), the entirety of which is herein incorporated by reference).

[0096] Murine monoclonal antibodies are particularly preferred. BALB/c mice are preferred for this purpose, however, equivalent strains may also be used. The animals are preferably immunized with approximately 25 μg of purified protein (or fragment thereof) that has been emulsified a suitable adjuvant (such as TiterMax adjuvant (Vaxcel, Norcross, Ga.)). Immunization is preferably conducted at two intramuscular sites, one intraperitoneal site, and one subcutaneous site at the base of the tail. An additional i.v. injection of approximately 25 μg of antigen is preferably given in normal saline three weeks later. After approximately 11 days following the second injection, the mice may be bled and the blood screened for the presence of anti-protein or peptide antibodies. Preferably, a direct binding Enzyme-Linked Immunoassay (ELISA) is employed for this purpose.

[0097] More preferably, the mouse having the highest antibody titer is given a third i.v. injection of approximately 25 μg of the same protein or fragment. The splenic leukocytes from this animal may be recovered 3 days later, and are then permitted to fuse, most preferably, using polyethylene glycol, with cells of a suitable myeloma cell line (such as, for example, the P3X63Ag8.653 myeloma cell line). Hybridoma cells are selected by culturing the cells under “HAT” (hypoxanthine-aminopterin-thymine) selection for about one week. The resulting clones may then be screened for their capacity to produce monoclonal antibodies (“mAbs), preferably by direct ELISA.

[0098] In one embodiment, anti-protein or peptide monoclonal antibodies are isolated using a fusion of a protein, protein fragment, or peptide of the present invention, or conjugate of a protein, protein fragment, or peptide of the present invention, as immunogens. Thus, for example, a group of mice can be immunized using a fusion protein emulsified in Freund's complete adjuvant (e.g. approximately 50 μg of antigen per immunization). At three week intervals, an identical amount of antigen is emulsified in Freund's incomplete adjuvant and used to immunize the animals. Ten days following the third immunization, serum samples are taken and evaluated for the presence of antibody. If antibody titers are too low, a fourth booster can be employed. Polysera capable of binding the protein or peptide can also be obtained using this method.

[0099] In a preferred procedure for obtaining monoclonal antibodies, the spleens of the above-described immunized mice are removed, disrupted, and immune splenocytes are isolated over a ficoll gradient. The isolated splenocytes are fused, using polyethylene glycol with BALB/c-derived HGPRT (hypoxanthine guanine phosphoribosyl transferase) deficient P3x63xAg8.653 plasmacytoma cells. The fused cells are plated into 96-well microtiter plates and screened for hybridoma fusion cells by their capacity to grow in culture medium supplemented with hypothanthine, aminopterin and thymidine for approximately 2-3 weeks.

[0100] Hybridoma cells that arise from such incubation are preferably screened for their capacity to produce an immunoglobulin that binds to a protein of interest. An indirect ELISA may be used for this purpose. In brief, the supernatants of hybridomas are incubated in microtiter wells that contain immobilized protein. After washing, the titer of bound immunoglobulin can be determined using, for example, a goat anti-mouse antibody conjugated to horseradish peroxidase. After additional washing, the amount of immobilized enzyme is determined (for example through the use of a chromogenic substrate). Such screening is performed as quickly as possible after the identification of the hybridoma in order to ensure that a desired clone is not overgrown by non-secreting neighbors. Desirably, the fusion plates are screened several times since the rates of hybridoma growth vary. In a preferred sub-embodiment, a different antigenic form of immunogen may be used to screen the hybridoma. Thus, for example, the splenocytes may be immunized with one immunogen, but the resulting hybridomas can be screened using a different immunogen. It is understood that any of the protein or peptide molecules of the present invention may be used to raise antibodies.

[0101] As discussed below, such antibody molecules or their fragments may be used for diagnostic purposes. Where the antibodies are intended for diagnostic purposes, it may be desirable to derivatize them, for example with a ligand group (such as biotin) or a detectable marker group (such as a fluorescent group, a radioisotope or an enzyme).

[0102] The ability to produce antibodies that bind the protein or peptide molecules of the present invention permits the identification of mimetic compounds of those molecules. A “mimetic compound” is a compound that is not that compound, or a fragment of that compound, but which nonetheless exhibits an ability to specifically bind to antibodies directed against that compound.

[0103] It is understood that any of the agents of the present invention can be substantially purified and/or be biologically active and/or recombinant.

[0104] Uses of the Agents of the Invention

[0105] The nucleic acid molecules and fragments thereof of LIB9 are isolated from Arabidopsis thaliana, ecotype Columbia, leaf tissue. Leaves are the carbohydrate factories of crop plants, therefore; the ESTs of the present invention will find great use in the isolation of a variety of agronomically significant genes, including but not limited to genes that are necessary for the interception and transformation of light energy via photosynthesis linked with plant growth, quality, and yield. Genes isolated utilizing the disclosed ESTs would also be in pathways including but not limited to a pathway such as nitrogen metabolism linked to fruiting and mobilization and distribution of nitrogen.

[0106] The nucleic acid molecules and fragments thereof of LIB22 are isolated from root from Arabidopsis thaliana, Columbia ecotype, plants. Root libraries can enable the acquisition of genes that will facilitate gene and protein expression analysis and genetic mapping. This information will enable the determination of genes in the synthesis and catabolism of traits including but not limited to genes involved in supplying water, minerals and substances essential to plant growth and development, absorption, anchorage, storage, transport, propagation and nitrogen fixation.

[0107] The nucleic acid molecules and fragments thereof of LIB23 are isolated from Arabidopsis thaliana, ecotype Columbia, stem tissue. Stems are involved in plant architecture, therefore; the ESTs of the present invention will find great use in the isolation of a variety of agronomically significant genes, including but not limited to genes that are instrumental in preventing lodging or control of plant height; genes that modify vascular structure for support and result in improvements in transport of solutes, ions and water flow, lignin biosynthesis genes, and drought tolerance genes.

[0108] The nucleic acid molecules and fragments thereof of LIB24 are isolated from Arabidopsis thaliana, ecotype Columbia, flower bud tissue. Flower libraries can enable the acquisition of, but are not limited to genes that are involved in floral development, reproduction and seed production, therefore, the ESTs of the present invention will find great use in the isolation of a variety of agronomically significant genes, including but not limited to, genes that regulate meiosis, cell division, carotenoids, floral biogenesis, embryogenesis, protein, amino acids, sterols, oils, minerals, isoflavones, saponins, vitamins, tocopherols, antinutrient components, carbohydrates, starch metabolism and seed regulatory elements. Such genes are associated with plant growth, quality and yield, and could also serve as links in important developmental, metabolic, and catabolic pathways.

[0109] The nucleic acid molecules and fragments thereof of LIB25 are isolated from Arabidopsis thaliana, ecotype Columbia, open flower tissue. Flower libraries can enable the acquisition of, but are not limited to, genes that are involved in floral development, reproduction and seed production, therefore, the ESTs of the present invention will find great use in the isolation of a variety of agronomically significant genes, including but not limited to, genes that regulate meiosis, cell division, carotenoids, floral biogenesis, embryogenesis, protein, amino acids, sterols, oils, minerals, isoflavones, saponins, vitamins, tocopherols, antinutrient components, carbohydrates, starch metabolism and seed regulatory elements. Such genes are associated with plant growth, quality and yield, and could also serve as links in important developmental, metabolic, and catabolic pathways.

[0110] The nucleic acid molecules and fragments thereof of LIB35 are isolated from leaf from Arabidopsis thaliana Columbia ecotype plants. Leaves are the carbohydrate factories of crop plants, therefore; the ESTs of the present invention will find great use in the isolation of a variety of agronomically significant genes, including but not limited to genes that are necessary for the interception and transformation of light energy via photosynthesis linked with plant growth, quality, and yield. Genes isolated utilizing the disclosed ESTs would also be in pathways including but not limited to a pathway such as nitrogen metabolism linked to fruiting and mobilization and distribution of nitrogen.

[0111] The nucleic acid molecules and fragments thereof of LIB146 are isolated from Arabidopsis thaliana, ecotype Columbia, immature seed tissue. Seed libraries can enable the acquisition of a variety of agronomically significant genes involved in the synthesis and catabolism of commercially important traits. The ESTs of the present invention can enable the acquisition of, but are not limited to genes that regulate protein, oils, amino acids, sterols, minerals, isoflavones, saponins, vitamins, tocopherols, antinutrient components, carbohydrates, starch metabolism and seed regulatory elements. Such genes are associated with plant growth, quality and yield, and could also serve as links in important developmental, metabolic, and catabolic pathways.

[0112] Nucleic acid molecules and fragments thereof of the present invention may be employed to obtain other nucleic acid molecules. Such molecules include the nucleic acid molecules of other plants or other organisms (e.g., alfalfa, rice, potato, cotton, oat, rye, barley, maize, wheat, soybean, Brassica, etc.) including the nucleic acid molecules that encode, in whole or in part, protein homologues of other plant species or other organisms, and sequences of genetic elements such as promoters and transcriptional regulatory elements. Such molecules can be readily obtained by using the above-described nucleic acid molecules or fragments thereof to screen cDNA or genomic libraries obtained from such plant species. Methods for forming such libraries are well known in the art. Such homologue molecules may differ in their nucleotide sequences from those found in one or more of SEQ ID NO:1 through SEQ ID NO:18718 or complements thereof because complete complementarity is not needed for stable hybridization. The nucleic acid molecules of the present invention therefore also include molecules that, although capable of specifically hybridizing with the nucleic acid molecules may lack “complete complementarity.”

[0113] Any of a variety of methods may be used to obtain one or more of the above-described nucleic acid molecules (Zamechik et al., Proc. Natl. Acad. Sci. (U.S.A.) 83:4143-4146 (1986), the entirety of which is herein incorporated by reference; Goodchild et al., Proc. Natl. Acad. Sci. (U.S.A.) 85:5507-5511 (1988), the entirety of which is herein incorporated by reference; Wickstrom et al., Proc. Natl. Acad. Sci. (USA.) 85:1028-1032 (1988), the entirety of which is herein incorporated by reference; Holt, et al., Molec. Cell Biol. 8:963-973 (1988), the entirety of which is herein incorporated by reference; Gerwirtz, et al., Science 242:1303-1306 (1988), the entirety of which is herein incorporated by reference; Anfossi, et al., Proc. Natl. Acad. Sci. (U.S.A.) 86:3379-3383 (1989), the entirety of which is herein incorporated by reference; Becker, et al., EMBO J. 8:3685-3691 (1989); the entirety of which is herein incorporated by reference). Automated nucleic acid synthesizers may be employed for this purpose. In lieu of such synthesis, the disclosed nucleic acid molecules may be used to define a pair of primers that can be used with the polymerase chain reaction (Mullis, et al., Cold Spring Harbor Symp. Quant. Biol. 51:263-273 (1986); Erlich et al., EP 50,424; EP 84,796, EP 258,017, EP 237,362; Mullis, EP 201,184; Mullis et al., U.S. Pat. No. 4,683,202; Erlich, U.S. Pat. No. 4,582,788; and Saiki, R. et al., U.S. Pat. No. 4,683,194, all of which are hereby incorporated by reference in their entirety) to amplify and obtain any desired nucleic acid molecule or fragment.

[0114] Promoter sequence(s) and other genetic elements including but not limited to transcriptional regulatory elements associated with one or more of the disclosed nucleic acid sequences can also be obtained using the disclosed nucleic acid sequences provided herein.

[0115] In one embodiment, such sequences are obtained by incubating EST nucleic acid molecules or preferably fragments thereof with members of genomic libraries (e.g. maize and soybean) and recovering clones that hybridize to the EST nucleic acid molecule or fragment thereof. In a second embodiment, methods of “chromosome walking,” or inverse PCR may be used to obtain such sequences (Frohm an, et al., Proc. Natl. Acad. Sci. (U.S.A.) 85:8998-9002 (1988); Ohara, et al., Proc. Natl. Acad. Sci. (U.S.A.) 86: 5673-5677 (1989); Pang et al., Biotechniques, 22(6); 1046-1048 (1977); Huang et al., Methods Mol. Biol. 69: 89-96 (1977); Hartl et al., Methods Mol. Biol. 58: 293-301 (1996), all of which are hereby incorporated by reference in their entirety). In one embodiment, the disclosed nucleic acid molecules are used to identify cDNAs whose analogous genes contain promoters with desirable expression patterns. The nucleic acid molecules isolated from the library of the present invention are used to isolate promoters of tissue-enhanced, tissue-specific, developmentally- or environmentally-regulated expression profiles. Isolation and functional analysis of the 5′ flanking promoter sequences of these genes from genomic libraries, for example, using genomic screening methods and PCR techniques would result in the isolation of useful promoters and transcriptional regulatory elements. These methods are known to those of skill in the art and have been described (See for example Birren et al., Genome Analysis: Analyzing DNA, 1, (1997), Cold Spring Harbor Laboratory Press, Cold Spring Harbor, N.Y., the entirety of which is herein incorporated by reference).

[0116] Promoters obtained utilizing the nucleic acid molecules of the present invention could also be modified to affect their control characteristics. Examples of such modifications would include but are not limited to enhancer sequences as reported by Kay et al., Science 236:1299 (1987), herein incorporated by reference in its entirety. Such genetic elements could be used to enhance gene expression of new and existing traits for crop improvements.

[0117] The nucleic acid molecules of the present invention may be used to isolate promoters of tissue enhanced tissue specific, cell-specific, cell-type, developmentally or environmentally regulated expression profiles. Isolation and functional analysis of the 5′ flanking promoter sequences of these genes from genomic libraries, for example, using genomic screening methods and PCR techniques would result in the isolation of useful promoters and transcriptional regulatory elements. These methods are known to those of skill in the art and have been described (See, for example, Birren et. al., Genome Analysis: Analyzing DNA, 1, Cold Spring Harbor Laboratory Press, Cold Spring Harbor, N.Y. (1997), the entirety of which is herein incorporated by reference). Promoters obtained utilizing the nucleic acid molecules of the present invention could also be modified to affect their control characteristics. Examples of such modifications would include but are not limited to enhancer sequences as reported by Kay, et al Science 236:1299 (1987), herein incorporated reference in its entirety. Such genetic elements could be used to enhance gene expression of new and existing traits for crop improvements.

[0118] In an aspect of the present invention, one or more of the nucleic molecules of the present invention are used to determine whether a plant (preferably Arabidopsis thaliana and more preferably Arabidopsis thaliana, ecotype Columbia) has a mutation affecting the level (i.e., the concentration of mRNA in a sample, etc.) or pattern (i.e., the kinetics of expression, rate of decomposition, stability profile, etc.) of the expression encoded in part or whole by one or more of the nucleic acid molecules of the present invention (collectively, the “Expression Response” of a cell or tissue). As used herein, the Expression Response manifested by a cell or tissue is said to be “altered” if it differs from the Expression Response of cells or tissues of plants not exhibiting the phenotype. To determine whether a Expression Response is altered, the Expression Response manifested by the cell or tissue of the plant exhibiting the phenotype is compared with that of a similar cell or tissue sample of a plant not exhibiting the phenotype. As will be appreciated, it is not necessary to re-determine the Expression Response of the cell or tissue sample of plants not exhibiting the phenotype each time such a comparison is made; rather, the Expression Response of a particular plant may be compared with previously obtained values of normal plants. As used herein, the phenotype of the organism is any of one or more characteristics of an organism (e.g. disease resistance, pest tolerance, environmental tolerance, male sterility, yield, quality improvements, etc.). A change in genotype or phenotype may be transient or permanent. Also as used herein, a tissue sample is any sample that comprises more than one cell. In a preferred aspect, a tissue sample comprises cells that share a common characteristic (e.g. derived from leaf, root, or pollen etc).

[0119] In one sub-aspect, such an analysis is conducted by determining the presence and/or identity of polymorphism(s) by one or more of the nucleic acid molecules of the present invention and more specifically, one or more of the EST nucleic acid molecules or fragments thereof which are associated with phenotype, or a predisposition to phenotype.

[0120] Any of a variety of molecules can be used to identify such polymorphism(s). In one embodiment, one or more of the EST nucleic acid molecules (or a sub-fragment thereof) may be employed as a marker nucleic acid molecule to identify such polymorphism(s). Alternatively, such polymorphisms can be detected through the use of a marker nucleic acid molecule or a marker protein that is genetically linked to (i.e., a polynucleotide that co-segregates with) such polymorphism(s).

[0121] In an alternative embodiment, such polymorphisms can be detected through the use of a marker nucleic acid molecule that is physically linked to such polymorphism(s). For this purpose, marker nucleic acid molecules comprising a nucleotide sequence of a polynucleotide located within 1 mb of the polymorphism(s), and more preferably within 100 kb of the polymorphism(s), and most preferably within 10 kb of the polymorphism(s) can be employed.

[0122] The genomes of animals and plants naturally undergo spontaneous mutation in the course of their continuing evolution (Gusella, Ann. Rev. Biochem. 55:831-854 (1986)). A “polymorphism” is a variation or difference in the sequence of the gene or its flanking regions that arises in some of the members of a species. The variant sequence and the “original” sequence co-exist in the species' population. In some instances, such co-existence is in stable or quasi-stable equilibrium.

[0123] A polymorphism is thus said to be “allelic,” in that, due to the existence of the polymorphism, some members of a species may have the original sequence (i.e., the original “allele”) whereas other members may have the variant sequence (i.e., the variant “allele”). In the simplest case, only one variant sequence may exist, and the polymorphism is thus said to be di-allelic. In other cases, the species' population may contain multiple alleles, and the polymorphism is termed tri-allelic, etc. A single gene may have multiple different unrelated polymorphisms. For example, it may have a di-allelic polymorphism at one site, and a multi-allelic polymorphism at another site.

[0124] The variation that defines the polymorphism may range from a single nucleotide variation to the insertion or deletion of extended regions within a gene. In some cases, the DNA sequence variations are in regions of the genome that are characterized by short tandem repeats (STRs) that include tandem di- or tri-nucleotide repeated motifs of nucleotides. Polymorphisms characterized by such tandem repeats are referred to as “variable number tandem repeat” (“VNTR”) polymorphisms. VNTRs have been used in identity analysis (Weber, U.S. Pat. No. 5,075,217; Armour, et al., FEBS Lett. 307:113-115 (1992); Jones, et al., Eur. J. Haematol. 39:144-147 (1987); Horn, et al., PCT Application WO91/14003; Jeffreys, European Patent Application 370,719; Jeffreys, U.S. Pat. No. 5,699,082; Jeffreys, et al., Amer. J. Hum. Genet. 39:11-24 (1986); Jeffreys. et al., Nature 316:76-79 (1985); Gray, et al., Proc. R. Acad. Soc. Lond. 243:241-253 (1991); Moore, et al., Genomics 10:654-660 (1991); Jeffreys, et al., Anim. Genet. 18:1-15 (1987); Hillel, et al., Anim. Genet. 20:145-155 (1989); Hillel, et al., Genet. 124:783-789 (1990), all of which are herein incorporated by reference in their entirety).

[0125] The detection of polymorphic sites in a sample of DNA may be facilitated through the use of nucleic acid amplification methods. Such methods specifically increase the concentration of polynucleotides that span the polymorphic site, or include that site and sequences located either distal or proximal to it. Such amplified molecules can be readily detected by gel electrophoresis or other means.

[0126] The most preferred method of achieving such amplification employs the polymerase chain reaction (“PCR”) (Mullis, et al., Cold Spring Harbor Symp. Quant. Biol. 51:263-273 (1986); Erlich, et al., European Patent Appln. 50,424; European Patent Appln. 84,796, European Patent Application 258,017, European Patent Appln. 237,362; Mullis, European Patent Appln. 201,184; Mullis, et al., U.S. Pat. No. 4,683,202; Erlich., U.S. Pat. No. 4,582,788; and Saiki, et al., U.S. Pat. No. 4,683,194, all of which are herein incorporated by reference), using primer pairs that are capable of hybridizing to the proximal sequences that define a polymorphism in its double-stranded form.

[0127] In lieu of PCR, alternative methods, such as the “Ligase Chain Reaction” (“LCR”) may be used (Barany, Proc. Natl. Acad. Sci. (U.S.A.) 88:189-193 (1991), the entirety of which is herein incorporated by reference). LCR uses two pairs of oligonucleotide probes to exponentially amplify a specific target. The sequences of each pair of oligonucleotides is selected to permit the pair to hybridize to abutting sequences of the same strand of the target. Such hybridization forms a substrate for a template-dependent ligase. As with PCR, the resulting products thus serve as a template in subsequent cycles and an exponential amplification of the desired sequence is obtained.

[0128] LCR can be performed with oligonucleotides having the proximal and distal sequences of the same strand of a polymorphic site. In one embodiment, either oligonucleotide will be designed to include the actual polymorphic site of the polymorphism. In such an embodiment, the reaction conditions are selected such that the oligonucleotides can be ligated together only if the target molecule either contains or lacks the specific nucleotide that is complementary to the polymorphic site present on the oligonucleotide. Alternatively, the oligonucleotides may be selected such that they do not include the polymorphic site (see, Segev, PCT Application WO 90/01069, the entirety of which is herein incorporated by reference).

[0129] The “Oligonucleotide Ligation Assay” (“OLA”) may alternatively be employed (Landegren, et al., Science 241:1077-1080 (1988), the entirety of which is herein incorporated by reference). The OLA protocol uses two oligonucleotides which are designed to be capable of hybridizing to abutting sequences of a single strand of a target. OLA, like LCR, is particularly suited for the detection of point mutations. Unlike LCR, however, OLA results in “linear” rather than exponential amplification of the target sequence.

[0130] Nickerson, et al. have described a nucleic acid detection assay that combines attributes of PCR and OLA (Nickerson, et al., Proc. Natl. Acad. Sci. (U.S.A.) 87:8923-8927 (1990), the entirety of which is herein incorporated by reference). In this method, PCR is used to achieve the exponential amplification of target DNA, which is then detected using OLA. In addition to requiring multiple, and separate, processing steps, one problem associated with such combinations is that they inherit all of the problems associated with PCR and OLA.

[0131] Schemes based on ligation of two (or more) oligonucleotides in the presence of nucleic acid having the sequence of the resulting “di-oligonucleotide”, thereby amplifying the di-oligonucleotide, are also known (Wu, et al., Genomics 4:560 (1989), the entirety of which is herein incorporated by reference), and may be readily adapted to the purposes of the present invention.

[0132] Other known nucleic acid amplification procedures, such as allele-specific oligomers, branched DNA technology, transcription-based amplification systems, or isothermal amplification methods may also be used to amplify and analyze such polymorphisms (Malek, et al., U.S. Pat. No. 5,130,238; Davey, et al., European Patent Application 329,822; Schuster et al., U.S. Pat. No. 5,169,766; Miller, et al., PCT Application WO 89/06700; Kwoh, et al., Proc. Natl. Acad. Sci. (U.S.A.) 86:1173-1177 (1989); Gingeras, et al., PCT Application WO 88/10315; Walker, et al., Proc. Natl. Acad. Sci. (U.S.A.) 89:392-396 (1992), all of which are herein incorporated by reference in their entirety).

[0133] The identification of a polymorphism can be determined in a variety of ways. By correlating the presence or absence of it in a plant with the presence or absence of a phenotype, it is possible to predict the phenotype of that plant. If a polymorphism creates or destroys a restriction endonuclease cleavage site, or if it results in the loss or insertion of DNA (e.g., a VNTR polymorphism), it will alter the size or profile of the DNA fragments that are generated by digestion with that restriction endonuclease. As such, individuals that possess a variant sequence can be distinguished from those having the original sequence by restriction fragment analysis. Polymorphisms that can be identified in this manner are termed “restriction fragment length polymorphisms” (“RFLPs”). RFLPs have been widely used in human and plant genetic analyses (Glassberg, UK Patent Application 2135774; Skolnick, et al., Cytogen. Cell Genet. 32:58-67 (1982); Botstein, et al., Ann. J. Hum. Genet. 32:314-331 (1980); Fischer, et al. (PCT Application WO90/13668); Uhlen, PCT Application WO90/11369).

[0134] Polymorphisms can also be identified by Single Strand Conformation Polymorphism (SSCP) analysis. The SSCP technique is a method capable of identifying most sequence variations in a single strand of DNA, typically between 150 and 250 nucleotides in length (Elles, Methods in Molecular Medicine: Molecular Diagnosis of Genetic Diseases, Humana Press (1996), the entirety of which is herein incorporated by reference); Orita et al., Genomics 5: 874-879 (1989), the entirety of which is herein incorporated by reference). Under denaturing conditions a single strand of DNA will adopt a conformation that is uniquely dependent on its sequence conformation. This conformation usually will be different, even if only a single base is changed. Most conformations have been reported to alter the physical configuration or size sufficiently to be detectable by electrophoresis. A number of protocols have been described for SSCP including, but not limited to Lee et al., Anal. Biochem. 205: 289-293 (1992), the entirety of which is herein incorporated by reference; Suzuki et al., Anal. Biochem. 192: 82-84 (1991), the entirety of which is herein incorporated by reference; Lo et al., Nucleic Acids Research 20: 1005-1009 (1992), the entirety of which is herein incorporated by reference; Sarkar et al., Genomics 13: 441-443 (1992), the entirety of which is herein incorporated by reference). It is understood that one or more of the nucleic acids of the present invention, may be utilized as markers or probes to detect polymorphisms by SSCP analysis.

[0135] Polymorphisms may also be found using a DNA fingerprinting technique called amplified fragment length polymorphism (AFLP), which is based on the selective PCR amplification of restriction fragments from a total digest of genomic DNA to profile that DNA. Vos, et al., Nucleic Acids Res. 23:4407-4414 (1995), the entirety of which is herein incorporated by reference. This method allows for the specific co-amplification of high numbers of restriction fragments, which can be visualized by PCR without knowledge of the nucleic acid sequence.

[0136] AFLP employs basically three steps. Initially, a sample of genomic DNA is cut with restriction enzymes and oligonucleotide adapters are ligated to the restriction fragments of the DNA. The restriction fragments are then amplified using PCR by using the adapter and restriction sequence as target sites for primer annealing. The selective amplification is achieved by the use of primers that extend into the restriction fragments, amplifying only those fragments in which the primer extensions match the nucleotide flanking the restriction sites. These amplified fragments are then visualized on a denaturing polyacrylamide gel.

[0137] AFLP analysis has been performed on Salix (Beismann, et al., Mol. Ecol. 6:989-993 (1997), the entirety of which is herein incorporated by reference); Acinetobacter (Janssen, et al., Int. J. Syst. Bacteriol 47:1179-1187 (1997), the entirety of which is herein incorporated by reference), Aeromonas popoffi (Huys, et al., Int. J. Syst. Bacteriol. 47:1165-1171 (1997), the entirety of which is herein incorporated by reference), rice (McCouch, et al., Plant Mol. Biol. 35:89-99 (1997), the entirety of which is herein incorporated by reference); Nandi, et al., Mol. Gen. Genet. 255:1-8 (1997); Cho, et al., Genome 39:373-378 (1996), herein incorporated by reference), barley (Hordeum vulgare)(Simons, et al., Genomics 44:61-70 (1997), the entirety of which is herein incorporated by reference; Waugh, et al., Mol. Gen. Genet. 255:311-321 (1997), the entirety of which is herein incorporated by reference; Qi, et al., Mol. Gen. Genet. 254:330-336 (1997), the entirety of which is herein incorporated by reference; Becker, et al., Mol. Gen. Genet. 249:65-73 (1995), the entirety of which is herein incorporated by reference), potato (Van der Voort, et al., Mol. Gen. Genet. 255:438-447 (1997), the entirety of which is herein incorporated by reference; Meksem, et al., Mol. Gen. Genet. 249:74-81 (1995), the entirety of which is herein incorporated by reference), Phytophthora infestans (Van der Lee, et al., Fungal Genet. Biol. 21:278-291 (1997), the entirety of which is herein incorporated by reference), Bacillus anthracis (Keim, et al., J. Bacteriol. 179:818-824 (1997)), Astragalus cremnophylax (Travis, et al., Mol. Ecol. 5:735-745 (1996), the entirety of which is herein incorporated by reference), Arabidopsis (Cnops, et al., Mol. Gen. Genet. 253:32-41 (1996), the entirety of which is herein incorporated by reference), Escherichia coli (Lin, et al., Nucleic Acids Res. 24:3649-3650 (1996), the entirety of which is herein incorporated by reference), Aeromonas (Huys, et al., Int. J. Syst. Bacteriol. 46:572-580 (1996), the entirety of which is herein incorporated by reference), nematode (Folkertsma, et al., Mol. Plant. Microbe Interact. 9:47-54 (1996), the entirety of which is herein incorporated by reference), tomato (Thomas, et al., Plant J. 8:785-794 (1995), the entirety of which is herein incorporated by reference), and human (Latorra, et al., PCR Methods Appl. 3:351-358 (1994)). AFLP analysis has also been used for fingerprinting mRNA (Money, et al., Nucleic Acids Res. 24:2616-2617 (1996), the entirety of which is herein incorporated by reference; Bachem, et al., Plant J. 9:745-753 (1996), the entirety of which is herein incorporated by reference). It is understood that one or more of the nucleic acids of the present invention, may be utilized as markers or probes to detect polymorphisms by AFLP analysis for fingerprinting mRNA.

[0138] Polymorphisms may also be found using random amplified polymorphic DNA (RAPD) (Williams et al., Nucl. Acids Res. 18: 6531-6535 (1990), the entirety of which is herein incorporated by reference) and cleaveable amplified polymorphic sequences (CAPS) (Lyamichev et al., Science 260: 778-783 (1993), the entirety of which is herein incorporated by reference). It is understood that one or more of the nucleic acids of the present invention, may be utilized as markers or probes to detect polymorphisms by RAPD or CAPS analysis.

[0139] Polymorphisms are useful, through linkage analysis, to define the genetic distances or physical distances between polymorphic traits. A physical map or ordered array of genomic DNA fragments in the desired region containing the gene may be used to characterize and isolate genes corresponding to desirable traits. For this purpose, yeast artificial chromosomes (YACs), bacterial artificial chromosomes (BACs), and cosmids are appropriate vectors for cloning large segments of DNA molecules. Although fewer clones are needed to make a contig for a specific genomic region by using YACs (Agyare et al., Genome Res. 7: 1-9 (1997), the entirety of which is herein incorporated by reference; James et al., Genomics 32: 425-430 (1996), the entirety of which is herein incorporated by reference), chimerism in the inserted DNA fragment can arise. Cosmids are convenient for handling smaller-size DNA molecules and may be used for transformation in developing transgenic plants. BACs also carry DNA fragments and are less prone to chimerism.

[0140] Through genetic mapping, a fine scale linkage map can be developed using DNA markers and, then, a genomic DNA library of large-sized fragments can be screened with molecular markers linked to the desired trait. Molecular markers are advantageous for agronomic traits that are otherwise difficult to tag, such as resistance to pathogens, insects and nematodes, tolerance to abiotic stress, quality parameters and quantitative traits such as high yield potential.

[0141] The essential requirements for marker-assisted selection in a plant breeding program are: (1) the marker(s) should co-segregate or be closely linked with the desired trait; (2) an efficient means of screening large populations for the molecular marker(s) should be available; and (3) the screening technique should have high reproducibility across laboratories and preferably be economical to use and be user-friendly.

[0142] The genetic linkage of marker molecules can be established by a gene mapping model such as, without limitation, the flanking marker model reported by Lander and Botstein, Genetics 121:185-199 (1989) and the interval mapping, based on maximum likelihood methods described by Lander and Botstein, Genetics 121:185-199 (1989) and implemented in the software package MAPMAKER/QTL (Lincoln and Lander, Mapping Genes Controlling Quantitative Traits Using MAPMAKER/QTL, Whitehead Institute for Biomedical Research, Massachusetts, (1990). Additional software includes Qgene, Version 2.23 (1996), Department of Plant Breeding and Biometry, 266 Emerson Hall, Cornell University, Ithaca, N.Y., the manual of which is herein incorporated by reference in its entirety). Use of Qgene software is a particularly preferred approach.

[0143] A maximum likelihood estimate (MLE) for the presence of a marker is calculated; together with an MLE assuming no QTL effect, to avoid false positives. A log₁₀ of an odds ratio (LOD) is then calculated as: LOD=log₁₀ (MLE for the presence of a QTL/MLE given no linked QTL).

[0144] The LOD score essentially indicates how much more likely the data are to have arisen assuming the presence of a QTL than in its absence. The LOD threshold value for avoiding a false positive with a given confidence, say 95%, depends on the number of markers and the length of the genome. Graphs indicating LOD thresholds are set forth in Lander and Botstein, Genetics 121:185-199 (1989) the entirety of which is herein incorporated by reference and further described by Arús and Moreno-González, Plant Breeding, Hayward et al., (eds.) Chapman & Hall, London, pp. 314-331 (1993), the entirety of which is herein incorporated by reference.

[0145] Additional models can be used. Many modifications and alternative approaches to interval mapping have been reported, including the use of non-parametric methods (Kruglyak and Lander, Genetics 139:1421-1428 (1995), the entirety of which is herein incorporated by reference). Multiple regression methods or models can be also be used, in which the trait is regressed on a large number of markers (Jansen, Biometrics in Plant Breeding, van Oijen and Jansen (eds.), Proceedings of the Ninth Meeting of the Eucarpia Section Biometrics in Plant Breeding, The Netherlands, pp. 116-124 (1994); Weber and Wricke, Advances in Plant Breeding, Blackwell, Berlin, 16 (1994), both of which is herein incorporated by reference in their entirety). Procedures combining interval mapping with regression analysis, whereby the phenotype is regressed onto a single putative QTL at a given marker interval and at the same time onto a number of markers that serve as ‘cofactors,’ have been reported by Jansen and Stam, Genetics 136:1447-1455 (1994), the entirety of which is herein incorporated by reference and Zeng, Genetics 136:1457-1468 (1994) the entirety of which is herein incorporated by reference. Generally, the use of cofactors reduces the bias and sampling error of the estimated QTL positions (Utz and Melchinger, Biometrics in Plant Breeding, van Oijen and Jansen (eds.) Proceedings of the Ninth Meeting of the Eucarpia Section Biometrics in Plant Breeding, The Netherlands, pp. 195-204 (1994), the entirety of which is herein incorporated by reference, thereby improving the precision and efficiency of QTL mapping (Zeng, Genetics 136:1457-1468 (1994)). These models can be extended to multi-environment experiments to analyze genotype-environment interactions (Jansen et al., Theo. Appl. Genet. 91:33-37 (1995), the entirety of which is herein incorporated by reference).

[0146] Selection of an appropriate mapping population is important to map construction. The choice of an appropriate mapping population depends on the type of marker systems employed (Tanksley et al., Molecular mapping plant chromosomes. Chromosome structure and function: Impact of new concepts, Gustafson and Appels (eds.), Plenum Press, New York, pp 157-173 (1988), the entirety of which is herein incorporated by reference). Consideration must be given to the source of parents (adapted vs. exotic) used in the mapping population. Chromosome pairing and recombination rates can be severely disturbed (suppressed) in wide crosses (adapted x exotic) and generally yield greatly reduced linkage distances. Wide crosses will usually provide segregating populations with a relatively large array of polymorphisms when compared to progeny in a narrow cross (adapted x adapted).

[0147] An F₂ population is the first generation of selfing after the hybrid seed is produced. Usually a single F₁ plant is selfed to generate a population segregating for all the genes in Mendelian (1:2:1) fashion. Maximum genetic information is obtained from a completely classified F₂ population using a codominant marker system (Mather, Measurement of Linkage in Heredity, Methuen and Co., (1938), the entirety of which is herein incorporated by reference). In the case of dominant markers, progeny tests (e.g. F₃, BCF₂) are required to identify the heterozygotes, thus making it equivalent to a completely classified F₂ population. However, this procedure is often prohibitive because of the cost and time involved in progeny testing. Progeny testing of F₂ individuals is often used in map construction where phenotypes do not consistently reflect genotype (e.g. disease resistance) or where trait expression is controlled by a QTL. Segregation data from progeny test populations (e.g. F₃ or BCF₂) can be used in map construction. Marker-assisted selection can then be applied to cross progeny based on marker-trait map associations (F₂, F₃), where linkage groups have not been completely disassociated by recombination events (i.e., maximum disequillibrium).

[0148] Recombinant inbred lines (RIL) (genetically related lines; usually >F₅, developed from continuously selfing F₂ lines towards homozygosity) can be used as a mapping population. Information obtained from dominant markers can be maximized by using RIL because all loci are homozygous or nearly so. Under conditions of tight linkage (i.e., about <10% recombination), dominant and co-dominant markers evaluated in RIL populations provide more information per individual than either marker type in backcross populations (Reiter et al., Proc. Natl. Acad. Sci. (U.S.A.) 89:1477-1481 (1992), the entirety of which is herein incorporated by reference). However, as the distance between markers becomes larger (i.e., loci become more independent), the information in RIL populations decreases dramatically when compared to codominant markers.

[0149] Backcross populations (e.g., generated from a cross between a successful variety (recurrent parent) and another variety (donor parent) carrying a trait not present in the former) can be utilized as a mapping population. A series of backcrosses to the recurrent parent can be made to recover most of its desirable traits. Thus a population is created consisting of individuals nearly like the recurrent parent but each individual carries varying amounts or mosaic of genomic regions from the donor parent. Backcross populations can be useful for mapping dominant markers if all loci in the recurrent parent are homozygous and the donor and recurrent parent have contrasting polymorphic marker alleles (Reiter et al., Proc. Natl. Acad. Sci. (U.S.A.) 89:1477-1481 (1992)). Information obtained from backcross populations using either codominant or dominant markers is less than that obtained from F₂ populations because one, rather than two, recombinant gametes are sampled per plant. Backcross populations, however, are more informative (at low marker saturation) when compared to RILs as the distance between linked loci increases in RIL populations (i.e. about 15% recombination). Increased recombination can be beneficial for resolution of tight linkages, but may be undesirable in the construction of maps with low marker saturation.

[0150] Near-isogenic lines (NIL) created by many backcrosses to produce an array of individuals that are nearly identical in genetic composition except for the trait or genomic region under interrogation can be used as a mapping population. In mapping with NILs, only a portion of the polymorphic loci are expected to map to a selected region.

[0151] Bulk segregant analysis (BSA) is a method developed for the rapid identification of linkage between markers and traits of interest (Michelmore et al., Proc. Natl. Acad. Sci. (U.S.A.) 88:9828-9832 (1991), the entirety of which is herein incorporated by reference). In BSA, two bulked DNA samples are drawn from a segregating population originating from a single cross. These bulks contain individuals that are identical for a particular trait (resistant or susceptible to particular disease) or genomic region but arbitrary at unlinked regions (i.e. heterozygous). Regions unlinked to the target region will not differ between the bulked samples of many individuals in BSA.

[0152] It is understood that one or more of the nucleic acid molecules of the present invention may be used as molecular markers. It is also understood that one or more of the protein molecules of the present invention may be used as molecular markers.

[0153] In accordance with this aspect of the present invention, a sample nucleic acid is obtained from plants cells or tissues. Any source of nucleic acid may be used. Preferably, the nucleic acid is genomic DNA. The nucleic acid is subjected to restriction endonuclease digestion. For example, one or more EST nucleic acid molecule or fragment thereof can be used as a probe in accordance with the above-described polymorphic methods. The polymorphism obtained in this approach can then be cloned to identify the mutation at the coding region which alters the protein's structure or regulatory region of the gene which affects its expression level.

[0154] In one aspect of the present invention, an evaluation can be conducted to determine whether a particular mRNA molecule is present. One or more of the nucleic acid molecules of the present invention, preferably one or more of the EST nucleic acid molecules of the present invention are utilized to detect the presence or quantity of the mRNA species. Such molecules are then incubated with cell or tissue extracts of a plant under conditions sufficient to permit nucleic acid hybridization. The detection of double-stranded probe-mRNA hybrid molecules is indicative of the presence of the mRNA; the amount of such hybrid formed is proportional to the amount of mRNA. Thus, such probes may be used to ascertain the level and extent of the mRNA production in a plant's cells or tissues. Such nucleic acid hybridization may be conducted under quantitative conditions (thereby providing a numerical value of the amount of the mRNA present). Alternatively, the assay may be conducted as a qualitative assay that indicates either that the mRNA is present, or that its level exceeds a user set, predefined value.

[0155] A principle of in situ hybridization is that a labeled, single-stranded nucleic acid probe will hybridize to a complementary strand of cellular DNA or RNA and, under the appropriate conditions, these molecules will form a stable hybrid. When nucleic acid hybridization is combined with histological techniques, specific DNA or RNA sequences can be identified within a single cell. An advantage of in situ hybridization over more conventional techniques for the detection of nucleic acids is that it allows an investigator to determine the precise spatial population (Angerer et al., Dev. Biol. 101: 477-484 (1984), the entirety of which is herein incorporated by reference; Angerer et al., Dev. Biol. 112: 157-166 (1985), the entirety of which is herein incorporated by reference; Dixon et al., EMBO J. 10: 1317-1324 (1991), the entirety of which is herein incorporated by reference). In situ hybridization may be used to measure the steady-state level of RNA accumulation. It is a sensitive technique and RNA sequences present in as few as 5-10 copies per cell can be detected (Hardin et al., J. Mol. Biol. 202: 417-431 (1989), the entirety of which is herein incorporated by reference). A number of protocols have been devised for in situ hybridization, each with tissue preparation, hybridization, and washing conditions (Meyerowitz, Plant Mol. Biol. Rep. 5: 242-250 (1987), the entirety of which is herein incorporated by reference; Cox and Goldberg, In: Plant Molecular Biology: A Practical Approach (ed. C. H. Shaw), pp. 1-35. IRL Press, Oxford (1988), the entirety of which is herein incorporated by reference; Raikhel et al., In situ RNA hybridization in plant tissues. In Plant Molecular Biology Manual, vol. B9: 1-32. Kluwer Academic Publisher, Dordrecht, Belgium (1989), the entirety of which is herein incorporated by reference).

[0156] In situ hybridization also allows for the localization of proteins within a tissue or cell (Wilkinson, In Situ Hybridization, Oxford University Press, Oxford (1992), the entirety of which is herein incorporated by reference; Langdale, In Situ Hybridization 165-179 In: The Maize Handbook, eds. Freeling and Walbot, Springer-Verlag, New York (1994), the entirety of which is herein incorporated by reference). It is understood that one or more of the molecules of the present invention, preferably one or more of the EST nucleic acid molecules of the present invention or one or more of the antibodies of the present invention may be utilized to detect the level or pattern of a protein or fragment thereof by in situ hybridization.

[0157] Fluorescent in situ hybridization also enables the localization of a particular DNA sequence along a chromosome which is useful, among other uses, for gene mapping, following chromosomes in hybrid lines or detecting chromosomes with translocations, transversions or deletions. In situ hybridization has been used to identify chromosomes in several plant species (Griffor et al., Plant Mol. Biol. 17: 101-109 (1991), the entirety of which is herein incorporated by reference; Gustafson et al., Proc. Nat'l. Acad. Sci. (U.S.A). 87: 1899-1902 (1990), herein incorporated by reference; Mukai and Gill, Genome 34: 448-452. (1991); Schwarzacher and Heslop-Harrison, Genome 34: 317-323 (1991); Wang et al., Jpn. J. Genet. 66: 313-316 (1991), the entirety of which is herein incorporated by reference; Parra and Windle, Nature Genetics, 5: 17-21 (1993), the entirety of which is herein incorporated by reference). It is understood that the nucleic acid molecules of the present invention may be used as probes or markers to localize sequences along a chromosome.

[0158] It is also understood that one or more of the molecules of the present invention, preferably one or more of the EST nucleic acid molecules of the present invention or one or more of the antibodies of the present invention may be utilized to detect the expression level or pattern of a protein or mRNA thereof by in situ hybridization.

[0159] Another method to localize the expression of a molecule is tissue printing. Tissue printing provides a way to screen, at the same time on the same membrane many tissue sections from different plants or different developmental stages. Tissue-printing procedures utilize films designed to immobilize proteins and nucleic acids. In essence, a freshly cut section of an organ is pressed gently onto nitrocellulose paper, nylon membrane or polyvinylidene difluoride membrane. Such membranes are commercially available (e.g. Millipore, Bedford, Mass.). The contents of the cut cell transfer onto the membrane, and the molecules are immobilized to the membrane. The immobilized molecules form a latent print that can be visualized with appropriate probes. When a plant tissue print is made on nitrocellulose paper, the cell walls leave a physical print that makes the anatomy visible without further treatment (Varner and Taylor, Plant Physiol. 91: 31-33 (1989), the entirety of which is herein incorporated by reference).

[0160] Tissue printing on substrate films is described by Daoust, Exp. Cell Res. 12: 203-211 (1957), the entirety of which is herein incorporated by reference, who detected amylase, protease, ribonuclease, and deoxyribonuclease in animal tissues using starch, gelatin, and agar films. These techniques can be applied to plant tissues (Yomo and Taylor, Planta 112:35-43 (1973); Harris and Chrispeels, Plant Physiol. 56: 292-299 (1975). Advances in membrane technology have increased the range of applications of Daoust's tissue-printing techniques allowing (Cassab and Varner, J. Cell Biol. 105: 2581-2588 (1987), the entirety of which is herein incorporated by reference; the histochemical localization of various plant enzymes and deoxyribonuclease on nitrocellulose paper and nylon (Spruce et al., Phytochemistry, 26: 2901-2903 (1987), the entirety of which is herein incorporated by reference; Barres et al. Neuron 5: 527-544 (1990), the entirety of which is herein incorporated by reference; the entirety of which is herein incorporated by reference; Reid and Pont-Lezica, Tissue Printing: Tools for the Study of Anatomy, Histochemistry, and Gene Expression, Academic Press, New York, N.Y. (1992), the entirety of which is herein incorporated by reference; Reid et al. Plant Physiol. 93: 160-165 (1990), herein incorporate by reference; Ye et al. Plant J. 1: 175-183 (1991), the entirety of which is herein incorporated by reference).

[0161] It is understood that one or more of the molecules of the present invention, preferably one or more of the EST nucleic acid molecules of the present invention or one or more of the antibodies of the present invention may be utilized to detect the presence or quantity of a protein by tissue printing.

[0162] Further, it is also understood that any of the nucleic acid molecules of the present invention may be used as marker nucleic acids and or probes in connection with methods that require probes or marker nucleic acids. As used herein, a probe is an agent that is utilized to determine an attribute or feature (e.g. presence or absence, location, correlation, etc.) or a molecule, cell, tissue or plant. As used herein, a marker nucleic acid is a nucleic acid molecule that is utilized to determine an attribute or feature (e.g., presence or absence, location, correlation, etc.) or a molecule, cell, tissue or plant.

[0163] A microarray-based method for high-throughput monitoring of plant gene expression may be utilized to measure gene-specific hybridization targets. This ‘chip’-based approach involves using microarrays of nucleic acid molecules as gene-specific hybridization targets to quantitatively measure expression of the corresponding plant genes (Schena et al., Science 270: 467-470 (1995), the entirety of which is herein incorporated by reference; Shalon, Ph.D. Thesis. Stanford University (1996), the entirety of which is herein incorporated by reference). Every nucleotide in a large sequence can be queried at the same time. Hybridization can be used to efficiently analyze large amounts of nucleotide sequence.

[0164] Several microarray methods have been described. One method compares the sequences to be analyzed by hybridization to a set of oligonucleotides representing all possible subsequences (Bains and Smith, J. Theor. Biol. 135: 303 (1989), the entirety of which is herein incorporated by reference). A second method hybridizes the sample to an array of oligonucleotide probes. An array consisting of oligonucleotides complementary to subsequences of a target sequence can be used to determine the identity of a target sequence, measure its amount, and detect differences between the target and a reference sequence. Nucleic acid molecules microarrays may also be screened with protein molecules or fragments thereof to determine nucleic acid molecules that specifically bind protein molecules or fragments thereof.

[0165] The microarray approach may be used with polypeptide targets (U.S. Pat. No. 5,445,934; U.S. Pat. No. 5,143,854; U.S. Pat. No. 5,079,600; U.S. Pat. No. 4,923,901, all of which are herein incorporated by reference in their entirety). Essentially, polypeptides are synthesized on a substrate (microarray) and these polypeptides can be screened with either protein molecules or fragments thereof or nucleic acid molecules in order to screen for either protein molecules or fragments thereof or nucleic acid molecules that specifically bind the target polypeptides. Implementation of these techniques rely on recently developed combinatorial technologies to generate any ordered array of a large number of oligonucleotide probes (Fodor et al., Science 251:767-773 (1991), the entirety of which is herein incorporated by reference).

[0166] It is understood that one or more of the molecules of the present invention, preferably one or more of the nucleic acid molecules or protein molecules or fragments thereof of the present invention may be utilized in a microarray based method.

[0167] In a preferred embodiment of the present invention microarrays may be prepared that comprise nucleic acid molecules where preferably at least 10%, preferably at least 25%, more preferably at least 50% and even more preferably at least 75%, 80%, 85%, 90% or 95% of the nucleic acid molecules located on that array are selected from the group of nucleic acid molecules that specifically hybridize to one or more nucleic acid molecule having a nucleic acid sequence selected from the group of SEQ ID NO: 1 through SEQ ID NO: 18718 or complement thereof or fragments of either.

[0168] A particular preferred microarray embodiment of the present invention is a microarray comprising nucleic acid molecules encoding genes or fragments thereof that are homologues of known genes or nucleic acid molecules that comprise genes or fragment thereof that elicit only limited or no matches to known genes. A further preferred microarray embodiment of the present invention is a microarray comprising nucleic acid molecules having genes or fragments thereof that are homologues of known genes and nucleic acid molecules that comprise genes or fragment thereof that elicit only limited or no matches to known genes. Site-directed mutagenesis may be utilized to modify nucleic acid sequences, particularly as it is a technique that allows one or more of the amino acids encoded by a nucleic acid molecule to be altered (e.g. a threonine to be replaced by a methionine). Three basic methods for site-directed mutagenesis are often employed. These are cassette mutagenesis (Wells et al., Gene 34:315-23 (1985), the entirety of which is herein incorporated by reference), primer extension (Gilliam et al., Gene 12:129-137 (1980), the entirety of which is herein incorporated by reference); Zoller and Smith, Methods Enzymol. 100:468-500 (1983), the entirety of which is herein incorporated by reference; and Dalbadie-McFarland et al., Proc. Natl. Acad. Sci. (U.S.A.) 79:6409-6413 (1982), the entirety of which is herein incorporated by reference) and methods based upon PCR (Scharf et al., Science 233:1076-1078 (1986), the entirety of which is herein incorporated by reference; Higuchi et al., Nucleic Acids Res. 16:7351-7367 (1988), the entirety of which is herein incorporated by reference). Site-directed mutagenesis approaches are also described in European Patent 0 385 962, the entirety of which is herein incorporated by reference, European Patent 0 359 472, the entirety of which is herein incorporated by reference, and PCT Patent Application WO 93/07278, the entirety of which is herein incorporated by reference.

[0169] Site-directed mutagenesis strategies have been applied to plants for both in vitro as well as in vivo site-directed mutagenesis (Lanz et al., J. Biol. Chem. 266:9971-6 (1991), the entirety of which is herein incorporated by reference; Kovgan and Zhdanov, Biotekhnologiya 5:148-154; No. 207160n, Chemical Abstracts 110:225 (1989), the entirety of which is herein incorporated by reference; Ge et al., Proc. Natl. Acad. Sci. (U.S.A.) 86:4037-4041 (1989), the entirety of which is herein incorporated by reference, Zhu et al., J. Biol. Chem. 271:18494-18498 (1996), Chu et al., Biochemistry 33:6150-6157 (1994), the entirety of which is herein incorporated by reference, Small et al., EMBO J. 11: 1291-1296 (1992), the entirety of which is herein incorporated by reference, Cho et al., Mol. Biotechnol. 8:13-16 (1997), Kita et al., J. Biol. Chem. 271:26529-26535 (1996), the entirety of which is herein incorporated by reference, Jin et al., Mol. Microbiol. 7:555-562 (1993), the entirety of which is herein incorporated by reference, Hatfield and Vierstra, J. Biol. Chem. 267:14799-14803 (1992), the entirety of which is herein incorporated by reference, Zhao et al., Biochemistry 31:5093-5099 (1992), the entirety of which is herein incorporated by reference).

[0170] Any of the nucleic acid molecules of the present invention may either be modified by site-directed mutagenesis or used as, for example, nucleic acid molecules that are used to target other nucleic acid molecules for modification. It is understood that mutants with more than one altered nucleotide can be constructed using techniques that practitioners skilled in the art are familiar with such as isolating restriction fragments and ligating such fragments into an expression vector (see, for example, Sambrook et al., Molecular Cloning: A Laboratory Manual, Cold Spring Harbor Press (1989)).

[0171] Sequence-specific DNA-binding proteins play a role in the regulation of transcription. The isolation of recombinant cDNAs encoding these proteins facilitates the biochemical analysis of their structural and functional properties. Genes encoding such DNA-binding proteins have been isolated using classical genetics (Vollbrecht et al., Nature 350: 241-243 (1991), the entirety of which is herein incorporated by reference) and molecular biochemical approaches, including the screening of recombinant cDNA libraries with antibodies (Landschulz et al., Genes Dev. 2: 786-800 (1988), the entirety of which is herein incorporated by reference) or DNA probes (Bodner et al., Cell 55: 505-518 (1988), the entirety of which is herein incorporated by reference). In addition, an in situ screening procedure has been used and has facilitated the isolation of sequence-specific DNA-binding proteins from various plant species (Gilmartin et al., Plant Cell 4: 839-849 (1992), the entirety of which is herein incorporated by reference; Schindler et al., EMBO J. 11: 1261-1273 (1992) the entirety of which is herein incorporated by reference). An in situ screening protocol does not require the purification of the protein of interest (Vinson et al., Genes Dev. 2: 801-806 (1988), the entirety of which is herein incorporated by reference; Singh et al., Cell 52: 415-423 (1988), the entirety of which is herein incorporated by reference).

[0172] Steps may be employed to characterize DNA-protein interactions. The first is to identify promoter fragments that interact with DNA-binding proteins, to titrate binding activity, to determine the specificity of binding, and to determine whether a given DNA-binding activity can interact with related DNA sequences (Sambrook et al., Molecular Cloning: A Laboratory Manual, 2^{nd} edition. Cold Spring Harbor Laboratory Press, Cold Spring Harbor, N.Y. (1989). Electrophoretic mobility-shift assay is a widely used assay. The assay provides a simple, rapid, and sensitive method for detecting DNA-binding proteins based on the observation that the mobility of a DNA fragment through a nondenaturing, low-ionic strength polyacrylamide gel is retarded upon association with a DNA-binding protein (Fried and Crother, Nucleic Acids Res. 9: 6505-6525 (1981), the entirety of which is herein incorporated by reference). When one or more specific binding activities have been identified, the exact sequence of the DNA bound by the protein may be determined. Several procedures for characterizing protein/DNA-binding sites are used, including methylation and ethylation interference assays (Maxam and Gilbert, Methods Enzymol. 65: 499-560 (1980), the entirety of which is herein incorporated by reference; Wissman and Hillen, Methods Enzymol. 208: 365-379 (1991), the entirety of which is herein incorporated by reference) and footprinting techniques employing DNase I (Galas and Schmitz, Nucleic Acids Res. 5: 3157-3170 (1978), the entirety of which is herein incorporated by reference), 1,10-phenanthroline-copper ion methods (Sigman et al., Methods Enzymol. 208: 365-379 (1991), the entirety of which is herein incorporated by reference) or hydroxyl radical methods (Dixon et al., Methods Enzymol. 208: 380-413 (1991), the entirety of which is herein incorporated by reference). It is understood that one or more of the nucleic acid molecules of the present invention, preferably one or more of the EST nucleic acid molecules of the present invention may be utilized to identify a protein or fragment thereof that specifically binds to a nucleic acid molecule of the present invention. It is also understood that one or more of the protein molecules or fragments thereof of the present invention may be utilized to identify a nucleic acid molecule that specifically binds to it.

[0173] The two-hybrid system is based on the fact that many cellular functions are carried out by proteins that interact (physically) with one another. Two-hybrid systems have been used to probe the function of new proteins (Chien et al., Proc. Natl. Acad. Sci. (U.S.A.) 88: 9578-9582 (1991) the entirety of which is herein incorporated by reference; Durfee et al., Genes Dev. 7: 555-569 (1993) the entirety of which is herein incorporated by reference; Choi et al., Cell 78: 499-512 (1994), the entirety of which is herein incorporated by reference; Kranz et al., Genes Dev. 8: 313-327 (1994), the entirety of which is herein incorporated by reference).

[0174] Interaction mating techniques have facilitated a number of two-hybrid studies of protein-protein interaction. Interaction mating has been used to examine interactions between small sets of tens of proteins (Finley and Brent, Proc. Natl. Acad. Sci. (U.S.A.) 91: 12098-12984 (1994), the entirety of which is herein incorporated by reference), larger sets of hundreds of proteins, (Bendixen et al., Nucl. Acids Res. 22: 1778-1779 (1994), the entirety of which is herein incorporated by reference) and to comprehensively map proteins encoded by a small genome (Bartel et al., Nature Genetics 12: 72-77 (1996), the entirety of which is herein incorporated by reference). This technique utilizes proteins fused to the DNA-binding domain and proteins fused to the activation domain. They are expressed in two different haploid yeast strains of opposite mating type, and the strains are mated to determine if the two proteins interact. Mating occurs when haploid yeast strains come into contact and result in the fusion of the two haploids into a diploid yeast strain. An interaction can be determined by the activation of a two-hybrid reporter gene in the diploid strain. The primary advantage of this technique is that it reduces the number of yeast transformations needed to test individual interactions. It is understood that the protein-protein interactions of protein or fragments thereof of the present invention may be investigated using the two-hybrid system and that any of the nucleic acid molecules of the present invention that encode such proteins or fragments thereof may be used to transform yeast in the two-hybrid system.

[0175] Synechocystis 6803 is a photosynthetic Cyanobacterium capable of oxygenic photosynthesis as well as heterotrophic growth in the absence of light. The entire genome has been sequenced, and it is reported to have a circular genome size of 3.57 Mbp containing 3168 potential open reading frames. Open reading frames (ORFs) were identified based upon their homology to other reported ORFs and by using ORF identification computer programs. Sixteen hundred potential ORFs were assigned based on their homology to previously identified ORFs. Of these 1600 ORFs, 145 were identical to reported ORFs (Kaneko et al., DNA Research 3:109-36 (1996), herein incorporated by reference in its entirety).

[0176] Several prokaryote promoters have been used in Synechocystis to express heterologous genes including the tac, lac, and lambda phage promoters (Bryant (ed.), The Molecular Biology of Cyanobacteria, Kluwer Academic Publishers, (1994); Ferino and Chauvat, Gene 84:257-266 (1989), both of which are herein incorporated by reference in their entirety). Several bacterial origins of replication such as RSF1010 and ACYC are reported to replicate in Synechocystis (Mermet-Bouvier and Chauvat, Current Microbiology 28:145-148 (1994); Kuhlemeier et al., Mol. Gen. Genet. 184:249-254 (1981), both of which are herein incorporated by reference in their entirety).

[0177] Synechocystis has been used to study gene regulation by gene replacement through homologous recombination or by gene disruption using antibiotic resistance markers (Pakrasi et al., EMBO 7:325-332 (1988), herein incorporated by reference in its entirety). In such gene regulation studies, double reciprocal homologous regions of the host genome flanking the gene of interest recombine to stably integrate the gene of interest into the genome. The gene of interest can be expressed once that gene has been stably integrated into the genome. Biochemical analysis can be performed to study the effect of the replaced or deleted gene.

[0178] It is understood that the agents of the present invention may be employed in a Synechocystis system.

[0179] Exogenous genetic material may be transferred into a plant cell and the plant cell regenerated into a whole, fertile or sterile plant. Exogenous genetic material is any genetic material, whether naturally occurring or otherwise, from any source that is capable of being inserted into any organism. Such genetic material may be transferred into either monocotyledons and dicotyledons including but not limited to the crops, maize and soybean (See specifically, Chistou, Particle Bombardment for Genetic Engineering of Plants, pp 63-69 (maize), pp 50-60 (soybean), Biotechnology Intelligence Unit. Academic Press, San Diego, Calif. (1996), the entirety of which is herein incorporated by reference and generally Chistou, Particle Bombardment for Genetic Engineering of Plants, Biotechnology Intelligence Unit. Academic Press, San Diego, Calif. (1996), the entirety of which is herein incorporated by reference).

[0180] Transfer of a nucleic acid that encodes for a protein can result in overexpression of that protein in a transformed cell or transgenic plant. One or more of the proteins or fragments thereof encoded by nucleic acid molecules of the present invention may be overexpressed in a transformed cell or transformed plant. Such overexpression may be the result of transient or stable transfer of the exogenous material.

[0181] Exogenous genetic material may be transferred into a plant cell by the use of a DNA vector or construct designed for such a purpose. Design of such a vector is generally within the skill of the art (See, Plant Molecular Biology: A Laboratory Manual eds. Clark, Springer, New York (1997), the entirety of which is herein incorporated by reference).

[0182] A construct or vector may include a plant promoter to express the protein or protein fragment of choice. A number of promoters which are active in plant cells have been described in the literature. These include the nopaline synthase (NOS) promoter (Ebert et al., Proc. Natl. Acad. Sci. (U.S.A.) 84:5745-5749 (1987), the entirety of which is herein incorporated by reference), the octopine synthase (OCS) promoter (which are carried on tumor-inducing plasmids of Agrobacterium tumefaciens), the caulimovirus promoters such as the cauliflower mosaic virus (CaMV) 19S promoter (Lawton et al., Plant Mol. Biol. 9:315-324 (1987), the entirety of which is herein incorporated by reference) and the CAMV 35S promoter (Odell et al., Nature 313:810-812 (1985), the entirety of which is herein incorporated by reference), the figwort mosaic virus ³⁵S-promoter, the light-inducible promoter from the small subunit of ribulose-1,5-bis-phosphate carboxylase (ssRUBISCO), the Adh promoter (Walker et al., Proc. Natl. Acad. Sci. (U.S.A.) 84:6624-6628 (1987), the entirety of which is herein incorporated by reference), the sucrose synthase promoter (Yang et al., Proc. Natl. Acad. Sci. (U.S.A.) 87:4144-4148 (1990), the entirety of which is herein incorporated by reference), the R gene complex promoter (Chandler et al., The Plant Cell 1:1175-1183 (1989), the entirety of which is herein incorporated by reference), and the chlorophyll a/b binding protein gene promoter, etc. These promoters have been used to create DNA constructs which have been expressed in plants; see, e.g., PCT publication WO 84/02913, herein incorporated by reference in its entirety.

[0183] Promoters which are known or are found to cause transcription of DNA in plant cells can be used in the present invention. Such promoters may be obtained from a variety of sources such as plants and plant viruses. It is preferred that the particular promoter selected should be capable of causing sufficient expression to result in the production of an effective amount of a protein to cause the desired phenotype. In addition to promoters which are known to cause transcription of DNA in plant cells, other promoters may be identified for use in the current invention by screening a plant cDNA library for genes which are selectively or preferably expressed in the target tissues or cells.

[0184] For the purpose of expression in source tissues of the plant, such as the leaf, seed, root or stem, it is preferred that the promoters utilized in the present invention have relatively high expression in these specific tissues. For this purpose, one may choose from a number of promoters for genes with tissue- or cell-specific or -enhanced expression. Examples of such promoters reported in the literature include the chloroplast glutamine synthetase GS2 promoter from pea (Edwards et al., Proc. Natl. Acad. Sci. (U.S.A.) 87:3459-3463 (1990), herein incorporated by reference in its entirety), the chloroplast fructose-1,6-biphosphatase (FBPase) promoter from wheat (Lloyd et al., Mol. Gen. Genet. 225:209-216 (1991), herein incorporated by reference in its entirety), the nuclear photosynthetic ST-LS1 promoter from potato (Stockhaus et al., EMBO J. 8:2445-2451 (1989), herein incorporated by reference in its entirety), the phenylalanine ammonia-lyase (PAL) promoter and the chalcone synthase (CHS) promoter from Arabidopsis thaliana. Also reported to be active in photosynthetically active tissues are the ribulose-1,5-bisphosphate carboxylase (RbcS) promoter from eastern larch (Larix laricina), the promoter for the cab gene, cab6, from pine (Yamamoto et al., Plant Cell Physiol. 35:773-778 (1994), herein incorporated by reference in its entirety), the promoter for the Cab-1 gene from wheat (Fejes et al., Plant Mol. Biol. 15:921-932 (1990), herein incorporated by reference in its entirety), the promoter for the CAB-1 gene from spinach (Lubberstedt et al., Plant Physiol. 104:997-1006 (1994), herein incorporated by reference in its entirety), the promoter for the cab1R gene from rice (Luan et al., Plant Cell 4:971-981 (1992), the entirety of which is herein incorporated by reference), the pyruvate, orthophosphate dikinase (PPDK) promoter from maize (Matsuoka et al., Proc. Natl. Acad. Sci. (U.S.A.) 90: 9586-9590 (1993), herein incorporated by reference in its entirety), the promoter for the tobacco Lhcb1*2 gene (Cerdan et al., Plant Mol. Biol. 33: 245-255. (1997), herein incorporated by reference in its entirety), the Arabidopsis thaliana SUC2 sucrose-H+ symporter promoter (Truernit et al., Planta. 196: 564-570 (1995), herein incorporated by reference in its entirety), and the promoter for the thylacoid membrane proteins from spinach (psaD, psaF, psaE, PC, FNR, atpC, atpD, cab, rbcS). Other promoters for the chlorophyl a/b-binding proteins may also be utilized in the present invention, such as the promoters for LhcB gene and PsbP gene from white mustard (Sinapis alba; Kretsch et al., Plant Mol. Biol. 28: 219-229 (1995), the entirety of which is herein incorporated by reference).

[0185] For the purpose of expression in sink tissues of the plant, such as the tuber of the potato plant, the fruit of tomato, or the seed of maize, wheat, rice, and barley, it is preferred that the promoters utilized in the present invention have relatively high expression in these specific tissues. A number of promoters for genes with tuber-specific or -enhanced expression are known, including the class I patatin promoter (Bevan et al., EMBO J. 8: 1899-1906 (1986); Jefferson et al., Plant Mol. Biol. 14: 995-1006 (1990), both of which are herein incorporated by reference in its entirety), the promoter for the potato tuber ADPGPP genes, both the large and small subunits, the sucrose synthase promoter (Salanoubat and Belliard, Gene. 60: 47-56 (1987), Salanoubat and Belliard, Gene. 84: 181-185 (1989), both of which are incorporated by reference in their entirety), the promoter for the major tuber proteins including the 22 kd protein complexes and proteinase inhibitors (Hannapel, Plant Physiol. 101: 703-704 (1993), herein incorporated by reference in its entirety), the promoter for the granule bound starch synthase gene (GBSS) (Visser et al., Plant Mol. Biol. 17: 691-699 (1991), herein incorporated by reference in its entirety), and other class I and II patatins promoters (Koster-Topfer et al., Mol Gen Genet. 219: 390-396 (1989); Mignery et al., Gene. 62: 27-44 (1988), both of which are herein incorporated by reference in their entirety).

[0186] Other promoters can also be used to express a fructose 1,6 bisphosphate aldolase gene in specific tissues, such as seeds or fruits. The promoter for β-conglycinin (Chen et al., Dev. Genet. 10: 112-122 (1989), herein incorporated by reference in its entirety) or other seed-specific promoters such as the napin and phaseolin promoters, can be used. The zeins are a group of storage proteins found in maize endosperm. Genomic clones for zein genes have been isolated (Pedersen et al., Cell 29: 1015-1026 (1982), herein incorporated by reference in its entirety), and the promoters from these clones, including the 15 kD, 16 kD, 19 kD, 22 kD, 27 kD, and gamma genes, could also be used. Other promoters known to function, for example, in maize, include the promoters for the following genes: waxy, Brittle, Shrunken 2, Branching enzymes I and II, starch synthases, debranching enzymes, oleosins, glutelins, and sucrose synthases. A particularly preferred promoter for maize endosperm expression is the promoter for the glutelin gene from rice, more particularly the Osgt-1 promoter (Zheng et al., Mol. Cell Biol. 13: 5829-5842 (1993), herein incorporated by reference in its entirety). Examples of promoters suitable for expression in wheat include those promoters for the ADPglucose pyrophosphorylase (ADPGPP) subunits, the granule bound and other starch synthases, the branching and debranching enzymes, the embryogenesis-abundant proteins, the gliadins, and the glutenins. Examples of such promoters in rice include those promoters for the ADPGPP subunits, the granule bound and other starch synthases, the branching enzymes, the debranching enzymes, sucrose synthases, and the glutelins. A particularly preferred promoter is the promoter for rice glutelin, Osgt-1. Examples of such promoters for barley include those for the ADPGPP subunits, the granule bound and other starch synthases, the branching enzymes, the debranching enzymes, sucrose synthases, the hordeins, the embryo globulins, and the aleurone specific proteins.

[0187] Root specific promoters may also be used. An example of such a promoter is the promoter for the acid chitinase gene (Samac et al., Plant Mol. Biol. 25: 587-596 (1994), the entirety of which is herein incorporated by reference). Expression in root tissue could also be accomplished by utilizing the root specific subdomains of the CaMV35S promoter that have been identified (Lam et al., Proc. Natl. Acad. Sci. (U.S.A.) 86:7890-7894 (1989), herein incorporated by reference in its entirety). Other root cell specific promoters include those reported by Conkling et al. (Conkling et al., Plant Physiol. 93:1203-1211 (1990), the entirety of which is herein incorporated by reference).

[0188] Additional promoters that may be utilized are described, for example, in U.S. Pat. Nos. 5,378,619, 5,391,725, 5,428,147, 5,447,858, 5,608,144, 5,608,144, 5,614,399, 5,633,441, 5,633,435, and 4,633,436, all of which are herein incorporated in their entirety. In addition, a tissue specific enhancer may be used (Fromm et al., The Plant Cell 1:977-984 (1989), the entirety of which is herein incorporated by reference).

[0189] Constructs or vectors may also include, with the coding region of interest, a nucleic acid sequence that acts, in whole or in part, to terminate transcription of that region. For example, such sequences have been isolated including the Tr7 3′ sequence and the nos 3′ sequence (Ingelbrecht et al., The Plant Cell 1:671-680 (1989), the entirety of which is herein incorporated by reference; Bevan et al., Nucleic Acids Res. 11:369-385 (1983), the entirety of which is herein incorporated by reference), or the like.

[0190] A vector or construct may also include regulatory elements. Examples of such include the Adh intron I (Callis et al., Genes and Develop. 1:1183-1200 (1987), the entirety of which is herein incorporated by reference), the sucrose synthase intron (Vasil et al., Plant Physiol. 91:1575-1579 (1989), the entirety of which is herein incorporated by reference) and the TMV omega element (Gallie et al., The Plant Cell 1:301-311 (1989), the entirety of which is herein incorporated by reference). These and other regulatory elements may be included when appropriate.

[0191] A vector or construct may also include a selectable marker. Selectable markers may also be used to select for plants or plant cells that contain the exogenous genetic material. Examples of such include, but are not limited to, a neo gene (Potrykus et al., Mol. Gen. Genet. 199:183-188 (1985), the entirety of which is herein incorporated by reference) which codes for kanamycin resistance and can be selected for using kanamycin, G418, etc.; a bar gene which codes for bialaphos resistance; a mutant EPSP synthase gene (Hinchee et al., Bio/Technology 6:915-922 (1988), the entirety of which is herein incorporated by reference) which encodes glyphosate resistance; a nitrilase gene which confers resistance to bromoxynil (Stalker et al., J. Biol. Chem. 263:6310-6314 (1988), the entirety of which is herein incorporated by reference); a mutant acetolactate synthase gene (ALS) which confers imidazolinone or sulphonylurea resistance (European Patent Application 154,204 (Sep. 11, 1985), the entirety of which is herein incorporated by reference); and a methotrexate resistant DHFR gene (Thillet et al., J. Biol. Chem. 263:12500-12508 (1988), the entirety of which is herein incorporated by reference).

[0192] A vector or construct may also include a transit peptide. Incorporation of a suitable chloroplast transit peptide may also be employed (European Patent Application Publication Number 0218571, the entirety of which is herein incorporated by reference). Translational enhancers may also be incorporated as part of the vector DNA. DNA constructs could contain one or more 5′ non-translated leader sequences which may serve to enhance expression of the gene products from the resulting mRNA transcripts. Such sequences may be derived from the promoter selected to express the gene or can be specifically modified to increase translation of the mRNA. Such regions may also be obtained from viral RNAs, from suitable eukaryotic genes, or from a synthetic gene sequence. For a review of optimizing expression of transgenes, see Koziel et al., Plant Mol. Biol. 32:393-405 (1996), the entirety of which is herein incorporated by reference.

[0193] A vector or construct may also include a screenable marker. Screenable markers may be used to monitor expression. Exemplary screenable markers include a β-glucuronidase or uidA gene (GUS) which encodes an enzyme for which various chromogenic substrates are known (Jefferson, Plant Mol. Biol, Rep. 5: 387-405 (1987), the entirety of which is herein incorporated by reference; Jefferson et al., EMBO J. 6: 3901-3907 (1987), the entirety of which is herein incorporated by reference); an R-locus gene, which encodes a product that regulates the production of anthocyanin pigments (red color) in plant tissues ((Dellaporta et al., Stadler Symposium 11:263-282 (1988), the entirety of which is herein incorporated by reference); a β-lactamase gene (Sutcliffe et al., Proc. Natl. Acad. Sci. (U.S.A.) 75: 3737-3741 (1978), the entirety of which is herein incorporated by reference), a gene which encodes an enzyme for which various chromogenic substrates are known (e.g., PADAC, a chromogenic cephalosporin); a luciferase gene (Ow et al., Science 234: 856-859 (1986), the entirety of which is herein incorporated by reference) a xylE gene (Zukowsky et al., Proc. Natl. Acad. Sci. (U.S.A.) 80:1101-1105 (1983), the entirety of which is herein incorporated by reference) which encodes a catechol diozygenase that can convert chromogenic catechols; an α-amylase gene (Ikatu et al., Bio/Technol. 8:241-242 (1990), the entirety of which is herein incorporated by reference); a tyrosinase gene (Katz et al., J. Gen. Microbiol. 129:2703-2714 (1983), the entirety of which is herein incorporated by reference) which encodes an enzyme capable of oxidizing tyrosine to DOPA and dopaquinone which in turn condenses to melanin; an α-galactosidase, which will turn a chromogenic α-galactose substrate.

[0194] Included within the terms “selectable or screenable marker genes” are also genes which encode a scriptable marker whose secretion can be detected as a means of identifying or selecting for transformed cells. Examples include markers which encode a secretable antigen that can be identified by antibody interaction, or even secretable enzymes which can be detected catalytically. Secretable proteins fall into a number of classes, including small, diffusible proteins detectable, e.g., by ELISA, small active enzymes detectable in extracellular solution (e.g., α-amylase, β-lactamase, phosphinothricin transferase), or proteins which are inserted or trapped in the cell wall (such as proteins which include a leader sequence such as that found in the expression unit of extension or tobacco PR-S). Other possible selectable and/or screenable marker genes will be apparent to those of skill in the art.

[0195] Methods and compositions for transforming a bacteria and other microorganisms are known in the art (see for example Sambrook et al., Molecular Cloning. A Laboratory Manual, Second Edition, Cold Spring Harbor Laboratory Press, Cold Spring Harbor, N.Y., (1989), the entirety of which is herein incorporated by reference).

[0196] There are many methods for introducing transforming nucleic acid molecules into plant cells. Suitable methods are believed to include virtually any method by which nucleic acid molecules may be introduced into a cell, such as by Agrobacterium infection or direct delivery of nucleic acid molecules such as, for example, by PEG-mediated transformation, by electroporation or by acceleration of DNA coated particles, etc. (Pottykus, Ann. Rev. Plant Physiol. Plant Mol. Biol. 42:205-225 (1991), the entirety of which is herein incorporated by reference; Vasil, Plant Mol. Biol. 25: 925-937 (1994), the entirety of which is herein incorporated by reference. For example, electroporation has been used to transform maize protoplasts (Fromm et al., Nature 312:791-793 (1986), the entirety of which is herein incorporated by reference).

[0197] Other vector systems suitable for introducing transforming DNA into a host plant cell includes but is not limited to binary artificial chromosome (BIBAC) vectors (Hamilton et al., Gene 200:107-116, (1997), the entirety of which is herein incorporated by reference, and transfection with RNA viral vectors (Della-Cioppa et al., Ann. N.Y. Acad. Sci. (1996), 792 (Engineering Plants for Commercial Products and Applications), 57-61, the entirety of which is herein incorporated by reference.

[0198] Technology for introduction of DNA into cells is well known to those of skill in the art. Four general methods for delivering a gene into cells have been described: (1) chemical methods (Graham and van der Eb, Virology, 54:536-539 (1973), the entirety of which is herein incorporated by reference); (2) physical methods such as microinjection (Capecchi, Cell 22:479-488 (1980), electroporation (Wong and Neumann, Biochem. Biophys. Res. Commun., 107:584-587 (1982); Fromm et al., Proc. Natl. Acad. Sci. USA, 82:5824-5828 (1985); U.S. Pat. No. 5,384,253; and the gene gun (Johnston and Tang, Methods Cell Biol. 43:353-365 (1994), all of which the entirety is herein incorporated by reference; (3) viral vectors (Clapp, Clin. Perinatol., 20:155-168 (1993); Lu et al., J. Exp. Med., 178:2089-2096 (1993); Eglitis and Anderson, Biotechniques, 6:608-614 (1988), all of which the entirety is herein incorporated by reference); and (4) receptor-mediated mechanisms (Curiel et al., Hum. Gen. Ther., 3:147-154 (1992); Wagner et al., Proc. Natl. Acad. Sci. USA, 89:6099-6103 (1992), all of which the entirety is herein incorporated by reference).

[0199] Acceleration methods that may be used include, for example, microprojectile bombardment and the like. One example of a method for delivering transforming nucleic acid molecules to plant cells is microprojectile bombardment. This method has been reviewed by Yang and Christou, eds., Particle Bombardment Technology for Gene Transfer, Oxford Press, Oxford, England (1994), the entirety of which is herein incorporated by reference). Non-biological particles (microprojectiles) that may be coated with nucleic acids and delivered into cells by a propelling force. Exemplary particles include those comprised of tungsten, gold, platinum, and the like.

[0200] A particular advantage of microprojectile bombardment, in addition to it being an effective means of reproducibly, and stably transforming monocotyledons, is that neither the isolation of protoplasts (Cristou et al., Plant Physiol. 87:671-674 (1988), the entirety of which is herein incorporated by reference) nor the susceptibility of Agrobacterium infection is required. An illustrative embodiment of a method for delivering DNA into maize cells by acceleration is a biolistics g-particle delivery system, which can be used to propel particles coated with DNA through a screen, such as a stainless steel or Nytex screen, onto a filter surface covered with corn cells cultured in suspension. Gordon-Kamm et al., describes the basic procedure for coating tungsten particles with DNA (Gordon-Kamm et al., Plant Cell 2: 603-618 (1990), the entirety of which is herein incorporated by reference). The screen disperses the tungsten nucleic acid particles so that they are not delivered to the recipient cells in large aggregates. A particle delivery system suitable for use with the present invention is the helium acceleration PDS-1000/He gun which is available from Bio-Rad Laboratories (Bio-Rad, Hercules, Calif.)(Sanford et al., Technique 3:3-16 (1991), the entirety of which is herein incorporated by reference).

[0201] For the bombardment, cells in suspension may be concentrated on filters. Filters containing the cells to be bombarded are positioned at an appropriate distance below the microprojectile stopping plate. If desired, one or more screens are also positioned between the gun and the cells to be bombarded.

[0202] Alternatively, immature embryos or other target cells may be arranged on solid culture medium. The cells to be bombarded are positioned at an appropriate distance below the macroprojectile stopping plate. If desired, one or more screens are also positioned between the acceleration device and the cells to be bombarded. Through the use of techniques set forth herein one may obtain up to 1000 or more foci of cells transiently expressing a marker gene. The number of cells in a focus which express the exogenous gene product 48 hours post-bombardment often range from one to ten and average one to three.

[0203] In bombardment transformation, one may optimize the prebombardment culturing conditions and the bombardment parameters to yield the maximum numbers of stable transformants. Both the physical and biological parameters for bombardment are important in this technology. Physical factors are those that involve manipulating the DNA/microprojectile precipitate or those that affect the flight and velocity of either the macro- or microprojectiles. Biological factors include all steps involved in manipulation of cells before and immediately after bombardment, the osmotic adjustment of target cells to help alleviate the trauma associated with bombardment, and also the nature of the transforming DNA, such as linearized DNA or intact supercoiled plasmids. It is believed that pre-bombardment manipulations are especially important for successful transformation of immature embryos. In another alternative embodiment, plastids can be stably transformed. Methods disclosed for plastid transformation in higher plants include the particle gun delivery of DNA containing a selectable marker and targeting of the DNA to the plastid genome through homologous recombination (Svab et al., Proc. Natl. Acad. Sci. (U.S.A.) 87:8526-8530 (1990); Svab and Maliga, Proc. Natl. Acad. Sci. (U.S.A.) 90.913-917 (1993); Staub and Maliga, EMBO J. 12:601-606 (1993); U.S. Pat. No. 5,451,513 and 5,545,818, all of which are herein incorporated by reference in their entirety).

[0204] Accordingly, it is contemplated that one may wish to adjust various aspects of the bombardment parameters in small scale studies to fully optimize the conditions. One may particularly wish to adjust physical parameters such as gap distance, flight distance, tissue distance, and helium pressure. One may also minimize the trauma reduction factors by modifying conditions which influence the physiological state of the recipient cells and which may therefore influence transformation and integration efficiencies. For example, the osmotic state, tissue hydration and the subculture stage or cell cycle of the recipient cells may be adjusted for optimum transformation. The execution of other routine adjustments will be known to those of skill in the art in light of the present disclosure.

[0205] Agrobacterium-mediated transfer is a widely applicable system for introducing genes into plant cells because the DNA can be introduced into whole plant tissues, thereby bypassing the need for regeneration of an intact plant from a protoplast. The use of Agrobacterium-mediated plant integrating vectors to introduce DNA into plant cells is well known in the art. See, for example the methods described (Fraley et al., Biotechnology 3:629-635 (1985); Rogers et al., Meth. In Enzymol, 153:253-277 (1987), both of which are herein incorporated by reference in their entirety. Further, the integration of the Ti-DNA is a relatively precise process resulting in few rearrangements. The region of DNA to be transferred is defined by the border sequences, and intervening DNA is usually inserted into the plant genome as described (Spielmann et al., Mol. Gen. Genet., 205:34 (1986), the entirety of which is herein incorporated by reference).

[0206] Modern Agrobacterium transformation vectors are capable of replication in E. coli as well as Agrobacterium, allowing for convenient manipulations as described (Klee et al., In: Plant DNA Infectious Agents, T. Hohn and J. Schell, eds., Springer-Verlag, New York, pp. 179-203 (1985), the entirety of which is herein incorporated by reference. Moreover, recent technological advances in vectors for Agrobacterium-mediated gene transfer have improved the arrangement of genes and restriction sites in the vectors to facilitate construction of vectors capable of expressing various polypeptide coding genes. The vectors described have convenient multi-linker regions flanked by a promoter and a polyadenylation site for direct expression of inserted polypeptide coding genes and are suitable for present purposes (Rogers et al., Meth. In Enzymol., 153:253-277 (1987), the entirety of which is herein incorporated by reference). In addition, Agrobacterium containing both armed and disarmed Ti genes can be used for the transformations. In those plant strains where Agrobacterium-mediated transformation is efficient, it is the method of choice because of the facile and defined nature of the gene transfer.

[0207] A transgenic plant formed using Agrobacterium transformation methods typically contains a single gene on one chromosome. Such transgenic plants can be referred to as being heterozygous for the added gene. More preferred is a transgenic plant that is homozygous for the added structural gene; i.e., a transgenic plant that contains two added genes, one gene at the same locus on each chromosome of a chromosome pair. A homozygous transgenic plant can be obtained by sexually mating (selfing) an independent segregant transgenic plant that contains a single added gene, germinating some of the seed produced and analyzing the resulting plants produced for the gene of interest.

[0208] It is also to be understood that two different transgenic plants can also be mated to produce offspring that contain two independently segregating added, exogenous genes. Selfing of appropriate progeny can produce plants that are homozygous for both added, exogenous genes that encode a polypeptide of interest. Back-crossing to a parental plant and out-crossing with a non-transgenic plant are also contemplated, as is vegetative propagation.

[0209] Transformation of plant protoplasts can be achieved using methods based on calcium phosphate precipitation, polyethylene glycol treatment, electroporation, and combinations of these treatments. See for example (Potrykus et al., Mol. Gen. Genet., 205:193-200 (1986); Lorz et al., Mol. Gen. Genet., 199:178, (1985); Fromm et al., Nature, 319:791, (1986); Uchimiya et al., Mol. Gen. Genet.: 204:204, (1986); Callis et al., Genes and Development, 1183, (1987); Marcotte et al., Nature, 335:454, (1988), all of which the entirety is herein incorporated by reference).

[0210] Application of these systems to different plant strains depends upon the ability to regenerate that particular plant strain from protoplasts. Illustrative methods for the regeneration of cereals from protoplasts are described (Fujimura et al., Plant Tissue Culture Letters, 2:74, (1985); Toriyama et al., Theor Appl. Genet. 205:34. (1986); Yamada et al., Plant Cell Rep., 4:85, (1986); Abdullah et al., Biotechnology, 4:1087, (1986), all of which the entirety is herein incorporated by reference).

[0211] To transform plant strains that cannot be successfully regenerated from protoplasts, other ways to introduce DNA into intact cells or tissues can be utilized. For example, regeneration of cereals from immature embryos or explants can be effected as described (Vasil, Biotechnology, 6:397, (1988), the entirety of which is herein incorporated by reference). In addition, “particle gun” or high-velocity microprojectile technology can be utilized (Vasil et al., Bio/Technology 10:667, (1992), the entirety of which is herein incorporated by reference).

[0212] Using the latter technology, DNA is carried through the cell wall and into the cytoplasm on the surface of small metal particles as described (Klein et al., Nature, 328:70, (1987); Klein et al., Proc. Natl. Acad. Sci. USA, 85:8502-8505, (1988); McCabe et al., Biotechnology, 6:923, (1988), all of which the entirety is herein incorporated by reference). The metal particles penetrate through several layers of cells and thus allow the transformation of cells within tissue explants.

[0213] Other methods of cell transformation can also be used and include but are not limited to introduction of DNA into plants by direct DNA transfer into pollen (Zhou et al., Methods in Enzymology, 101:433, (1983); Hess et al., Intern Rev. Cytol., 107:367, (1987); Luo et al., Plant Mol Biol. Reporter, 6:165, (1988), all of which the entirety is herein incorporated by reference), by direct injection of DNA into reproductive organs of a plant (Pena et al., Nature, 325:274, (1987), the entirety of which is herein incorporated by reference), or by direct injection of DNA into the cells of immature embryos followed by the rehydration of desiccated embryos (Neuhaus et al., Theor. Appl. Genet., 75:30, (1987), the entirety of which is herein incorporated by reference).

[0214] The regeneration, development, and cultivation of plants from single plant protoplast transformants or from various transformed explants is well known in the art (Weissbach and Weissbach, In: Methods for Plant Molecular Biology, (Eds.), Academic Press, Inc. San Diego, Calif., (1988), the entirety of which is herein incorporated by reference). This regeneration and growth process typically includes the steps of selection of transformed cells, culturing those individualized cells through the usual stages of embryonic development through the rooted plantlet stage. Transgenic embryos and seeds are similarly regenerated. The resulting transgenic rooted shoots are thereafter planted in an appropriate plant growth medium such as soil.

[0215] The development or regeneration of plants containing the foreign, exogenous gene that encodes a protein of interest is well known in the art. Preferably, the regenerated plants are self-pollinated to provide homozygous transgenic plants, as discussed before. Otherwise, pollen obtained from the regenerated plants is crossed to seed-grown plants of agronomically important lines. Conversely, pollen from plants of these important lines is used to pollinate regenerated plants. A transgenic plant of the present invention containing a desired polypeptide is cultivated using methods well known to one skilled in the art.

[0216] There are a variety of methods for the regeneration of plants from plant tissue. The particular method of regeneration will depend on the starting plant tissue and the particular plant species to be regenerated.

[0217] Methods for transforming dicots, primarily by use of Agrobacterium tumefaciens, and obtaining transgenic plants have been published for cotton (U.S. Pat. No. 5,004,863, U.S. Pat. No. 5,159,135, U.S. Pat. No. 5,518,908, all of which the entirety is herein incorporated by reference); soybean (U.S. Pat. No. 5,569,834, U.S. Pat. No. 5,416,011, McCabe et al., Biotechnology 6:923, (1988), Christou et al., Plant Physiol., 87:671-674 (1988), all of which the entirety is herein incorporated by reference); Brassica (U.S. Pat. No. 5,463,174, the entirety of which is herein incorporated by reference); peanut (Cheng et al., Plant Cell Rep. 15: 653-657 (1996), McKently et al., Plant Cell Rep. 14:699-703 (1995), all of which the entirety is herein incorporated by reference); papaya (Yang et al., (1996), the entirety of which is herein incorporated by reference); pea (Grant et al., Plant Cell Rep. 15:254-258, (1995), the entirety of which is herein incorporated by reference).

[0218] Transformation of monocotyledons using electroporation, particle bombardment, and Agrobacterium have also been reported. Transformation and plant regeneration have been achieved in asparagus (Bytebier et al., Proc. Natl. Acad. Sci. USA 84:5345, (1987), the entirety of which is herein incorporated by reference); barley (Wan and Lemaux, Plant Physiol 104:37, (1994), the entirety of which is herein incorporated by reference); maize (Rhodes et al., Science 240: 204, (1988), Gordon-Kamm et al., Plant Cell, 2:603, (1990), Fromm et al., Bio/Technology 8:833, (1990), Koziel et al., Bio/Technology 11:194, (1993), Armstrong et al., Crop Science 35:550-557, (1995), all of which the entirety is herein incorporated by reference); oat (Somers et al., Bio/Technology, 10:1589, (1992), the entirety of which is herein incorporated by reference); orchardgrass (Horn et al., Plant Cell Rep. 7:469, (1988), the entirety of which is herein incorporated by reference); rice (Toriyama et al., Theor Appl. Genet. 205:34, (1986); Park et al., Plant Mol. Biol., 32: 1135-1148, (1996); Abedinia et al., Aust. J. Plant Physiol. 24:133-141, (1997); Zhang and Wu, Theor. Appl. Genet. 76:835, (1988); Zhang et al. Plant Cell Rep. 7:379, (1988); Battraw and Hall, Plant Sci. 86:191-202, (1992); Christou et al., Bio/Technology 9:957, (1991), all of which the entirety is herein incorporated by reference); sugarcane (Bower and Birch, Plant J. 2:409, (1992), the entirety of which is herein incorporated by reference); tall fescue (Wang et al., Bio/Technology 10:691, (1992), the entirety of which is herein incorporated by reference), and wheat (Vasil et al., Bio/Technology 10:667, (1992), the entirety of which is herein incorporated by reference; U.S. Pat. No. 5,631,152, the entirety of which is herein incorporated by reference.

[0219] Assays for gene expression based on the transient expression of cloned nucleic acid constructs have been developed by introducing the nucleic acid molecules into plant cells by polyethylene glycol treatment, electroporation, or particle bombardment (Marcotte, et al., Nature, 335: 454-457 (1988), the entirety of which is herein incorporated by reference; Marcotte, et al., Plant Cell, 1: 523-532 (1989), the entirety of which is herein incorporated by reference; McCarty, et al., Cell 66: 895-905 (1991), the entirety of which is herein incorporated by reference; Hattori, et al., Genes Dev. 6: 609-618 (1992), the entirety of which is herein incorporated by reference; Goff, et al., EMBO J. 9: 2517-2522 (1990), the entirety of which is herein incorporated by reference). Transient expression systems may be used to functionally dissect gene constructs (See generally, Mailga et al., Methods in Plant Molecular Biology, Cold Spring Harbor Press (1995)).

[0220] Any of the nucleic acid molecules of the present invention may be introduced into a plant cell in a permanent or transient manner in combination with other genetic elements such as vectors, promoters enhancers etc. Further any of the nucleic acid molecules of the present invention may be introduced into a plant cell in a manner that allows for over expression of the protein or fragment thereof encoded by the nucleic acid molecule.

[0221] Cosuppression is the reduction in expression levels, usually at the level of RNA, of a particular endogenous gene or gene family by the expression of a homologous sense construct that is capable of transcribing mRNA of the same strandedness as the transcript of the endogenous gene (Napoli et al., Plant Cell 2: 279-289 (1990), the entirety of which is herein incorporated by reference; van der Krol et al., Plant Cell 2: 291-299 (1990), the entirety of which is herein incorporated by reference). Cosuppression may result from stable transformation with a single copy nucleic acid molecule that is homologous to a nucleic acid sequence found with the cell (Prolls and Meyer, Plant J. 2:465-475 (1992), the entirety of which is herein incorporated by reference) or with multiple copies of a nucleic acid molecule that is homologous to a nucleic acid sequence found with the cell (Mittlesten et al., Mol. Gen. Genet. 244: 325-330 (1994), the entirety of which is herein incorporated by reference). Genes, even though different, linked to homologous promoters may result in the cosuppression of the linked genes (Vaucheret, C. R. Acad. Sci. III 316: 1471-1483 (1993), the entirety of which is herein incorporated by reference).

[0222] This technique has, for example been applied to generate white flowers from red petunia and tomatoes that do not ripen on the vine. Up to 50% of petunia transformants that contained a sense copy of the chalcone synthase (CHS) gene produced white flowers or floral sectors; this was as a result of the post-transcriptional loss of mRNA encoding CHS (Flavell, Proc. Natl. Acad. Sci. (U.S.A.) 91:3490-3496 (1994)), the entirety of which is herein incorporated by reference). Cosuppression may require the coordinate transcription of the transgene and the endogenous gene, and can be reset by a developmental control mechanism (Jorgensen, Trends Biotechnol, 8:340344 (1990), the entirety of which is herein incorporated by reference; Meins and Kunz, In: Gene Inactivation and Homologous Recombination in Plants (Paszkowski, J., ed.), pp. 335-348. Kluwer Academic, Netherlands (1994), the entirety of which is herein incorporated by reference).

[0223] It is understood that one or more of the nucleic acids of the present invention including those comprising SEQ ID NO: 1 through SEQ ID NO: 18718 or complement thereof or fragments of either or other nucleic acid molecules of the present invention may be introduced into a plant cell and transcribed using an appropriate promoter with such transcription resulting in the co-suppression of an endogenous protein.

[0224] Antisense approaches are a way of preventing or reducing gene function by targeting the genetic material (Mol et al., FEBS Lett. 268: 427-430 (1990), the entirety of which is herein incorporated by reference). The objective of the antisense approach is to use a sequence complementary to the target gene to block its expression and create a mutant cell line or organism in which the level of a single chosen protein is selectively reduced or abolished. Antisense techniques have several advantages over other ‘reverse genetic’ approaches. The site of inactivation and its developmental effect can be manipulated by the choice of promoter for antisense genes or by the timing of external application or microinjection. Antisense can manipulate its specificity by selecting either unique regions of the target gene or regions where it shares homology to other related genes (Hiatt et al., In Genetic Engineering, Setlow (ed.), Vol. 11, New York: Plenum 49-63 (1989), the entirety of which is herein incorporated by reference).

[0225] The principle of regulation by antisense RNA is that RNA that is complementary to the target mRNA is introduced into cells, resulting in specific RNA:RNA duplexes being formed by base pairing between the antisense substrate and the target mRNA (Green et al., Annu. Rev. Biochem. 55: 569-597 (1986), the entirety of which is herein incorporated by reference). Under one embodiment, the process involves the introduction and expression of an antisense gene sequence. Such a sequence is one in which part or all of the normal gene sequences are placed under a promoter in inverted orientation so that the ‘wrong’ or complementary strand is transcribed into a noncoding antisense RNA that hybridizes with the target mRNA and interferes with its expression (Takayama and Inouye, Crit. Rev. Biochem. Mol. Biol. 25: 155-184 (1990), the entirety of which is herein incorporated by reference). An antisense vector is constructed by standard procedures and introduced into cells by transformation, transfection, electroporation, microinjection, or by infection, etc. The type of transformation and choice of vector will determine whether expression is transient or stable. The promoter used for the antisense gene may influence the level, timing, tissue, specificity, or inducibility of the antisense inhibition.

[0226] It is understood that protein synthesis activity in a plant cell may be reduced or depressed by growing a transformed plant cell containing a nucleic acid molecule whose non-transcribed strand encodes a protein or fragment thereof.

[0227] Antibodies have been expressed in plants (Hiatt et al., Nature 342:76-78 (1989), the entirety of which is herein incorporated by reference; Conrad and Fielder, Plant Mol. Biol. 26: 1023-1030 (1994), the entirety of which is herein incorporated by reference). Cytoplamic expression of a scFv (single-chain Fv antibodies) has been reported to delay infection by artichoke mottled crinkle virus. Transgenic plants that express antibodies directed against endogenous proteins may exhibit a physiological effect (Philips et al., EMBO J. 16: 4489-4496 (1997), the entirety of which is herein incorporated by reference; Marion-Poll, Trends in Plant Science 2: 447-448 (1997), the entirety of which is herein incorporated by reference). For example, expressed anti-abscisic antibodies reportedly result in a general perturbation of seed development (Philips et al., EMBO J. 16: 4489-4496 (1997)).

[0228] Antibodies that are catalytic may also be expressed in plants (abzymes). The principle behind abzymes is that since antibodies may be raised against many molecules, this recognition ability can be directed toward generating antibodies that bind transition states to force a chemical reaction forward (Persidas, Nature Biotechnology 15:1313-1315 (1997), the entirety of which is herein incorporated by reference; Baca et al., Ann. Rev. Biophys. Biomol. Struct. 26:461-493 (1997), the entirety of which is herein incorporated by reference). The catalytic abilities of abzymes may be enhanced by site directed mutagensis. Examples of abzymes are, for example, set forth in U.S. Pat. No. 5,658,753; U.S. Pat. No. 5,632,990; U.S. Pat. No. 5,631,137; U.S. Pat. No. 5,602,015; U.S. Pat. No. 5,559,538; U.S. Pat. No. 5,576,174; U.S. Pat. No. 5,500,358; U.S. Pat. No. 5,318,897; U.S. Pat. No. 5,298,409; U.S. Pat. No. 5,258,289 and U.S. Pat. No. 5,194,585, all of which are herein incorporated in their entirety.

[0229] It is understood that any of the antibodies of the present invention may be expressed in plants and that such expression can result in a physiological effect. It is also understood that any of the expressed antibodies may be catalytic.

[0230] In addition to the above discussed procedures, practitioners are familiar with the standard resource materials which describe specific conditions and procedures for the construction, manipulation and isolation of macromolecules (e.g., DNA molecules, plasmids, etc.), generation of recombinant organisms and the screening and isolating of clones, (see for example, Sambrook et al., Molecular Cloning: A Laboratory Manual, Cold Spring Harbor Press (1989); Mailga et al., Methods in Plant Molecular Biology, Cold Spring Harbor Press (1995), the entirety of which is herein incorporated by reference; Birren et al., Genome Analysis: Analyzing DNA, 1, Cold Spring Harbor, N.Y., the entirety of which is herein incorporated by reference).

[0231] The nucleotide sequence provided in SEQ ID NO: 1, through SEQ ID NO: 18718 or fragment thereof, or complement thereof, or a nucleotide sequence at least 90% identical, preferably 95%, identical even more preferably 99% or 100% identical to the sequence provided in SEQ ID NO: 1 through SEQ ID NO: 18718 or fragment thereof, or complement thereof, can be “provided” in a variety of mediums to facilitate use fragment thereof. Such a medium can also provide a subset thereof in a form that allows a skilled artisan to examine the sequences.

[0232] In one application of this embodiment, a nucleotide sequence of the present invention can be recorded on computer readable media. As used herein, “computer readable media” refers to any medium that can be read and accessed directly by a computer. Such media include, but are not limited to: magnetic storage media, such as floppy discs, hard disc, storage medium, and magnetic tape: optical storage media such as CD-ROM; electrical storage media such as RAM and ROM; and hybrids of these categories such as magnetic/optical storage media. A skilled artisan can readily appreciate how any of the presently known computer readable mediums can be used to create a manufacture comprising computer readable medium having recorded thereon a nucleotide sequence of the present invention.

[0233] As used herein, “recorded” refers to a process for storing information on computer readable medium. A skilled artisan can readily adopt any of the presently known methods for recording information on computer readable medium to generate media comprising the nucleotide sequence information of the present invention. A variety of data storage structures are available to a skilled artisan for creating a computer readable medium having recorded thereon a nucleotide sequence of the present invention. The choice of the data storage structure will generally be based on the means chosen to access the stored information. In addition, a variety of data processor programs and formats can be used to store the nucleotide sequence information of the present invention on computer readable medium. The sequence information can be represented in a word processing text file, formatted in commercially-available software such as WordPerfect and Microsoft Word, or represented in the form of an ASCII file, stored in a database application, such as DB2, Sybase, Oracle, or the like. A skilled artisan can readily adapt any number of data processor structuring formats (e.g. text file or database) in order to obtain computer readable medium having recorded thereon the nucleotide sequence information of the present invention.

[0234] By providing one or more of nucleotide sequences of the present invention, a skilled artisan can routinely access the sequence information for a variety of purposes. Computer software is publicly available which allows a skilled artisan to access sequence information provided in a computer readable medium. The examples which follow demonstrate how software which implements the BLAST (Altschul et al., J. Mol. Biol. 215:403-410 (1990)) and BLAZE (Brutlag et al., Comp. Chem. 17:203-207 (1993), the entirety of which is herein incorporated by reference) search algorithms on a Sybase system can be used to identify open reading frames (ORFs) within the genome that contain homology to ORFs or proteins from other organisms. Such ORFs are protein-encoding fragments within the sequences of the present invention and are useful in producing commercially important proteins such as enzymes used in amino acid biosynthesis, metabolism, transcription, translation, RNA processing, nucleic acid and a protein degradation, protein modification, and DNA replication, restriction, modification, recombination, and repair.

[0235] The present invention further provides systems, particularly computer-based systems, which contain the sequence information described herein. Such systems are designed to identify commercially important fragments of the nucleic acid molecule of the present invention. As used herein, “a computer-based system” refers to the hardware means, software means, and data storage means used to analyze the nucleotide sequence information of the present invention. The minimum hardware means of the computer-based systems of the present invention comprises a central processing unit (CPU), input means, output means, and data storage means. A skilled artisan can readily appreciate that any one of the currently available computer-based system are suitable for use in the present invention.

[0236] As indicated above, the computer-based systems of the present invention comprise a data storage means having stored therein a nucleotide sequence of the present invention and the necessary hardware means and software means for supporting and implementing a search means. As used herein, “data storage means” refers to memory that can store nucleotide sequence information of the present invention, or a memory access means which can access manufactures having recorded thereon the nucleotide sequence information of the present invention. As used herein, “search means” refers to one or more programs which are implemented on the computer-based system to compare a target sequence or target structural motif with the sequence information stored within the data storage means. Search means are used to identify fragments or regions of the sequence of the present invention that match a particular target sequence or target motif. A variety of known algorithms are disclosed publicly and a variety of commercially available software for conducting search means are available and can be used in the computer-based systems of the present invention. Examples of such software include, but are not limited to, MacPattern (EMBL), BLASTIN and BLASTIX (NCBIA). One of the available algorithms or implementing software packages for conducting homology searches can be adapted for use in the present computer-based systems.

[0237] The most preferred sequence length of a target sequence is from about 10 to 0.100 amino acids or from about 30 to 300 nucleotide residues. However, it is well recognized that during searches for commercially important fragments of the nucleic acid molecules of the present invention, such as sequence fragments involved in gene expression and protein processing, may be of shorter length.

[0238] As used herein, “a target structural motif,” or “target motif,” refers to any rationally selected sequence or combination of sequences in which the sequences or sequence(s) are chosen based on a three-dimensional configuration which is formed upon the folding of the target motif. There are a variety of target motifs known in the art. Protein target motifs include, but are not limited to, enzymatic active sites and signal sequences. Nucleic acid target motifs include, but are not limited to, promoter sequences, cis elements, hairpin structures and inducible expression elements (protein binding sequences).

[0239] Thus, the present invention further provides an input means for receiving a target sequence, a data storage means for storing the target sequences of the present invention sequence identified using a search means as described above, and an output means for outputting the identified homologous sequences. A variety of structural formats for the input and output means can be used to input and output information in the computer-based systems of the present invention. A preferred format for an output means ranks fragments of the sequence of the present invention by varying degrees of homology to the target sequence or target motif. Such presentation provides a skilled artisan with a ranking of sequences which contain various amounts of the target sequence or target motif and identifies the degree of homology contained in the identified fragment.

[0240] A variety of comparing means can be used to compare a target sequence or target motif with the data storage means to identify sequence fragments sequence of the present invention. For example, implementing software which implement the BLAST and BLAZE algorithms (Altschul et al., J. Mol. Biol. 215:403-410 (1990)) can be used to identify open frames within the nucleic acid molecules of the present invention. A skilled artisan can readily recognize that any one of the publicly available homology search programs can be used as the search means for the computer-based systems of the present invention. Having now generally described the invention, the same will be more readily understood through reference to the following examples which are provided by way of illustration, and are not intended to be limiting of the present invention, unless specified.

### EXAMPLE 1

[0241] The cDNA library of the present invention designated LIB9, is prepared from Arabidopsis thaliana, Columbia ecotype, leaf tissue. Wild type Arabidopsis thaliana seeds are planted in commonly used planting pots and grown in an environmental chamber. Leaf blades are cut with sharp scissors at seven weeks after planting. The tissue is immediately frozen in liquid nitrogen and stored at −80° C. until total RNA extraction. SEQ ID NO: 1 to SEQ ID NO: 1425 are from LIB9.

[0242] The cDNA library of the present invention designated LIB22, is prepared from Arabidopsis thaliana Columbia ecotype root tissue. Wild type Arabidopsis thaliana seeds are planted in commonly used planting pots and grown in an environmental chamber. After 5-6 weeks the plants are in the reproductive growth phase. Stems are bolting from the base of the plants. After 7 weeks, more stems and floral buds appear, and a few flowers are starting to open. Roots of 7-week old plants from pots are rinsed intensively with tap water to wash away dirt, and briefly blotted by paper towel to take away free water. The tissues are immediately frozen in liquid nitrogen and stored at −80° C. until use. SEQ ID NO:1426 through SEQ ID NO: 5331 are from LIB22.

[0243] The cDNA library of the present invention designated LIB23, is prepared from Arabidopsis thaliana, Columbia ecotype, stem tissue. Wild type Arabidopsis thaliana seeds are planted in commonly used planting pots and grown in an environmental chamber. Stems are collected seven to eight weeks after planting by cutting the stems from the base and cutting the top of the plant to remove the floral tissue. The tissue is immediately frozen in liquid nitrogen and stored at −80° C. until total RNA extraction. SEQ ID NO: 5332 through SEQ ID NO: 6413 are from LIB23.

[0244] The cDNA library of the present invention designated LIB24, is prepared from Arabidopsis thaliana, Columbia ecotype, flower bud tissue. Wild type Arabidopsis thaliana seeds are planted in commonly used planting pots and grown in an environmental chamber. Flower buds are green and unopened and are harvested about seven weeks after planting. The tissue is immediately frozen in liquid nitrogen and stored at −80° C. until total RNA extraction. SEQ ID NO: 6414 through SEQ ID NO: 11364 are from LIB24.

[0245] The cDNA library of the present invention designated LIB25, is prepared from Arabidopsis thaliana, Columbia ecotype, open flower tissue. Wild type Arabidopsis thaliana seeds are planted in commonly used planting pots and grown in an environmental chamber. Flower are completely opened with all parts of floral structure observable, but no siliques are appearing, and are harvested about seven weeks after planting. The tissue was immediately frozen in liquid nitrogen and stored at −80° C. until total RNA extraction. SEQ ID NO: 11365 through SEQ ID NO: 16980 are from LIB25.

[0246] The cDNA library of the present invention designated LIB35, is prepared from Arabidopsis thaliana Columbia ecotype leaf tissue. Wild type Arabidopsis thaliana seeds are planted in commonly used planting pots and grown in an environmental chamber. After 5-6 weeks the plants are in the reproductive growth phase. Stems are bolting from the base of the plants. After 7 weeks, more stems and floral buds appear and a few flowers are starting to open. Leaf blades are collected by cutting with sharp scissors. LIB35 is normalized by a PCR-based protocol. The tissues are immediately frozen in liquid nitrogen and stored at −80° C. until use. SEQ ID NO: 16981 through SEQ ID NO: 18589 are from LIB35.

[0247] The cDNA library of the present invention designated LIB146, is prepared from Arabidopsis thaliana, Columbia ecotype, immature seed tissue. Wild type Arabidopsis thaliana seeds are planted in commonly used planting pots and grown in an environmental chamber. At approximately 7-8 weeks of age, the seeds are harvested. The seeds range in maturity from the smallest seeds that could be dissected from silques to just before starting to turn yellow in color. The tissue is immediately frozen in liquid nitrogen and stored at −80° C. until total RNA extraction. SEQ ID NO: 18590 through SEQ ID NO: 18718 are from LIB146.

### EXAMPLE 2

[0248] The stored RNA is purified using Trizol reagent from Life Technologies (Gibco BRL, Life Technologies, Gaithersburg, Md. U.S.A.), essentially as recommended by the manufacturer. Poly A+ RNA (mRNA) is purified using magnetic oligo dT beads essentially as recommended by the manufacturer (Dynabeads, Dynal Corporation, Lake Success, N.Y. U.S.A.).

[0249] Construction of plant cDNA libraries is well-known in the art and a number of cloning strategies exist. A number of cDNA library construction kits are commercially available. The Superscript™ Plasmid System for cDNA synthesis and Plasmid Cloning (Gibco BRL, Life Technologies, Gaithersburg, Md. U.S.A.) is used, following the conditions suggested by the manufacturer.

### EXAMPLE 3

[0250] The cDNA libraries are plated on LB agar containing the appropriate antibiotics for selection and incubated at 37° for a sufficient time to allow the growth of individual colonies. Single colonies are individually placed in each well of a 96-well microtiter plates containing LB liquid including the selective antibiotics. The plates are incubated overnight at approximately 37° C. with gentle shaking to promote growth of the cultures. The plasmid DNA is isolated from each clone using Qiaprep plasmid isolation kits, using the conditions recommended by the manufacturer (Qiagen Inc., Santa Clara, Calif. U.S.A.).

[0251] The template plasmid DNA clones are used for subsequent sequencing. For sequencing the cDNA libraries of LIB9, LIB22, LIB23, LIB24, LIB25, LIB35, and LIB146, a commercially available sequencing kit, such as the ABI PRISM dRhodamine Terminator Cycle Sequencing. Ready Reaction Kit with AmpliTaq® DNA Polymerase, FS, is used under the conditions recommended by the manufacturer (PE Applied Biosystems, Foster City, Calif.). The ESTs of the present invention are generated by sequencing initiated from the 5′ end of each cDNA clone.

[0252] A number of sequencing techniques are known in the art, including fluorescence-based sequencing methodologies. These methods have the detection, automation and instrumentation capability necessary for the analysis of large volumes of sequence data. Currently, the 377 DNA Sequencer (Perkin-Elmer Corp., Applied Biosystems Div., Foster City, Calif.) allows the most rapid electrophoresis and data collection. With these types of automated systems, fluorescent dye-labeled sequence reaction products are detected and data entered directly into the computer, producing a chromatogram that is subsequently viewed, stored, and analyzed using the corresponding software programs. These methods are known to those of skill in the art and have been described and reviewed (Birren et al., Genome Analysis: Analyzing DNA, 1, Cold Spring Harbor, N.Y., the entirety of which is herein incorporated by reference).

1-19. (canceled)

20. A substantially purified nucleic acid molecule comprising a nucleic acid sequence wherein said nucleic acid sequence:
(a) hybridizes under stringent conditions to a nucleic acid sequence selected from the group consisting of SEQ ID NO: 1 through SEQ ID NO: 18718, a complement thereof or a fragment of either, or
(b) exhibits an 90% or greater identity to a nucleic acid sequence selected from the group consisting of SEQ ID NO: 1 through SEQ ID NO: 18718, a complement thereof or a fragment of either.

21. The substantially purified nucleic acid molecule of claim 20, wherein said nucleic acid molecule encodes an Arabidopsis thaliana protein or fragment thereof.

22. A substantially purified nucleic acid molecule comprising a nucleic acid sequence that shares between 100% and 90% sequence identity with a nucleic acid sequence selected from the group consisting of SEQ ID NO: 1 through SEQ ID NO: 18718, a complement thereof or a fragment of either.

23. The substantially purified nucleic acid molecule of claim 22, wherein said nucleic acid sequence shares between 100% and 95% sequence identity with a nucleic acid sequence selected from the group consisting of SEQ ID NO: 1 through SEQ ID NO: 18718, a complement thereof or a fragment of either.

24. The substantially purified nucleic acid molecule of claim 23, wherein said nucleic acid sequence shares between 100% and 98% sequence identity with a nucleic acid sequence selected from the group consisting of SEQ ID NO: 1 through SEQ ID NO: 18718, a complement thereof or a fragment of either.

25. The substantially purified nucleic acid molecule of claim 24, wherein said nucleic acid sequence shares between 100% and 99% sequence identity with a nucleic acid sequence selected from the group consisting of SEQ ID NO: 1 through SEQ ID NO: 18718, a complement thereof or a fragment of either.

26. The substantially purified nucleic acid molecule of claim 25, wherein said nucleic acid sequence shares 100% sequence identity with a nucleic acid sequence selected from the group consisting of SEQ ID NO: 1 through SEQ ID NO: 18718, a complement thereof or a fragment of either.

27. A substantially purified polypeptide, wherein said polypeptide is encoded by a nucleic acid molecule comprising a nucleic acid sequence, wherein said nucleic acid sequence:
(a) hybridizes, under stringent conditions to a nucleic acid sequence selected from the group consisting of SEQ ID NO: 1 through SEQ ID NO: 18718, a complement thereof or a fragment of either, or
(b) exhibits an 90% or greater identity to a nucleic acid sequence selected from the group consisting of SEQ ID NO: 1 through SEQ ID NO: 18718, a complement thereof or a fragment of either.

28. A transformed plant having a nucleic acid molecule which comprises:
(a) an exogenous promoter region which functions in a plant cell to cause the production of an mRNA molecule; which is linked to;
(b) a structural nucleic acid molecule, wherein said structural nucleic acid molecule comprises a nucleic acid sequence, wherein said nucleic acid sequence
(i) hybridizes under stringent conditions to a nucleic acid sequence selected from the group consisting of SEQ ID NO: 1 through SEQ ID NO: 18718, a complement thereof or a fragment of either; or
(ii) exhibits an 90% or greater identity to a nucleic acid sequence selected from the group consisting of SEQ ID NO: 1 through SEQ ID NO: 18718, a complement thereof or a fragment of either,
which is linked to
(c) a 3′ non-translated sequence that functions in said plant cell to cause the termination of transcription and the addition of polyadenylated ribonucleotides to said 3′ end of said mRNA molecule.

29. The transformed plant according to claim 28, wherein said nucleic acid sequence is a complement of a nucleic acid sequence selected from the group consisting of SEQ ID NO: 1 through SEQ ID NO: 18718 or a fragment thereof.

30. The transformed plant according to claim 28, wherein said plant is selected from the group consisting of soybean, maize, cotton and wheat.

31. A transformed seed comprising a transformed plant cell comprising a nucleic acid molecule which comprises:
(a) an exogenous promoter region which functions in said plant cell to cause the production of an mRNA molecule; which is linked to;
(b) a structural nucleic acid molecule, wherein said structural nucleic acid molecule comprises a nucleic acid sequence, wherein said nucleic acid sequence
(i) hybridizes under stringent conditions to a nucleic acid sequence selected from the group consisting of SEQ ID NO: 1 through SEQ ID NO: 18718, a complement thereof or a fragment of either; or
(ii) exhibits an 90% or greater identity to a nucleic acid sequence selected from the group consisting of SEQ ID NO: 1 through SEQ ID NO: 18718, a complement thereof or a fragment of either,
which is linked to
(c) a 3′ non-translated sequence that functions in said plant cell to cause the termination of transcription and the addition of polyadenylated ribonucleotides to said 3′ end of said mRNA molecule.

32. The transformed seed according to claim 31, wherein said nucleic acid sequence is a complement of a nucleic acid sequence selected from the group consisting of SEQ ID NO: 1 through SEQ ID NO: 18718 or a fragment thereof.

33. The transformed seed according to claim 31, wherein said seed is selected from the group consisting of soybean, maize, cotton and wheat seed.

34. The transformed seed according to claim 31, wherein said exogenous promoter region functions in a seed cell.

35. The transformed seed according to claim 31, wherein said exogenous promoter region functions in a leaf cell.

36. A method of producing a genetically transformed plant, comprising the steps of:
(a) inserting into the genome of a plant cell a recombinant, double-stranded DNA molecule comprising
(i) a promoter which functions in plant cells to cause the production of an RNA sequence,
(ii) a structural nucleic acid molecule, wherein said structural nucleic acid molecule comprises a nucleic acid sequence, wherein said nucleic acid sequence
(A) hybridizes under stringent conditions to a nucleic acid sequence selected from the group consisting of SEQ ID NO: 1 through SEQ ID NO: 18718, a complement thereof or a fragment of either; or
(B) exhibits an 90% or greater identity to a nucleic acid sequence selected from the group consisting of SEQ ID NO: 1 through SEQ ID NO: 18718, a complement thereof or a fragment of either,
which is linked to
(iii) a 3′ non-translated sequence which functions in plant cells to cause the addition of polyadenylated nucleotides to the 3′ end of RNA sequence,
(b) obtaining a transformed plant cell with said structural nucleic acid molecule that encodes one or more proteins, wherein said structural nucleic acid molecule is transcribed and results in expression of said protein(s); and
(c) regenerating from said transformed plant cell a genetically transformed plant.

37. A method for reducing expression of a protein in a plant cell comprising growing a transformed plant cell containing a nucleic acid molecule wherein the non-transcribed strand of said nucleic acid molecule encodes a protein or fragment thereof, and wherein the transcribed strand of said nucleic acid molecule is complementary to a nucleic acid molecule comprising a nucleic acid sequence selected from the group consisting of SEQ ID NO: 1 through SEQ ID NO: 18718, a complement thereof or a fragment of either, and whereby said transcribed strand reduces or depresses expression of said protein.

38. A method for increasing expression of a protein in a plant cell comprising growing a transformed plant cell containing a nucleic acid molecule that encodes a protein or fragment thereof, wherein said nucleic acid molecule comprises a nucleic acid sequence selected from the group consisting of SEQ ID NO: 1 through SEQ ID NO: 18718, a complement thereof or a fragment of either, and whereby said nucleic acid molecule increases expression of said protein.

39. A method of producing a plant containing reduced levels of a protein comprising:
(a) transforming a plant cell with a nucleic acid molecule comprising a nucleic acid sequence selected from the group consisting of SEQ ID NO: 1 through SEQ ID NO: 18718, a complement thereof or a fragment of either, wherein said nucleic acid molecule is transcribed and results in co-suppression of endogenous protein synthesis activity, and
(b) regenerating said plant comprising said plant cell and producing subsequent progeny from said plant.

40. A method of growing a transgenic plant comprising
(a) planting a transformed seed comprising a nucleic acid sequence selected from the group consisting of SEQ ID NO: 1 through SEQ ID NO: 18718, a complement thereof or a fragment of either, and
(b) growing a plant from said seed.

The application's sequence listing, which the Patent Office published only in electronic form, follows.

SEQUENCE LISTING (18718 sequences)

SEQ ID NO: 1 - DNA, 410 bp, Arabidopsis thaliana
  unsure at all n locations
  Clone ID: ARABL1-08-Q1-B1-E6
ctcgagttgatttcaaagggatcgtctttaatggaggtgatacacgcatggtctgctccaagatcactcagcaccactctcatgtactcctttgcccagagagatgacattgaagtgcttgatgagccattatacgctgcgttcctcaagtctacgggtgttgatangccttacaaagatgagcttctctctaagatggagtgtgatggagaaaaggtggtgaaggatatcatttatggtccaggaaagaagaaatatangttttgtaagcatatatcganacagcgacttcttggtttgccaantgancnaatgagtgacgggaaacactttatattgacacgcattcccctcaacatatngccttctttngnaaaaaatacaacnttcaacatttcaacaaattggna

SEQ ID NO: 2 - DNA, 417 bp, Arabidopsis thaliana
  unsure at all n locations
  Clone ID: ARABL1-08-Q1-B1-E9
tcgagcggagagaagagagacggtgatcggagagaaagagaggatgggaacgagacaagtatacgaagagaagcttcggcgtgggaatcttgattatgatccgactatgaatcctggtcttggttctgctcggtgtcctcgttgtctttctctcttaaaccctaattcagagaaaggagagtggacgataactccagttttacacgatgctgctgcagtggctggttctggtattggtggcttgcttagtgccgtccatgctttcaatacagggatcccctatcttcaaaatcggttttccgggtcaaagcggctttcctttcttgtgggggttccattgcttctagtatattcangtgtaagggctgcttttggaggttatgcactttcaaagtttgctcaacctgaacaagttac

SEQ ID NO: 3 - DNA, 428 bp, Arabidopsis thaliana
  unsure at all n locations
  Clone ID: ARABL1-08-Q1-B1-E4
ctccgaaggccagaattcanaaggagaaatcaatgggagaagaaggggcgaaagggcttcccacaaggcattcacaatcacatgaggaggaccaggaagagaatacatatgcggctaaagtgagcgagaaacaagacttctcggagagccagcaagaggaaaatgatggttgggaaactgtgggcaaaaagaaacctgcaaggcaatcacataaggtccagaaggagcaatggcaagattacaaacgcccagcaagtgaacaacactactcagacgaagttgaaacttatggaaacctagaaacctcacaactagagctctcaagtctctcanaagcctncaacaaactgtgggaactccanttaaancgccntgttcctggaaagggattatcaaatcgactgccggagattggaaaanggtccaat

SEQ ID NO: 4 - DNA, 415 bp, Arabidopsis thaliana
  unsure at all n locations
  Clone ID: ARABL1-08-Q1-B1-F12
tcgagctcttcttcaaatccagtagagagattcaagacgagtctcatcgaaagttcgaatctttcgtcatctgattagctttctcttagggtttatttcgatttcgatttagtgttctccatcaatggcgacacccatggttagttccgctggaggattactagcaatgctcaacgagcctcatcctgttttgaagcttcatgcgctctctaacctcaacaatttggttgaccaattctggcctgagatctccactagtgtccccatcattgagagtttatatgaagatgaagaattcgatctgcatcaaagacagcttgctgctttgctggtctctaaggntttcnantactgggcgaacctaaaggatccccnggtctaaggcccaagganccggtccctaatttgangttca

SEQ ID NO: 5 - DNA, 79 bp, Arabidopsis thaliana
  unsure at all n locations
  Clone ID: ARABL1-08-Q1-B1-F3
cgccaaagggtgggttttcctttcaaccaagttgagacngggcaacaactgaattggcccttcaacgcctgggccctga

SEQ ID NO: 6 - DNA, 406 bp, Arabidopsis thaliana
  unsure at all n locations
  Clone ID: ARABL1-08-Q1-B1-F6
tcgagtgtgaatcgaaatggtactgctggggaaagcatatatgccggaaaatttccagatgagtcaccgaaactaagacatgaggagactggtcttttatctatgtcgattgcanaccgtgacaagttcggatcanactttcatattaccttcaggccaaatcagcagcttgatagaaataatgttgttttcggaaagctaattcaagggaaagagatattgaaaaaaattgaacgtgtgggtgatgaggaangtaaacctactgtcagcgtgaagataatccgttgtgganantattctggagataanaagaaaagtgacggtaaaaaaatggaaagcacaagaagtctttaagagttagaanaanaaagaggngaanacnctcttcatcngaatctgaaactcc

SEQ ID NO: 7 - DNA, 261 bp, Arabidopsis thaliana
  Clone ID: ARABL1-08-Q1-B1-F7
gagtccgaatcttcgattggtttccgttaaaacctcggaaagcaaaatttgttgttgttctctgagctcgaacatggacgctcaaaaacaggaaaagcttgaataagaatgagactatgaacatggatctttgtgtgcccatgggtgagcgaagtaaagaaggagataaagagatactttgaagagttctttgttagataatttcttttatggacatgagatgagagtttgttttttttctttcaaaaaaaaaaaaaaaaa

SEQ ID NO: 8 - DNA, 424 bp, Arabidopsis thaliana
  unsure at all n locations
  Clone ID: ARABL1-08-Q1-B1-G10
ctcgagaatctagaagaagagaaagctacaaaaatctcaacatcgaggtaagagttttggctacagagcaaccatgctaacttgcgccttctcccaaaatcttatccactaatctcggtaaggaaagtgatgttggcaaaatggtgaagaaaggaagttggttttctgctatcaaaagggtttttactccacattccnnnnnnnnnnnnnnnnnnnnnnnnnnnnnnnnnnnnnnnnnnnnnnnnnnnnnnnnnnnnnnttttgggaagctaaggcatggcgagaccaattcatttcttcccatcttcagagagcctagtagtatcgaaaagatnttgggcgangctgaaaaagattacaatccttgtcctcaaggctcccnatcccngatngacaaaatcaatattaagcctctctcctccga

SEQ ID NO: 9 - DNA, 422 bp, Arabidopsis thaliana
  unsure at all n locations
  Clone ID: ARABL1-08-Q1-B1-G11
cgaggaccagaacgaatctccctgactttggcggcccatcggagtttagcgtgcgaagaagattcagagatgttgtcacattggctgatcgattggctgagacgtatagagggttctgcataccaccacggccagataagagcgtcgtagagagccaagtaatgcagaaacaagagttcgtggagcagagaagagttgcattggagaaatacttgcgcaggctaagtgcacaccctgttattaggaacagtgacgagttgaaagtgtttcttcaggtgcaagggaagttgccactaccaatgagtactgatgtggcctctcggatgttggatggggcggtgaagctcccaaaacagttgttcggtgaaaggcggacctcctgcaattnccgttnactgaagggtgggtcaacctgcaaaaag

SEQ ID NO: 10 - DNA, 434 bp, Arabidopsis thaliana
  unsure at all n locations
  Clone ID: ARABL1-08-Q1-B1-G4
gtaanctcggaattcggctcgaagcggacnatgattttaggcatctatggaagttggttgaggtcaaagatggcggtccttgttggattcaaatgatggaccgatcaaccccaaccttctcatatcaagcttggaggcgagatcctgagaatgggcctccccagtaccgtagcagaactgtgtttgaggatgccactcccganatggtcagggacttcttttgggatgatgagttccgttccaagtgggatgatatgcttttgtattcttctactctcgagcgttgcaangacacgggcactatggttgtgcaatgggtgcgaaagttcccttcttttgtancgacagggaatatattatangccgtcgtatatgggatgctgngccnagtcntttactgcattactaagggagtacaatacccgtctgtacct

SEQ ID NO: 11 - DNA, 424 bp, Arabidopsis thaliana
  unsure at all n locations
  Clone ID: ARABL1-08-Q1-B1-G7
tcgagccaaggtacacacagctgatttttgtgataagaagattgattgagatgggtactagagctcagcagattcctttacttgaaggtgagactgataattacgatggtgttactgtaaccatggtggaacctatggattctgaggtttttactgaaagtcttagggcttctctttcgcattggagagaagaggggaagaagggaatttggataaagctgcctcttggattggctaatcttgtggaggctgcagttagtgaaaggattttagatatcaccacgccggagcctgagtacttgatgccttgtatcttgggatctcctgaaaactcctgatacaatcccaagccaaatgcctcctcatgttgttaggtgctgggtgcctttggtcatcaacaaaaaattactaaaagangtcctcc

SEQ ID NO: 12 - DNA, 411 bp, Arabidopsis thaliana
  unsure at all n locations
  Clone ID: ARABL1-08-Q1-B1-G9
ctcgaggcaagtactggccttccactgtctaacaagcctagtgtagtaactggtccaatttctccgccgcagacaacaccattaacatctgctcctgttgcgggagtttctagttccattagccaagataagccaaaacctttgttggttactcctggtcaactgctgcagtctggatcttctgcagtctctttgtccccaccctcgacaaatgctgataaagatgttgaggtggttcaagtatcgtcatcagctgggttggaacaatctgttccagttacatccgaagcccaacctccaatactgccattgccttcctctgcaagaccaactcagaagccaaacgggcattctttcccaaatcatnatgggtaaaagggacttggaaaaggacaaggaaaaggancaggg

SEQ ID NO: 13 - DNA, 534 bp, Arabidopsis thaliana
  unsure at all n locations
  Clone ID: ARABL1-08-Q1-B1-H1
aaatncgggtccgaaggggggaacaacgaanggtnagaagaacaatccccgaagggtaagcccaatggganaattngaaaattttgggccttggttccttnaaaaaagtnccggattcctttnaaaagtccgggaaatttgggaaattgggcaatcctggtccaataagaagaanggaatcgctaatcctatcaagttgaagggctattcccaagaactttctcgaagttatctaaaagaagcaacctcctggttgccaaaatttgttcttcgtgtctccaaacgttgggccccaatccgtaagantcctaacaatcctcctccctggtttaattgaagaaagctggctggcgttacaaactggatgganttggtgtgttgggcaatggttgaactccaagttttcccaacgggtccgaattcaaccaanttgaatggtttgaatttccttggattctcnaaaaatcctgncccctggtgaaatnggtnggttnaaaccttccnccctggttttgggnccaaacccgaatgcaa

SEQ ID NO: 14 - DNA, 421 bp, Arabidopsis thaliana
  unsure at all n locations
  Clone ID: ARABL1-08-Q1-B1-H11
cgagggcattcgtcagcgtaggaaggcccaccgagcgaagctctttcttttttttggccgtgccgaaaatttgatcgtatgttagttagagaggttggcgaactactacgatcaatagattccccatctatatccaatcccaacggggaatagaagcgagtcgcttccggctggcttatagtcctagtcttttagcttatgtaatggtcggccttcctacacgcacgcgcccgccggaatgcctccttgttttagttttggacgaagccaagccgatacatacaatatacgataggcgaaggaaagacccccatttattgaatagcgcctgggcaagtttgatngangattggagaagtacttaataactccaactgaaagggaaaaattgggaaagaaaaaggcttgggatggatttaag

SEQ ID NO: 15 - DNA, 428 bp, Arabidopsis thaliana
  unsure at all n locations
  Clone ID: ARABL1-08-Q1-B1-H3
ctcgagaaatcnaccaaaaacaatcggcgagaaaaagggggaatcagtttcttgcaagtttcaacaaggacgatcagaagaaatcttagagaaatcggaaaattctcttactcgggttttgcatcggtgaatatgaattgcgaagtttgtcagctaaaggaactggaagtggaatccttcgagatacgcgaagttttgcgctgcattctacatacgattgtctttcatcgtgcgcttggtcttatccgccctaaagatatttgatttgggagcctttttgagattacttatggtcaatgcgggtgaaatttgaagtgggagaaagaaaatccgatgaaaagattgagcaattcaattaaactgggattgaagaaacaaccaaacaaaaagaatcaaattgtccaaccgtccaagaagtcaaaaagcaa

SEQ ID NO: 16 - DNA, 410 bp, Arabidopsis thaliana
  unsure at all n locations
  Clone ID: ARABL1-08-Q1-B1-H5
ctcgagcttagctacaaaagaacagtcgccggcaaaagtctcagcctttttcctctccgccgttcacagttcaccggcatttctctcttctttctttttctccgactagatttccttgtctctttggtttcttggcgatgggagacgagaagccggtgattgttatggccaatcgagaaagagatcgagagcttctgattcccgtcgctgattccggcgacaaagacgacggnnnnnnnnnnnnnnnnnnnnnnnnnnnnnnnnnnnnnnnnnnnnngcatcaatccagccacgagactttaagcttgttcattaggggctgggcgtcaaagaagttcatgacaggctgtgttatcctacttcctaattgcaattacttccaatataacaaggggggttaatcacttggc

SEQ ID NO: 17 - DNA, 81 bp, Arabidopsis thaliana
  unsure at all n locations
  Clone ID: ARABL1-08-Q1-B1-H7
gngtattgggcggcaatgggtggttttccntttaaccanttgannacgggcnacaagtngattggccctcaaccggcctgg

SEQ ID NO: 18 - DNA, 409 bp, Arabidopsis thaliana
  unsure at all n locations
  Clone ID: ARABL1-08-Q1-B1-B1
ctcgaggtgagagttaggatgaaagctgttggtatttgtggaagtgatgttcattaccttaagaccatgagatgtgcggattttgtggtgaaagagccgatggtgattggacatgaatgtgctgggatcattgaagaagtaggtgaagaagtgaaacatttagtggttggtgaccgtgtagctcttgaacctgggattagttgttggagatgcaatctctgcagggaaggacgatacaacctttgtccagaaatgaagttctttgcaactccaccggttcatggctctttagctaaccaagtggtacaccctgcggacctatgcttcaaattgcctgagaatgtgagtttggaggaaggancaatgtgtgaaccacttagtgttggtgtccatgcttgtcgccganctg

SEQ ID NO: 19 - DNA, 411 bp, Arabidopsis thaliana
  Clone ID: ARABL1-08-Q1-B1-B6
ctcgagcttaaaatagaaccaaagagtaaacacttaagcaaaacaattttgtcctactcttaggttatctccaatgaagaacttaaagatggttttcttcaagatcctctttatctctttaatggcaggattagccatgaaaggatctaagatcaacgtagaagatctccaaaagttctccctccaccatacacagaacaacctccaaaccataagccttctattgtttcttgtcgtttttgtgtggatcctctacatgttaacccgacctaaacccgtttaccttgttgatttctcctgctatcttccaccgtcgcatctcaaggtcagtatccaaaccctaatgggacacgcaagacgtgcaagagaagcaggcatgtgttggaagaacaaagagagcgaccatttagt

SEQ ID NO: 20 - DNA, 414 bp, Arabidopsis thaliana
  Clone ID: ARABL1-08-Q1-B1-B9
cgagcgtatctcgcggggaagaagaagaaaagactgctttttctcaaaaccctaaaatctctctctccggatccatttctcgaacatggcgtctattgttcaaccatcgcctactttcccggcgctaaatctccggcgttcttctctgattcgtccgccttcttccgttcgatttcctcttaagtgtaacgcggcggatccgtacaagttcgacggcggaaactctgccggtttccatctgcttactggcgacaccgttccggctagcttttcgaggacacgtttggaagattcgatttatcagaacaccacacgacttcgtatcttttccggcactgctaatcctattttggctcaggagatttcttgctatttgggtctggaccttggggaaaatcaagattaaacgctttg

SEQ ID NO: 21 - DNA, 405 bp, Arabidopsis thaliana
  unsure at all n locations
  Clone ID: ARABL1-08-Q1-B1-C1
agaaactgatttcttggnnnnnnnnnnnnnnnnnnnnnnnnnnnnnnnnnnnnnnnnnnnnnnnnnnnnnnnnnnnnnnnnnnnnnnnnnnnnnnnnnnnnnnnnnnnnnnnnnattccctcctctcagaaatctacacagaggttttttattttataaacctctttttcgattttcttgaaaacaaaaaatcctgttctttactttttttacaagaacaagggaaaaaaatttctttttattagaaatgacaacttctatggatttttacagtaacaaaacgtttcaacaatctgatccattcggtggtgaattaatggaagcgcttttaccttttatcaaaagcccttccaacgattcatccgcgtttgcgttctctctaaccgctccaatttcatacgggtc

SEQ ID NO: 22 - DNA, 391 bp, Arabidopsis thaliana
  unsure at all n locations
  Clone ID: ARABL1-08-Q1-B1-A6
ctcgagctcgagccgaatcggctcgaggagcacatangatctcgttgancanatgcattacctctacgttagcgtcgtgaaagctcgagatcttcctgtcatggatgtttccggtancttagatccttacgttgaagtgaagctagggaactacanaggtttaacgangcatttggagaagaattcgaatccgatctggaaacagatctttgccttctctaaaganagattanaatcgantcttcttgaagtcactgtgaaagataaagatcntttgactaaaagacgaattttcgttgggaanagttcataatgatnctcactgaagttccctccttaanaggttcctccaagatantccctttgggctcccacaagtggtaanaaggtt

SEQ ID NO: 23 - DNA, 411 bp, Arabidopsis thaliana
  unsure at all n locations
  Clone ID: ARABL1-08-Q1-B1-C2
agctcaaacctttcaggttcgaantgatgaaaaaatatttggcagtttggatttgacggtctctattgctagaagaactacagatgaagtgaccaccaagaagcccttcatacatcactatcatggtggggcagtggcggataatatcatcttcaaaggtgaattgcctgattggccctcagatgatgttttgaaagacagagaacgtttttacgtgattatgaatgaatcagagtggcgagctactgcttggattctctggtattgggaactgtacttgtgcacatgataagttcatcactaatactgatctgtcccggttgaataatgagaaagtggcgatagaaactaataatggagaagcnctgttgtatgaaagactcnaaggcaaaagtgcaaatgtctacatat

SEQ ID NO: 24 - DNA, 406 bp, Arabidopsis thaliana
  unsure at all n locations
  Clone ID: ARABL1-08-Q1-B1-C5
ctcgagctttaacatcgtctcttccataaaaacaaacctctttcaaacagtggaaacactttttatcttttagttccccaaagtttttgaaaaggtcaaaatgtcaatggagaagccacctttggcctccggtttagctcgaacacgatcggagcagctatatgagacggttgcagcagacataaggtcacctcacggctccatggacgctaatggtgtgcctgcgacggctccagcagccgttggaggaggaggaacgttgtcgaggaaatcaagccggaggttgatggggatgtctccggggaggagtagcggcgccggaacacacataaggaagtctaggagcgctcagcttaagctcgagctanangaatgagtagcggcgcaactttgagccgtgcgtcta

SEQ ID NO: 25 - DNA, 393 bp, Arabidopsis thaliana
  unsure at all n locations
  Clone ID: ARABL1-08-Q1-B1-C6
ctcgagatcaaacatcacatttcttcctcttttctctcttttttctcagtcttcaaagagtttcttagtaacccaaatcaatggcaggtatcaangttttcggacacccagcttccattgccacnaggagagtcctcatcgccctccacgagaaaaacctcgactttgagctcgttcatgtcgaacncaaagacggtgagcacaagaaggagcctttcctctcccgcnacccttttggtcaggttccagcctttgaagatggagacctcaagctcttcgaatcaagagcgattactcantacataagctcacngatntgaaaaccanggaaccnanccttctcnggnccgacnccaagacatatctcattcgcatcatggcattnggaatcaa

SEQ ID NO: 26 - DNA, 409 bp, Arabidopsis thaliana
  unsure at all n locations
  Clone ID: ARABL1-08-Q1-B1-C8
cgaggcaaaacacttacttagaaagtccagaaacatccattaacacatatggctaaagacgtggaaggacctgatggatttcagacgagagattacgaagatcctccgccaacaccgtttttcgacgcagaggagcttaccaagtggtctttatacagagcagtcatcgccgagttcgtagccactctcctcttcttgtacgtcaccgttttaactgtcattggttacaagattcagtccgacacanaagccggtggagttgactgcggcggcgtcggaatccttggcatcgcgtgggcttttggtggcatgatcttcatccttgtctactgcaccgccggtatctcaaggtggcacataancctgcggtnaactttgggttggtcctaaccccggaaggtaccccgaa

SEQ ID NO: 27 - DNA, 412 bp, Arabidopsis thaliana
  unsure at all n locations
  Clone ID: ARABL1-08-Q1-B1-D1
gagattttgcagagatgtcgagacgagcaatggtgataaagatgccaatacttatgatactgatttcatcaatggtgatgacgatggtcgagtcttcgagatcagttaataatggtcatgacgattctgagatcttacgaagacacttgctcactaatggcctcggagtcactcctcccatggggtggaatagctggaaccattttagctgcaacatagatgaaaaaatgatcaaagaaactgctgatgctttggttaccactggcctctctaagcttggctacaactatgttaacatcgatgattgctgggctgaaatttctcgtgacagcaagggaagtctggtgccaaagaagtcaactttcccttctggaattaaagccggttgccggattangttcacaagtaaaag

SEQ ID NO: 28 - DNA, 407 bp, Arabidopsis thaliana
  unsure at all n locations
  Clone ID: ARABL1-08-Q1-B1-D10
tcgaggtttagcttcatctgaaactgcgaatcccgcttatggaaccgatggatccaagaaaagtgagtgattatacaaaccatgatggtggtttttgatcgccggtattacactttgtttggtttgcagctatcagattctcaacatcatggcttattttggacgagttaggcagtatcttaatagtaacaaagcattagtttttgtacttcttaagttaaaagcttagaacaaaataacactgttgttttgttctaagcttttaacttaagaagtacaaaacaacagtgttattttctataccaagacacaaaaactgtgtcgttgtaataacacttaccataacattttctttcagtgtatgtttaaagccgtttataagggttaaaaaaaaaaacnaaaaaaag

SEQ ID NO: 29 - DNA, 431 bp, Arabidopsis thaliana
  unsure at all n locations
  Clone ID: ARABL1-08-Q1-B1-D2
ctcgagccaaattccaccgtctcttatatattcttnnnnnnnnnnnnnnnnnnnnnnnnnnnnnnnnnnnnnnnnnnnnnnnnnnnnnnnnnnnnnnnnnnnnnnnnnnnnnttcttgccatggccacacatagtctctccttcttcttcagagttcttctcctcctctttcttactctctcagagagaattaaagggcaaggtgtgggaatcaactacggccaaatagcaaacaacctcccatctccggcaagagtcgccgtgctccttcgatcactaaaacatcacaaagaagtaaaactccaacgaagcagattcaaacgtcctcctctcctcctcaaaactcacaaagttagatttcaatgatnngtttaagnaaacgaagtatccttcaaaacatgtnaacagattcaaccaaagctcaaggantg

SEQ ID NO: 30 - DNA, 431 bp, Arabidopsis thaliana
  unsure at all n locations
  Clone ID: ARABL1-08-Q1-B1-D4
cgaaggataggtgaacgtcaaacatctgtggagattccaaccaacaataaggtctcgcttcctccttccaccatgtcaaactcttcaacttttcctccaatctcagaggggctaatgcctatagatctcccagaacagcaaaatgagttcaaggtggcctatcctgtttccccagcattaccgagtaagaattatgagaattcagaagactctgtcagctggctaagtgtgccattcctcaacttctaccgttccattaacaagaantttcctgcttaactctcagaaagccttgatacanttgggcgaagcatagccccaacctaaatttcancctttaagagaaggcagaacntcaanggtgggaccaangntacttctgccccgtaaggcttaaatganattggttgttnccggttaatgaagaatga

SEQ ID NO: 31 - DNA, 412 bp, Arabidopsis thaliana
  unsure at all n locations
  Clone ID: ARABL1-08-Q1-B1-E1
cgagcaagggagccgtcacacctgttaaaaaccagggtatgtgtggttcatgctggtcatttagtgcgataggagctcttgaaggagcacattttctagccactaaagagcttgttagcctcagtgagcagcagctcgtagattgtgaccatgagtgtgatccagcacaagccaattcatgtgattctggttgcagtggaggactaatgaacaacgcttttgagtacgctcttaaagctggtggtctaatgaaggaagaggactatccttatacaggacgtgaccataccgcntgtaagttcgacaagagcaagattgttgcnantgtgtcaaacttcagcgttgtcncctccngatgaagaacaaatcgctgctaatccaatccaacatggacctccaactattgctatca

SEQ ID NO: 32 - DNA, 382 bp, Arabidopsis thaliana
  unsure at all n locations
  Clone ID: ARABL1-08-Q1-B1-E10
tcgagagcgaaatctcggatttgtgatcttcttctgggctctggtggttgcagtagtagccacggccatcgagcatcgtcgcaatgagaggactaaaggcgtcaatggtcttgacaagatcatcatccgcgaccgtcgtggccgatctgctgaggtttacttgtatggaggtcaagtcagttcttggaaaaatgagaatggagaggagttacttgttatgagtagcaaggctatattccagcctccaacaccgattcgtggaggaattccagtattgtttccgcaatacagtaacaccggtccacttccctcacatggatttgtaagacagaggttctgggangtttagactaaancaactcctttgccaacaatttccaaa

SEQ ID NO: 33 - DNA, 416 bp, Arabidopsis thaliana
  unsure at all n locations
  Clone ID: ARABL1-08-Q1-B1-E3
tcgagctttggttttgattggcacgatccaaagacacacattttgtcaaatcattttcgacgactgttattaataattaattcgttaatgacgcaccgttagtcaactccgcttcgtattaattactcctccgatctctttcttattcttctccggcgacacttcccttgcttctccctcttaggactctctctacgaatctgtaagcttcaaattcttacgccacactccgagattcgcttctgattattgtatgaatttttgagctccaagggattcactgccatgtatttaatgctggctaaagcttgaaagggaagtaatgggatcaacaataaagttccttgccttgtnatttaacctgatttgagaataaacaaatgggaaaagcatcaggctgcctccggttctcctgg

SEQ ID NO: 34 - DNA, 454 bp, Arabidopsis thaliana
  unsure at all n locations
  Clone ID: ARABL1-06-Q1-B1-A6
nacccacgcgtacataaactcggaattcggctcgagccgggattgaaggagtttaaaatcttcaacaacaagttaaccggagaaatacctgcagagattggagttcattcaaagctggagagattcgaagtttcggagaatcagttaaccggaaagttaccggaaaatttgtgcaaaggtggtaaacttcaaggagtggttgtgtactcaaacaatcttaccggagaaatccctgagtcgctcggagattgtggaacgctcttgactgttcagttacagaacaatgacttctccggcaagtttccttctcggatctgggaatgcttcaagtatgtataagtctacangtgagtaacaactcattcaccgggagagttaccgggagaatgttgcctgggaataagtcnaaggatcgangattgataacaatcgattttccggtgagattccgaan

SEQ ID NO: 35 - DNA, 455 bp, Arabidopsis thaliana
  unsure at all n locations
  Clone ID: ARABL1-06-Q1-B1-B1
ccgacncgtacgtaaactcaagaattcggctcgaggccaaaacgtcaagatgctaacaacccttgtagtctaaccactcccaagatttaagaattttcttacttttgttctaagttttgttgagaaaaagatgcatccgatcttcgatgccatccttcaaaatgaccttccagcttttcttggtttggtggaagcgagagaatcttccctggaggagagaagcgaggaacagaacaccaacaacacggttttgcacgtagctgcaaagctcggtcaccgagaactggtcgccaagattattgagctccgaccttcccttctctcttcccgtaacgcgtacggagacacacctttgcatcttgctgctcttcttgggagacgtaaacatagttatgcagatgttagacactggattggaactatattccgcacgcaataacaagaaccaaacacct

SEQ ID NO: 36 - DNA, 489 bp, Arabidopsis thaliana
  unsure at all n locations
  Clone ID: ARABL1-06-Q1-B1-B2
atgatcttntggaggtcagaagagaggagncgtcgngncgaccccgtacgtacaactaaagcattcggctcgagtggaagtgtattccgatgagattagaattggttcaagaacagattanagccacggtgaatgagttaaagacaatgcctaatggaggatgatgcataaggaaagactacaatgggttctttaagttatgagaaaatgatgaagaaagattatgatggtgaggtatagtattagcaaaagtaataatcttaatgaaaatttctgatggtgatgaaatcttttttagggttttagtatttttttttcttgattgaatctttttttaattttgtcgattaggagtgaataacctttgttcttagctgataaattatagtttttggtaaagttcaaaannaaaaaaaaactcttttgtgccaattaanaangtttttttggtgtgangcatataaaaatngatattacacaatccaatgg

SEQ ID NO: 37 - DNA, 461 bp, Arabidopsis thaliana
  unsure at all n locations
  Clone ID: ARABL1-06-Q1-B1-B3
acncgtacgtaaactcaagaattcggctcgagatcttcagaaggagtccacactccacttggtcttgcgtctgcgtggaggtatgcagatcttcgtgaagactctcaccggaaagaccatcacnttggaggtggagagttctgacaccattgataacgtgaaagccaagatccaggacaaagagggtatcccaccggaccagcagagattgatcttcgccggaaagcaacttgaagatggaagaactttggctgactacaacattcagaaggagtccacacttcacttggtcttgcgtctgcgtggaggtatgcagatcttcgtgaagactctcaccggaaagactatcactttggaggtagagagctctgacancaattgacaacgttgaaggccaaagattcaaggataanggaaaggaatccctccgggaccaagcanaaggttgatcttttgcccgg

SEQ ID NO: 38 - DNA, 390 bp, Arabidopsis thaliana
  unsure at all n locations
  Clone ID: ARABL1-06-Q1-B1-C2
ctcgagcgacgacgacgacggagatagccgtaatcttagacataataataataacaattcgagtgaccaaattgagataattacaacagaccaaacagatgataaaacaaaaccaatcttctttgatttcatgagaaaagaaagaacaacagatttgaaccttttgccgagctctccttcttccgatcatgcttcaagtggagtcacgacggagatcttctcttcttccgatgaagagaccagtagttgcaatagtttcagatgaaatctttaatttaattttaatgttgactatcttaataagttattatagttttatattaatacgactctccttcctttttaatccaatttttacttgaaaacgaaaaanannaaaaaaaaaaaggg

SEQ ID NO: 39 - DNA, 461 bp, Arabidopsis thaliana
  unsure at all n locations
  Clone ID: ARABL1-06-Q1-B1-A4
gtcggaccgacncgtacgtaaactcaagaattcggctcgagctgattaatgcggtggcggcggcgaggattttatccggaatcggacaatctaacggtaataacggaggagaagcgattccgtttggatcgtttgagtggatcacttacgccggaatatcttgtttcctcgtactcttcgccgggattatgtctggtcttactttgggacttatgtctcttggtcttgtcgagcttgagattcttcaacgtagtggtactcctaatgagaagaaacaagccgctgcgatttttccggttgttcagaaacagcatcagcttttaatgacactgcttctgtgtaatgctatggctatggaggggcttccctataatatttgggataagttaatcantgaaatacgttgcgaataancctttctgtcacattcgttcttgctttccggtgaaggttattcccca

SEQ ID NO: 40 - DNA, 470 bp, Arabidopsis thaliana
  unsure at all n locations
  Clone ID: ARABL1-06-Q1-B1-C7
tatagaaactgntgacgtccnacccacgcgtacataaactcggaattcggctcgagatccaaagaacctggtaccgagagtgctgatgtgtctttacaccaattagctgatatccagcccgggccatccattttggttgatcaaatggatactgaaaaatccaaagaacctggtaccgagagtgctgatgtgtctttacaccaattagctgatatccagcccgggccatccattttggttgatcaaatggatactgaagaattcaaaaatcctgatgtgtctttacaccaattagctgatattgagccctcactgtctatttcagctgtgcaaaagaatattgaggataaggatcaaagtcacgttgaaactgctgggatctgagttagttgatgtctctgccgaatgttcaacagaacctcaagttcaattaccgccatcttcagagccagtgggaagatatgcacgtt

SEQ ID NO: 41 - DNA, 423 bp, Arabidopsis thaliana
  unsure at all n locations
  Clone ID: ARABL1-06-Q1-B1-D2
ctcgagtccttctatcttcttctccactttaaaaaaaaaaaatatccgtctcactctctcgccgccggtaacatttcccggcgacaaaacttctctanncncaccattcctccatcgtaatctctaaattcttctccattctcttcttcctcccgatcatctcgagctcttcgtgagagattatgtgattatgtaatcgttgttgctgtagaagacgatctctaacaactgattccttcatcatcaccttcgctagatttgtaattttcagagcttgagatgttggatcttaacctcaacgctgattctcccgagtcgactcagtacggnggtgactcatacttagatngggaagacatcagacaaatccggccgggaatcnaattggaanaatcccggtaaatcgaagtcgtcangttaaca

SEQ ID NO: 42 - DNA, 422 bp, Arabidopsis thaliana
  unsure at all n locations
  Clone ID: ARABL1-06-Q1-B1-D4
ctcgagggaaatgatcgaaagagggctatctccaaggagaaggcctgagttggtagaaaagtccttggacgaaacgcttgtctgtagagaatagataactagatatgaagaaactctttggttatgtgttcaaaacagacatgaagcaatagagaagcgtccttttggatggagaaatctccccaaggtatatcatctttgccataaagtggctttgtttcaactcaaaaccgaggagaaaacactgaggttcattgagaaatctggttgagttgtgtgtcttaagccaaattccgaagatttggttttgaaagatggtttgtcccctcctaaaagtgttctactacatatacgtnccaatttgtaantcactctccaacttaanttttttttggtggttgttccactccggtgacaaccac

SEQ ID NO: 43 - DNA, 459 bp, Arabidopsis thaliana
  unsure at all n locations
  Clone ID: ARABL1-06-Q1-B1-D8
tgacgtcngacccacgcgtacntaaactcggaattcggctcgagaaaaaaaaaaattaactcgttaattttttttgaatattttcgtttttttaccgggactcgtctttgtcacattccctttctttgttttncaaaangatgataaaccctttcaatttttttatttcaaattgaacttcgtacttgttttctctatattgatttctattgtttatttaaggttctttagaaactctttttgtaaagaatcgaagttttttacgatacttcatcaagatgattgtacaaggaaagtanactactaggttttataaaggaaagnctggaaaaagaaggataaaggaactttttttttattggatcgggaatcctcattaangtaatcgggtgtggataaaaagatctccctaaggttatacnagntaaattcttggangaatgaatccnattttaaaag

SEQ ID NO: 44 - DNA, 443 bp, Arabidopsis thaliana
  unsure at all n locations
  Clone ID: ARABL1-06-Q1-B1-E1
tacgtaaactcnagaattcggctcgagatttttcccgtgaatagccgtctctagtgaatcgagtttttgtccatcatcttgtggctccgttagccaagatagctagcttctgtctggcaaatctagcttctataagcagttttggtgttagtcacttaaaatcaatctatcgacttgtatctctggaagctcgatcttgcaaatcgcntaaagtaaagagaanaagagttgtttccagcaaatttggattgccatanccgtctctagttgtttttgaatctggtgaaaaacaaagtaaatcgatgtttaagaaatttacagcatcgattgaggttcaccaagaatcggaatcgttgacgacaaagattaaccgggatgtttaacgcatctnctcatacntgtccgtttttaatacatttttggagttgtangcctgaacctgt

SEQ ID NO: 45 - DNA, 424 bp, Arabidopsis thaliana
  Clone ID: ARABL1-06-Q1-B1-E4
ctcgagggctgatattcaacctgcctccaccgtcgctatttttggacttggcgctgttggacttgccgtggctgaaggtgcaagagccagaggagcctctaaaatcattgggatcgacatcaaccctgacaagttccaactaggcagagaagcagggattagtgaattcataaatccaaaggagagtgacaaggcagttcatgagagagtaatggagataacagagggaggagtggagtacagcttcgagtgtgcaggaagtatagaagcacttagagaagcctttctgtctacaaactcaggagtgggagtgactgtcatgctgggcgttcacgcaagcccacagcttctccctatccatcccatggagctcttccaaaggcagattcatcaaccgcctcctggtttccggagggcttcaaaa

SEQ ID NO: 46 - DNA, 471 bp, Arabidopsis thaliana
  unsure at all n locations
  Clone ID: ARABL1-06-Q1-B1-E5
ctatagacaacatntgacgtccgacccacgcgtacntaaactcggaattcggctcgagcaccgaccgggatgaatccgtcacttctttaactaatacgaactccagttttgagtttcctataatgggtggttccgatttactacctggtttctcaaatgctttcgctcggtgggtattctccgcaagagcatggtaaagagggtctggagaaagaaatgagccttgcacaggaaggtaacggtggttacttggcaggtacggcagggttgaacagagtcgtaataacaggaaaagcacagaataacagttacatcttgtaaatatccgactcatacctttgtaaagatccacgnnnnnnnnnnnnnnnnnnnnnnnnnnnnnnnnnnnnnnnnnnaagcaaaatagatttcaatcctggtttttcaccancanccacaaagtttgattctgtttttccgtttttggtaaan

SEQ ID NO: 47 - DNA, 473 bp, Arabidopsis thaliana
  unsure at all n locations
  Clone ID: ARABL1-06-Q1-B1-E7
acgtccnacccacgcgtacntaaactcggaattcggctcgaggaaaagtgggtctccaagaaaattaccctaaattcacaaagattcatacttttctccacctccaatggattcnnnnnnnnnnnnnnnnnnnnnnnnnnnnnnnnnnnnnnnnnnnnnnnnnnnnnnnnnnnnnnnnnnnnnnnnnnnnnnnnnnnnnnnnnnnnnnncagggatgttaatgagtcaccacaattcctacaatcgaaaccctaacgccgccgccgctgttttaatgggtcacaacacctccacatctcaagctatgcatcaaagattaccttttgggtggttctatgtcaccgcatcaagcntcaacaacatcaagtatcatcatcctcaagcctcagcaacaagatagatnaagnagactccttggaatcctcttggatttgatgggattcgcccttcttctggttgccggccantcaaaa

SEQ ID NO: 48 - DNA, 419 bp, Arabidopsis thaliana
  unsure at all n locations
  Clone ID: ARABL1-06-Q1-B1-F1
ctcgagctccataattgcttcgatttctctgcaaagacacaacacaaaaagtgctttttttaatcagatattttctgggcttcactttaactctcttcgtgcttggttttccgatcttagtcgttactaattgagtcggagactgttcatttcctgattctgaagaaagttttggagaaggagaagatgtcaactctgcgagtgagctagggtttagtgtgttttccgatttttgagctcttggggattgttgttttctcttaaagagtcgattttgaatggcggtggagtatgtatgttgcagcccaaacttctttatacatatanctgtgaatgtgttcctgtcctgttcgctggactcatgtctggcttaacattgggtctaaagtccttgagtcnccgttgatcttgaagttccc

SEQ ID NO: 49 - DNA, 430 bp, Arabidopsis thaliana
  unsure at all n locations
  Clone ID: ARABL1-05-Q1-B1-D5
ctcgagaaagaaacagaacaacaatggcgaaattaaatcgttccaacattggtctctcactgttactatctatgttcctcgcaaactttatcaccgatcttgaagcttcttctcatcaagatctcaaccaaccgtaccggaccggttatcactttcaacctctcaaaaattggatgaacgatcctaatggaccaatgatatacaaaggaatataccatcttttttaccaatataacccatacggtgccgtttgggatgtgagaatcgtgtggggacactccacgtcagttgacttagtcaactggatttcacaacctccagctttaatccatctcaagccgtcagatatcaacggttgttggtcaggctcccgtcacgantctaccaaacggnaaaactgtgattctccacaacgggcattgaccaaaac

SEQ ID NO: 50 - DNA, 497 bp, Arabidopsis thaliana
  unsure at all n locations
  Clone ID: ARABL1-05-Q1-B1-D6
gattnttcttggtgggacatagacacacagtnnacgncccngncacgcgtacgnaagancggaattcggctcgagcgccactaaggatctccacgatgccattgcatctggcaactaccccgagtggaaacttttcatccagaccatggatcctgcagatgaggataagtttgactttgacccacttgatgtgaccaagatctggcctgaggatattttgcctctgcaaccggttggtcgcttggttctgaacaggaccattgacaatttcttcaatgaaactgagcagcttgcgttcaacccgggtcttgtggttcctggaatctactactcagacgacaagctgctccagtgtangatctttgcttatggtgacactcagagacatcgccttggaccganttaattgcagcctccaatcaatgctcccaaatgtgctcaacaacaaacaatcaccatggaaggtttaatgaacttcaagccacaagaggatgang

SEQ ID NO: 51 - DNA, 424 bp, Arabidopsis thaliana
  unsure at all n locations
  Clone ID: ARABL1-05-Q1-B1-D8
ctcgagggagctttctcactatcaaaagctttccggcgacaaaaccaaccatctcctccttatctccaccatgatctcactccactcatcagccattaaagcctctctctacggctctttcccttcttcgttacgatcaacactctctgtttccttctctgctggatctcttattcggcttccttccgtcggcaagcgcaatctctccgtcgtcgtttcctctggaagagactcctcgatgtcatcaaacaatgtttctcgcggatcgtcttcaaaggttgctgctgaatctttcttcaggagtgtcttagggcagatggaaactgtttacctaaatcgaaacccgacgcctaaatccgtcctggagcttgttcgatncgttgatgaacaacaactttggcaatgattaaccccgcctttaana

SEQ ID NO: 52 - DNA, 446 bp, Arabidopsis thaliana
  unsure at all n locations
  Clone ID: ARABL1-05-Q1-B1-E12
tatagaaactgntgacgtcngacncacgcgtacntaaactcggaattcggctcgagcacaatcctccaacccgcgatcgattacatggcttattcatcggcgatcatgttcaatgctgacaaagaccgaccaatcgtttacaacacgattcaggcgtacttgagagacgccggtgagagactgcatttggcagtacaaaatgctgagaaagagaatgttcctatggggttcaagttggtgagaggggcttacatgtctagcgaagctagcttggcggattccctgggttgcaagtcgccagtccacgacacaattcaggatactcactcttgttacaatgattgtatgacattcctgatggagaaagcatcaaacggttctgggttccngtgtcgttctcgccaacacataacgctgantccggggaaaactttccttcaaggaaa

SEQ ID NO: 53 - DNA, 409 bp, Arabidopsis thaliana
  unsure at all n locations
  Clone ID: ARABL1-05-Q1-B1-E6
ctcgaggttctttctttgtctctgagttttagcttttttattgacctttttcttcttggtttcttctctgcatctcaaagactaaaaggctttagcaaaaaccgaccagctgagaagatgtcttcatcgtacaacacaattgctttgtcctccactccgaccttcctcctctcaagtgccgctgccggacccggaccaaacaactttaaccgtcaagaggctgcgatgaccatggttcaacaacaacccacttcctccgttgctccaccacccaagaagcgaaggaaccaacccggaaacccaaatccaagatgctgaagtgatagcgttatcgccaaagacgataatggcgacgaacaagttcctaagtgaagtgtgcaacaaaangggttcaagaagggaaanaatc

SEQ ID NO: 54 - DNA, 456 bp, Arabidopsis thaliana
  unsure at all n locations
  Clone ID: ARABL1-05-Q1-B1-D2
ctacgtaagnacggaattcggctcgagaatctgaaatcctctgtcgagaaagaagccgtcgacgatatctgtacggacgcgtccgccgacgccatcggaagcttcgaggagtaggaaagggattcgtttggaggtgagctggtttgcggcggctaaaccagcgagtccagcgccgatgatgatgacgccagtttgattcttccgaatgtacggatcttccgtggaagattgagctccggaaaagcgttgatatcggtgatttgcatggccgcggcggcgagggaagaaatgagaagtagatgaggttgggagaganatngccacggggcattttaaaagtttgggataaagggttttcctcantcctttactttaatttccccggggaaaaattatttgtccaaganaaaataatatatatatantcaaaataattatttaaaagaattcgantaa

SEQ ID NO: 55 - DNA, 408 bp, Arabidopsis thaliana
  unsure at all n locations
  Clone ID: ARABL1-05-Q1-B1-E9
atgacgtccgacccacgcgtacataaactcggaattcggctcgagttccctttcatattccttttccttttctcattcctcactagcttcagagcttctgctcaagatcctcgtttcctagcctattattgtccaaatgcaacaacttactcaagtaacagcacttacttgaccaatcttaaaacccttttgtcctctctctcttcccgcaacgcctcttactccaccggattccaaaacgccacggtgggacaagcccttgacagggtcaccggacttttcctttgccggggagacgtctcgccggaagtttgccgtaactgcgtcacctttgccgtcaacaacacctttagtaggtgtccgaatcagagagaagctgtgttctantacgaagaatgcatantcaag

SEQ ID NO: 56 - DNA, 414 bp, Arabidopsis thaliana
  unsure at all n locations
  Clone ID: ARABL1-05-Q1-B1-F12
ccgacccacgcgtaaataaactcggaattcggctcgagaatcaagacttgtgattacttcatcagacaataacaccccagtggattctgtactttcctctgattcaatttgcatcaatgtgtcagttgatgatatccgagttggagactcgctattggttttgcctggtgagacatttcctgtcgatgggagtgtcctagctggaagaagtgttgtagatgaatctatgctgacaggagagtcacttccggtgtttaaagaagaaggctgctcagtttcagcgggaacaattaactgggatggccctctacggatcaaagcttcttctactgggttccaactcaacgatatctaaaattgtcagaatgggttganggatgcacaanggtaatgcaactccggtacaanaggctg

SEQ ID NO: 57 - DNA, 455 bp, Arabidopsis thaliana
  unsure at all n locations
  Clone ID: ARABL1-05-Q1-B1-F4
ccggcctacgtaagnacggaattcggctcgagcaattcaaaaacttcaccaccgagcaatctcgccggaaacagagcctctcttcttcaccgccgtattttcttcttctccagaaatgtgggattgaagaagttgacgaagaagacgaagtttaacaatggctccagtgaaaaaatcagataagaaagcaacattagatgctgctgcttggatgttcaatgttgttacttctgttggtatcatcattgttaataaagctttaatggctacttatggctttagctttgctacaacgttaaccggtttacatttcgccactacgacgttgatgacgcttgttttaagatgtttaggatatatacaaccttctcatcttccatttacaagagcttcctaagtttaatccggtttgcnaaattttccgaatggtgggaatgaatggttagcctaagtgg

SEQ ID NO: 58 - DNA, 484 bp, Arabidopsis thaliana
  unsure at all n locations
  Clone ID: ARABL1-05-Q1-B1-F6
gacggncaagagcacacagnnacgncccnggcacgcgtacgnaagancggaattcggctcgaggtcaataaaaatctcttacaaccacaacaacttctcagattcttcttcgctttgttgttcgttctcttcttcaagctctctgtctctccaaatgggcgacaccggtagacacaaatggttctccttccaccaccaccgttcagcctccgccacaactatgccacancanaacagccccggngaaactccaacagagttcctctgtcccatcaccggntttttgatgtcagaccccgtcgtcgtcgcttctggtcaaacatttgaacgtatctccgtccaagtttgccggaatctcaagtttgctccaaagcttcacgacgggnactcaaccaagatttatccaccgttatcccaaatctcgccatgaaatcaacaattttnaagctggggcgattgggaacaaatgggacatcccccgtcc

SEQ ID NO: 59 - DNA, 454 bp, Arabidopsis thaliana
  unsure at all n locations
  Clone ID: ARABL1-05-Q1-B1-G11
aatttccagncggactatagaaantnatgacgtcngacccacgcgtacntaaactcggaattcggctcgaggttgaccgcgacgaatccgtcggaaaccggaatcaccatggattttcctccgacgaagcttgattatcatgtagacatgttcaatcttcagtctcattccagatttctctccttatttaaggcgcaagatggacgcatagctctaatactagaatcaacggtgtttcatccacaaggtggtggccagccgtcagacaccggtttaattgttttctccggttcggatttgaaattttccgttcaagatgttcgatcgaaagacggaattgttctccattacggagttttcgaaggttcgaatcctgaaagtgggattgatagtgagaaagggaaagaagnttactaactggttgatgaatcaaagggtaaaaccaaattcaagg

SEQ ID NO: 60 - DNA, 450 bp, Arabidopsis thaliana
  unsure at all n locations
  Clone ID: ARABL1-05-Q1-B1-G12
atctgctcgntcaagagttangatgangaggcccggncncacgcgtaagtaaactcggagattcggctcgaggttaatatgtctaaagagaaatcatatgtaattgctcttcttctatctttgcttctctgtctttcttttcaagttggtgtctctgaggccaactacaacgcagttactacaaggtactcggattctcctcgatgcgccaatggatcttctgcaagtccaccaacaagacactgtccaagggggcgtccccgtcctcctacaccgagagtagcggtgcactctaactcaaccaaaggaaaaggcccatnagtgatgaaattattttatgtctcaacactatgatttttgtacttaatttggtgttaaatttacaaggcaaaggagattcaaatcctttgtaaatcagatnaattacattaaagaaacaaatcaaaaacn

SEQ ID NO: 61 - DNA, 452 bp, Arabidopsis thaliana
  unsure at all n locations
  Clone ID: ARABL1-05-Q1-B1-G4
ncacaggcccggcctacgtaagaacgnaattcggctcgagctgctaaaatcgcgaaagagatatcttacgaatctccacaagtgcgaatttcgaacggagctacgattccatggcgaccaacggagagaaggtcacggctacggtggtgaatggcggagggctatctactggtgaaaaccctaagaaaattgtagacctcaacactacggagttagatcgtactgacgacattctcgacggagaagtcaagggattttcagattctggtgaaaagaaggaagaaaccgactctaatggtattggatcgacggctggtgttgattctggggatatctctccggtcgatgatatccaagaagaagattcgacgtgctgaaaagtttggtgtttccgtgaaaattgaccgaagaggaaaaaccncaattctcgtgcctgaaaggttttggtacng

SEQ ID NO: 62 - DNA, 423 bp, Arabidopsis thaliana
  unsure at all n locations
  Clone ID: ARABL1-05-Q1-B1-G6
ctcgagatctggtttaagccctcactatcctctctctcaaatcgcggagtctccgaagtttctctgtcagacaaaatgcagtcgtcaacgtangcggttaaaggaaacgctgcgtttgcgtttcagagacggaccttctcttctgacagatcgacgacttctaccggaattcgcttcgctggttataagagcttagccaccaccgggccactctactgttctggttctgaagccatgggagcgacgcttgctcgtgctgataacgggatccagagcgttatgagtttctcttctgtcaaagctcgatcggtcagagctcaagcctcatctgatggagatgaagaagaagctatacctctgagatctgaagggaaaagctctggaacagttttgccntttggttggtgttgcctggtcttggtg

SEQ ID NO: 63 - DNA, 463 bp, Arabidopsis thaliana
  unsure at all n locations
  Clone ID: ARABL1-05-Q1-B1-H10
atgatccatctgtacgttcgaagagatgacnnntgangtcggacgcacgcgtaantaaactcggaattcggctcgagggcgacgacgacgagttgttcgcttctcctttcttccactctcttccttcactctcctccttcttctcacctctccttcttcaatctctcttcttcacgatcctctccaatttctctttacccaatccgatccaaacgctatttccgaatcctctcgaagctttcactaaacgacaacaacagagacgacgatgatgatactcttcattttactccgttctccgccgttaaacctttcttcctcctctgtacctccgtcgcgttatcgttttcactcttcgccgcttctcccgccgttgaatctgcctcggcgtttgtagttagtactccgaagaaacttcaaactgatgagctcgcgaanggtcgctgtttcaagaagaaaaatc

SEQ ID NO: 64 - DNA, 430 bp, Arabidopsis thaliana
  unsure at all n locations
  Clone ID: ARABL1-05-Q1-B1-A10
gatatgacgtccnacccacgcgtaaataaactcggaattcggctcgagggctgaagagaaatttgcagaacctaaagaagtagagaaacttgtgataactcctgtgaagaaagaactgggtcttgcattcaagggaaatcaaaagaatgtggttgaatctttggaggcgatgaatgaggaagaagctatggagatgaaagcaaccctggaatccaaaggggaagtggagttttacgtgtgtaccctaaagaaaagcgtgaacatcaagaaaaacatggtgtctatatcaaaggagaagaagaaagagcaccagcgggttttcactccatcagtgattgaaccatcgtttgggattggtccgatnatatattgtccgtatgancaattgttcancacaaaggcaanccaaacaaggggataaccatttnaa

SEQ ID NO: 65 - DNA, 214 bp, Arabidopsis thaliana
  unsure at all n locations
  Clone ID: ARABL1-05-Q1-B1-A3
cccagntcctagaacagcacagacaggcccgcctacgtaagnacggaattcggctcgagtgggggttgcaatatatatttttttatagatttattcagtgtaaaattaatacatgtacatgatatatactatatatctgttgaatatggtgagtagagacaatgtttataatatactgtaacagtttttatccacggacaaaaaaaaaaaaaaa

SEQ ID NO: 66 - DNA, 206 bp, Arabidopsis thaliana
  unsure at all n locations
  Clone ID: ARABL1-05-Q1-B1-A4
cnaaattcggctcgagtataccacgtcacacgctggatgaagttccgatagaatttcttctgcagaaggttatctaatgggccttttttgggctttatgtaattccaaagttggagcttttgtttaagctcttgtatgatatgatgatgtttnnnnnnnnnnnnnnnnnnnnnnnnnnnnnnnnnnnnnnnnnnnnnnnnnnnnnn

SEQ ID NO: 67 - DNA, 404 bp, Arabidopsis thaliana
  unsure at all n locations
  Clone ID: ARABL1-05-Q1-B1-A9
taaaggatcccctcggggaattccaattccacattttcaagaaataaggaggcaaaaatgttcatatatgaattggaattatttgttttcttattaggcctatcctgaagccaanggaaatgagatcggaattcctcggggaattccaattccacattttcaagaaataaggaggcaaaaatgttcatatatgaattggaattatttgttttcttattaggcctatcctgaagccaaaggaaatgagatnggnattcctcggggaattccaattccanattttcaagaaataaggaggcaaaantgttcatatatgaattggcattatttgttttcntattangcctatnctgaagccaaaggaaatgntatcggnantcctccgggggtancgagctcgaatt

SEQ ID NO: 68 - DNA, 439 bp, Arabidopsis thaliana
  unsure at all n locations
  Clone ID: ARABL1-05-Q1-B1-B10
agaaaacncgtgacgtccgacncacgcgtacntaaactcggaattcggctcgaggttgacatgacgatttcttttactactagccaaatcatttaataatcagtcacaaagaggaagagaaatgtgttcattagagaaacgtgatcgtcttttcatactaaaactcaccggcgacggcgaacaccgtctaaacccaaccttactcgactctctccgctccaccatcaaccaaatccgatcagatccatcattttcacaatcagtactcatcacaacatcagatggtaaattcttctccaacggctacgatctcgctttagccgagtcaaatccttctctctctgttgtaatggacgcaaaacttagatncttagtcgccgatntaatctctcttcctaangcaacaatcgncggcgtnnaaaggtaagncttcggcggg

SEQ ID NO: 69 - DNA, 494 bp, Arabidopsis thaliana
  unsure at all n locations
  Clone ID: ARABL1-05-Q1-B1-A1
gcccnggccctaccanaaacgncgcaggcncgcgtacgtaagnacggaattcggctcgagagaaaagcaaaaaagccagatcacaatctcaaactcgcttcttcttcttcctcactctcttattaggttcagttccttttcgattcttcgtgtggatcgctgtcggtagatttccgatttctttaggttctgctcgaaatcgtggtttagtgtttattatcatcgattcagaaaacggtgggtaaacttgtagcggaagatgaggcggtggccggtggatcaccggcggcgaggtagaaggagattgtcgagttggatatggtttctccttggttctttctctgtcgctgggtttagttctcttcaccgntcaacantatcaaccaacaacaaagattcatcccagcttttaacttgagagagacacaagaaccgaaatggnatcccctccccaattaaacttcacgggaagaggcaacaagtgcttcctccct

SEQ ID NO: 70 - DNA, 429 bp, Arabidopsis thaliana
  Clone ID: ARABL1-05-Q1-B1-B11
tgacgtccgacgcacgcgtaaataaactcggaattcggctcgagcgatggccactcgtgacgtcgttaatcttgcgggtggaccacaatacgacgtggaattgggaaggctagatggactatcatcaacagcggctagcgtcggagggaagttgccgcatccgaccgacgatgtcaataaactcacttcactcttcgccaaaaacggccttagccttaacgacatgatcgctctctccggggcacacacattaggattcgcgcattgcacaaaagtgttcaatcggatatacactttcaacaagacaactaaagtggatcccacggttaacaaagattacgtgacagagctaaaagcgtcgtgtcctcgaaacatagattcaagagtggctattaacatggacccaacaacaccaaagacaattcgaca

SEQ ID NO: 71 - DNA, 436 bp, Arabidopsis thaliana
  unsure at all n locations
  Clone ID: ARABL1-05-Q1-B1-B12
atagaaanacatgacgtccgacgcacgcgtacntaaactcggaattcggctcgagatatttgctaaccacagcatgatgcgtttcactgcaaacgccaacacgatccacataatagatttcggaatatcttacggttttcagtggcctgctctgattcatcgcctctcgctcagcagacctggtggttcgcctaagcttcgaattaccggtatagagcttcctcagcgcggttttagaccagcggaaggagttcaggagacaggtcatcgcttggctcgatactgtcagcgacacaatgttccgtttgagtacaacgcaattgctcagaaatgggaaacgatccaagtcgaagacttaaagcttcgacaagggagaatatgtgggttgtgaaacccttggttccgttttaaggaacccttctaaatganaccgttc

SEQ ID NO: 72 - DNA, 473 bp, Arabidopsis thaliana
  unsure at all n locations
  Clone ID: ARABL1-05-Q1-B1-B2
tgagcacanaatcgcaggcnngcctacgtaagcacggaattcggctcgagaagacttctacagacannnnnnnnnnnnnnnnnnnnnnnnnnnnnnnnnnnnnnnnnnnnnnnnnnnnnnnnnnnnnnnnnnnnnnnnnnnnnnnnnnnnnnnnnnnnnnnnnnnnnnnnnnnnnnnnnnnnnnnnnnnnnnnnnnnnnnnnnnnnnnnnnnnnnnnnnnnnnnnnnnnnnnnnnnnnnnnnnnnnnnnnnnnnnnnnnnnnnnnnnnnnnnnnnnnnnnnnnnnngggtcagtggtcttatgttagcaagccacactagtatcaggcacctattcaagcaaatgtttgagccaatatgataaagttgagggaaagaagcaagcttttctagacaattaccgggaagtttcccatgtttgctgacatgatcttcagagtttgacgaatcaaggacataattgaaatttggtaa

SEQ ID NO: 73 - DNA, 466 bp, Arabidopsis thaliana
  unsure at all n locations
  Clone ID: ARABL1-05-Q1-B1-C1
ccgcctacgtaagnacggaattcggctcgagtcctcaggggaacacgtgatgaagcagccaaatccggttgaaccggtaatggatcatgctgggctagaagcttggattgagcaaatgcagctcgatcagcttgtggctcagcagaattgagagacctaaccaaagaatcacatgttcttgtctggtctctctatgtggtagataaaaacctcttttttacaggtggtggtggtagaagggtaacaagattaacaaagaagagaagagaagaaagaagatttctttgtttttggtcaattaattttcacaaaaaacagttttttttttttatttananaaagagaagggaacaattccaagaaaaagggcttatgggaaagaaaaggagattaaacaaaaaccnttcttggggtttccttcccccaattttcaaattttttttaagggattcctttctcccantaa

SEQ ID NO: 74 - DNA, 437 bp, Arabidopsis thaliana
  unsure at all n locations
  Clone ID: ARABL1-05-Q1-B1-C10
agtncactgatgacgtccgacncacgcgtanataaactcggaattcggctcgagctcgaggagctcaagaaggtgggtgaccctgttgaagtgcgttacaaggagtcattggaaagagggtcggtcattgatcagcttggttactgtattaacagctacagagaggcagctatgtctactgatcccaagtttgatcacattgaattggcagagaagcaaaaggttttgaacgagtgtgtggaagcagaagcatggctgcggggaaagcagcagcagcaggacacacttcccaagtatgccacaccggctctcttgtcagctgacgttaaaagcaaggcagaggcattggacaagttttgcaggcctataatgaccaaaccaaagccggtggctaaagcaanaggancacaagncaaaggaaggtaacnaggcggatt

SEQ ID NO: 75 - DNA, 464 bp, Arabidopsis thaliana
  unsure at all n locations
  Clone ID: ARABL1-05-Q1-B1-C4
ctgcgcanaaancaggcccggcntacgtaagnacggaattcggctcgagcgaagcaagaggaggcagaccgagtagaactactggttcaggatactggaaagcaactggatcacctggtccagtcttttccaaagacaacaaaatgattggagcaaagaaaactatggttttctacactggaaaagcacccacaggaagaaaaactaaatggaaaatgaatgagtaccacgccgttgacgaaacagtcaacgcttccacaatccctaagctgagacgtgagttcagtttatgtcgagtctacataacaacaggaagctccagagcttttgatagacgtcctgaagggagttttgcagacagaagagaatgctaacaagtgatgttgcagtagctgagacatccgttcccttgtggaaagctcactgggaaacttcaatttcaggaggagaacatattgatgtcn

SEQ ID NO: 76 - DNA, 443 bp, Arabidopsis thaliana
  unsure at all n locations
  Clone ID: ARABL1-05-Q1-B1-C5
ctcgagggccaaaactcgcctctggaagctccgatgacgaagaggagcaaaggagctaacgaagataagctgatagaaaccaaaagcaaaaacgtttctggaaaatctcagaaacagaagaaaccagtagaagcagaaagcttaaaagaggaagaccttctacaagcatccggaactgattctgattacgacggagatagtttgcctggttctttgaattccgacgatttcgactccgatttttccgattcagaggatgatggaacacatgaaggaacagaagatggagatgtagaattttccgatgacgacgacgtgccttgagcatgatggggtcaaattgataacgaaggatgatgatgggaagttgaacatgttaggtattgacaataaatgaggaacattgggaantgatgaaagattctgaaccaaaggtgaagccg

SEQ ID NO: 77 - DNA, 429 bp, Arabidopsis thaliana
  unsure at all n locations
  Clone ID: ARABL1-05-Q1-B1-C6
tcgagaaccacttgaaatctccctcccagagtaagaacttccatactttgctctagatttcttgagaaaagatgcagccgatcttccatgcgatccttaaaaatgaccttccagcttttttagagttggtagaagatagtgaatcgtctctggaggagagaaacgaggaagaacacttgaacaacacggttttgcacatggctgcaaagtttggtcaccgagaactcgtctccaagattattgagctccgaccttccctcgtgtcttcccgcaacgcatacagaaacacacctttgcatcttgctgctatccttggagatgtaaacatagttatgcagatgttagaagactgggattgggaagtgtgttctgcacgcaatatcaacaaccaacacaacaactccaacttgggcttgccgttacaanttc

SEQ ID NO: 78 - DNA, 485 bp, Arabidopsis thaliana
  unsure at all n locations
  Clone ID: ARABL1-05-Q1-B1-C7
cccntagcatacatacacggcccnggccacgcgtacgnaagancggaattcggctcgagcaaaaatggagaccaaagaattcgactcttacagtgagcgcaaagctttcgacgagacgaaaacaggtgtgaaaggtctcattgatgctcacatcactgagattcctcgaattttctgtctccctcaaggttccttatccgacaagaaaccttttgtttctaccactgattttgcgatccctatcatcgacttcgaaggcctccacgtctcccgtgaagatatcgttgggaagatcaaagacgctgcatcgaattggggattcttccaggtgatcaatcatggtgttcctttaaacgttcttcaagaagattcaagatggagttcgtaggttcatgaggaagctccctgaggttaagaaaacctacttcactccgtgacgccactaaaaagatttgtccacaatagtaatttcgatctctaaagtt

SEQ ID NO: 79 - DNA, 432 bp, Arabidopsis thaliana
  unsure at all n locations
  Clone ID: ARABL1-05-Q1-B1-C9
atnacgtccgacccacgcgtacataaactcggaattcggctcgaggtttcagctaatcgtcaccctggtgctgggaatttcatgtccaaccaacaaagtttaggggctcagcttgcccagcttggcagggatgcttcagcggctggggcggctcgtcgttttaccactcagaagaagagtattgtagaaattgaatcagttggtgttgctggtaaaactgatacccgtgttaagaaattctttcgtctagagtttcttgctaaagaacaagaacacacagatgaagatttggatgtcaaggctctagaagatggtttcgtttccgtgactccattttctctccttccaaaaacggattcagaaactcaagccgcaagcatcaagaatggatntccaaancccttaactctgattnaatgaaaaaggtcatac

SEQ ID NO: 80 - DNA, 405 bp, Arabidopsis thaliana
  unsure at all n locations
  Clone ID: ARABL1-044-Q1-E1-C4
nnnnnnnnnnnnnnnnnnnnnnnnnnnnagaagtcaactttatgagttgctttacatatttatcggacaaacaatttgggtacacttacaatcatgatctcataatctgacgattttttgttcacttggttacaaattagtttgagagacaaaagagaacaaagacagggatttgatttgagatctggattctcatatttggagatcgtctaaagataaatcatcatttgcagtcaaaagcttcaatttcgttangaactgtggaggatcgtccatgctcgtggaancgangattacttctcttttgagttttgtggatactttgtggcatacttttaactccggatctantcgctccaccgacgatgaacaccaatatccgccgtcccancctcccgaaatcgc

SEQ ID NO: 81 - DNA, 407 bp, Arabidopsis thaliana
  unsure at all n locations
  Clone ID: ARABL1-044-Q1-E1-C6
ttttttttttttttaaaacaaacatcatatctttcataaagagatcagagtttttggttttattctcttgctaagtaagcgcanngaagagaagcagcacaaggccttagttttgnnnnnnnnnnnnnnnnnnnnnnnnnnnnnnnnnnnnnnnnnnnnnnnnnnnnnnnnnnnnnnnnnnnnntatttacactgatctggaagcttttcagattcagcagcacaagaccagacgacacaacagggaactcttttctttccattattcaagatctagtaacctccctgaatatacgcatttaggcgttgaagctcctctctatgctcatgaaccactgcacggncancatctcctatgggacancattccaatcatgnccctgtccttggantaacgggataagcct

SEQ ID NO: 82 - DNA, 407 bp, Arabidopsis thaliana
  unsure at all n locations
  Clone ID: ARABL1-044-Q1-E1-C9
tttttttttttttttttttttcataaagcttcttaaatatttcacacacanacaaagtaatttacaacgatatgaaatctgcatcacatttccaagatgcaacaaaccggatacacacaactcgatcacaaattaaactcactttccggggacgaanttggtagcgaaggcccangcattgttgttgactggatcagccaagtggtccgcgaggttctccaacggtccctttccggtgacaatggcctgaacgaagaatccatcatagagaacatagccaaccttccgttcttgagctccttcancttcaactccgcnaaaagcctcggggtcagtaccgaggcccaatgggtcnaagctcccacctgggtaaagcaaagtcctctgcttctcccaatgggccaact

SEQ ID NO: 83 - DNA, 409 bp, Arabidopsis thaliana
  unsure at all n locations
  Clone ID: ARABL1-044-Q1-E1-D2
tttttttttttttttaactaaattttcatcacattacagtacattgcaaactatatagactgttcaatcttcttatagctaagnaactgnnaaaagaattgcaatcgctgagataatttgaccagtttctctcttctgataagattgggaagaagatagcagtataaagcgttggtgaagtgttagagaagctcatcgcttggaaagcttacatataacatcggcgactgcaaaaagatattgagatttcaaaagactagtttgagaccatggcgaatcangctgtgtagttangcattgctttcttgaggaaggttattgggctgagattcttcaggggctaaccggtcaaaaggaatgtaattcncctccttgtcatagacatgacacacagtcattaacgtccttc

SEQ ID NO: 84 - DNA, 394 bp, Arabidopsis thaliana
  unsure at all n locations
  Clone ID: ARABL1-044-Q1-E1-D5
ttttttttttttttttataagaggattagacatttaatataatctattttatttacatcttctctaattctctcatatgataaaatcggaacaatgcaaataaaattaggatgaccctacctttgggtttgagctagcttggtttctcactgcacccacacgtgcaattctcttgatcttttttcaaattctgaagttgatgctgaaggcctttgatgtgttgtacagctaaatccagcatgtctgaatagcttgtttgcttatccatgttggggacaagatcttgtagcttctttagcttcccacttattctcgttctcctctcccgctcagcgatgcttctaggatgggtggcgcanccgcgtttgggccggattttgcaaggtacaaaatc

SEQ ID NO: 85 - DNA, 402 bp, Arabidopsis thaliana
  unsure at all n locations
  Clone ID: ARABL1-044-Q1-E1-D6
nnnnnnnnnnnnnnnnnnnnnnnnnnnnnnnnnnnnnnnnnnnnnnnnnnnnnnnnnnnnnnnnnnnnnnnnnnnnnncataaagcttcttaaanatttcacacacatacaaagtaatttacaagatatgaaatctgcatcacatttccaagatgcaacaaaccggatacacacaactcgatcacaanttaaactcactttccggggannaanttggtancnaaggcccatgcattgttgttgacnggatcagccaagtggtccgcgaggntcnccaacggtccctttccggtgacaatggcctgaacnaanaatccaaacatagagaacatagncaaccttccgttcntgagctccntcaccttcaactccgcnaaagcctccgggggcagtancgagggc

SEQ ID NO: 86 - DNA, 400 bp, Arabidopsis thaliana
  Clone ID: ARABL1-044-Q1-E1-C12
tttttttttttttgacaaaaagattatgggtttccctttcatatcaagtaaccaaataataacaacaacaaacaattttggccaaacttaatcaaagaaacaacaaatccttgcattacacacctccccacatctttttccttatttcaatcttcctcccttcaacaaaagatctaacataaattcatctatattttatacattctcacaatttcatcccctcatcttttttattgctcccccatgccccaaaatgtcccttaaaacggaatcgatccctcacaatattggtttgtccatcagctcgttttcggctgcgatccttcccgagccacggccggttatcctaccgaatgatccaatagttgatagtcccatgaagctgctgctttcttcgcca

SEQ ID NO: 87 - DNA, 399 bp, Arabidopsis thaliana
  unsure at all n locations
  Clone ID: ARABL1-044-Q1-E1-D7
ttttttttttttttagggcactttccatatttgttgaattnntgatanttangntaagctacacntggaggcttattantcgttgatatcaactattgtccangtctgtaancctctccctangacagaggttttcagagcagtaacaaacaacttacacatgagagttaacattgcacagtctgagattatacncgctagattcttttcaagtcttgaagaacaacatgtgcagcgtttcttccaggtgcacccataactccgcctccaggatgagctccgctgccacacaagtagagacctttcaaagggcttctgtaatttgaccatcctttcacagggcgcatcangaagaagagagtctaatcccatggcaaccgtgaaagatgtttcccgcct

SEQ ID NO: 88 - DNA, 403 bp, Arabidopsis thaliana
  unsure at all n locations
  Clone ID: ARABL1-044-Q1-E1-D8
tttttttttttttttttacgtaaaactttaaccctttaaaatctctcgtaccaaaaacaaaattttatccattttttacactacttgaaaggagtcccaggatcacatacttctaaattctatcatagctcaacatgaaaacaagatacattggagtaggatctccaggaaacgaggattataaaattcctacatgagataatccttactagttgccattttggatgtcagccaccgccattactcaccactctctcttcgcgcccgtttgctaatgtacggttgtattttgactggttctgattctgtagagatgctttcagttttcactaacttccgtttttccttctcaaattcnttcctggattcctttccagtgcctgattggcaaanccgaacaaag

SEQ ID NO: 89 - DNA, 414 bp, Arabidopsis thaliana
  unsure at all n locations
  Clone ID: ARABL1-044-Q1-E1-E1
nnnnnnnnnnnnnnnnnnnnnnnnnnnnnnnnnnnnnnnnnnnnnaagtaagaaccttaaagatcaagtgacagatacaaacattgaatcaaatttcttaaacacctttctaaatttatccaaaaaagcctttacacaccgtgctattcccacccaattcaacctcacatcaaagaacttatattgcagcctttttttgctacttgctaacacagcatcgggaagtgattcacgatctatcaatatggnatcaaagatataacaagaagagagaagagagtatagatnaaagaaacaaagcgtaagcgattaaaccacgggtgctcctctccaacatcaagcaagagataccaccaatggtagagcangggtcnantggnaccacaacacaaacaaaagccggcaagcacaaaa

SEQ ID NO: 90 - DNA, 397 bp, Arabidopsis thaliana
  unsure at all n locations
  Clone ID: ARABL1-044-Q1-E1-E11
ttttttttttttgtgaanatatatatttataaacgaattagaaaatatataaatgatcgttttctcgaagagcatcaatttgttcaacatgtgcaccatctgccattgcaatcgtgcttcctcgnntccccaacttcntctcaagctaagtcgaatagaagttggananagtcaggtaaaatgataagtctaccgttggaatcaccattgtttttgttatcttgattaggaggagcttgtccatgaattatcactctttttgggaactccctctcttcttctctcttctatctgtccattttcatgtcttgagaccgtaactatttcctcatccgttactttgtggtgtttcctctgactgaactgtttcctgaanctgagcatccggcgtcatcna

SEQ ID NO: 91 - DNA, 406 bp, Arabidopsis thaliana
  unsure at all n locations
  Clone ID: ARABL1-044-Q1-E1-E12
nnnnnnnnnnnnnnnnnnnnnnnnnnnnnnnnnnnnnnnnnnnnnnnnnaataaaatgaagcatcatagttcagtgttaatcaaaagccaagtttcgtaattacataaacaaatgttgcacaacacgatacagcagaagcagattctcttacttccgccacaacatttacaatcagagatcaaccagtatggtaatacaggtgtgagcagttttggattaagtagtcttctcatcttctggtttagcttccatgtccgacatacaagccacatcagcaactagtctctcaacaggcaccttgctcacatcccatcgcatgcctatatctgaaactaagcgactgggtgcagtacatgccataagccaagccacaagccaaaccaccaaaacctgctacaaacctga

SEQ ID NO: 92 - DNA, 398 bp, Arabidopsis thaliana
  unsure at all n locations
  Clone ID: ARABL1-044-Q1-E1-E7
nnnnnnnnnnnnnnnnnnnnnnnnnnnnnnngatggaaaaaaaatatgaattgactatgcaatattacacattttcttattatttatacatcgaattttttcattccttatgggaaaaagggaatcaggttactttgaccgaatcaataacccaatgttgaccatcggttttgacctttaaccggttaatctctgcgaacagattcacggctctcctcactcctctattatccgccgccgtgaaataatcgtgaccaaatataacaccgccgggtcggagtatccgaaccgcccggtttaaatccgcccaagccgaattaaaatcgtgacccgcgtctanctccaccaagtccggcgtcantccccaatcaaaanagcttctccaaagccgaancggg

SEQ ID NO: 93 - DNA, 406 bp, Arabidopsis thaliana
  Clone ID: ARABL1-044-Q1-E1-E9
ttttttttttttcatgaagtgattgcattgttttgaagcttcttaaatctcagaagctacataaagcagaagaacgtaagctagaatttcttctgctgtaagaatacactccaatacgcaaattaagttgaaagaatgattacaataacggaactcagacttcaaagttgaaagaatggtccaattgtcaacatggaagctcccaatagccgagatttgaatcaaggtgatgccgtctactcgagttagtagaaggagaaaaaccaacgaacagtagtgaagctttctaatcttctattgcacacagacgctttaagtattcgtaagtcaatatcatcgaggttccccaagccgacatgcctaaagaatcttgggcccaaacccctatagaatcccttccaagcca

SEQ ID NO: 94 - DNA, 407 bp, Arabidopsis thaliana
  unsure at all n locations
  Clone ID: ARABL1-044-Q1-E1-F10
ttttttttttttttggtgaaccaacttagaatagatattccttatgaacctaaaagataattgttgctgaaccaaatcatatagtttctaaatcagctcgacaaaaggtaaacaagcatttcattcaggtttcttcatgttcaggcaattgtcagcagcttgtccaaacagctcttgtacttgctttagctccttctctgcagcctctagttgcttttggagttcttgaccaacaagatcattttccacctggagttcagcgattcttttgagctgagcaccttcaccaccttctgacaaaggaagtgcaagcaaccaaagcatcaaactgtttagcagccttaactaagccagcactgagctgcttaaggttgctcaaggaaaangcgtancatccatcaagttaa

SEQ ID NO: 95 - DNA, 404 bp, Arabidopsis thaliana
  unsure at all n locations
  Clone ID: ARABL1-044-Q1-E1-F12
ttttttttttttttttttttaatgtaaacataaaactgtccataaaacaaaggattaattttacatttgaatcccaaagatgatttatnnnnnnnnnnnnnnnnnnnnnnnnnnnnnnnnnnnnnnnnnnnnnnnnnnnnnnnnnnnnnnnnnnnnnnnnnnnnnnnnnnnngaacccaaagtagtgccggtgtcacaacaatcaacaacaactgtcctctgctgtctgaactagcagccgccgcttctgccgcagcataagcctccggaggtggagtcaaaagccctgacgctgcaagaccaccaccaatacctagaccaacaacgatacctttactctcacgcatcttgttgacctggttaatanctggctggagggatgttgtaaaaggaccatgcaatgg

SEQ ID NO: 96 - DNA, 415 bp, Arabidopsis thaliana
  unsure at all n locations
  Clone ID: ARABL1-043-Q1-E1-H3
nnnnnnnnnnnnnnnnnnnnnnnnngagctaaaaccacttaaaagccattaagaatatcacttaggcccatattaaacaacacaatttcaatcattcaacaaaacatagaaacaaactcattgatgttcttatcaagaactacctccttcagaaacagcctcttgagccaacactttccatttctcaagcattctttctaatctctttaccttgctctgcctccataacttcttccacacgtctcacaaactcttctcttctcacgaacccatcactgtctgctttaaccctaactccaactttccacacatcctccatgaacttagcatttgtaggctgatctgcccaatgaggcataccaatcattggaactcccaaactcaatccctccaacgtcgagtttcaaccacaatn

SEQ ID NO: 97 - DNA, 423 bp, Arabidopsis thaliana
  unsure at all n locations
  Clone ID: ARABL1-043-Q1-E1-H4
cggccgcccnnnnnnnnnnnnnnnnnnnnnnnnnnnnnnnnnnnnnnnnnnnnnnnnnnaagaagaagaagaaatggagattacagaaatgggtgaaatcgatgagtgggaggaatggatgggattcgaaggagggataccatcaggtatttcttactagatatatatcatttgctacaatggatagtagtagaatcagagagatggagagtacaatttttgggagcaagacaacagttgcatcttggaggaagcttgtcagcgccggaggaaggacatgtcatgtactctacttgtaagcaatagagaggacacgcgatcgctgtctttgttgtagtaactccagggattattcctcctaaaatagctcctgctatgatgaaagacatcacccaaatcctgtatgttaacctccnaagccga

SEQ ID NO: 98 - DNA, 408 bp, Arabidopsis thaliana
  unsure at all n locations
  Clone ID: ARABL1-044-Q1-E1-A1
nnnnnnnnnnnnnnnnnnnnnnnnnnnnnnnnnnnnnnnnnnnnnnnnnnnnnnnnnnnnnnnnnnnnnnngggataaaacattcncgtcttaaacaagcagaaaacatacctcgagtcccatgaataaaaattatagaacataacataagaatttanatgtaagagatgcaaaccaagtttatagagccattgnttggntcnaaaannnnnnnnnnnnnnnnnnnnnnnnnnnnnnnnnnnnnnnnnnnnnnnnnnnnnnnnnnnnnnnnnnnnnagcttccttggatcatctcancaaacttcttcatcagnnagccttccaccaaggggttggcancacaaggggggnggctcanctgctgnnaagnaaancgttctgggccctgtcaaaaaccggaagggntcc

SEQ ID NO: 99 - DNA, 397 bp, Arabidopsis thaliana
  unsure at all n locations
  Clone ID: ARABL1-044-Q1-E1-A11
ttttttttttttttttttgataacaaaaacaaacatcatatctttcataaacgagatcagagtttttggntttattctcttgctaagtaagcgcaagaagagaagcagcacaaggccttagttttgacaagttaaacaacgaaacaacacanaacatcaancacaacancaacaacaanaacaacgangactgcatatntacactgatctgggaagcttttcagattcagcaagcacaagaccangacgacacaacagggaaactcttttctttccantattcaacgatctagtaacctccctgaatataggcatttaggcgttgaagctcctcnccnatgcncatgaaccactgcaaggggcaagnatccncctaatgggcaccattcccaatcat

SEQ ID NO: 100 - DNA, 324 bp, Arabidopsis thaliana
  Clone ID: ARABL1-044-Q1-E1-A12
gaaatggtcaaaactcaaaagtgatccccaagaatatctttgataaaattacatgtggccaccgtagaagacccaccatcaccaacagctttcctcgccactgaagatttttctataaccttctttctcacggggttatcactatccatcaatgatcggacggctgtggctatttcatcggctgacacgatctccaaagtaaccctatcaccatccgccacgtagtcaagccttatctccactgctaagcccaactccttcaccatctcaaatgcgttcagttgttgctccgcatacattgggccacgttgcaataggtacacc

SEQ ID NO: 101 - DNA, 375 bp, Arabidopsis thaliana
  unsure at all n locations
  Clone ID: ARABL1-043-Q1-E1-F7
ttttttttttttttttttttggaaatcatcttctttagattctctgcttcaaagttcaaactccaactaacccatttggtttcaacanttacaacaagtacagggctagatggcaaaagatgtattgtatcctaaagctaaactcttgtaagctttcgacaaaataaaaagcaagaagacttataggagattgcagggttatcactccactcagtcttcttcatctgaactatcatatgctaatcccaacaagcctttcggagcattttgaccttgcccattgctttccgtagcttttccgtcatttctgtctgcgccaggtttcttcaacactggcatagcttcttctttctgcttatctctgtgaacttttgn

SEQ ID NO: 102 - DNA, 406 bp, Arabidopsis thaliana
  unsure at all n locations
  Clone ID: ARABL1-044-Q1-E1-A2
tagaactagttagtcattttttttttattaagaatcccaaatgggcttatggaagatgggccaaacgacaaatacacggttacaaaatgaaagaagcccanaacaaacccagcgaaaacaagtntcagaaccgtgcggtacaccggaaacacgaacatcgccttctagaaccgacgctagcaaggacgactcctatgtggctacgacctcgacatcaaacttttggcttgagctagcgaaccccgccgcanatcaacgccaagaacaagcctaacctggaacaatcctttcgggaaaagggagaaccgccacaaccgagacccaatccctcctctccccaacctaacaagacgangggttcgaaacttanccccatctccactgatgctcacccaagggacctctc

SEQ ID NO: 103 - DNA, 405 bp, Arabidopsis thaliana
  unsure at all n locations
  Clone ID: ARABL1-044-Q1-E1-A3
nttntttttttttttatgcagaaatatctttgattcattaactttgagtgattatcacatcaacagaattatgggtcatagcagctacattattacattctctacacaacaatggatacagaccacattctatcacagaacccatcactttccatttcacatttatctatatgcatatagatagatagatagacgtcgagactatatatggttattggttaagaatgaaagagaaaaaagctgggaggaatttgtttctaaggtccatcagcaagattgagtctttcttaggttccagtgaagaccatcgtggatgctgcgtaagaagtcgttaagtgggattcaacttgacaagcggttgaaacggggcaaggtgccatgctaaacactagtgcatcccctgcn

SEQ ID NO: 104 - DNA, 424 bp, Arabidopsis thaliana
  unsure at all n locations
  Clone ID: ARABL1-044-Q1-E1-A5
ttttttttttttatcagcacaaaccatatcagatacataaacccgagtgaattacgggacgacaaagccggcaggatataatcctccggtacacaagccggcgaggaatgaaaccccgacactaagccccgacatggggaaacgacgtagaaagacaaaataaaacatgattgatgattttacacataaacatagttctctctttaaccaanataaaccaagatcgaaaattaactggcatcggagatttccgtccggagaatggagacacccacttttaagaaaantttgattcntccntgcccttactgataatttaaaaatccntcaagaagaaaaaaccttgggaatacctttgggatgggcaagacggtgggaaactcaacctaaacaatgcaagaaaaccgtccaagaaacgccgttg

SEQ ID NO: 105 - DNA, 394 bp, Arabidopsis thaliana
  unsure at all n locations
  Clone ID: ARABL1-044-Q1-E1-A7
nnnnnnnnnnnnnnnnnnnnnnnnnnnnnnnnnnnnnnnnnnnnnnnnnnnnnnnnnnangggtttccctttcatatcaagtaaccaaataataacaacaacaaacaattttggccaaacttaatcaaagaaacaacaaatccttgcattacacacctccccacatctttttccttanttcaatcttcctcccttcaacaaaagatctaacataaattcatcnatattttaaacattctcacaatttcaacccctcatcttttttaatgctcccccaagccccaaaatgtcccttaaaacggaatcgatccctcacaatatgggtttgtccaacanctccgttttcgggnngnattcttccccgannccannggcgggttacccaaccnaatgg

SEQ ID NO: 106 - DNA, 374 bp, Arabidopsis thaliana
  unsure at all n locations
  Clone ID: ARABL1-044-Q1-E1-B11
ttttttttttttttggtcnaagcgaaaactaatgagctaatgaaataaaaactacaataattttgtaacatgagatcaataanttcatangtttttcttttggttgttgttgtanaagctatgggagatttactctgtacaaagctttgaatctccctttttcacccaaagaagtgtgtttatggtaatgaatgatgtgattaggccaataccaagtctccttcttcttgttgttgctcttcaaatttctcgccttcctgctttggaangagaatacgcnttatgtcctctgcngttagcgtttcatactctagaagtgcgtttgccaacgtgtgtagctgcatctcangccgtttcaanagagattcaatcct

SEQ ID NO: 107 - DNA, 409 bp, Arabidopsis thaliana
  unsure at all n locations
  Clone ID: ARABL1-044-Q1-E1-B4
ttttttttttttttttttttgatcagtagttcagtagagataaactttcactgattcacagattantgcataacaaaaaanggnaaatgaaagattgtgagaacttgttcacttctttgaagaaactgttgatgaatctggctctttccatgcagcttgccattgtttgtcatanaacgtagtctcatcgaacagatccttaagtttgtctaaatcttcattcttacggatgaagagaactccancnacagccacaaacaagagtgttttgcagaagaaatttcccatttgatnaacaagtcctactccggtaagactatcancanagtaagccatgaagaacctatcatcggcagcacgaacatttgngaagttcagcctcaaggtagatgggaaccccttcaaccaa

SEQ ID NO: 108 - DNA, 383 bp, Arabidopsis thaliana
  unsure at all n locations
  Clone ID: ARABL1-044-Q1-E1-B6
ttttttttttttaatttaaggaatcttctgtatcaccaacgagtattacagaatctaaaacaaccttggcacatacgtatatatgcagtatgtaactcaccacaataaaaatcatagaacaatatacancgcatcatcatcctactacaagtcagaattttgcaatccacgaagcagaatagtaaacggggaagaagataaagaggtgctcagatcataatacctctcatgtaattaatcgagcacctttccgtactctggtttggtccaagctgcataggatacagggcgcgcccacggtatggtttacccagtgggtgagatncagtgccggtttangtcaacgaggtagtaaaaatccanacttgtgtgtgtcntcctgg

SEQ ID NO: 109 - DNA, 397 bp, Arabidopsis thaliana
  unsure at all n locations
  Clone ID: ARABL1-044-Q1-E1-B8
nnnnnnnnnnnnnnnnnnnnnnnnnnnnnnnnnnnnngaacagagttctctcataatccaaggcttgctttgatcttttagaacattctaatattcacagagatgtaaccaaactatacagttgcatccagaaaatccgactcaagcgatttcataagcacgagtcaaccaccacagatgaaccaaactatatacagtttgcatcagaaaaaaattctgattcagcggagttcatgagcgagccacgaccatcattatctgaatttagccttgagcccagcagttgaggtacatgacttgtcggagaaactcatcgggagtgggaagaagaggtacgaagtccttcctccgaagggganaaaatccccgggtaaatttgccggggggnaaaaggacg

SEQ ID NO: 110 - DNA, 419 bp, Arabidopsis thaliana
  unsure at all n locations
  Clone ID: ARABL1-044-Q1-E1-C1
nnnnnnnnnnnnnnnnnnnnnnnnnnnnnnnnnnnnnnnnnnnnnnnnnccaatgaaaagccaaaatagatacaaccgcgtttttgtttgtaattgcatgattagaaagagttctagagattatcaattatacattatacaaacgataacgaaaanaaaagaagaagaagagagttttggactcatatagaagattcaaagagggttcaaaacaaatcaaaacctgtgcattaactccagcaaaaatcctcaagaatcccctcaagtaatcctnagcttgggcgcctttccaannatacaacaatcnaaaagcgatttcctggaaattcgggangcattaatccggngcaccaaggcaattggnactcaattcnanctgcaagctcaataaccaaangacccccggtaaangccccaaa

SEQ ID NO: 111 - DNA, 397 bp, Arabidopsis thaliana
  unsure at all n locations
  Clone ID: ARABL1-044-Q1-E1-C10
nnnnnnnnnnnnnnnnnnnnnnnnganagaaaaacnagttatttgattaatgaaaaaaatacaaagtcttgcaaattttacatctaaacaagctctctttctcctctcacactcacgaancaaagacngaagcaaaatanagataaaacttggctcactttccggggaacaaagttggtggcgaatgcccatgcgttgttgntaacnggatctgncnaatggncagcaacgttctctaacngtcccttaccagtgnnnatgggcttgaactaagaatccacaacatagagaacataagccaatcttccgttcttgagctccttcancttcanctcaagcgaatgcctctgggtcngtagccaaacccaatggggtccaagcttgccaccggggtana

SEQ ID NO: 112 - DNA, 406 bp, Arabidopsis thaliana
  unsure at all n locations
  Clone ID: ARABL1-044-Q1-E1-C11
tttttttttttttttttaacgaaaataatgttagtttattgtgtgaatgtgatgtatttgagaaagaaaagttnnnnnnnnnnnnnnnnnnnnnnnnnnnnnnnnnnnnnnnnnnnnnnnnnnnnnnnnnnnnnnnnnnnnnnnnnnnnnnnnnnnnnnnnnnnnnnnnnnnnnnnnnnnnnnnnnnnnggtttttgctcttttttaagtactaagtgattggtaaccatcttcccgtttctgtctccggtatatcacggcggctattaaaaccacaacagccacaactaccgtcactgcaaaaatggctaaaaagctcaagcttctcgcaagtgcctcaaaatgttgtttattaggcaaggagctatcctggtttccgggagnctgctgaacaacnaaggatgta

SEQ ID NO: 113 - DNA, 431 bp, Arabidopsis thaliana
  unsure at all n locations
  Clone ID: ARABL1-042-Q1-E1-H6
ttttttttttttttcaatgtaacagatatcatcatataaacgctaaagatttcaagataatgaacatattaaagacttgtgatggttctaattcntcatatctcctgcggaaaccatattttctagaangttccattcgtatttccaactcaaagaaaaacagtgactggatcttctgtgtctgagttctcactccaaaaccttgtagtggatccgagtctacgagcatttgagtttgagaatctacataaggcttcattcatctgttctgcctacgtttgcgaaaatgtctgaggatgaaactgtctgcatacagaggatacttcttttttanaaagaccttttatgcattccaatacgaaaagtcgactanttcctcatcctttcgaactataaacatacaancgaganncctcaaaaaccggggttga

SEQ ID NO: 114 - DNA, 448 bp, Arabidopsis thaliana
  unsure at all n locations
  Clone ID: ARABL1-042-Q1-E1-H7
ttttttttttttcgaccaaaacatattttaaccaaatacaatgaatcagtctattatcaccttgaaacactatgatggattcaacgctacccaaccgaaattcactgtatttttccaaccacaacgagatgaattacaccacgactctaagtgaaatcatcttttaaaccaccaaaattcacccaatgacacgaaaacatttctagcacaaagaaaatcaaatcctatcctgagatccaatccaattccaagctattagtccctcatgatccgagtgtagaacatgtcctaatagcatcctacgccaaaaaggcggcaactttcagaaagggtttggaccctcctggcttcaactaatttcgggccctaagcctaaaaaccggacatactaatcccgactngatactcaaccnggattnaaccggggctggagacaaaaaatttcttg

SEQ ID NO: 115 - DNA, 415 bp, Arabidopsis thaliana
  unsure at all n locations
  Clone ID: ARABL1-043-Q1-E1-A3
ggccgcccttttttttttnnnnnnnnnnnnnnnnnnnnnnnnnnnnnnnnnnnnnnnnnnnnnnnnnnnnnnnnnnnnnnnnnnnnnnnnnnnnnnnnnnnnnnnnnnnnnnnnnnnnnnnnnnnnnnnnnnnnnnnnnnnnnnnnnnnnnnnnnnnnnnnnnnnnnnnnnngaacccaaagtagtgccggtgtcacaacaatcaacaacaactgtcctctgctgtctgaactagcagccgccgcttctgccgcagcataagcctccggaggtggagtcaaaagccctgacgctgcaagaccaccaccaatacctagaccaacaacgatacctttactctcacgcatcttgttgacctggttaataactggctggaagatgttgttaanggaccatgcaatggctgggacnattg

SEQ ID NO: 116 - DNA, 242 bp, Arabidopsis thaliana
  unsure at all n locations
  Clone ID: ARABL1-043-Q1-E1-A8
nnnnnnnnnnnnnnnnnnnnnnnnnnnnnnnnnnnnnnnnnnnnnnnnnnnagagaatgacaagtgacttaacattacgtttccagataccaatgaatgttctctctctcgcttgttatgcttctacttggttttgtgtgttctctattttgttctggttctgctttagatttgacgtaacagttcgtgattaggtattttggtatctggaaacgtaatgacaagtgacttaacactcgagc

SEQ ID NO: 117 - DNA, 415 bp, Arabidopsis thaliana
  unsure at all n locations
  Clone ID: ARABL1-043-Q1-E1-B2
nnnnnnnnnnnnnnnnnnnnnnnnnnnnnnnnnnnnnaacaaggagaagtatattatagaaggatcttcatacagcaaaaccattaacattacatgaatatctatctaaagcgtacaacaatcactaatttactatgtacacacgcttctagcttctgatatatctcttctacatgtcgtaagagtttggaatgtgacagatacaaaaccacaaaccaaatgaagaaggaaagagtctttacagatccgagtcttgccggctagccaagcagagttcatgtaattcattgagtatccattcctcaccaagtgtgaccaccaaggaccaatactctagttcctccaacaacgcatgtgctatgtccccaagctaacttaagcggtttcccggggaaaatcaaggttctccaaggag

SEQ ID NO: 118 - DNA, 415 bp, Arabidopsis thaliana
  unsure at all n locations
  Clone ID: ARABL1-043-Q1-E1-B3
nnnnnnnnnnnnnnnnnnnnnnnnnnnnagaaatcgatccctgcccttaacgaacgaaatcacatagtacagtacaaccttgtaaaaagctagcagataaaaagagaacattcagtagaagccaaagagatgcagaagaacaaagctcaatgacttgaagcggctggagaagtaagctctctagaagacaacagtgtcgagcatagtgcctagtgtctgaacaatgttggatgacatgaggttcgagacatgttcttccagatgcttctttgcatcttgtcttcccacattcacaattgccaagcttctctggtgacaactcgtcctcctcttgaaccgccttgttanatttagcaaccaagctcaacatctcctggaacgtctgttccttgggcctgggattggtgtcnaaacc

SEQ ID NO: 119 - DNA, 490 bp, Arabidopsis thaliana
  unsure at all n locations
  Clone ID: ARABL1-042-Q1-E1-H4
gtatcggtaaagacattaannnncggnncanctcactaatcaagcggccgcccttttttttttttttttttgagataataatgctggtttatctaaataaccgatttggctctcaaacagaactaatcaatccaagtcaatgtcatggctctttattgaatgagagaggttcataatcaaatacaatacgattcagcaacaaagcttcatcattcaggagatattcagaagattctttatgtcatgctcaagtgtaagaggggaagtagttggataataacgttgtacagcttgaccgtttttgtcaacaagaaacttagcaaagttccattgaatgtcatcgccgaagattccccatttgcctttcttcaggaacttatacagaggagaagcattctctccgtttacttcaatcctgttgaaaatggggaaatcagaattggaagcgaagtncaaacaaagtcaagttaattgggcaataanttcccgg

SEQ ID NO: 120 - DNA, 409 bp, Arabidopsis thaliana
  unsure at all n locations
  Clone ID: ARABL1-043-Q1-E1-B4
tttttttttttttttagaggaggatgatgatgacataaataatactgaaaacacaagtacataagccaagaaaagaaaatcactggactcgtttatttgggcaaaaggaaaagaaaagaagtgaagaaagagagagggtcactactgcttctggaggtcaataaccttagcccaagcaggcctggcagagatcttcttaatccactcgctaaccttagggcgagagtcaaagagcaccttggagtcagtacccaacaagtaatggatggctgggaggtggtgaagatcagcaagagtgaaggaatcaccaaccaagaactcagatttggcgaacctaacctccgtagacatccaagactttctggagcttaacttcnaactcctgggcaaccgnaagggcaattggcaa

SEQ ID NO: 121 - DNA, 405 bp, Arabidopsis thaliana
  unsure at all n locations
  Clone ID: ARABL1-043-Q1-E1-B5
ttttttttttttacctgtaaatctttgcatttaaatcacaaaagtttgttctttcgaatcagataacaactttctgtaaattatttagggattcaaatcaaaccagtaatagtaagggataagaaactggaaaccccagaaatacataacaatgatagtatcacaatcttctgtatctaagaagatatgtatctcaaatttgataatacangctggaacagagagccaacaacagatacaaacttagatccnatcaatatcctcatccnnnnnnnnnnnnnnnnnnnnnnnnnnnnnnnnnnnnnnnnnnnnnnnnnnnnnnnnnnnnnnnnnnnnnnagacgagtattctccggaagctcaacaanagccctaannaanctagcccaaccaggnttttccttga

SEQ ID NO: 122 - DNA, 410 bp, Arabidopsis thaliana
  unsure at all n locations
  Clone ID: ARABL1-043-Q1-E1-B6
nnnnnnnnnnnnnnnnnnnnnnnnnnnnnncaatccacattttcccacaatttatatataaaatctcgtacaagacgaaacatgatcattgcaacgtacgtatgcaattattttcaagcacgacactcgggtggtgggacaggaaacctagaccggtcagtacaataatcataaaccatatggtttactctaacccaccggtaacgtcgagcttcaacggcgttaagagactgataggcataaccttcccaccaattatgagggttcgatggacaaaaggttggtccaggaacaggacaaccttcgatgtcgaaatctttgtaataagcataaaatgggagctttgctccaatcaattttctctaatccaccacgtgttgcccagtcatctgcttcccanaatgttgagt

SEQ ID NO: 123 - DNA, 443 bp, Arabidopsis thaliana
  unsure at all n locations
  Clone ID: ARABL1-043-Q1-E1-C3
ggtcacnaataaattcgccggtccacgagctcantagtcggcgggccgcccnnnnnnnnnnnnnnnnnnnnnnnnnnnnnnnnnnnnnnnnnnnnnnnnnnnnnnnngcagaaaatagcatgtattaaaattattatttgnatggataaaagacaaataatatatcaaaatgctgaatacaaaatgtgagctgtaatacatgagacaaatgggagaggannnnnnnnnnnnnnnnnnnnnnnnnnnnnnnnnnnnnnnnnnnnnnnnnnnnnnnnnnnnnnnnnnnnnnnnnnnnnggctagaacaagtagagaccatgcgattgccgcagctcccaccatttgtatcacaacacttattctttgtgctccgctctgatcgtcagcggcaggaganaaagcatcccttggtccangaccangaacttctccgggcggaacaag

SEQ ID NO: 124 - DNA, 413 bp, Arabidopsis thaliana
  unsure at all n locations
  Clone ID: ARABL1-043-Q1-E1-C8
nnnnnnnnnnnnnnnnnnnnnnngactgagcaaaacactctttaatgaacaactcaaaaggaaagcatatcattcaaatggtaaaaactaaaaacacacgaaggttttttatataaagttataaacaaagcatatttcaaagtgagcaatatacacaaatacgcccgtgtttgcggataatagaagcaacaattcgataaggatcgcatgcaaagtggcaggtaatccaagcatgaatgttggttagcgcatttatcctctggctttaagctccgcaagcctcctcgacaaatcatcctcatcgactttctcctcagtcttaagtaggaatggcatgaccagcangctgaggaagccccacagagacttccaaaccatagtcatctggcaaccggctggcataaaggcgtttg

SEQ ID NO: 125 - DNA, 395 bp, Arabidopsis thaliana
  unsure at all n locations
  Clone ID: ARABL1-043-Q1-E1-E6
tttttttttttttttgaatagaaaaacaatccacatctaatatacaaagacaagactggaggaccaaacaagaccagaccagcagaagaaggagagacggaaggcgaaaaataaagacactcttgtttcacacgaaaaattgtcaccatcatcatcaactagacaatacaggaagactaagaagaatcaagaagagagaatatatgttcttggtgaagattagttcttcgactttgaatgctttacgagccaatcaatgacttgatcaatgttggtagagttcttgcatgatatcatgaaacagcagacttctctatctgtaagtgatgtangtcccatttcgtctgttaaggcttctttggacagagctccaaggtttgtcaatcctgttcccc

SEQ ID NO: 126 - DNA, 420 bp, Arabidopsis thaliana
  unsure at all n locations
  Clone ID: ARABL1-043-Q1-E1-F3
nnnnnnnnnnnnnnnnnnnnnnnnnnnnnnnnnnnnnnnnnnnnnnnnnnnnnaagaaaaaactttgagaagaagagcttcattttcaannggngatacaacacatcagtttctcaacgaatcaagaaagagttaacattgatcaaaaacagaaacataaaacactaactagaacaaacacactcatgacaaattaaattaccaatcggnaaaacatttaatcagtatgaatataagaaaaaggtttgcaggttattcttcaaagtgaaactgcattatgacttgacatacagacttgttgtacctcnagaaaccaaataaagttttcatttttatgattccaagacataccaaacctatcaaattctcaccatttcccctatcaaaaatttcaacaacgaacccgaaaaaagaagtcct

SEQ ID NO: 127 - DNA, 455 bp, Arabidopsis thaliana
  unsure at all n locations
  Clone ID: ARABL1-043-Q1-E1-F5
tttttttttttttgacaaacacatgcatataatagataaagagccacatacatgatacattgcaaatatgacaaacacgtgacatgcaggataatagataaagagccccacacatcacaggngaaacaanttaacgtgcatacatttattgacgcaatttcgtagctatagtgacatcagtgacttgggtgagttttttggggaaaagcctttggggggaacgaaggagggatnacaagaaaaggggcaaccttctggggacgatatgggtgggtaaactgcgggaaatagtttggccgcccgangncngaaaaccccggaacatgnaattgggggacnaatggggccgagttaaancctaagttggatttagccatnantttanccncnccaagnttcnaanggaggtttcaattcgtgcgcccaagggnnattancccaaattggttgggaaa

SEQ ID NO: 128 - DNA, 412 bp, Arabidopsis thaliana
  Clone ID: ARABL1-043-Q1-E1-F6
ttttttttttttacattgataccccaattatattcgatactgaaaccatattacaaactcattttaataaattgcatgcaagaaaagatggtaacacaataaatttattacatagaaattattttcaaagatcaaacgcctttttagagagatctaacataccagccagaccctaatggcataaagttactgatgtaccatttcaagaaaacaacgcttcgaacaaatttttgatgaagtcggtcattggcgctgcgatgatatttttggcaaccccggccgccaagtccctctccaaagtgccaccaagttgtgtcatatttagtatcatgaccttgattcttggccatcataagcctggcaaactctctgtagttgatttggaccaacaacaacaacatcaagctggcct

SEQ ID NO: 129 - DNA, 455 bp, Arabidopsis thaliana
  unsure at all n locations
  Clone ID: ARABL1-040-Q1-E1-G2
nnnnnnnnnnnnnnnnnnnnnnnnnnnnnnnnnnnnnnnnnnnnnnnnnnnccataagagtagagtacaaagctctttgcttctgcctgactgatatacaaacaaacaaaaaaagccgaacctctcatacctgaaagttgaaatgaaacaacaaaaacagcttcttacttcattccttcgctgagacccggtggcattcctaagctctgcgcaaggtcactcattctctctttcatagccaccacactcttggcgtgtgcgtccttgtatgcttctgtgacaagttgtgataagtttttcggaacctagttcattgctggctcgggtaatatcaagttacgggattgggttgctgggntaaccggataaagttaacccttgaacaagccccccctggaacaataaaccaatcaaatttcngnggaagcaaanccttttggaaaacgttcaagctt

SEQ ID NO: 130 - DNA, 439 bp, Arabidopsis thaliana
  unsure at all n locations
  Clone ID: ARABL1-040-Q1-E1-G3
tttttttttttttagctaaaacagtttcttaaagtttttgttaaatgtatacaacaaggttcttctatatacacaagctgcgattattactgcgagtttgtaatttatttggatcggaacataagacatattgtaagacttcagatcagttgcaggacaagttcgagtgaagtctgctagaacggtctgtctccatctcagttcctcaaagcttggcaagcaggagggattgttgtcaggccacatttgctcagaagagcctggactttagatgggtaaaccgctaaaacggggagaacagacttgaatctgcagatgcatttcagattagcggcttggaggagttcacaacaccctttgattggaaatggcgggttgccccnaattacggctggacaacattttncaaaatggtttgccttgaangtacatgcggtaa

SEQ ID NO: 131 - DNA, 442 bp, Arabidopsis thaliana
  unsure at all n locations
  Clone ID: ARABL1-040-Q1-E1-G4
ttttttttttttaagggaaaggttttttcataagtaggaaacaagaagcataaaatccagacaaagtcgagttcacattcatgagtacgcctaacatattgaaaaacaaaaataaccgataaaatccaaaacgggagagagcacagcttcaacatcgattccaccccaaaaaagagtcaatcagagacgttttacatgaacaagttgggcttgttggccttgtaagtcgtcttcagcttcctgcttggtggtctaaccttgcggaacaccaatgggaacttgatcttgctgttgtggaactgtttagtgctctctctcttgcacagcttggctgggacagtggctgtcttgatgatctgaatgcaagggaaatctgacacggtgacggggatgcaaccccattgtanaccngctcaaaactnccgttaaaattggggtcacg

SEQ ID NO: 132 - DNA, 439 bp, Arabidopsis thaliana
  unsure at all n locations
  Clone ID: ARABL1-040-Q1-E1-G7
ttttttttttttttttttttgttcagtagaaaagctagcattaatctcataacattcaaagatggtatcagaagcaaacttctttacaaacaaaatattatcaagttcatcaagacagatgcagacaatacaagaatacaaaacaaatgccaagctcttttttttattaccgtaccaaccaaataacatcctacactcaagtaaccaccaaccaaggaaagcgaggtggcaacatctgcttcccaaaccaagaatccacaaaatatcggctcccgatactacataccgcacttataagttgatcgataaggaagtacctggaaattttaacatttgtttgtgctctcattctgctctggactgaccagctcgagaagataaaatgatgcctacaattaggccgtatanagcgagcgcttccgcaaagataaggataaga

SEQ ID NO: 133 - DNA, 457 bp, Arabidopsis thaliana
  unsure at all n locations
  Clone ID: ARABL1-040-Q1-E1-F3
ttttttttttttttctttaataccctcgttttttatatgatgtttgtgaatgtgtttgtaataacttaaaacatattgctatcctagaatggtatcatcttaatacagatttttatttggtttcagagctgtttgatttgctttaacttacagagtactaagtgatcataatgagtcccaaggcttgagttctctgtcacgatccatgtgtttcctaatcacttagcctttgccaaagctagtgtcattgacctcgctcgcagggttaggaaaattccccaaaagaatgcgaccaggctgtgcaagatgacccggaaagtgcaagtgggcacaataacttgtagttaaaccaacccaaccaaccggggaaaaaacttcaatgcaagttaagctgggacgttgggatnaagtcctcctggattccttccccnaacaaaggggtccaagggaanttctt

SEQ ID NO: 134 - DNA, 438 bp, Arabidopsis thaliana
  unsure at all n locations
  Clone ID: ARABL1-040-Q1-E1-G8
nnnnnnnnnnnnnnnnnnnnnnnnnnnnnnnnnnnnnnnnnnnnnnnnnnnnnnnnnncatatgtaataaaagtgaacctcattgggatatgaatattatcagtaaaccagaactgaggaaggtgtacatattactttgggacatggcctgcttaaacaaatcatacagccattttttttgttgattttattattttgatgattcaagagaatccaaaaaagtgtcaaataagatttcatatcctgtcgtctgtcggtcattttttttgggtttgttgtctccacatctaatgtaaaaagtttctttattttggtcgcttgcgatatgggtccaaggaatcatccacaagtttccntcacatagttaccaactcctctcaaggtcctcaacaaccccgccggcaaacaaggtttgnctttcctggtgaaaccgggtna

SEQ ID NO: 135 - DNA, 166 bp, Arabidopsis thaliana
  Clone ID: ARABL1-040-Q1-E1-G9
ttttttttttttttcttgtttaataaagggttcgatttcttccacaatggtaaagagcacaagccagattccttaagttttaagacaacactataaggacccaaaaaggagaccaaagacaaagacaaagaccaaactgataaaatgaagctgttcaggttggtac

SEQ ID NO: 136 - DNA, 441 bp, Arabidopsis thaliana
  unsure at all n locations
  Clone ID: ARABL1-040-Q1-E1-H1
nnnnnnnnnnnnnnnnnnnnnnnnnnnnnnnnnnnnnnnnnnnnnnnnnnnnnnnnnnnnnnnnnnnaaccaccaaaagaggaaacaaagcattaaagcttacaacgatatgtgcagaaagaaaagttaggcccaacatagcccataagattaacatctacggcataaagatgttttgacatttggactctatccaatacacgtgtccacgtgatattacaactgcaacacaagatgaagagtcatcggaagtgtaccgacatcaaccttcgccgccgatgaacaccgaatccggtgaggaatgcatcgccgaaacatcgcacaatgaatccttgtaaccaccgaaataaaactgaacggtgcccaatttaaaagacacagcaaaanggatccataattagccatcggaatatccttaaatcttnaaaccgaagaaatatc

SEQ ID NO: 137 - DNA, 456 bp, Arabidopsis thaliana
  unsure at all n locations
  Clone ID: ARABL1-040-Q1-E1-H10
gtaccaaatcanaattcgccggtcnacgagctcantagncggcggccgccctttttttttttttttatgggttcaaatcaacttattggaatcacctttgatcaaatttcacaaaagaaatggctagtagagttacacataagatgaatacaaggcccatatggaaggtgcaatgggaaatgtagaaacttgactgcatgaccgagagtatgagagaagtttcttccaaaggagtcaaatatctctgtgcgtgttcacaattcttgtgcaagggctttctcgatgtctttctggatggatagaggtgaaacagttgtgccataacgatcaatgacttgaccatctttgccgaccaagaacttggtgaagttccatttgatacgacttccaaagaaaagagggtttcttagatttgaggaattttgtagactnggtgcaacgttttgtccaattaca

SEQ ID NO: 138 - DNA, 425 bp, Arabidopsis thaliana
  unsure at all n locations
  Clone ID: ARABL1-040-Q1-E1-H12
antacacggcggccgccctttttttttttttttggtaacatttcagctctaattttattataggtttttgcaaaaccacaagatacagaccacaaaagacagctacgtaggttaataaaaaanaaaacatatagatgccttcactcttatatggaaaccacgcattactatatgtatatgtatgtatattcataaccaaaacatcccaaaagatagattatctgaaacgtaattatacataacccacaataagatagaaaacagatctatctaagtagctgaaccacacaacatgagtctccgggaggaagtggcaagaccggaacggtccctgggcttcacctttaagactttgaagggcaagtggtttgggttccaagctgaggtgtcctgtggcatancgcaactgcttttagcctcgcatc

SEQ ID NO: 139 - DNA, 452 bp, Arabidopsis thaliana
  unsure at all n locations
  Clone ID: ARABL1-040-Q1-E1-H5
nnnnnnnnnnnnnnnnnnnnnnactgaaaagtgtatcacaaaacacaaaatgtaaacaagtttgaatagtttatgattatttattacaaatccatactacaattatacagtcttcaccgatattttgagaaccataatgtaaaaaagagaaagagaaaaaaatggaaaaacatgaaacaaagtttgatgaaatcacttccagttgttggcaacaatgtcagccaagtcaacaactctctgtgagtaaccccattcattatcataccaagcaatcaccttaaccatatcatctcccataaccatagtgagtgatgaatcaatggtcgttgaaaaatccggagcatctgaaatcaacgggacactantggntcaaccgcaagacaaccgagtaaaaccttaaagccccttccccngcaagaatcctcctgaaagcaagcgttggacttccccaa

SEQ ID NO: 140 - DNA, 434 bp, Arabidopsis thaliana
  unsure at all n locations
  Clone ID: ARABL1-041-Q1-E1-A1
accggtcaanaattaattcgcnggtcgacgaagctcactaagtcggcggccgcccnnnnnnnnnnnnnnnnnnnnnnnnnnnnnnnnnnnnnnnnnnnnnnnnnnnnnnnnnnnnnnnnnnnnnnnnnnnnnnnnaaaaagaaaccatcttttcaattaacttgcaagtttcttnaagttttatagggaagggaaagaagggtcataacccattacatcacaccatactaagagagtagtaataagagagacatgagcccaatagatgagcccanatcaacttttaatcanattacattttgattaaaagaagcttcaatanttggggcaacaagtgcaattgacncanctgcaaaaggagccccaacttgcacttgcaanttggcgttggtccccccgggaacaaaggtccaatgataaagggcccccntgga

SEQ ID NO: 141 - DNA, 398 bp, Arabidopsis thaliana
  Clone ID: ARABL1-041-Q1-E1-A11
tttttttttttttgattgaagatatatggctctgtttagtaactaatttacatcacgggaacacttttacttggtgcctcaacatttatagcaaaactattcaactacaaaacacacaagatcaaacttatgaaaccaataactcatcaacacgtgtctcatcaccaacctcacacttcacctgcaccacctccgacgtcagattctctgcttttctccttcgtttcaacttcccgttttcagacgacgacgtagaagaggacgacgacgacgacgacgaagaagatctcttagacgtgatccgaaccgggtcaggttcaccggaattaaccctcaacggaaaattcaataaagcgcgggaaccacgcatcctaaaagcagctatatcgtaagctaaa

SEQ ID NO: 142 - DNA, 445 bp, Arabidopsis thaliana
  unsure at all n locations
  Clone ID: ARABL1-041-Q1-E1-A3
ggtccccggtgctcactagtnggcggccgccctttttttttttttttttaaaatagtgaagaaataaatactccatatgacttaaacttaaaaatggtcaagaagagagagatatgttcgtagctgggagagagaggagagaacaacaactaagaaaatttaagaaatgtaaatcgctgatagacgacgggtcaaaatcagatcaaagagtgccttgcaaaacaagaaaacctttcttctccggtgatactagtacggcagagcaaacacagcaacagaaccgacttcttttctcccttcacagcagatcggccacgttcgaaggnagctccttcgacaaccacaatggtagaatttctgaatatcaaacaagcaatcctcctcatcatcacgggtcacgaaaattgattcgcaacaaccctttctcccgaaaccttccaacttt

SEQ ID NO: 143 - DNA, 402 bp, Arabidopsis thaliana
  Clone ID: ARABL1-041-Q1-E1-A4
tttttttttttttttccagggaagaacattcataagctagtaaaacacacaagaacaagcaggggacacaagtctattacaacacaagatcagagcacaacagctacacaatccattatgtgaaaattcccactaagcacaacattacaccactccactttaccccaaatctctccaccctcgcgtctttccactgcgatttccgcacaccaaatctctgttttctctgttttctgcaagaacagaaccaatttcccaccggtgtaactcacagttttggaccacttacaagccacaggcaacaatccttcaaaacctttaacgactccccaagctctctgctttggatcataagctctcaaacaattctcacgaacatcatagtaatacaagacatcatct

SEQ ID NO: 144 - DNA, 397 bp, Arabidopsis thaliana
  Clone ID: ARABL1-041-Q1-E1-A8
tttttttttttttttgaaagttaatctttttatacatgaagctcattttaaaccctttgggctactacattggatatgtcaaaatacataatacaaaaaaattacagagcaaaacaccaaaaaaaaatctaatcttgatcccaaatatgactaaagaaatcagcaaaagttggtgaagctaccaaactagtaaagccaggacttcgaaacgggctcataaatcccgccggcgagaataatcccagtggtatagccggcgaaaacatcccaccttgatgatacatcggagagaatatcccggtagaagctgttggcaacaaggccggagatggcgagagtattcccggagcataaccaccaaattcagctgcttcttccatagccgtgttgatttcca

SEQ ID NO: 145 - DNA, 118 bp, Arabidopsis thaliana
  unsure at all n locations
  Clone ID: ARABL1-040-Q1-E1-B3
ttatatttactgatccattctgtttggtgttttacatttgattgaattcgtnnnnnnnnnnnnnnnnnnnnnnnnnnnnnnnnnnnnnnnnnnnnnnnnnnnnngggcggcctcgagc

SEQ ID NO: 146 - DNA, 446 bp, Arabidopsis thaliana
  unsure at all n locations
  Clone ID: ARABL1-040-Q1-E1-B5
ttttttttttttttttttttctcataacaattaagcttatcaatggttcaaccccatattccaaatgtatatgtatagtgagcaataaagaagaaaatttgcatatttttatcacatacaggacaaaactggaggacttccactaaaccaccaccataaattaccaaagaagaatgtcgtcaattcagagaaacttgaacatcatcatcttcatttaaaaaattcgaatcagagaagctgtgggtacaagacgttcangccacttgggataagcgcgcttgtacaaagttcaagcacactacgtcaaggttggttgaancaactccaattggatatgcatttcattggccccaangttgtgccnacngggttccttcacgcgaccacgaacgcccgcattttgaccatacttcaacaggcttgaaccatttcacgtcttcggggtt

SEQ ID NO: 147 - DNA, 449 bp, Arabidopsis thaliana
  unsure at all n locations
  Clone ID: ARABL1-040-Q1-E1-B6
nnnnnnnnnnnnnnnnnnnnnnnnnnnnnnnnnnnnnnnnnnnnnaactaattgcatatatattaaatagtgaaccctttctttcaaagggaagttttcaaattctcacactaacctattgaacaagaacatctaaaaccctctcaaacacattcatttactctacttatgattttcttctactaatgtctttccctgaaaactctcctgatccaaatgttgttgccatatcgatgccggttcctcctccgactagagtagatagtccgttacttggaccatttccgttaccaaccgctctacctaaaccgaggaagtcnaatgtcgttggttncggaccaaacaacggatgaaatccccaacaanagnccctttaaaacccgaacctggcttccgccaacaacaaaggnaancccnaatccnaagncaaggagggaactaattgcgtn

SEQ ID NO: 148 - DNA, 378 bp, Arabidopsis thaliana
  unsure at all n locations
  Clone ID: ARABL1-040-Q1-E1-B12
atcgtttacttagnccggccngaattcaaaataacatttccnttgnncttcagganaggcctaanangaaaacaaataattccaattcatatatgaacatttttgcctccttatttcttgaaaatgtggaattggaattccccgaggaattccgatctcatttcctttggcttcaggataggcctaataagaaaacaaataattccaattcatatatgaacatttttgcctccttatttcttgaaaatgtggaattggaattccccgaggaattccgatctcatttcctttggcttcaggataggcctaataagaaaacaaataattccaattcatatatgaacatttttgcctccttatttcttgaaaatgtggaat

SEQ ID NO: 149 - DNA, 196 bp, Arabidopsis thaliana
  unsure at all n locations
  Clone ID: ARABL1-040-Q1-E1-B7
nnnnnnnnnnnnnnnnnnnnnnnnnnnnnnnnnnnnnnnnnnnnnnnnnnnnnnnncanaaatcaatttcatattaatattaacggtacagtcttccccggttcggtttaaaaccatggggtggattcncaatanaaatggttgtttattatagagaggatgaagctcatgaagaaccttttcctcaagctcgagc

SEQ ID NO: 150 - DNA, 442 bp, Arabidopsis thaliana
  unsure at all n locations
  Clone ID: ARABL1-040-Q1-E1-B8
tttttttttttttttttaaaatgacaatgatcaattactatttagagacgaccatataaagatttcgaaatttcaatttgacatttccataattagttctggacttaattagtcctagaaactatattatgaaaacaaataaaggtaaaacacctttttctcattggctcatgcatcaaaaaccatttttcaatctgttttcaaaatctacaaaaaggcaaaagaataaagtaggaaaaaaatcaacgagcatgaggaaatttgagcttcttgggtttcgttaaggagttgcagaaagaagagaaagctcctttgatttcatcatggattgggatagccaacgagagcagcggtaaatcatgttggggactccggtttgttgtccaaacgaagacagagtgagccaaagccgtttgtcctttgttgagtccctcaanggatg

SEQ ID NO: 151 - DNA, 390 bp, Arabidopsis thaliana
  unsure at all n locations
  Clone ID: ARABL1-040-Q1-E1-B9
tttttttttttttttttttttggtaaatatgttgagattttgataataatgtaaaagtatatcagacttgagatctgcggttgcaacaagatacagagaacgattgaacaaagtgaggtcaccaagagaacattgatgaaaaatatccaacacacatgagccgatgagtgttccctgccacaaatgttcctccgctgctagaggataagggcttgaaatgccagacacaagcaagtcacaactagctgtcttcttccaagcctcctaatctgggtacctggattataacttataacagtccggaactcttttccantttgcaaaattgataaggcttaaacacacaagggcnaanacccaatacctcanctgcatgtcccctttgaactn

SEQ ID NO: 152 - DNA, 446 bp, Arabidopsis thaliana
  unsure at all n locations
  Clone ID: ARABL1-040-Q1-E1-C4
ttttttttttttttttttttgagattaaagctattaactataccaatccaagagcaagacaaattaatttaagtactagagagtagagatccaaatacaaaccataatatgttcgtctcacaaagtnnnnnnnnnnnnnnnnnnnnnnnnnnnnnnnnnnnnnnnnnnnnnnnnnnnnnnnnnnnnnnnnnnntcacatcacattcacataaactcgtcataaatagaccatcccaattcccaaatggcttagaagcaaatgtccagggcacaacagcaacacatggccgcaagacagcctttgaagaatccgtcacccttagacttggtttccactttaccctgagctaccgaaccatgactcggttggttagtccgggtaaccaatccggcggtggtggtgatgtcanggtagacatcggtggcggtgggtaaccncctgcaga

SEQ ID NO: 153 - DNA, 446 bp, Arabidopsis thaliana
  unsure at all n locations
  Clone ID: ARABL1-040-Q1-E1-C7
nnnnnnnnnnnnnnnnnnnnnnnnnnnnnnnnnnnnnnnnnnnnnnnnnnnnnnnnnnnnnnnnnnnnnnnnnnnnnnnnnnnaccaacaaaacccaagacaaacaagaaaataaaaaccaattacatcgtaccccncattgattttattacccttgncgggattttatttgaaaggggggataaattaaaaaaggacatcatcaaagcagtacgtaaaagtccgaacgatattacaaaaagaaacacaagatttgcnaataaaatgagcttcaacacacgtgtctcccgcanaggctttgttaaattcncactcaccatattcaggcgcccgacgggggaagggacggtggcatcgtcggaatcgggattgnccttggaggagcccaagctccttgaaaaaangggctaaaacacgaagctccaaccgccaagccatccccaacc

SEQ ID NO: 154 - DNA, 426 bp, Arabidopsis thaliana
  unsure at all n locations
  Clone ID: ARABL1-040-Q1-E1-D1
nnnnnnnnnnnnnnnnnnnnnnnnnnnnnnnnnnnnnnnnnnnnnnnnnnnnnnnnnnnnnnnnnnnnnnnnnnnnnnnnnnnnnggccattgacattgncatttcttanaaaacacgaatatgtttacacagggtgttacaatacgaanaagccaatggtancgaaagatggaaatattgtacgatacaagagacataaaaacacatgagatgatgatcacctcagtggaacttgaggctggtcaanacgttgttgttgacgggatcagccaagtgatnaagcaggttctgataaggncccanaccggtcactaantccttgggataaagtaaccgaggatggcgaacaataaccaatctaacgttcttgaactccctgagtttcaaaccccttcaatgacttcccaacctttccaaaaccaaan

SEQ ID NO: 155 - DNA, 402 bp, Arabidopsis thaliana
  unsure at all n locations
  Clone ID: ARABL1-040-Q1-E1-D10
nnnnnnnnnnnnnnnnnnnnnnnnnnnnnnnnnnnnnnnnnnnnnnnnnnnnnnnnnnnnnnnnnnnnaaagaggtttcaaacaaagagatgataaaacataggaatctaacttatttcatggaagatccctatgtgaagaagtcnnnnnnnnnnnnnnnnnnnnnnnnnntaaaaccgagtctgtgagggatcaaaggacacaaactttcatcccattgcatatttctgagtccagcttctcgcagtagactcatactttgctctatcggttttgtacatgtgaagcaatctctggaaccaatggatcatctgggtttgggtccgttaacaatgaacatatcnaaagcaanaaccttcgatatggtgagtgcaggactccattgttctttcaaaatgtcaa

SEQ ID NO: 156 - DNA, 403 bp, Arabidopsis thaliana
  Clone ID: ARABL1-040-Q1-E1-D12
ttttttttttttacgtaaaaccaagataagaattattgctgtgaaataatatcatgtattttaagataattaaacccgaaaaatcacaaaagcccccaaattcaaagagaaagaatataaaaaaaagcagaaccaaactgtttttttctttttttcttattgataccataatctttttaagctctaagcagtagatcccttgagcttcttggtgatgctggcaatgtactggccttggtgaaatgcttgctgtagctccagctctgttggctgccttgaaccgtctcctgcaaatgttccagctccatatgggcttccacctttcacattctccatttcgaacattcccgcgccaaatgtgtaaccgattgggacaaataacatccccgtggtgaaacaagct

SEQ ID NO: 157 - DNA, 444 bp, Arabidopsis thaliana
  unsure at all n locations
  Clone ID: ARABL1-040-Q1-E1-D4
tttttttttttttagagtaaacaataacagatttcatattaaaattatgcttcataaatgggtcacaacataaaccatcttcagacactaagttcacacacaaacttcagttcaagcatgaacttgaaaagaacagctaagatagttacatgtcctctacacatatataatttgaatatattacataaaacacacaaaacaaggattaaaacggtgcgtatcatgggataccgatgatgggcaagaaaggaacgtaataactggtcggagccagcccccactcgggaggaactggtaaatcaacggtcttggacgaactaaaagattcgaagccttcntggacatgattcaagaagaacaacttgggaagaanagaccatattttgtcaccgccaagcntaacaatcctccgacnttaacgttaattccttgggaaancataaa

SEQ ID NO: 158 - DNA, 407 bp, Arabidopsis thaliana
  unsure at all n locations
  Clone ID: ARABL1-040-Q1-E1-D9
nnnnnnnnnnnnnnnnnnnnnnnnnnnnnnnnnnnnnnnnnnnnnnnnnnnnnnnnnnnnnnnnnnnnggccantgacattgtcatttcttacaaaacacgaatatgtttacacagggtgttacaatacgaagaagccaatggtancnaaagatggaaatattgtacgatacaagagacataaaaacacatgagatgatgatcacctcantggaacttgaggctggtcaanacgttgttgttgacgggatcagccaagtgatcaagcaggttcngataaggncccacaccggtcactantccttgggaaaagtaacccgagggatggggaancaaaaccaatccaacgttccttgacccccttgagttttaancccctcaaggnatttccnaccttcccaaaaccca

SEQ ID NO: 159 - DNA, 443 bp, Arabidopsis thaliana
  unsure at all n locations
  Clone ID: ARABL1-040-Q1-E1-E7
nnnnnnnnnnnnnnnnnnnnnngatcgaatatacatgaccatacaaagctaaaataagacaacttgtggtccaaatacaaagttaaataaaagacaaggtgtgtaagaaaatacaaagctaaaaagatacatgtggtggaaacatacaaagctaaaaaaaagacaacaaagcaaacgaatcatatgtctcttttggcatcaagtggaacatgagttgcaagttacgtgtctttgtctatctttgtctccaaccggtgatgataaacttcattgaagtgcataagacgaaattcctttacagtttctccttaactcacaaccacttgcttatccgccattaacactcaccaaaagcatagagaanaaaaacaacaattagcatttacagttaactttccaatttgattcaatcacagaaacaagatattaaacaacaaagttta

SEQ ID NO: 160 - DNA, 423 bp, Arabidopsis thaliana
  unsure at all n locations
  Clone ID: ARABL1-040-Q1-E1-F1
nnnnnnnnnnnnnnnnnnnnnnnnnnnnnnnnnnnnnnnnnnnnnnnnnnnnnnnnnnnnnnnnnnnnnnnnnnnnnnnnnnnnnnnnnnnnnnnnnnnnnnnnnnnnnnnnnnnnnnanattaaagcaaaagcatcaaccatcancaaaatccaacaagatagngaaagatccaaccgccacttgcaactanactananaacncngaaatacaaaaacttgcaaaacacagcccaaaacagaaactaacacacattgcttaggggggaaaacagttttttgggaaaaagaaaaaaaatccccgtcacttaaccacccngaaaaagacncaaanancaataaaaaaaaacaaagtaagggnggcggaanattagggcaccaatatttaaaaccncccgcaangtcaaaacncaatcgggacca

SEQ ID NO: 161 - DNA, 427 bp, Arabidopsis thaliana
  unsure at all n locations
  Clone ID: ARABL1-040-Q1-E1-F2
ttttttttttttttaatataaacacgtcattagcatttcaattaccaaagaaaagcaagaagaagatgaaagagcaaagctcagtattatacagatctgtagataatgaaaactctggccatcgaatgatatctttccaccaaagagaagaggttgtgtacataaaagacctttgaattaacctaaataagaagataagagaaaaataactcacattttatggtttatgaatttgatatcgaaagatctcttacaagccatgtaaaaacaagaattcccccataattttacagtcgtccaaatcatcaatatgtcatcatccttctcaatttagtgttgaatcaaccacagcctcnggccccctaatatcaaaaccttggtccgccggttaagagtacaaagaatgagaagggaacccnttggttgc

SEQ ID NO: 162 - DNA, 89 bp, Arabidopsis thaliana
  unsure at all n locations
  Clone ID: ARABL1-04-Q1-B1-F8
nacataagacgggccgtccacgcgtacgnaanatcggaattcggctcgnnnnnnnnnnnnnnnnnnnnnnnnnnnnnnnnnnnnnnnnn

SEQ ID NO: 163 - DNA, 436 bp, Arabidopsis thaliana
  unsure at all n locations
  Clone ID: ARABL1-04-Q1-B1-G1
cccgtacgtaagancagaattcggctcgagggaagagattggttattgctaataagttaaggaggagaggaagatctatgtcagcttcgaatttttactcgtggcaaaaccctaattcaatgcctttacttgcactccaagaacctaannnnnnnnnnnnnnnnnnnnnnnnnnnnnnnnnnnnnnnnnnnnnnnnnnnnnnnnnnnnnnnnnnnnnnnnnnnnnnnnnnnnnnnnnnnnnnnnnnnnnnnnnngctcagactcgaagttgtttctgtctaagtagtttgcnnnnnnnnnnnnnnnnnnnnnnnnnnnnnnnnnnnnnnnnnnnnnnnatcaagtaacattgtttcctttaatacttgnttttaatttgntcntcncctgtgaatttgttttattaaagggagaatttanaggaaaaaaaaaaaaa

SEQ ID NO: 164 - DNA, 466 bp, Arabidopsis thaliana
  unsure at all n locations
  Clone ID: ARABL1-04-Q1-B1-G3
gcccgaagagcacagaaagtcgcgnncacccgtacgtaagancggaattcggctcgaggaaaaatggaaaatattgagtatctgaatgagatccaagccgttgcggggaagctaatccacagctatggagtcccagttatgatcacgttgttcctaagatggctcgcgtccatcgttgcagtgtcagtcatgtctttcatattttaaacatttggatttatgtttaatttttaattttttaatgttggtttacttcttttatttgtgtgtaaagttttcttatgatattggatcanacgaaatggaagtactcaaacaatataatggcttcactattaactccttacctcctctctaaccttcctantgttatttttcaaggtcttganggaacggggttgggaaatggatcgctctcctcaccgttantcccaggctttttttaccaaaccattttcaatgaatc

SEQ ID NO: 165 - DNA, 427 bp, Arabidopsis thaliana
  unsure at all n locations
  Clone ID: ARABL1-04-Q1-B1-G4
anatcagaattcggctcgaggttttaaatatcaaagccatgttttgggtaaggaattaaagagcaaaaacctcgattccgatttcaaatattcgaaggtgaaatttcttcattttctgcgaatttggtagctatcacgttctcaatctggtgaattagggcttttgttgagctgtggaagctaatgatgggtgtacccaccgctgaggaaggtggggtttctctttgttgctatgtcttgaaaccttagtttgcttttgtcaatgggtaaaaccgaggatgatgtgagtctccgtgtcgccggcggcgaagctaccggcgattcgacggtgaggaatgctcngtgtgggtgttgcaaatggatttcaaacctcgttgggttcaaatgtttaatcntgctgcttttaacaatcnctttgtttccttcc

SEQ ID NO: 166 - DNA, 410 bp, Arabidopsis thaliana
  Clone ID: ARABL1-04-Q1-B1-G5
ctcgagcatgagggaagtcagaacagtggtgtactctcagtttttggaatcttacaaaagtgtgacagttgaagcaatggcaaaggcctttggcgtttctgtcgatttcatagaccaggagttgtcgcgcttcattgctgctgggaagcttcactgtaagatagacaaggttgcaggtgttttggagacaaaccgtcctgatgcaaagaatgcactttaccaggcaacaatcaagcaaggggatttcttgctaaaccgaatccagaagctgtctcgtgtgatcgatctgtgagcatgctacatgtttctgtttcactctttcgtcaagctttgcaacttggaaactccgaacggtagaatcttaaggtctgagaaacgatatgaactttggattttgagatgaatggctg

SEQ ID NO: 167 - DNA, 413 bp, Arabidopsis thaliana
  unsure at all n locations
  Clone ID: ARABL1-04-Q1-B1-F1
ctcgaggtcttaaaacatgggaagtatcgtggagccatgggcagcaatcgccgagaacggaaacgcaaacgtgaccgcgaaaggctcgagcagggagctgcgacatgggagaacagcacacaacatgtcttcatcgtcgctaaggaagaaatcagacctgagattggttcagaaagttccatgcaaaactctcaagaacattctctctaatcttcaagaagtcattcttggtactaagcttactctcttatttctcgccatccctctcgccattcntgccaattcttacaactacggtcgtccgttgatatttggactgagcttgatanggctgacacctctagctgagcgagttagctttttgacagagcaactagctttctacactggtccaacagtgggcggtttgttga

SEQ ID NO: 168 - DNA, 415 bp, Arabidopsis thaliana
  unsure at all n locations
  Clone ID: ARABL1-04-Q1-B1-G7
ctcgagcgccggagnnnnnnnnnnnnnnnnnnnnnnnnnnnnnnnnnnnnnnnnnnnnnnnnnnnnnnnnnnnnnnnnnnnnnnnnnnnnnnnnnnnnngttccaaagggaacccttaagaagagtcttagcaataccgttgccgttagccangtgagaatccttangngnggcgaagaaatccccaaggagacttcagatctggttgtggaaatgtcagatntgggatctactcgtcggattggaccaagattngggtttgattccgggtcagattcgtttatctggccgcaaatcgaanatcagcaccgttttacgccggtcctgtgaccatgacctcgccgcctcctagcgatgtcccgcttccaagctttcttcacnaanaangnaacaaatgatntcatcaggatccttc

SEQ ID NO: 169 - DNA, 453 bp, Arabidopsis thaliana
  unsure at all n locations
  Clone ID: ARABL1-04-Q1-B1-G8
gagacgncccgccacgcgtacgnaaaatcggaattcggctcgagaaaacacacaagaaaataaagatactacaaagtatacgacaacttctttttttgtttgtagtaataattatagccaaaaatatagacanacaaaatggagagaaagcctcttgaacttgagtcgacggataaccaccagaatccttcctccgccgtatacggtggctctgttacggcggttgactctgttgaagaagatgttcagaatcagaagaaagtcgtttatagaggctggaaagtcatgccctttattattggaaatgagacatttgagaagcttgggatcattgggaacactaacaaaccttctggtttatttaactgcagtcttcaacctgaagangtantacagctgcaancatcantaacgcctttagtggcacaattaatttcggaactttcgttgctg

SEQ ID NO: 170 - DNA, 483 bp, Arabidopsis thaliana
  unsure at all n locations
  Clone ID: ARABL1-04-Q1-B1-H1
ggggatgaatccttggctcgccagaagagcataaagtngcnggcnacccgtacgtaagancngaattcggctcgagatggcgacgacgacgagttgttcgcttctcctttcttccactctcttccttcactctcctccttcttctcacctctccttcttcaatctctcttcttcacgatcctctccaatttctctttacccaatccgatccaaacgctatttccgaatcctctcgaagctttcactaaacgacaacaacagagacgacgatgatgatactcttcattttactccgttctccgccgttaaacctttcttcctcctctgtacctccgtcgcgttancgttttcactcntcgccgcttctcncgccgttgaatctggctcggngtttgtagttagtactccgaagaaacttcaaactgatgaagctcgcgaaggntcgtttgtttcaagagaacactccttccgttgtttacatca

SEQ ID NO: 171 - DNA, 452 bp, Arabidopsis thaliana
  unsure at all n locations
  Clone ID: ARABL1-04-Q1-B1-H3
cgcgtccnggccgtacgtaagancgnaattcggctcgagtgactctggccctctctctcttctctctctcaaaattttcagagagagaatcaaaccanaattttcgacgacggtaaattgatgtcgtcggtgatggttgaattgccgtccggtgtagtatccggctttcgtctgacatatattggcttccacagcagtacatggtcggnccntgtctagcatcatcggctctttcagcggtgatggctagctcacggtgttaatccggcgtagttcgggttttcttttccttttggggnaacaccacgggttacgtttccgaccgttgattgtntttanatnaagaactcattgggtatgngtgttgggnatcgccgtnggttttnaatnnaagcctgcttaattagatccaaantncaaaccnatcctttgaaatttaaaggttacggnta

SEQ ID NO: 172 - DNA, 477 bp, Arabidopsis thaliana
  unsure at all n locations
  Clone ID: ARABL1-04-Q1-B1-H4
ttgtacggtcatagattgatttanacgncccggccntacgtacgancnaaaattcggntcgagcgcattaatctctctctctgtatcttctcttgagtggagcgaatatccaaaagagttccgagtttctttcatccttcacgagcttatactttttcggtctccattcgtttgtttttaacgatnaaaaacaacggcgaaggtattggaaataagacagaagctgttagctctgtttctccatggtgtcaagatcttgtgctaattttctagacttatcatcttgggaccttttagattttcctcaaactccacgaactcttccacgcgtcatgnctgttccgggaatcatcaccggacgtttnacggtgatacancctcccgaaagtaacttcgaactccgggggttcacgtgagagggaagattattgtancnaacatgttnccactncaatctaaaagagatgcagaanctgg

SEQ ID NO: 173 - DNA, 414 bp, Arabidopsis thaliana
  unsure at all n locations
  Clone ID: ARABL1-04-Q1-B1-H6
ctcgagctattctctgtttcgtgttccacttcacgattgagagaacactttcctaagtttatcaagaacatttcttttcaatttctcgattctttcnggctcattctctcatctctgtttcatatctaaattattgattgagaattcgacttgtggaaatggcaacagttgcatcaaatctcgcttgtatcggaaaagtaacgatgtctagagctagttcaatggtaggatggaggttgcagataaattgcagaaagaaagagaaaggaagagatcagagtcattatccttacaaagtcattgaaatcactcctcctcctaaatctctcggnantccgttggcctcctcaataaccttcaatgtggagagaacgtgatgatcgaagggcaaacgtacacaatccctgctgtgac

SEQ ID NO: 174 - DNA, 459 bp, Arabidopsis thaliana
  unsure at all n locations
  Clone ID: ARABL1-04-Q1-B1-H8
ataaacggccgnccacgcgtacgnaaaatcggaattcggctcgagcggctcgagcggctcgagcggctcgagctcgagccgctctcaaaccctaagagaagaaaaatttgctttgtttttgccaaattcaatcgngatatcaaagatgaagatgggaggttcaaagagaagagtatcgagcaaaggacttggagctgttcttaaagaacaaagagctaagctatacatcattcgaagatgtgtcgtcatgcttctttgttggcacgattgatcctcaatctgtcttcanatttcatcctcatcaatctttatgtataaaaggctttcgtgtgttggagggagaagagtcgtgatgtttggagcttaagcgggctggcgggatnggggttttgattctacncgaagatttgtggntgaatnggttaaagagtttgacttgtttttgattaaacctctcta

SEQ ID NO: 175 - DNA, 392 bp, Arabidopsis thaliana
  unsure at all n locations
  Clone ID: ARABL1-040-Q1-E1-A1
tttttttttttttttttaatgatggattgatggtggagaatggagatgttgtccgtgcagtggttcatgagcatagagaggagcttcaacgcctaaatgcgtatattcagggaggttactaagatcttgaataatggaaagaaaagagttccctgttgtgtcgtctggtcttgtgctgctgaatctgaaaagcttccagatcagtgtaaatannnnnnnnnnnnnnnnnnnnnnnnnnnnnnnnnnnnnnnnnnnnnnnnnnnnnnnnnnnnnnnnnnnnncaaaactaaggccttgtgctgcttccctccttgcgctaacttagcaagagataaaaccaaaaaccctgatccctttatgaaaaaaaaaaaaaaaaagcccaanccgaattc

SEQ ID NO: 176 - DNA, 386 bp, Arabidopsis thaliana
  unsure at all n locations
  Clone ID: ARABL1-040-Q1-E1-A3
ttttttttttttganctgcaaatctggttgaagaaattaagcaatatacagagttacaagaattaagaagaataagatctaaatatctacacagagaacataaggnnagaagaagaanagaagcagaataatttcataacaagaaaaaggtattcaagggagaaatccaaataggaatggagaagggtaagaagcggtanaagggagaagaccctggcggaggacaggcggagngatgtggagcacggtggttgaggtgttgccgcataacaatctgggacggcttcagccaccaccactacanactccatacctatcttcattagctctatacacagctccatccttttatcaacaattttcccctgtttttttttaatatcccc

SEQ ID NO: 177 - DNA, 423 bp, Arabidopsis thaliana
  unsure at all n locations
  Clone ID: ARABL1-040-Q1-E1-B1
ttttttttttttgttttgtttttcattgatataaatacttggagtacacctccttacaactagaaacaacatggaaacaaacgtggagtaacaacttctacaaacttggaaaagatggaaactgtaatcgtggaagactccttgcttattgtaactaaatcgaaaacagagactaagtaaaatgacttagtgttgggaatacttgggattggggcatgcgagtcccttaaggggccttctccttcctcntcntcctctccgtctggactcatcatattgttgcataaatcgtcctcctgtttgatatccccgtttagcaaatttgtcaacaagcttcgagtcatcatcacctgaacaatcncccggaganttgcgcaaaattggtcaatgcttgcctccatttaagaactttccaaggatntt

SEQ ID NO: 178 - DNA, 401 bp, Arabidopsis thaliana
  unsure at all n locations
  Clone ID: ARABL1-037-Q1-E1-F10
nnnnnnnnnnnnnnnnnnnnnnnnnnnngaaatgagaagtaacattaactaattacaagataggatattaaacctcgtgtgatatggaagaaaataaacttttgactaatttacatatgcaaaagttgtagtaacctgaaaaaaaaaaagaattctaaaaacaaaggtataccttgtaggaaatttcgtattatatagttagaataaagaatgtactaaatggaagaaaaaaatatatatatgaatctagccgagactatcaatggccaacaccgggactaggaacggatcggagataccgatcaacggtgggagagatgtcgtgatcggagctttccggcgaagacggccgcgtgacctttttgctcggtgtcgagttgggaattttcccctttgggaaa

SEQ ID NO: 179 - DNA, 420 bp, Arabidopsis thaliana
  unsure at all n locations
  Clone ID: ARABL1-037-Q1-E1-F3
ttttttttttttgaatctgaactctgatttttgaacaaacanatttacatgacataaaggtacaanggaaaaattaaatctttttttttttgnttnnnnnnnnnnnnnnnnnnnnnnnnnnnnnnnnnnnnnnnnnnnnnnnnnnnnnnnnnnnnnnnncatacacaaaccagaatgttacaaggagaactctcaaacagcggctctcaaggctcctctcgctgcntcccgtctcatttgatcttgtttcccgctgcctcggaagtacatatacacttgcngantaacccagatgctaaccactgattccanggcaggaaaaatgcaaacccaatgaagtagaatatcccancaattgcnttgaccacttaagacatcctagtgcaggnanagatncccgcaagagatttncctttgaag

SEQ ID NO: 180 - DNA, 397 bp, Arabidopsis thaliana
  unsure at all n locations
  Clone ID: ARABL1-037-Q1-E1-F4
tttttttttttttttttttaagccagaaacgacgtagtctataaagagaagaagtcaagttagtcatttacaaaaaaaaagtcagtttagagcattatctttgacaaaccacaattcttttgctgcaaaggttaacaaattttcacatcttccttaactcggcttgaaacttttcgaggtcttcaagctttccatcaaaagtcattgctgaaaactctttgccatggttctttagcctctttactttagcgctttcacttgctttcattcttcttgttttcagcctctccacgcttgcacgaagttccgatgccattttcgtcatctctttgaatatttcatccataagaagactcatcataagagctccaaagcttcattaacgagtctcaanaag

SEQ ID NO: 181 - DNA, 426 bp, Arabidopsis thaliana
  unsure at all n locations
  Clone ID: ARABL1-037-Q1-E1-E8
ttttttttttttcttaaaactctcattaaaaacaatgataaatcaaacatgcttcgttccagcttggttactgttcttgcccatctcaagcgcattcccatactcaccatcctccacaaaccttgaccaataccagtgtgacctccacacttgacccatctcctctatcggaatccctttcgtctccggcaagaaaatgtatacaaagatcgacatcaccaccacgaaaaaggcgaaaacaaggaataacccaaacttcaaatgacaaagcatcgtcaagaagatttgcgcgataatgaacgtgaagatcatgttcacggacacggtgatactctgcgccgccgaccttatctccaacggggaagatttcactcggtactaaccaccctagtgggccccacgacnacgcaaaanccggcacattga

SEQ ID NO: 182 - DNA, 408 bp, Arabidopsis thaliana
  unsure at all n locations
  Clone ID: ARABL1-037-Q1-E1-F7
nnnnnnnnnnnnnnnnnnnnnnnnnnnnnnnnnnnnnngaaaacctgagacatcatattatcatacaagtctagatgaacagtgatgagtanataggtaaaaggtagagagtcgagagatacagagaaaagagaacagtgactagtagttcattacaanaatttgttgatgctggttgcnaaagtgtctttagagacagcaccgangattgtatccttcttctcaccattgacaaagatcatgatagttgggatgcttctaacaccatactggccangggttgcaggagacncatcagtgttaagtttgtagnaacttgaactggccggcgtacttttgcncnanttcgttgacaatgggatcaatcactttgcaagggtcnacaccatggtgcccaaaaagtccgnc

SEQ ID NO: 183 - DNA, 167 bp, Arabidopsis thaliana
  Clone ID: ARABL1-037-Q1-E1-F8
tttttttttttttataaatacgagttcccatacacataaaatgaaaagaaaccaaggtaagatatgtctcaagagttttattaagcatgagatgatgaaaatgttgttaccaaatcttaccttggtttcttttcattttataaatacgagttcccatacacataaaa

SEQ ID NO: 184 - DNA, 402 bp, Arabidopsis thaliana
  unsure at all n locations
  Clone ID: ARABL1-037-Q1-E1-G10
tttttttttttttcagaatcagtaaaacttagaatgagccacatgaagaaagagatttcattagcagtgaagaaaaaatagacaagcaagaaccgacgaaactctctcttgctctcaagttttgactccaattaataaaatggcgacacagtgaaaagaaaataatagtgtttttttttgccattgctctacgcctaaactctctaaaaccaatagagctttttgtttcaaaagcacatttacgcagcaacagacacacggggagcatcatccacgggtttcgtagctctgttagcatcatttccgccaccacgtcttactcgtccattgttaccattggccctcgggaacccaccaccatcaccatttgctcggtttgcgtatccgcctcnattgtttccc

SEQ ID NO: 185 - DNA, 434 bp, Arabidopsis thaliana
  unsure at all n locations
  Clone ID: ARABL1-037-Q1-E1-G6
tttttttttttttaaagaagtgagaaactggatttctacaattgaacaaatatgtttcatacaattgtggaaatgacagtttcagactcatccgttacattttaacaagaatattgccttgtctttttcattagnactacaataaaagcgataaggatagtantattgtgttttctctgtgtgatgnnnnnnnnnnnnnnnnnnnnnnnnnnnnnnnnnnnnnnnnnnnnnnnnnnnnnnnnnnnnnnnnnctttaaaccttgagaaaacgcagccagacgagtgcaagggcttttgtgtagtggggaacacntcaattctggctttgatcgacttcttcancanatnccctggtngnttgagaaagagtttcaatcttgtcgtgaagcgtcacgacaagaatgatgggcatcatccaagaangcttccaagac

SEQ ID NO: 186 - DNA, 425 bp, Arabidopsis thaliana
  unsure at all n locations
  Clone ID: ARABL1-037-Q1-E1-G7
nnnnnnnnnnnnnnnnnnnnnnnnnnnnnnnnnnnnnnnnnnnnnnnnnnnnnnnnnnnngatcaaagaaanaccaaataagatttcancaaaagcancaaattgcaaattcaanacaangacattacaangggatttcagacaagagtcaaagnttcaggtcaaaacaacccaatttcaaacataaagtcnacaanangctcaaaagacaaaccaaagtgatcatcatcanttcttagcagcagctccttttcctcnagctgcacnaccagaactcgcacctgcagcttgagcagctttcttagccgctttcncttgcaatgctttcccatctctttcacggcgttgccccggngtcaanaccatcgtcaccattcagtaccctttccaccagcacgagnggaagctctttcacgggcacgcnc

SEQ ID NO: 187 - DNA, 141 bp, Arabidopsis thaliana
  unsure at all n locations
  Clone ID: ARABL1-037-Q1-E1-H1
nnnnnnnnnnnnnnnnnnnnnnnncgatcagaaaataattaaagaagtaagattttcacacaattttgtttgcttcttttgttacaaaagaagcaaacaaaatcaaattctggttcaaataaggagaaaaaaaactcgagc

SEQ ID NO: 188 - DNA, 402 bp, Arabidopsis thaliana
  unsure at all n locations
  Clone ID: ARABL1-037-Q1-E1-H10
ttttttttttttttttttaagaaagaaagcacaactttaaaaatccaatccgtacattcagacannnnnnnnnnnnnnnnnnnnnnnnnnnnnnnnnnnnnnnnnnnnnnnnnnnnnnnnnnnnnnnnnnnnnnnnnnnnnnnnnnnnnnnnnnnnnnnnnnnnnnnnnnnnnnnnnnnnnnnnnnnnnnnnnnnnnnnnnnnnnnnnnnnnnnnnnnnnnnnnnnnnnnnnnnnnnnnnnnnnnnnnnnnnnnnnnnnnnnnnnnnnnnnnnnnnnnagcgggagagtctccggtattttgttgccggagctacttcccggaaacattcctctctcatcatctgttgccagcaacgtattctttcccatctggctagccanaaactgggttctcctctctc

SEQ ID NO: 189 - DNA, 394 bp, Arabidopsis thaliana
  unsure at all n locations
  Clone ID: ARABL1-037-Q1-E1-H11
nnnnnnnnnnnnnnnnnnnnnnnnnnnnnnnnnnnnnnnnnnnnnnggtgtgtgtaactaagaaaagtacaaaaccacacatgacacaacagtactacactctcaattatgtgtacatgagctataaaactgcccctttgtttactaactagatatataacgagtactgtttaatttaatggtttgatataactaaaaattaggagaaagagaagaaggagcgtttggcaggaggacgtccaagggctctcatgagattagcaacttcaactacttttgcaacctctgtccctctctttgcctctgccgtcgctcttctctcctccgctttcctctgcgctttcgccacattgttttgcgttttctccatcgcttttgcttttctctcctctag

SEQ ID NO: 190 - DNA, 405 bp, Arabidopsis thaliana
  unsure at all n locations
  Clone ID: ARABL1-037-Q1-E1-H12
tttttttttttttgttgaaagcttgattctttcttttttatggctgaatatttcacaatccaagcttgtcatatacaaaatagacaaagttgcagacaacaaagtgtttgtttagatttgatagtcgacttcatatgggtttgtacctgccctatagtaacaagcttcacattcaaacgaaggccgagatgcagcatcagtgattgcaatctcatgtcgacgactactgtgattagtgcaatatgggttattgcagaatctgcacttgggaagcacaagccaacattcaagacacagaacatcatcattaccacacgctgcttcttgactctcagtatctgaaccaacaaggnacactgcgcactctgcacatcctaaggatacaaagccaagcatccaccggaa

SEQ ID NO: 191 - DNA, 426 bp, Arabidopsis thaliana
  unsure at all n locations
  Clone ID: ARABL1-037-Q1-E1-H5
ttttttttttttgaaaagttcaaagagttgttataacatccgcaagattttacatgtantgtgatccctttttaaatttgttttgtttgtctagcattattatataaaatacgaattaaaatcttacaaatcataagattgtttcccagtgaatttaacctcaatgggactaacatttttaccgatggatctcatgtttagtccaacaccttctcttcctggattcnctttctctggataaactccatctttcgggtgaagatattgaacctctccgttacgggaacactctgtaaaactggtaangtgatcntgtactttgacctcaacctcgtagcnaaagccaanacacgggttcnttcctcgncagtttcaagcagantcgggtccgtctnctcattanccgcaggctcctcccggntggca

SEQ ID NO: 192 - DNA, 406 bp, Arabidopsis thaliana
  unsure at all n locations
  Clone ID: ARABL1-038-Q1-E1-B5
ttttttttttttagtctaaaaaagggctccaaaccaaaaagagtgatttcagaacactatccatcaaagttatcacaaaattcgaaagaaagagaaaggtagtttcagagaaaatggaggacaaaagttaaaaataactcaatgaaaatctgtttccccataaaataaaacttcaatagaagaagccgagaaccttgcctccaacattcttccttctagcttcttcatggtccataatgccagcagatgtagtcagcacgatgtaaccaaactgtctagaagggagcaaacgggcagtccaaccttcaatttccttgacaccaacatcaaaacgtgggctgataacaccacacttgttcaaccttccgttcaattcaacgacgatnttgccagatctgtggtcanc

SEQ ID NO: 193 - DNA, 407 bp, Arabidopsis thaliana
  unsure at all n locations
  Clone ID: ARABL1-038-Q1-E1-B9
nnnnnnnnnnnnnnnnnnnnnnnnnnnnnnnnnnnnnnnnnnnnnnnnnnnnnnaatcattacacaaaccattatacatgccaagattcaaacatttctcatcagaaactgactaaaaaggcttgtcgctgcagaagtcgcagaagcacttaagaccgtcgcattttccacctttcgcgcccttgtaaaaacgacaatttcgataacacaacgacggataaatcctagccatacaatagcttaaaggcgcatcaatgtatccttttagacattccttatctttcgcttctatctcaagatatttcagaggtgaccaaaaagaggattaaaaagattgcgaagttagaaactgacttcattgccatgcccatcttctctgtctccggtagtcccccaancctcccccc

SEQ ID NO: 194 - DNA, 405 bp, Arabidopsis thaliana
  unsure at all n locations
  Clone ID: ARABL1-038-Q1-E1-C1
tttttttttttttttgcccgcaaacgcacctgtttccaactgaaatcagaaaaagtgccaacaagatatccataacaacacaaacaaaatcacatagaagactctgtttcaagttccaacaacacattattcaaaacccactctttacttactcacttactctcttctgctaagattagccaagctcatcaagaattaatcccctgacgataataatgatcctacagcctcctccatgctcttcccatttggattcttgttccattccaacatttttctaaaagtctccacgaatttctccgcgtgaaccactctccattcctcgaaatcccattctccatacattctaggatcatctttattaacccanacataagtttcaactttcaacttctcangaattta

SEQ ID NO: 195 - DNA, 397 bp, Arabidopsis thaliana
  Clone ID: ARABL1-036-Q1-E1-F9
tttttttttttttagttttaaagagcatttataagtctttaaccgaggaatccaacatcaaacggagacacatggttgttagtttctaaaacatgaaggatcattctgattttgtattcaaagttcaaaccaaaaaagaacacgaaagcaagagtcggaaacagagaaatgagcaaaacaagcttttagaaaatcaactagagagggagcgatctggtgatgattcttcattcctctgcagcacttgcggcactcaggtcaacacttaggtccagttgctttccggtgattagggtatacatgttcaacacatccgcaacagttgtctcaaagtgtgttgtagcatcatagctcgttgaaataaagcagttgtccaactctggctccgttgacaagg

SEQ ID NO: 196 - DNA, 413 bp, Arabidopsis thaliana
  unsure at all n locations
  Clone ID: ARABL1-036-Q1-E1-G4
ttttttttttttaaaaatagatagatatataattatcttcatcacacgtaacgtaatggacctagtaacctatacagcttccatacattgggaaagtaagaagaaaaaacaaataagggacaaagagttacttgaaaagaatttatagttcattttctacacattcaaagatgataaataactccacagcttaaagggaagctttactttacttttagctttctttttttgattttgttttcttctgtaccggaagaantgaaacgatgtgtangatagatacattggtcttcctcccttcacaaaatggtgcatgtgcacattactgcctttggtgcnttatcaaccttcttctcngntttggntttagctagagaanggntgtacaacancatgcatcccaatgnctccac

SEQ ID NO: 197 - DNA, 415 bp, Arabidopsis thaliana
  Clone ID: ARABL1-036-Q1-E1-G5
ttttttttttttattaaaacacttttattactcgaagacaaagatatcaagaaagaatggcaacaaagatggaaatatataattaacgacgattttgttttacatttcacacattttatttacagaactcaataatccagcagtgataagcttggcaaacgaacttgcaatgggtaaagccagaagctgcagccaaagcttcaaactcagctcttgatctctcttttcctccggaacattgtgtgaacattaacatgtccatgtcaaaggcaatgtttgcgttgatgtctccattctctgcctcatcaggagtgactaattctataacaactactttaccgctttctggtagtgatttccaacaattcttaagaatcttgacacaatcttcatcggtccaatcatgaaagtatac

SEQ ID NO: 198 - DNA, 373 bp, Arabidopsis thaliana
  unsure at all n locations
  Clone ID: ARABL1-036-Q1-E1-F8
ttttttttttttctctacaactagatcaaaagaggaagcgtcgagggtttgaatccactgatgttcatcttcgcgctagtagccaatgcaacatatgttggtagtattcttgtccgaacaactgaatgggacaacatcaaaccaaaccttccttggttgcttgatgctattgtctgcgtcgtactagatctatttataatactgcagtatatctactacaagtattgcaggataaagagcttggaaagcagagaagaagacgcctatggagactatgtggaagcaancaaaacttttgtttcgtgaatcactatttatgttacaaggataatttgattttcttttgatcttaagtattattgatttaaaanaa

SEQ ID NO: 199 - DNA, 403 bp, Arabidopsis thaliana
  unsure at all n locations
  Clone ID: ARABL1-036-Q1-E1-G8
ttttttttttttttanctgaactatggaaaaacatcaaattgaagtccaaagttcattaaggaagagattagaaatanagagagtgataacaattgaactcagtaaagaatcanaaaagcaaagagatccaagattgcaatttatgtcccagctggctaatacaaacgaacatctaggaagtgtttgagctatggattgactatagcttggatctgctccaatgtcttcccttttgtctcaggcacgatggcantgacgaagacaatggccagcgcgttgatggcancgtaaatgangaaagttccgtaaggagctccaggacatgangaagttgaaagtgtaagaaanagcccacgctccaagancaagttcaccagcgtcgccaatgcngcctgctacctc

SEQ ID NO: 200 - DNA, 286 bp, Arabidopsis thaliana
  unsure at all n locations
  Clone ID: ARABL1-036-Q1-E1-H3
ttttttttttttttaaaccaatgggtgactatgtatatccttagaagcatgataaagcaccattgaaaatttgaaatatatcaagaagattcagatggaagtttttttaacattgtcaaaaggagttccaatcgaacaaagtgtacattttggaaacaacttgcttaccgtcatcgctggaactgccgagagagctcccactctcgaagccatttctactttttttaagagcttccaaaatgtacactttgttcgattggnantccntttaacattgtcaaaactc

SEQ ID NO: 201 - DNA, 399 bp, Arabidopsis thaliana
  unsure at all n locations
  Clone ID: ARABL1-036-Q1-E1-H6
ttttttttttttttttttttgagattaaagctattaactataccaatccaagagcaagacaaattaagttaacgtactagagagtagagatccaaatacaaaccataatatgttcgtctcacaaagtnnnnnnnnnnnnnnnnnnnnnnnnnnnnnnnnnnnnnnnnnnnnnnnnnnnnnnnnnnnnnnnnnnntcacatcacattcacanaaactcgtcataaatanaccatcccaattcccaaatggcttangaancaaatgtccagggcacaacagcaacacatggccgcangacagcctttgnagaatccgtcacccttanacttgggtttccacnttagcctgagctacngagagcatgactccggttggctagtcggggtaaccaancgggcg

SEQ ID NO: 202 - DNA, 404 bp, Arabidopsis thaliana
  unsure at all n locations
  Clone ID: ARABL1-037-Q1-E1-A12
ttttttttttttgatcatattaaaattatcgtaattaacaaactaaacaggaatcgcatatctgcaatagtaactatttcacagattggttttatcttttctatgtcttgtccttttttgtccaatttaagaccatanaaggagaaaatcgtgtgaaagacaagacagatagacagacacgaatattcagaannaaaaaatttcttttctctttctaacaccacagatttcgcaatcgtgttttgatctgattcttccaggattctcccggtggcggagagaaganacaggggaaacccannaagcatttttcncaatggccgtcgactacacggagaaaagtttgnannctttcagannnaacaagatggatcngtcnnccgncggctgccatgtgganacaa

SEQ ID NO: 203 - DNA, 405 bp, Arabidopsis thaliana
  unsure at all n locations
  Clone ID: ARABL1-037-Q1-E1-A5
ttttttttttttttttttgaagacaaaccattatcttcattgatttacttttcattttatacatgatttnnnnnnnnnnnnnnnnnnnnnnnnnnnnnnnnnnnnnnnnnnnnnnnnnnnnnnnnnnnnnnnnnnnnnnnnnnnnnnnnnnnnnnnnnnncgttttggtttcgttttctcatctattattttctcaaccagatctaacaagatccccaacagctcagaaacatcaccgtcctcaaagattcctccgcttgcctcagcctctcactcgccgccgcaccaaatcgactcgattccaagatctcctttaagcctcctcaccgacgacgacgacgacgcactccgtgggagacgaagaccgattcttggcnggnagatcttaaagtcgtatctcnggcc

SEQ ID NO: 204 - DNA, 420 bp, Arabidopsis thaliana
  unsure at all n locations
  Clone ID: ARABL1-037-Q1-E1-A8
nnnnnnnnnnnnnnnnnnnnnnnnnnnnnnnnnnnnnnnnnnnnnnnnnnnnnnnnnacacatctctgtaatatatgaagaagtgtacatacatgtaatatacacaaagaaccnnnnnnnnnnnnnnnnnnnnnnnnnnnnnnnnnnnnnnnnnnnnnnnnnnnnnnnnnnnnnnnnnnnnnnnnnnnnnnnnnnnnnnnnnnnnnnnnnnnnnnnnnnnnnnnntttcaaaatctacgaaccaaataagactcttcttgatacaacaagacttgaatggttctcngtttttgtcctctgataaaagactcccagcaaaatcattcagatacgtgatttagtttctgcagtgttttgctttcngtccgggngaaatcttgganctgccggtcgngttcttccagcaacngatccactttt

SEQ ID NO: 205 - DNA, 432 bp, Arabidopsis thaliana
  unsure at all n locations
  Clone ID: ARABL1-037-Q1-E1-B4
tttttttttttttttttganatctaagaaactttattaatcanaccaaccaaacttacactcttattaacacaatgacacaacaacgaatgcataagcattacaagaagcaagacnngagtttaccacaancacaaagagcttcttttagttctgatggattccacttggccatgtcagattctttacaggctcnagaatagcttcaacctcagacagagtttcntgatccatccccagnctttcaagctctgtaactgcngcancattttcttcaacctgtgagacagagctcatcngaatcaacaccgangaaatctccttgtttgcnaaactgtattgcagagcntaacnntgtgatcatcnttgccctttgcgtttgcngtgagcaactgcngggttgcntgnaggacttgaggcccanggggaaccg

SEQ ID NO: 206 - DNA, 418 bp, Arabidopsis thaliana
  unsure at all n locations
  Clone ID: ARABL1-037-Q1-E1-B8
tttttttttttttttaaaaacaaagtcttctttttattcttttgtcttcaagttctaagcaggaaacaacaaacattttaaagaacaaagcagtgaagaaaacacgcttcctgttttgatgagcagatcacttagatgggtctctatggctctcctccaagctcaactctcaggttgtcatatggatacactctcggtgtaaatggaaccttagaagctttgtcgttcaaaacagcgagcagaccgagaccancagagaaccctaatccgccactcaaccatgccaatgcttcatactttccgacggtatcagcaatccgatctatgcaaggctctggaaacgcagtcncgttgtcccanatcagctcgtcgtttaancgatagcggnttatcggggacgatgtgtttgccnacgggg

SEQ ID NO: 207 - DNA, 400 bp, Arabidopsis thaliana
  Clone ID: ARABL1-037-Q1-E1-C10
tttttttttttttttttttgaagaaacaagaaagatattactgtattagcttcaataagactctgtttccaatacacaaatctcagaatttaagtttttacactcgagaatccatatatatatatatatgtagagaagaaacgaaaccacgcgcgaagacactcactcattagaacaaactctttgaacagagagtgatatctacgaccagccaaaccagtaatcaagaatatagaccagacccaaggagaatgggtaaagcaagtaagctatgaaacatgtccaaagaggataagttgtgcggaaactcgcgaaaccgcccatcaccagacaaacgatgagaatcaccaacacttctgatgagaagttccatgtcagtcctcgaacggtagacgattgc

SEQ ID NO: 208 - DNA, 389 bp, Arabidopsis thaliana
  unsure at all n locations
  Clone ID: ARABL1-037-Q1-E1-D12
tttttttttttttaattaacgcactttttttattcatgaangctaaagttacaaaacaataaaactggtcaagagtccagtttggaacccaactaactttgtgttcaccatgtgatgtctctcgggaacattaagtatactttaataaagacagttttaagtttttttttttaaaggatgaggatgatgaatgcaagacttttatagggtcaagctttccgatttgatggaaccacagaaacatggaagtantcctttccattctttgccggggttcactgtgatcggtttcgcnacagccgcgctttccaccgttacaaaacgcttanagncntcaactcccaaatcggatacnttcttagcccatggattccanaccaacggggatc

SEQ ID NO: 209 - DNA, 417 bp, Arabidopsis thaliana
  unsure at all n locations
  Clone ID: ARABL1-037-Q1-E1-D4
ttttttttttttttgtttcttcatcggccaaaaaatatataatgtcacaatgataagggaaatcccccacaacacaatcttctgtcacttggctttatcagagctttgtatctctcttttcatctgtgtttcatcatcatcgtctcgtggaagctgcgaggaggagatccggtggaagacggtggtggagctctgttgaatctctcagggctacngctcctttctcgctctcttccccatccantgntgcttctactgtcacggggaagcaaagctacctctgccaccataaccagagtcgccaaccacgaccacgggccgccnggaaggaggtccccaacgactgaaattttgttcaatcccccancaccacgtgtagccatttcgncggatntgagggnggaactccctgggttt

SEQ ID NO: 210 - DNA, 401 bp, Arabidopsis thaliana
  unsure at all n locations
  Clone ID: ARABL1-037-Q1-E1-E11
nnnnnnnnnnnnnnnnnnnnnnnnnnnnnnnnnnnnnnnnnnnngggtgtaaaactgggactatactatacatacattgggctaatttactgagacagagagatatctaaaccttatgttcaagtgatctctttctcaattgcacatcaaatgaggtaacaattacaacaaaaaactataaacctccccccaattgtaatctaagaaaaaatgaataactttaaacaagtcaaacttgatctcattgtanaaaatctgtaagagaagcttgtatatcttccaatgttcttcctttagtttcgggtaccatccgcataantaangacnanacccgcaccacatanagtaaacgtcgagncgggttcccgagcttacngtangcgtggcagggcgangtcata

SEQ ID NO: 211 - DNA, 411 bp, Arabidopsis thaliana
  unsure at all n locations
  Clone ID: ARABL1-037-Q1-E1-E6
tttttttttttttcttgctgaaaagggacattttaccacttgtgcaaatatagacaatcaatacaaaatatctgtttttgttattgctacaaagaaacaaccagaaattatattcttctctttgttttatctatcttacacatttgctgatgatcttcatatatagaaccaccacacaaaggaaacttccttgaggaatttatactctttgtcttttcgagctcatgcgtggcgcgaacccttttaaaaagccgagtcaaagatgatcagatcagcttaaacattctcaaaaccactttctcatggattaagtgagcttctttcaccttataatccttatcccatatagtgttgtttccacacctaaagacgtatagtggncacaattttcgtcacatgggaccnatattc

SEQ ID NO: 212 - DNA, 414 bp, Arabidopsis thaliana
  unsure at all n locations
  Clone ID: ARABL1-035-Q1-E1-H10
nnnnnnnnnnnnnnnnnnnnnnnnnnggatcaaacaaactatatataaaataatgtatatcttattaaaaatgataaccattgaaaatagtacttaagaagattaaaaaaccaaaagcaagaagagtcatagactcaaaaacataacaagacacaaagtacttaaagtagcaaataaattacttgctaacattttcttcttcttttgtctttcaaaagacagtttttttcttcacatttactcancagccttctccactggagctgtcacggaggcttcnacggcgggtttctcctcctctgcctcnggnttcntctcttcctccacaaaccanntggagcttcctcggtcttccgtnccgncgnacgtcntcccncctntcttcgccnctaanaaacctccgccggnttttgg

SEQ ID NO: 213 - DNA, 399 bp, Arabidopsis thaliana
  unsure at all n locations
  Clone ID: ARABL1-036-Q1-E1-A4
nnnnnnnnnnnnnnnnnnnnnnnnnnnnnnnnggcataataaagtatttgataaacgttcaataacaatggcttaaaatgagtttcaagcgtatataatccataataactggatcaaatagatatacaaacacataaactganaaacgcaaagtcctcgcaagtacctcttcatttccacacaaaggcaacacacttgcttagcacacaccattcatcttcntcctctccttcacaaacttcctccatccaacagtaagcttccatcaagaancnccttcgccatctncgtcncctttacattttccgcgatcccttctantcccatnntctnagagatcttggaagggcaaggtatcgagctcatgaagcaccttcgaaatatcaggcaanaagtcgc

SEQ ID NO: 214 - DNA, 424 bp, Arabidopsis thaliana
  unsure at all n locations
  Clone ID: ARABL1-036-Q1-E1-B2
ttttttttttttcagacgcgatcacgtttttagggtttctatagtactgaaactcatggaaaaaacacagtacaaaagatgctatattctaagacattgaagaaccccaaaattaagagagaacataaattatgcaagtagaaaacaaacccagtanaagaaagccaagaccagttttagtttcgtttgcctcgaaggacacccttactacgacgattcttcatccccagcttaaacttcttcttcaacttcttcccaataggttttagcgacttgtttttcttctcancatcnatttccncatcacgagcgntggcgattgtantggaggcangatgcatnactcanaggaaggcgtcgcanncttccanaancggagaaanctggggcttgacgaacngggnacttcnggggcagcgagatt

SEQ ID NO: 215 - DNA, 401 bp, Arabidopsis thaliana
  unsure at all n locations
  Clone ID: ARABL1-035-Q1-E1-G5
ttttttttttttgaacaaaaaaaaagaatcctttagctaaacaaatcaactacaaaaaanaaagagaaaaaaaaagagaatcctcacaataaaaatacaaagaattgaaagaacaaaagaagaagaggaagatttaatgtaatactcaacacctaatgattctctaatgtcttcaaaatcttctgctcttcctcaacttacttttcctctgtttcaagagttttttgcccattcacactacaaatacaaantanncgcaaanacaatcaattctcatctaacttttaatccctccaattgattgctctcntccttcatctcttctaaagctaaaaacttttcttcncactgacnctttccnannccnggcaganngaancacttcacgcatggaaaangaa

SEQ ID NO: 216 - DNA, 422 bp, Arabidopsis thaliana
  unsure at all n locations
  Clone ID: ARABL1-036-Q1-E1-B3
ttttttttttttttttttaaggatgagacgttgcaacctttttatatatattatgcaacagacatgaagttgaagaatgacatactgtaggagcaaaagttgcaaccatggaaaaagctaaaaattgaagctttgtaatgttccattctcttacacaaagatgctactatctggagccactagaccctcaagtttccatccaccaggcccggacagcgcaaaagcttcttcccaggagttgccaaaagcctgaagcaaagcagcattgcatgttttcaacttaatagaagctccagagagcatggaagctgcttcttcccaacccttattatgccccatacacatgatagtggagatatcaggggttgaatatttgggagataatgttttgaagatgctcggctgtttgggcatccanaaca

SEQ ID NO: 217 - DNA, 415 bp, Arabidopsis thaliana
  unsure at all n locations
  Clone ID: ARABL1-036-Q1-E1-B4
nccnnnnnnnnnnnnnnnnnnnnnnnnnnnnnnnnnnngagcacaaaagctttcttgcgtactttattgatactgggatgaaacaataataatagtaacgacatttatcttgtcactgccggaaatgctataanagaaagaaaagaacaaaatctttattatgaanctttggtgtcatggtggtgttcagtttctcagacggctttggtgacaacagcatggatagcgtctgcaaggtgaggtacagtcttcgaactcagaccagccatgcttatcctcccgtcagatgtcatgtagatgtggtactctttagtcangaaggagacttnagctgggtttaaccctgtgaaggtaaacataccaatnctgctntantgantgtgacgccagtctccaggagtcctccnagtacgtt

SEQ ID NO: 218 - DNA, 413 bp, Arabidopsis thaliana
  unsure at all n locations
  Clone ID: ARABL1-036-Q1-E1-B8
nnnnnnnnnnnnnnnnnnnnnnnnnnnactgtgaaacaaaacaagcaacgtttcgttgtctattatttagcaaccttttatttatacacacaaatgtaatacgaatgcaaagcagggagagaagtgacaaataatcaacttcatttacatctaaagttgaaatttctattcacttatccaaaagtactaggacaatatgactcatcggtgaaggcgtctggtgctgacaagttcaatgtcaaaaacgagagttccaagagtagaaccttctccattggcgagacgtgttgggttaaatatagtcgtgaagagtctctgtctgtcaaagaagtttggtggggagaggctcctgtgatgtattctggtatccctgagatggaggnataaccanccggacgaatcccgccctacnt

SEQ ID NO: 219 - DNA, 411 bp, Arabidopsis thaliana
  unsure at all n locations
  Clone ID: ARABL1-036-Q1-E1-C2
nnnnnnnnnnnnnnnnnnnnnnnnnnnnnnnnnncgagcaaaaaccttgtgtcttcaactttgaataaaccccaataatgcagtaacaagagattctgataagctttttctcttgggttaaaaaggagtcaagagatatataacatacagtttttccgcgtatgtaatatgcacaaaccaaacgcaggaatagaggaagaatttggatttgatcnttaagatctcactcantcttgattactttttgtcagttgncactccaacaanaacattgctcaccaactttccgctttcancaacggacatggggttttctaaaacaacggtttgggtctgagagggtggtgttgaanttgaggtagagggggggacaagcctgntccattnggcccgttagttgggaaaagtncc

SEQ ID NO: 220 - DNA, 409 bp, Arabidopsis thaliana
  unsure at all n locations
  Clone ID: ARABL1-036-Q1-E1-C3
ttttttttttttctcataagtattattttattgatatgtctccatttgaactttctgaataaagctacaaagggcataaaagcccataacagacagccatgaaataggcccattagagatacagttcaaggaacgtgtcagaatcataaagataagctgaggacacgtgttacttccacaatctctgctggatgagacttcaaatcacggtgaatcatagaacgtcgtcggaaaacgaagccgaacaacgaatcttcttttttctcaccgattatggcaatcacgagtatggaggacaaaacatcaatatactgagcttttaaccagctaacttaggcgcagaactgtcttgacaactaaatcgaaagaaacatctaggattcaacaaaagctatcaacanataaaccc

SEQ ID NO: 221 - DNA, 392 bp, Arabidopsis thaliana
  unsure at all n locations
  Clone ID: ARABL1-036-Q1-E1-C4
ttttttttttttaagaaaaagaaaaaaatctttcgttacttcgagactaatacatatccacacatttcnnnnnnnnnnnnnnnnnnnnnnnnnnnnnnnnnnnnnnnnnnnnnnnnnnnnnnnnnnnnnnnnnnnnnnnnnnnnnnnntcgttatgattaccccaatccaatagactatgtatgtgtcgtatctctatatacatcnnnnnnnnnnnnnnnnnnnnnnnnnnnnnnnnnnnnnnnnnnnnnnnnnngccatcancnagacactgcatgaccttgacctgcatacnaaggcacttgatgtaatgagccgtctcttccatcagctttgacgtcnccattcctcngcctcgcggaacaggattcctcaggcctcgtccgncggcct

SEQ ID NO: 222 - DNA, 414 bp, Arabidopsis thaliana
  unsure at all n locations
  Clone ID: ARABL1-036-Q1-E1-C6
tttttttttttttttcatgtaaaggcactgattttatatatcacacaatgaaactgttactacaagttaacgtaagagaatagtgaaggaacaagatcaacaacggaccaggcaaggcctgcatattggaagaaccttataccagtatcaatatcaaacgagtcgtggctcaaaaactcgcatagtttctgcaaatatccaactgaattcttgggttcgtctgtcttcttcccacttgcataccccttgagcttgggaatgtacatgctggatcttattggaatcccaagtgcgttggataccattggtaaagtccattttgcaagagatttactgcagaacttcactaatagtatccgtcggtattcccaccatgactctaccaaggtaggatganatagggagctctgggga

SEQ ID NO: 223 - DNA, 412 bp, Arabidopsis thaliana
  unsure at all n locations
  Clone ID: ARABL1-036-Q1-E1-D1
ttttttttttttaaagaaaataatattattacaaatacttttttccacgtaaaaacagcataaaaactacttttaccatcgagtaaaaacaaaaaagtgcagtggaactcatacgtccagatccagcaattacgcacacgacacaaacnanttttgtcatccagtcatcaccanatctagaacacaaactanaaaatacgtatcgtanatgaccnanacgccattcagattcaggggtanttaccacgaanagtacaaattggaaagcgagggaaaggacgattccgacaaagggtaaatncgtaagcttcacttannccgntcttgngcatnctctctgtaccttagganacgaanctaccctctgtggctaagnctgttgcttaaacctgttgatganaattgaaggctt

SEQ ID NO: 224 - DNA, 397 bp, Arabidopsis thaliana
  unsure at all n locations
  Clone ID: ARABL1-036-Q1-E1-E9
tttttttttttttggagacaaaggagcatttgttttattcattttatcaagaanacagagatacagaaaattaatgaaagcatttttgagaaagaaaatgcatagatcaaatanaaatactataaggaacacccattccggtaacaccatgctcagaggtaggcttcaaaagctcatacttaacaacaccagctccagctctattctttagagtaatgttcacgtttctctcatctatcactccttctagatattggagcttgcctttgaatctttcanatgcagcattgataacaggctcattggcccaagatgcntcttgtngttctccaatgtactcttccgtcaggtgaatgtgttgataanaggatcaacgtgaccatcactagggtcgcct

SEQ ID NO: 225 - DNA, 423 bp, Arabidopsis thaliana
  unsure at all n locations
  Clone ID: ARABL1-036-Q1-E1-F2
tttttttttttttttttttttgtaaaaaggcatgctcatattaaagaataaaaattcaccaaactctgttgcagaaaagtcttaaccaacataacattaaactgctttcacatagaaagcaaaagtcttaaacaacattacattaactcctttcacataaacagaaaagtcttaaacaacattacataaactcctttcacacagacacaaaaggctctttcntgctcaacgcatcaacactcttagttcaagatttcacctgtnatgggtgaaacatgtnggctcntacacntctgcccatttttcgaaccgaccactaccataggctttggtggtatcaaaccgggccctgaaaagcatgcnttcacngtgtcngttggntgnncctccaacagatnngcaagnacctggagtccggccaaa

SEQ ID NO: 226 - DNA, 397 bp, Arabidopsis thaliana
  unsure at all n locations
  Clone ID: ARABL1-036-Q1-E1-F6
tttttttttttttattagaaatatacttcatttatgatgtacgaaaagaaagatcgaatgtgtaataccaaaattagagagaaaaatatcttaataatttttttcataacttaaaaaacgtaatagtttcgcagaaaagaccttcagaaagtgtaacaaaaaattataaaactaacaaaattcaaccaaagagaaacgaaagacagagatagcgaggctgaaggaccaggggtctttactagcccaacgaagggaactgagctgtgtctccaatcgccggagctgcagcttcttttgcatacctttggtttcctccttcaccacgaccaccgcgacctcctcttccgcggggagcctccacntctcccgttgtactctttccatcaagccgggcntc

SEQ ID NO: 227 - DNA, 414 bp, Arabidopsis thaliana
  unsure at all n locations
  Clone ID: ARABL1-036-Q1-E1-F7
ttttttttttttttnnnnnnnnnnnnnnnnnnnnnnnnnnnnnnnnnnnnnnnnnnnnnnnnnnnnnnnnnnnnnnnnnnnnnnnnnnnnnnnnnnnnnncaccacaccaattattcgcataaatagtatagatatatcaaacgatccaattcgggttcagtttagaaaccgtggatcttgatctgatccttcttagcaatcccagtttggaccaagaactgagacactttcttcctttgatcaccttgaagctggatgatcttgcctagttctttgtcctgcacaacgttaccgttgcagcagaaatctttcttcaaatccttgngaatcctctccgtagctgtactctttcttaagcccttgaacaagtcgtcaagctctttttcccattcctccgctggnttcgaaatgtg

SEQ ID NO: 228 - DNA, 311 bp, Arabidopsis thaliana
  unsure at all n locations
  Clone ID: ARABL1-030-Q1-B1-H1
aaagacggttcgttgcacaagcgaagacaagccttgggatatatctacgagaaacagattgttcacgctctgtttgctgaggttcctgatagatacggtgagagaaacggtggatacacgaggatcatcagaactcttccaaggagaggtgataatgctccaatggcttacattgagcttgtctaaggtcaatatctcttttattttgctcaattgtttcacttttgctctgtaatattgaaaaaacagttgttgatgcagatatgagatcattttgtttngtgaaacaaaatgatttcatanctgcatca

SEQ ID NO: 229 - DNA, 494 bp, Arabidopsis thaliana
  unsure at all n locations
  Clone ID: ARABL1-030-Q1-B1-H5
attgaatttaacgaacactatagaccagctatgacgtcnaatgcacgcgtacgtaagctcggaattcggctcgagcggctcgagggaaccgatgattgttggtagaaagttcttggtcaaggtcaatgcgaatatcggaaactctgctgttgccagctctattgaagaggaagtctacaaggttcagtgggcaaccatgtggggagctgatacaatcatggatctctcaactggtcgtcacatccatgagacacgtgagtggatcctaaggaattcagctgtgcctgttggtacggtgcctatttatcaagcacttgagaaagtggatggaattgctgagaatcttaactgggaggttttcagagagactctgattgaacaagctgagcaagggtgtaaactatttcacatccatgcctgganttttgctgcntaaaattcccttaatggcaancctttgaacnggattgnttccccttganggttcaatcaag

SEQ ID NO: 230 - DNA, 421 bp, Arabidopsis thaliana
  unsure at all n locations
  Clone ID: ARABL1-030-Q1-B1-H7
gagacaaaaaccaacccaaattctttctatatattaaaaaaaaatcaacacaaaggaaaaaaaaatggattacgttttggntgttttgccacttgcattgtttctcatagcttacaaattcttattctcatccaaaacgcagggcttcaatctcccaccaggaccaactccgtttcctatcgtcggccatctccacctagtgaaaccaccggtccaccgtctcttccgccgcttcgctgaaaaatacggcgacatcttctccctccgttacggctctcgccaagtcgtagtgatctcttcattgcctctcgtaagagaatccttcaccggtcaaaacgaagtcatttaacaaacagaccgaatttccggacggcaaatangtnnctaagaataacacaatataggaacggcggcttanggt

SEQ ID NO: 231 - DNA, 387 bp, Arabidopsis thaliana
  unsure at all n locations
  Clone ID: ARABL1-031-Q1-E1-A2
nnnnnnnnnnnnnnnnnnnnnnnnnnnnnnnnnnnnnnnnnnnnnnnnnnnnnnnnnnnnnnnnnnnnnnnnnnnnnnnnnnactaagaacanaaaatccantaacaagctcaagcattacatcaaactcaanattgaganaacaaaggttctatcatgaanaagctcaagcattacatcaaactcaacagtgacanaacaaagctttttcncacaaaaacaatagataacagtanaaacaaacatagaaaaacatagcaaaccaaaganatttttcncttttaaagtcncaaancttcaanaacattggaaaccangttgaacnattgtggcaanaaagttccccaaggtttccaagggttcttgaagatttgaaaccatgagccc

SEQ ID NO: 232 - DNA, 408 bp, Arabidopsis thaliana
  unsure at all n locations
  Clone ID: ARABL1-031-Q1-E1-A7
ttttttttttttgaatgaagttgtttataggttcataacttcacaacacaatgtaaaaacataatcaagtaccagtaccatcactcaaaaataacagaataagagaatagatctttcaaggggatgatgataataaactttggtttttactttttanttggcacggctcctgaaaacatcgagatccatctctgttggatcagttgcctgtagctctacttgaatcccatctaagttccctcttgaacctgtccttggagctcgcgtagatcatctngcttctcaccttagcaatatccggacaccacgcgantgaagaagatcttgctcttctggcaantctcagcaagttacaaagtcaaaatcgnaaatggcgtaacgggcattcatcaancggaagacatgcgc

SEQ ID NO: 233 - DNA, 496 bp, Arabidopsis thaliana
  unsure at all n locations
  Clone ID: ARABL1-030-Q1-B1-G1
ttgaatttangcaacactataggccngctatgacgtngaaancannccttanttanccccggaattcggctcgagggtggtgtcattcccccagcgtgttgctccggcgttaaaaacctcaacagcatagccaagacgaccccagaccgtcagcaagcttgcaattgcattcaaggtgccgctagagccttaggctctggtctcaacgctggccgtgcagctggaattcctaaggcatgtggagtcaatattccttacaaaatcagcaccagcaccaactgcaaaaccgtgaggtgatgagctagcaacggtgagatgatgctactaccggaagtttcgaatccttattatataatggatgagattaatattaaataagatgttcgaatgtttgnttttaaagtttttaatttcctgtccttttccaatgtggtgttcctgttanatgggtttgtcngtactatgttcccaagnaacaacgttatatgaaatttca

SEQ ID NO: 234 - DNA, 409 bp, Arabidopsis thaliana
  unsure at all n locations
  Clone ID: ARABL1-031-Q1-E1-C5
nnnnnnnnnnnnnnnnnnnnnnnnnnnnnncaagatcttaggcatgtgcattttatataagagagataaacgaagaaagcatcaaaagatgttatcattatcatcaaacacaatcaacggaaaatntaataacatgatcacncaagttgaccataccacaccccttggatcttcacatcctttggtaccttagcacccaagtcagtatccgacggctgaagactctcgaacactccgatcacctctcctgtctccggcttgctctttgtcactttcagagtgatctctcccactgaagcggcangtgttcttcangttctcctttacaagctccncctcgtcncctctgcctcnatctggcaatgccacggagttgtcatatcctggtgngattcaccagggccctttg

SEQ ID NO: 235 - DNA, 405 bp, Arabidopsis thaliana
  unsure at all n locations
  Clone ID: ARABL1-031-Q1-E1-D4
ttttttttttttttttacatatatacaaatttttaacttgcaagaaatcaagtcacatgatcacatgaagacttatcaacaaacagaggttaggattttcggagatgagaattattacaaacgaatcaatcaaaatgcaaagttgatttttctattaatcaacaaggttcacttgtgttcaagccaaattttaaacaagccaactaaatttgagacgagattttcaaatgatttataccaatcatatcattggacaatgaccgtaaattccgaaactcttgatgatcttgagagtgtatgtattcatgaccaaggccagttcgcatctcgccacgcaaagcgacatcctccaaaactactactacaancatctccctttaacccatcaaaattgttggntttaac

SEQ ID NO: 236 - DNA, 419 bp, Arabidopsis thaliana
  unsure at all n locations
  Clone ID: ARABL1-031-Q1-E1-D6
tttttttttttttttttttttggtgtcnataaacacaaattttctaattaaaaaaagacaaatcgttaatagataaataaaatttaaacaaaagataacgaaaaacatacattcatatccttgatgtaattcaacctccagaactttaagtattaacttagaataacatgagaaaactagtactgtcccaaaaaaagaaccatccccattgggttttaaaccagaaaacgaaaaggctctctaagcaactggcattgctggataatctgtggtggttaatggagcttccggtacaaaagcagcttgagtaacaacctgagcaggtgcaatgtatacatcatcttctttcggtgtatggatgatcacaacatcaggcaatggtgtcatcngtcccttggtttgcccctgggggtcccaat

SEQ ID NO: 237 - DNA, 391 bp, Arabidopsis thaliana
  unsure at all n locations
  Clone ID: ARABL1-031-Q1-E1-E6
nnnnnnnnnnnnnnnnnnnnnnnnnnnnnnnnnnnnnnnnnnnnnnnnnncccaaatgtcacattgangaagagaaacattnggtttttggaagaaaaattgtanctacagaatcaaaaacatcannccgttttctcacaaaccaagancaccnaaaggcgttttccccngcccggcctcaaagtaaaanatcaacatggcaaccattgcgagcctcaantgcttaatctctgccaatttcagcctctccagcttctcaaagtccggctcataaacaccgtcgcggtttttcccggcnagacccaagggatcgaagaatctcccaacggggtatcccgnatcgccggtaccagttccgcgaaattctcggccgtcttcgaccangggcgtt

SEQ ID NO: 238 - DNA, 413 bp, Arabidopsis thaliana
  unsure at all n locations
  Clone ID: ARABL1-031-Q1-E1-E8
tagaactagttttttttttttttttttgattagaatctgcacatttagattaatatatagttaagcaagtctgcagttttgctgcaataacttataagttaacaggaaaaatgaaaaagagcttttttgttttgttttgtttgatctctctctctctctcgagtaagtcattcgaatcatagacatataagaatcagacacttgcagggtcgaaatgatgattaaatctctaagcttctggttccatagctcaaccttggctatcgagattaccatggccgctacttcctccacttccataagacacatcatcaccaccaccagctgaattctgccaaacgctttgccatgcctgagaangangctgagcataaacaccgctaggattcatcgccggtcttccaaacancatc

SEQ ID NO: 239 - DNA, 383 bp, Arabidopsis thaliana
  unsure at all n locations
  Clone ID: ARABL1-031-Q1-E1-F2
tttttttttttttttttttattaaaaatctaagtttaattgtaaaaaataacagcacaacacagaacaatataatctgtgagaagataaaagtaccaaaaggtaaaatctatgaataacacaaaaatgttacctaacaacatataacaataaaccaagaagttccaagtctttggcctgtagtctccctagacccaaataagacctcatttattggtaactatagcatgtcgaactagtggtagagttctaaacctcctcaggaacaaatagctcacatagtagataattcataattgtaatttttacaaaggttggccattaatccaccttcgaaacatgataaaactctcntgtgggttaatccccgctgtgtgccacttn

SEQ ID NO: 240 - DNA, 399 bp, Arabidopsis thaliana
  unsure at all n locations
  Clone ID: ARABL1-031-Q1-E1-F4
tttttttttttttttttttcaacgaaattttatagcatagattcactaaatcactgaattacagatattttctttcatacagaattaaagaaaaaagggttcaatcacactatcacacgtcgcttacgttaactaacggcggtggtgagctccggcggcgatcggagctggaggtggtttgcattggtagcatttggcaaagaggccaaaagtatcaatttgcctgatgaagttggtcatactggcccatccgccaaacccgaacccgagaactaggacccaaaccactatgaaagcgtttatcacgtaaactccagcccagctagggataaaaaacggtggtttctccgccgcgttccggccgggcaaaagccgttgccggtacgtnaaccatttggg

SEQ ID NO: 241 - DNA, 411 bp, Arabidopsis thaliana
  unsure at all n locations
  Clone ID: ARABL1-031-Q1-E1-F5
nnnnnnnnnnnnnnnnnnnnnnnnnnnnnnnnnnnnnnnnnnnnnnnnnnnnnnnnnnnnnnnnnnngaccgttatgaatacaaatcaaactatggagaaaaaccaaactcgaataaactttttggttgcaccaataaacagcataagcaatgaaagcttgaaacaaatctaattatgagattctcggtgaaaataaaacaccacaaaacaagaatctccaaagcaaatctgataacattacatacaaagctgagtttttgacttattcgcaagcaagttttgtgtcgaaactgctcaaacagatagcgaaagcctgaaacgcagagagcggataccggaaatccatcgtgaacangtcttttcccactttccaagnctgcaggtaagatcttgtcgggaacatcgggtct

SEQ ID NO: 242 - DNA, 412 bp, Arabidopsis thaliana
  unsure at all n locations
  Clone ID: ARABL1-031-Q1-E1-G1
tttttttttttttattggggaaaactgatattcaatttctcatagagagtgaactgtacacagggaaaaatgaanaacaatatatcncctttggatttacagtggatgttgtccttttacctacgcaaaagttctttgtttcancggttttttagatgaatccacaaactccagatcttttactcggcaaagctctttcttcggtgagaataaaccatcattaataanctacacttgtctgaggttgctggtgaataaggagctgcaaaaacttccattanatttctttantaacanttaaccggagaaaggtactttatcancnccacgatcnactgggttcctccannagtcatnncgaattccgagcttgtcaaaatctactggtaanttccanaaggtttgccccgtt

SEQ ID NO: 243 - DNA, 666 bp, Arabidopsis thaliana
  unsure at all n locations
  Clone ID: ARABL1-031-Q1-E1-G10
ttttttttttttggaggtgcttcatcctctttaggagctgttggttcttgagtgacaggcttagtagggactggtttgacctctttggttgcaactgatgccttcggtggagggacataaggccgtttggaaggaatcttttcaagaagcttttcaattggagttaatggtgcagttgtttcagcaaccacttccacaatcttagagaaagaaagttgaggattctttgccatgcaagcaagcaactctgcaacctggagatttgagacctgaccaccaaacaatgtatcgtctagagcaagagtgagatcatgagtttctttgtatgcatcagtcggtctctccattcctccaggtctaactattgcgtaattaagaccgctttcaatcaatgcttcttcagcttttctcttccagcaaaagaactccccagaataggttgagaatcncagcgggaaatccaaatttatttgtcccaaggatgtcaccaaaaatgaaagttattaacttttgctgatgttgcagcatcaacaaggtttttgggtggctaaggttaaccgattctggtaaggaccggttaatatccggaaatntcnttcctcgctaagcaccaattnagcataataatcaccgaatgcaattccccaaatgcggggctgtaattna

SEQ ID NO: 244 - DNA, 515 bp, Arabidopsis thaliana
  unsure at all n locations
  Clone ID: ARABL1-030-Q1-B1-C7
ggtggtaatcntgcagtagnctgtgaattaccngagacactaggnnccgagctatgacgtaaaatgcacgcgtacgtaagctcggaattcggctcgagcctccggccaaccttaacccttaagcgaacggtgttcctttgcggattgcgatcgttccgtcgatcccttcatcgcncgatctaaatctctaatcgtgtcggagattaaaagcagaggttttgtggtgaatcatgtctgatgtcccttcttgttctagcggtaatgatacaaacaacaatgattcgagtaacttcgaatgtaacatctgcttagacttggctcaagatcctattgtcactctctgtggtcacttgttctgttggccttgtttatacaaatggctccatctccattctcaatctaaggactgtcctgtttgcaaagccgtgatcgaagaagacagattggntcctttgttcggtanaggtaaatcgtcctgctgancctcggtccaagtccaatccgggtcccgaaat

SEQ ID NO: 245 - DNA, 397 bp, Arabidopsis thaliana
  unsure at all n locations
  Clone ID: ARABL1-030-Q1-B1-C8
cctcaaaacttgttggtaaatccacacactcatcaagtgaaactatgcgattttggaagtgcgaaagtnnnggttaaaggagagccaaacatttcatacatttgctcgaggtattacagagcacctgagctcatttttggagccaccgagtatactacagccattgatgtctggtctgcaggatgtgttctcgccgagcttcttctcgggcagccattgttcccgggtgagagcggtgttgatcaacttgtanagattataaaggttttgggaacaccaacaagggaagaaatcaaatgcatgaancccgaatttacacagaagttcaaatttcctcaaattaaagctcatccatggcataagattttccacaagaagaatgctccaaaanctgttg

SEQ ID NO: 246 - DNA, 423 bp, Arabidopsis thaliana
  unsure at all n locations
  Clone ID: ARABL1-030-Q1-B1-D1
gagcttaagctttatttctccgttttcgttttgtctttctttatcgtctcggtttcgtcgtctgatgtcaacgacggcgnngatctcgtgatccgtcaggtggttggtggagccgagcctcaggttttgacctcagaggatcacttttctctcttcaagcggaagttcgggaaggtctacgcttccaacgaggagcatgactatagattctcggttttcaaagcgaatctcaggcgagcgaggcgtcaccaagaagttggatccgtcggcgactcatggtgttacgcaagttctcaaatttgactcggtctgagttccgtaagaaacactgggggttaaaaatgggtttaaagcctcccaaaagatgcaacaagggtccgattccccctaacgaaaatctccctgaaggatttgattggagaa

SEQ ID NO: 247 - DNA, 426 bp, Arabidopsis thaliana
  unsure at all n locations
  Clone ID: ARABL1-030-Q1-B1-C4
aagagaagacagtgaagaaaggtttaatcggcggaatgagcttcgctaaagacgccggaaaaatcaattggtttcccggtnatatggctgcagctactcgcgccattcgtaaccgcctcaagctctccgatctcgttatcgaagttcgcgatgctcgtattcctctgtcatcggcgaacgaagatctacaatcccaaatgtcagctaagagacgtatcattgctctgaataagaaagatttagcaaaccctaaatgttctcaataaatggactcgtcatttcgaatccagcaagcaagattgtattgccattaatgctcatagcagaagctctgtcatgaagctgcttgatctcgtggagttgaagctcaaagaantgattgctaaggagcctactttacttgtaatggtggttggtgtccccaat

SEQ ID NO: 248 - DNA, 426 bp, Arabidopsis thaliana
  unsure at all n locations
  Clone ID: ARABL1-030-Q1-B1-D3
aattncnggncaaattgaccntaccttaanctggaaggatgtccantggctccagacaatcaccaagttgcccattcttgnnaaaggtgttcttacaggagaggatgcaaggatagcgattcaagctggtgcagccggaatcattgtatcaaaccatggagctcgccagcttgactatgtcccagcaaccatctcggcccttgaagaggttgtcaaagcgacacaaggacgaattcctgtcttcttggatggtggtgttcgacgtggcactgatgtcttcaaagcacttgcacttggagcctccgggatatttattggaagaccaatgggtattcctcaatggcaactgaaaggagaagctggagttanaaaaggtgcntcaaatgctacgtgatgaattcnaactgancatggcactgaattggt

SEQ ID NO: 249 - DNA, 421 bp, Arabidopsis thaliana
  unsure at all n locations
  Clone ID: ARABL1-030-Q1-B1-D4
gaggtgagacgacatccaaggatatacttgcgttccatcgtctcctccacctctttatggtggctatcatcatagccagngaccattttgctatcatcttcacaagcagtaaagtacttcagcgtgcagtgtctaagctagcttatcttcttggtataaccatggttctcaacagtgtgcagccggttgtttctggtgtggctgttggaggcggttggcaaggcttagtggcctatatcaacttgggctgttactacatttttgggccttccctttggatatcttccttggttacattgcaaaactttggagtgatgggaactttgggcctggaatgataaccggggacaacgcttcaaaccgttgttactgttgattgttccggtataagacaaactggaataaagaagtgggaaggana

SEQ ID NO: 250 - DNA, 392 bp, Arabidopsis thaliana
  unsure at all n locations
  Clone ID: ARABL1-030-Q1-B1-D5
tccgaacactttagtgaaaccttatagagaagattactttaaggagccgngttctgcagcggaaccaagcgagagttctcagaaagcgagtcagtttcaggagcaagagttagctcagggtcgtgggacggctaatgtggtgcctcaacctatgtgggcggttgcgccagggactacgaatggaggtagtgcgttctggatgcttccgatgagcggttcgggtgggcgggagcagatgcagcagcagcctggtcaccaaatgtgggcgtttaatccanggaattatccagttgggacangacgagtagtaactgcaccaatggggtcaatgatgttgggaggtcaacanctaggattaggattggcanagggcaacatggcggctgcaatgc

SEQ ID NO: 251 - DNA, 346 bp, Arabidopsis thaliana
  unsure at all n locations
  Clone ID: ARABL1-030-Q1-B1-D6
gctaggtgccaatgattctcctccccaccgtatgaggnngctgctgatccggcggcggagttaaactcgccggaagatgtattcgganaataactaggaccggagccgtgggccatgcaaaccgttggtactattccattactacacagcctacaggagctactcatatnaagcattanactttggcacaaaagaggctcanaaacattgcaagcatggataccantcgttggtcnaaaaatcaggantacccatttgctgattttgagttcccctccctttgctttttcancattctcgaattctttgtgttggtcggaggattcaaatgaanttttaaagcaaa

SEQ ID NO: 252 - DNA, 395 bp, Arabidopsis thaliana
  unsure at all n locations
  Clone ID: ARABL1-030-Q1-B1-D7
gagtaaatttttattttgtctcttatctactttagagtttagaagttccatattaaaaattttagttatgaaacaatagngaccaaaaaattgccaagattgttcttgaatcttacttgtgcattgtaaatagagtctgttagcaaactttgaccattgagtattttgtgctttgtgtctagattcttgaatcttattctatggttattggacttcataaatccattttgttctttagtagttggtacccaaatattgatttttcaatagtttcagaaaacagaccaacatggaagatcggtgcttgatcaagaacgatatcactgaattgattggtaacacaccaatgggtatcggaacaatgttgttgatgggttgcgtggcncgtatcgctg

SEQ ID NO: 253 - DNA, 391 bp, Arabidopsis thaliana
  unsure at all n locations
  Clone ID: ARABL1-030-Q1-B1-D8
tgtttaaagaatacaaagaggtacagcgagagaaagtaggngatcctgatattcaattgatctgtgacgataccaacatattcaaatggaccgctcttatcaaaggaccttcggagactccttacgaaggcggtgtttttcagcttgctttttctgttcctgaaccttatcctttgcaacctcctcangttcgattcttgaccaagatattccatcctaaatgtcatttcaaagacagggagaaatatgtctccgacattttgaaagaatgctggagtcctgcttggacgcctcaatctgtgtgtaagagctatcatancattgatggntcaacctgaaccggacagtcctccttaactgcgactcaaggaatcctccaaagattcgggtg

SEQ ID NO: 254 - DNA, 363 bp, Arabidopsis thaliana
  unsure at all n locations
  Clone ID: ARABL1-030-Q1-B1-E6
gagacagaaaataaaaaacaatggcgaataagttcactagacaacagatttcagagtttagggaacagttcagcgtannggacaagaatggtgatggtcacattaccacagaggagttcggtgccgtgatgcgttccctcggtttaaacctgacccaagctgagcttcaggaggagatcaacgattcggatttagatggtgacggaaccatcaatttcactgagttcttgtgcgcaatggctaaggacacttactctgagaaagacctcangatagatttcagactctttgcatanacaagaatggtttcacctcactgtgaattgagatanttgaggacaacctccgggtggaaccaaccng

SEQ ID NO: 255 - DNA, 468 bp, Arabidopsis thaliana
  unsure at all n locations
  Clone ID: ARABL1-030-Q1-B1-F3
tatgacgtngaaaacacgcnttnnttancnncggantncggtncaattntcggcnggnattcaactggtgctggggttaatggcggtagttcgctgattcatgatttctatgctagagaagtagncaacccaattcacctaactgtggatactgggtttactaatggtgagggtactatcaaagcttttgtctcttcaaacctctcactcggtgatcgacaactcgttgcacattttcaagagattcctgttgatctccgcatggttgatgctgagagagtcggattcgatgtacttaaggcaacatctgttgacaaactcccaaatgacttggaaggaatggagttaacaatggagaggctgttaactctaatcaacgatgtctacaaatatgttgacagtgtcgtgggaagtcaaatagctccaagacaacaacattggacgattcattgcaaatgcagtaacctc

SEQ ID NO: 256 - DNA, 503 bp, Arabidopsis thaliana
  unsure at all n locations
  Clone ID: ARABL1-030-Q1-B1-F4
cagcantctgaatttaaggaacactatagncccgctatgacgtnnaaancangccttnnttancnccggaattcggcncaaggttgatttctataggaaaatcccgagggatttgacagaggcgtctctgtctggtgctggattgtccattatagcagnnctctctatgatatttctatttggaatggagttgaataattatttggctgtcagcacttccacatcggtcattgttgacaggagcgctgacggagacttcttgcgcttagattttaatataagcttcccgtcactttcatgtgaattcgcatctgtggatgtcagtgatgtattaggaactaacaggctaaatgtaacaaagacaattcggaagttttctattgattcgaatatgagacccactggttctgagtttcatgccggggaagttttatcactcattaatcatggagatgaaactggtgaagaaatagttgaagattcggtaccacttactggacgca

SEQ ID NO: 257 - DNA, 405 bp, Arabidopsis thaliana
  unsure at all n locations
  Clone ID: ARABL1-030-Q1-B1-F6
cacttaccgaagcatcttctccaagaaagccatgactgatatggacagtacaaatgtctacgcnnggnatctccatcatcgcactcttcgtctgcattcctcctgccatcatcgttgaaggtcctaaactacttaaccatggtttcgccgacgcgattgctaaagttggaatgactaaattcatctctgatctcttctgggttggntgttttaccatctctacantcagctggctaccaataccttgggagagggttgcaacgctgaatcangcggttggnaacgttctgaaacgtgtgttcgtgatnggnttctccatcgttatcctcgggaacaagatatcgacacaaacaggtatangaacaagnataaccaatgctggagttgcaatgtnctccatcaata

SEQ ID NO: 258 - DNA, 473 bp, Arabidopsis thaliana
  unsure at all n locations
  Clone ID: ARABL1-030-Q1-B1-F7
ctatgacgtcnaatgcacgcgtacgtaagctcggaattcggctcgagagaagatggtgtctgggtcagggatatgcgcgaagcgcgttgtcgtcgacgggcgacaccacatgcttggtcgtctagcttccaacactgcgaaggagttacttaacggacaggaagtggttgttgtccgatgtgaagagatttgtctctcgggaggtttggttcgacaaaagatgaagtacatgagattccttaggaaacgtatgaacactaagccttctcatggtcctattcactttcgtgctccttccaagatcttctggcgcactgttcgcgggatgattccacacaagaccaaagcgtggtgctgctgcacttgcccgcttgaaagggtttttgagggaatcccaacctccttacgacaagattaaaganaatgggttaatcctgatgctcctaagggttttgagacttcaaantggtcac

SEQ ID NO: 259 - DNA, 325 bp, Arabidopsis thaliana
  Clone ID: ARABL1-03-Q1-B1-F9
tcgagccgtcgtccgatcggtgaacacatgtaactgtaacgatcgaaatgctgagattgaaaatggtcagggagttagaaacagtgctgcaactacttgagtttgcccaagaaaccctaataagaaacctatttgttgactattttgactttgtacccttcttgatatacctatcaatcaccattgtccacgtgtactagtttcgttgtagtaattttcaaagtttatcgaagtatgcgtattcgaggattaattaaatcgggaattacattttcctgagttaattttttctctttttcttttactaaaaaaaaaaaaaaaaggg

SEQ ID NO: 260 - DNA, 459 bp, Arabidopsis thaliana
  unsure at all n locations
  Clone ID: ARABL1-03-Q1-B1-G1
tggnacgccagaagagctcaanagtcgcggncncccgtacgtaagancggaattcggctcgagctcgagccgtcgtggaggagatatgcaattgctgacgctaaatccggcggccatttccaggacgccgccgcaagccatagacccttcctcatcctcgagtcttcttcttccttttcctcagattttgagctcccaacgcgctcttggtcttgtagctaggccttgtaatccacttcgacgaggattatctaggtttttatcaagtcgacagcttttccgacgatccaaagttgtcaaggcagtagcaaccccagaccccatcttggaagtacctttaactgaggaaaatgtagaaagcgttttggatgaaatccgaccttaccttatgtctgatggtggtaatgtggcattacatgagatcgatggaaatattgtgcgggttaagctgcaaggaac

SEQ ID NO: 261 - DNA, 399 bp, Arabidopsis thaliana
  unsure at all n locations
  Clone ID: ARABL1-03-Q1-B1-G12
ctcgaggaaaaaaaaaattgacaaacaaatataaaatccctatgaacaactctagagaagaccagtggttacaacactatgagcaacaaaatattcaagagattactccgtgcttcaacgccattaacatcgcgtcatcgtcgggatcttcccttggagacggtggtgccgcggcacatgaagctgctggaaggagatctagggcttcgaggagagccataccaacaaccctcctaaacgcaaaccctagcaatttccgagccctagttcagaaatttaccggacgttctgccggaggtgaatccaaccgcagaaaaggtccggtgactttggatttcgggtctcccactacaatctccaaagaagctatctttccagtctcaagcgatngaagtaata

SEQ ID NO: 262 - DNA, 473 bp, Arabidopsis thaliana
  unsure at all n locations
  Clone ID: ARABL1-03-Q1-B1-G3
gaatcttttggnacgccagaagagcatagaaagtcgcngnccacncgtacgtaagaacggaattcggctcgagcacattcctttactcactctctctctctctctaaaaacagagctcaacaataatgatccactaaaaaagattctcttttctcttcttctccggtgatttacttacttaacaatcatggcgtcgtcggagggattagcaagcgttgatccttggtcattccgtcaaaacttcaacatcgattcgtggctactctctgattccttctcacacgacagtgatatactcgctaaagctcttcacagatccatctccacttccaccgaatcatctcctctttctccttcatctttcttcgactcttcaaccgccgccgtcgatttttctcctcctcaaactctctccaacgtctctttcgggtcaagattcaagaaatcccggcgctagtgctcctgggnctcgg

SEQ ID NO: 263 - DNA, 400 bp, Arabidopsis thaliana
  unsure at all n locations
  Clone ID: ARABL1-03-Q1-B1-G6
ctcgagctcgcttctctttctcagatccccatccaaatcgttttataggtagattagatagataaactacggatatactcgaactctatccatttacggtattgatttggaaatatggacaagtatgacgttgtcaaggatctgggagctggaaatttcggtgtggctcgccttctcaggcacaaggacaccaaagagcttgttgccatgaaatacatcgagagaggtcgcaagatagatgagaacgtggcgagagagattattaatcacagatcacttaaacatcctaatatcatccggttcaaggaggtgatcctgacacctactcatcntgctattgtgatggagtatgcttcctggangaaanctcctttgatngaaactgtactggccggtaaat

SEQ ID NO: 264 - DNA, 416 bp, Arabidopsis thaliana
  unsure at all n locations
  Clone ID: ARABL1-03-Q1-B1-G8
ctcgaggaagtctctggttcctgatcccatgaaacaagagcctttagtaattgaaaacactccagatcctttagcaggggaacagacatggccaacagaggaagaaatggctgaggctgacaaaaatcagaagcagggcaggctaaagaagaagactttgccgcgagggacttcagaatatcaggctgcttggattgtggatgaaacagatgaagaggattccgataatggtgattctgatgataatggtatggtattggatagaggagaggattccaatcaagaagggattttattgaccaaagaattttgagggatgacgggaaatccattgaancctgcgggataattgatactgaaaactcaagaatgaatcccgaaattggtggacgaattgaaagacttgacaagaagaa

SEQ ID NO: 265 - DNA, 468 bp, Arabidopsis thaliana
  unsure at all n locations
  Clone ID: ARABL1-03-Q1-B1-F8
nttctagctcgttcataganntacncgagacgncccgnccacgcgtacgaaanatcggaattcggctcgagctcgaactcactactcttcagccgtcgacgccgcatccgttccatttccgagaagccggagtacttcctccgccttctcttcctctgcctcttctcggagaagatcttcggatttcactttcgacgatgattatagcgagctgcttagagctgcttccgttaggagtttaggtcataagaatgagattgacatgatnatannnnnnnnnnnnnnnnnnnnnnnnnnnnnnnnnnnnnnnngcgttgcgatgggagcggttacggttaaaggcggtttgcctaagagctcgagtgttgggatgacaatggctangattgatgaaagaaagatgaagaagaaggntntgtaaagaatcaaaaagaagggattctggatttcctaaancctccggagcaa

SEQ ID NO: 266 - DNA, 361 bp, Arabidopsis thaliana
  unsure at all n locations
  Clone ID: ARABL1-03-Q1-B1-G9
tcgagggggactctgcttttcacagttccagagaatcccggaatctggaatcggcaaattggagaaggaatcgaatcctaagcattagcagttttagggataagaggaactgtgaagatggtggggactctgcttttcaatctttttcttcttgctagtgatgaaaaattgttgctacattttcagatgtgaatgttcaagattctctatcttttttttttttttgaactctttttaacttggagtggtttcccaaaaaataagatgcaaaactcatctttttgttggttttctatctttaatctgtgnnnnnnnnnnnnnnnnnnnnnnnnnnnnnnnnnnnnnnnnnnnnnnnnnnggg

SEQ ID NO: 267 - DNA, 460 bp, Arabidopsis thaliana
  unsure at all n locations
  Clone ID: ARABL1-03-Q1-B1-H1
tgagntcgccagaagagcttagaagtcgcntccacccgtacgtaagancggaattcggctcgagaatctttcagtgggaagagaatggtttgctcgggcggtgggtttcctcaattgcagaagctttcaatacgggaaatagagtgggaagagtggatagtagaacaaggctccatgccccttcttcatactctctatatcggggtttgtccaaacttaaaggagcttcctgatgggctgcgatttatctattcattaaaaaatttgatagtatcaaaaagatggaagaagagattgtcggaaggaggagaagattattacaaagtccaacacattccttctgttgaattcgacgactaggaatgctctcagcaatcacagaagccaggagtctcataagcctctgtttccacccaaaatcangtccgaagataattgcaaggtaaggaanctaatcaaa

SEQ ID NO: 268 - DNA, 438 bp, Arabidopsis thaliana
  unsure at all n locations
  Clone ID: ARABL1-03-Q1-B1-H2
gacngcccacccgtacgtaagancngaattcggctcgagctttagaagatgtctttgaagaacttttgcaagaagagattgtggatgaaactgatgaatatgttgacgtacataaaaggattcgagtagcagcagcagcggctgcttcatcaatagcgagagctccttcaagccggaagttgcttgcgcaaaagggaactggaggacaaaataagcaagggcagacgaataaagttcctggtcaggaacaagataaaatgcttggaactattaccgagccgattcgaagaaacaactgatgttgtgttcttgcttaaggaggcaaaaactctgttgcggtataaagaaagaaaacaaagaataaattataagattcaagttccttctgtatactttgattcatcacataaattatntatatataaaaatattaaaaag

SEQ ID NO: 269 - DNA, 462 bp, Arabidopsis thaliana
  unsure at all n locations
  Clone ID: ARABL1-03-Q1-B1-H6
ggntcgccagaagagctcgagaagtcgcggccgcccgtacgtacnaacnatcggaattcggctcgagttcagatgctgagatttgggaggttcttggcaagtgtcaactaaaagaagtggttcaagaaaaagagaacggcttagattcattagttgtggaggatggatcaaattggagcatgggacagagacagttgttctgtttaggcagagcagttttgagaagaagcagagtattagtcctggacgaagccacggcatcgatagataatgcaacagatttgatacttcagaaaacaatcaggcgagaatttgcagattgcactgtcattacagttgctcaccgtatccctaccgttatggattgtacaatggttctctccatcagcgacggacggattgtggagtatgatgagccaatgaaagttgatgaaggatgagaactccttgttcgggaaagcc

SEQ ID NO: 270 - DNA, 133 bp, Arabidopsis thaliana
  unsure at all n locations
  Clone ID: ARABL1-030-Q1-B1-B1
actgtntttaaccccacactatnggncccctatgacgtngaaaannannccttnnttancnncggaatncggtncaannncaacccgnnnnnnnnnnnnnnnnnnnnnnnnnnnnnnnnnnnnnnnnnnnnnn

SEQ ID NO: 271 - DNA, 365 bp, Arabidopsis thaliana
  unsure at all n locations
  Clone ID: ARABL1-030-Q1-B1-B3
antaaagcggccccttaagtagttccctgcgatctccatgtctgctcattgacttgattgttccttcgtctactattggaaatcatccccaatcgcgattgcggtgatatgcaacctttgcgcaggagatggtatggctgacattgtgggtcggcggtttggaacagagaagcttccttacaacaaaaacaaatcatttgctggtagcattggaatgggcaccgccgggtttctagcatctgttgcgtatatgtactactttgcttcatttggttacatcgaaggatagcgggggaatgatcctccgttcccccgtcanccccaaagcatcaactcctgtgggatcaatcccaatnagcaacggc

SEQ ID NO: 272 - DNA, 427 bp, Arabidopsis thaliana
  unsure at all n locations
  Clone ID: ARABL1-030-Q1-B1-B4
anttgaaaaacnancncaagactttgaagaccantgggattcttgtcatggttaagaaatcttacaagnnnnnnnnnnnnnnnnnnnnnnnnnnnnnnnnnnnnnnnnnnnnnnnnnnnnnnnnnnncagatctgatttcatagtcaacgagaaccaacctttacctgatccggttttggcttcttctactcctcagactattaaacgtggtcgtggtcgacctccaaaagctaaaccagatgttgttcaacctcaacctctgactaatggaaaactcacctgggaacagagtgaattacctgtctctcgaccagaggagatacagatacagccgccacagttaccgttacagccacagcagccggttaagagaccgccgggtcgtcctagaaaaagatggaacttcgccgacggtgaagccaagct

SEQ ID NO: 273 - DNA, 401 bp, Arabidopsis thaliana
  unsure at all n locations
  Clone ID: ARABL1-030-Q1-B1-B5
gagtagaagggtggactgccatgatttcgatcgggtttaacgctgcgattagtgtgagagtatcgaatgagctgggtgcaggaaacgcagcgttagccaaattctcagtgatagtcgtctccataacttcaactcttatcgggatagtgtgcatgattgttgtcttagccacaaaagacagcttcccttatcttttcacttcaagcgaagctgtggcagcagaaaccacgagaatagccgtcttgttgggcttcactgtcctcttgaacagcctccagcccgtcttgtcaggggttgccggttggagcggggtggcaggctctggttgcatacgtgaacattgcgtgttattacattatcggactacctgctggccttgttcttggatcaaactanactcg

SEQ ID NO: 274 - DNA, 224 bp, Arabidopsis thaliana
  unsure at all n locations
  Clone ID: ARABL1-030-Q1-B1-B6
gagcagaacagcaaaaaaaaaggggtggtctttgtgcttcttctcaataaagcttttcttctgagtaaaactttgtattngtttgtaatgttttggtagtttcatgtgaatcttgtgaaaggtgtttgttaatatttgtgaatcacgtnnnnnnnnnnnnnnnnnnnnnnnnnnnnnnnnnnnnnnnnnnnnnnnnnnnnnnnnnnnnnnnnnnnnnnnnnnng

SEQ ID NO: 275 - DNA, 525 bp, Arabidopsis thaliana
  unsure at all n locations
  Clone ID: ARABL1-030-Q1-B1-C2
ggttgtattcntgcagcaacttgaatttanccgacactataggcccngctatgacgtcgaaangaacgcnttacgttaagctcggaattcggctcgaggaaataatcaaaacttaaaaactatcagaatgggaacgttcttaggacactttgtgcctggtctctcacttgctcttcntggtctttggcatctcttcaacaccataagatcttactgtcttaaaggccctgaagctttctctgcaaaattctggttccctttccctaaactcaaacatcttgagcttatcttgattctcttcttctccttcctctccatcactctcctcaccctagatttccctaatttcaacttctcctctctcaaaccagacaacctanaaaaatggctccaatggtcctccaactcaatanccttggcgtgtttcgctcctcttccggcgaagctaaacctttgctcaagatttcctctccggtccaatcggagttccttccggctccgtcctcgctcaagaactcctccttc

SEQ ID NO: 276 - DNA, 374 bp, Arabidopsis thaliana
  unsure at all n locations
  Clone ID: ARABL1-028-Q1-B1-C7
gagtgcgtttgctgttgggaacttgctactgctttgaaagaggctaaaccganatttgatgcggctggtgttaaattgatagctgttggagttggaactcctgacaaggctcgtatacttgcaactcggttaccttttcccatggaatgtcnttatgcggatcctgaacgcaaggcatatgatgttcttggtttatacttcggtttgggccgcactttcttcaacccanctagcaccaaggtcttctcaagatttagcganattcgagaagcaacaantnattacaccananaaagccactcctgaagacagaancagtgtgttgcancanggangtacntttgtgttcagaggcaagaaattantgtacgggc

SEQ ID NO: 277 - DNA, 342 bp, Arabidopsis thaliana
  unsure at all n locations
  Clone ID: ARABL1-028-Q1-B1-D5
gatcgattcttcttcgtctctctccgagtganatanacccttgatttcactanagaaagttttttttttgtgatcgggaattgaatcttcttatcatgaattatcttcttggagctttcaanccagcatgtaatatttcaatcacatttanngatgggaaaaaccgtaaacaggtacccactaagaaagataagggacaaatagttatgaatccacttttccagagtcaagaaactantgctgggaagattaacattgaaccatatcaaggaaaaaaagtggagcataatggtgtaaaagttgagcttcttggtcaaatggaaatgtactttgacagaggaa

SEQ ID NO: 278 - DNA, 196 bp, Arabidopsis thaliana
  unsure at all n locations
  Clone ID: ARABL1-028-Q1-B1-D6
ggataaaganggcgaggaagattaccgagggagcanaaggcgataataatatgggccactcttggttatcttattacagctacaggactcattttgtatctgtttcgttgagtgggggatgatatgccttgtattcaagagaagagagacacggttgatttcaacaaagcttatattgataaaaaaanaanaaang

SEQ ID NO: 279 - DNA, 385 bp, Arabidopsis thaliana
  unsure at all n locations
  Clone ID: ARABL1-028-Q1-B1-C6
caaaatccatagcaatggcnacttcgatagctcnattgtctcggagaggagtcanttctaacctgatccgtcgttgcttcgctgcggaagcggcgttggcgaggaagacagagttacctanaccgcaattcacggtgtcgccgtcgacggatcntgtgaaatgggactacagaggncaacgacagatcattcctttgggacagtggcttccgaacgtagccgttgatgcttacgtggcacccaacgttgtgctggcnggtcaggtcanagtctgggaaggctccgtccgtttggaaaggtgccgttttgcgccggnatntcaacaaaatcactggttggantccgctcnaaatgtncaaggaaccgtgtgttgttcatgccncct

SEQ ID NO: 280 - DNA, 368 bp, Arabidopsis thaliana
  unsure at all n locations
  Clone ID: ARABL1-028-Q1-B1-D7
tcgggtcggatcttttgaagttcttcaatggcgcagatactttcccctgtttgtacggatcttttgaagttccanaactcagctcttanctccagatcaggtgcgtcgccgcggttctcggcgaagaccaccggtgcttcttcatcttggnacttacctcggtacgcaggaaagaggcgaaccgattcaatcggaatgattgagagttgcaactgaggatgcttcttctctttccaccggtgatgtcgccgatgattactatgccgttctcggactccttccagatgctacgcatgaggagattaannnnagcttactanaactgtatgaaaatcgtgncagcnanacttnagtggcaatgacccccg

SEQ ID NO: 281 - DNA, 422 bp, Arabidopsis thaliana
  unsure at all n locations
  Clone ID: ARABL1-028-Q1-B1-F1
gagagagaatctctccggcgagatcaccggcgttattccgataatttcgcctgagagttgtcgcatgttataaatgggnnnnnnnnnnnnnnnnnnnnnnnnnnnnnnnnnnnnnnnnnnnnnnnnnnnnnnnnnnnnnnggtgtagtancggaagcggtggatttaggagtagttctaagcttttcgattctccggcgtgttcgagatcggatttgaagaaacgtagcgggaagagaaattcacggttaaacggactttcgttagagaaattaaggtcnattaaagcatcgtcngtccttcccggctgggacaagancaantanccgaaagttgatcgaacgaacgggagaanccggcnggcgccttgggtttaanctggttaacttcaanggagaatgttaaccgtccggtttgggaaaa

SEQ ID NO: 282 - DNA, 61 bp, Arabidopsis thaliana
  unsure at all n locations
  Clone ID: ARABL1-028-Q1-B1-F10
gnnnnnnnnnnnnnnnnnnnnnnnnnnnnnnnnnnnnnnnnnnnnnnnnnnnnnnnnnnng

SEQ ID NO: 283 - DNA, 365 bp, Arabidopsis thaliana
  unsure at all n locations
  Clone ID: ARABL1-028-Q1-B1-F12
tgacaaaaacaccctcctcaagatcaagaaatctctaaacaacccttatcacctcgcttcatgggaccctcaaaccgactgttgctcctggtactgccttgagtgcggcgacgccaccgttaaccaccgtgttaccgccttaaccatattctccggccagatctccggtcagatcccggctgaagtcggtgacttgccgtatcttgagacccttgtcttccgcaaactctctaacctcaccggtacaatccaanccancatcgccaaactcaagaacctccgaatgctcangctcagctggacgaatctgacangtcnaattcctgactttatnagtcanctcangaatctcgagttcttaaaac

SEQ ID NO: 284 - DNA, 381 bp, Arabidopsis thaliana
  unsure at all n locations
  Clone ID: ARABL1-028-Q1-B1-F3
cgaaggacaaaaccgagagacgcggcgagaaagacngtgacttgangtggtctatgggtggtggtgggaatctcgtcgacggnnnnnnnnnnnnnnnnnnnnnnnnnnnnnnnnnnnnnnnnnnnnnnnnnnnnnnnaacaataataataataatcacgaacaacccattttcaattcttcttcnttctcttcttcctctaaccccaatcattccgctaantctggagagcttattattgaanaagatctcgatttctctggtctaacgcttattaacgttcctaaacgttatcatttacctaaggattctcacaagaanggggaaactgaattctcacggggtatgganaanctaacaaggtacaaattcaaganggtgg

SEQ ID NO: 285 - DNA, 408 bp, Arabidopsis thaliana
  unsure at all n locations
  Clone ID: ARABL1-028-Q1-B1-F4
gagaattaagtggaaatgaagaagaggaagattcatcatagcgacgacgaagaggacgacactttctactatcgnnattcctccgtcgcggcaccaccaccttcgaaccctaaacaccaaccttcttcctccgccaaatcatcagctcccggcggcggatctggcggcttagctccttcaaaatcaacactctacgtctccaatctcgatttctccctcaccaattccgacatccacactctattctccactttcggcaaggtcgcgagagtcactgttctcaaagattgccaaactccgcaaatctcgtggggtcncgttcgtgctccaacgtctctcgtgaaagacccgctaaaagcggggcgttctaatgggacgccaaagnattcttaaatgggccgggnaact

SEQ ID NO: 286 - DNA, 375 bp, Arabidopsis thaliana
  unsure at all n locations
  Clone ID: ARABL1-028-Q1-B1-F7
aggataagttgaaacaaaaggttgtgacaattgatagctatgctggtgtaaaatcaaatgatgagaaagcgttaatggaggctgtagcggctcagccagttagtgttggcatctgtggaagcgagagagcgtttcagctatattctagtggaatattctctggcccgtgttcgacatcattggatcatgctgtgctcatagtaggatatggttcacagaatggtgttgattattggattgtgaaaaactcatggggaaaaagttggggaaatggatgggtttatgcacatgcagcgttacactgaaaaatcagacggngtttgcggaatcaacatgcttgcttcatatccatcaagacacatcaaacccgcctca

SEQ ID NO: 287 - DNA, 359 bp, Arabidopsis thaliana
  unsure at all n locations
  Clone ID: ARABL1-028-Q1-B1-F9
tgttgagcagattgacatttgtgaaatacataaaatggtggttgatgtggctaagcagtatttccctaatgtagcagttggntacgaggatccncgtgtcaacctcatcantggcgatggtgttgctttcttgaanaacgctgctgaangaacctatgatgcanttattgttgattcatctgatccaatcggtccagcaaaagagctanttgagaaacctttctttgagtcagtgaatagagctcttcgtcctggtgggagttgtgtgcacacaagctgaaagcttgtggcttcacatggatatcattgangacattgtttctaattgccgtgacatcgttaaangatctgttaactac

SEQ ID NO: 288 - DNA, 360 bp, Arabidopsis thaliana
  unsure at all n locations
  Clone ID: ARABL1-028-Q1-B1-G11
ttttttgacagccactggtccatctggtcctgttactccagatggtgtgtggaaatccccggcagacactccttcctcagtgccattattctctcctcctgccaaagctgctacgtttggtcatggtgggaacaaatcatttggagtatctattggatcagccttttggcccaccaatgcagatagtgcagctgaatcctttgcttcagcgtttaacaatgaatctactgaaaagaaacaaactaatggaaatgtctgtaggctttttgggtttgagctagttgaaaatgttaatgtggatgaatgtttctctgctgcctctgtgtctggtgcngtcgctgtagattaaactgtcccaat

SEQ ID NO: 289 - DNA, 324 bp, Arabidopsis thaliana
  unsure at all n locations
  Clone ID: ARABL1-028-Q1-B1-G7
aaggaattgtttgttgttaaaatgtttcttacgcgatttgtcgggaggagattcttggcggctgcatcggcgcgatcggagtccactacagcagcagcagctgcctcgacgattcggacgccaacaaatccactcgaagagttctttgagttcgacagaagccaagacgaagataaacctgttgtctatggtcgaggttgggaaagcttcagagctgcgtctcaagtcatgggatgatcttcagaagctgtgggaacgttcntctcaangagaanaacatgtttgaaggactcagcgtcagatgccttaaggctcaanaacatg

SEQ ID NO: 290 - DNA, 387 bp, Arabidopsis thaliana
  unsure at all n locations
  Clone ID: ARABL1-028-Q1-B1-H1
ctccttcttcttcttagctctcttcctccattatcgtattatcgtagcttctccattcgaaggatttgatgctgaagaagacgacgttaccgacgattcctctcaccttcttcaccactcactccctccgcctcttctcactcagtctcactcatcactctccgatcccgatccggagccggaaccttcttccgccgaatgtaaatccgatctcatcactgaatcagatctcgagcatcaatccgattcgaaaactccctcgtctacaccatttgagtactgggacnaaagacgagttcgaagggactaccantttgagatagaagacacttgaatcctccaattgattacagaaaaacgggactcatgctgattcaaagaacgccn

SEQ ID NO: 291 - DNA, 381 bp, Arabidopsis thaliana
  unsure at all n locations
  Clone ID: ARABL1-028-Q1-B1-H10
gagctaaaaactcctcctttcatttccaaacaaaaacttctttttattctcacatcttaaagatctctctcatggcgatgtctttctcaggagctgttctcactggtatggcttcttctttccacagcggagccaagcanagcagcttcggcgctgtcagagtcggccagaaaactcagttcgtcgtcgtttctcaacgcaagaagtcgttgatctacgccgctaaaggtgacggcaacatcctcgatgacctcaacgaggccacaaagaaagcttcagatttcgtgacggataananaanngaggcattancaagatggtgagaaagcgaaangactacgttgttgaaanaaacagtgaaancgcagatagattgggtaa

SEQ ID NO: 292 - DNA, 404 bp, Arabidopsis thaliana
  unsure at all n locations
  Clone ID: ARABL1-028-Q1-B1-H3
gaggtaagacctaactcttaacgaacttttagataaaagcttataactgagagagacatagatcgacaaaagtctctataccttcttgtaacgtggtggttaattaatcatggccgatcaaatctccggcgagaagccggccggagttaatagattcgctcttcaatgtgctatcgtcgcctccatcgtctccatcatctttggttacgatactggtgttatgagtggagcgatggtgtttaatagaagaagatttgaagacaaacgacgttcaaatagaagttctcactggaattctcaacctttgtgcccttgtcggatnattgctcgccgggaagaacgtcgggcataatcgggacggggttacacaatcgtcctgggcctcaatactaatcaatgttang

SEQ ID NO: 293 - DNA, 398 bp, Arabidopsis thaliana
  unsure at all n locations
  Clone ID: ARABL1-028-Q1-B1-H4
gtgaagcatgcgaaaatggaagagtagagaaatcacaaggtatatgaacatgatgactccattttcccattttcttctcagtcgtcatcttcatcatcactcctccttcaccttcaccttcactctctcttttaccgccaatcattaccaccgattcacctcctaagcttccggcgaaaactgagcttcctgtcatcggaagctgtatagattgaagatccagtttcaaatttctcgaatcatcgttagtttcccatcgacgttcactctgtaaatcagtgtctgtgaaacaccataacgtanangagcttctaaaagtctccggggggtgcgacctctcggggctaatatctggaaatcgccaagacgttgtcgaatctcgaccaagaatctgtcgc

SEQ ID NO: 294 - DNA, 378 bp, Arabidopsis thaliana
  unsure at all n locations
  Clone ID: ARABL1-028-Q1-B1-H5
gaatcgccaaatatatattctttttttttcgatttttcgatagattagaaatcgacanatccaaaanaaaaagtaagtggacctaacccatcgaatcatgactatatccactattctgatattcaaattcgatagagattaaattgaaacagtanattttttttanttcatatttttgtattaggaaatccgtcgatatctcttattgaatcttcttgtntctatatatttcataggaaatatattgcgttcctgcctagagaaagagagtatttttgcaaagtaataactaaaanggcgttcaatatttttttttgatcgagaacataacaagttctacattccccttggtnttangaatcaattggaataaaaata

SEQ ID NO: 295 - DNA, 359 bp, Arabidopsis thaliana
  Clone ID: ARABL1-027-Q1-B1-H11
ttcctcgattttggacaggatgcagcacaagaaaagttatcggaatcactatacaactcagctgcaaactctacaggggaaggaatagttcctgacccttgtattcctaaagggtatatccttgaaacaaatttacaaaaggacttacctggattcttggctgataaaggcaaatttacagccacccttcaagctgctggtaatttctcagagtgtcgatctgctgcatttgccatgttgcaggaagaaaaagggaaatgtacttataagcgttgttctattggatcaatattcacacctaatcttcaaggaagttttttggctacagagaatttcctccacacatccaagttctttgg

SEQ ID NO: 296 - DNA, 375 bp, Arabidopsis thaliana
  unsure at all n locations
  Clone ID: ARABL1-027-Q1-B1-H2
ggtggtgttgttcgtggtctcnatgantgtgctangcttattgagaagcgtgtggctcaactcgttgtcttggctgaagactgcaacgagcctgattatgtcaagcttgtgaaggctctctgtgctgatcacgatctcaggttgctaacagttccaagtgccaagacccttggcgaatgggctggtctctgcaagattgattctgagggtaatgccacngaaggttgttggatgctcatgtcntgttgtcaaggncttcggcaaggaganaacngcctccantatcgttaaataancatattgctnccaataaaatgccatgnaacatatctaaactccngattcanatgttttcaacnccaatgccgttttccc

SEQ ID NO: 297 - DNA, 430 bp, Arabidopsis thaliana
  unsure at all n locations
  Clone ID: ARABL1-027-Q1-B1-H4
tcttcctagattccagcgacttaacaacaacaacaacaacatattctctgctgggtattagattcgaatttctctttttgtgatcagaaatggatcgagctccggtgaccacaggaccgttggatatgccgattatgcacgacagtgatccgatatgacttcgttaaggatattggttctggtaatttcggtgttgctcgtcttatgagagataaactcactaaagagcttgttgctgtcaagtacatcgaagagaggagacaagattgatgaaaatgttcaaaaggggagattaattaaacaacaaggtcactaaagggaatccctaaataattgtcaagattttaaagaaggtcaatttttggacgcccgantcaacctggggtatcataatgggaataatgccttccgggcnggtgaaacttttacg

SEQ ID NO: 298 - DNA, 359 bp, Arabidopsis thaliana
  unsure at all n locations
  Clone ID: ARABL1-027-Q1-B1-H9
tgacgaaagcgaagaaggtttcggaagtaaatatgtcttccttggggagcagcaaatccctgagggatgagatggaggtaacaaccgccgatgtttttccggaggttaacgccgccgctgtgacggaaaatcttgatcggaacgagcttgtgcttgctgacggagtcgtgtcggctgaggaaaggaatattgagccagacaatcgtggagagaggaagatagagagcgagtcgcctccagaggatgatgtttgcccgatctgtttcggctcctttacggttccgtgtcgtggaaattgtggtcattggtantgcggnaattgcatcttgcagtactggnactatgctgcaatatctagg

SEQ ID NO: 299 - DNA, 360 bp, Arabidopsis thaliana
  unsure at all n locations
  Clone ID: ARABL1-027-Q1-B1-H10
gagagggtttctagtcacttgaagcttctcttaaaaaacctgtctcactcctcgtcaacctcttcctctcccgctgtcgccaagattgaatcttttttcagttgtggcttcaccggataataaggaattcagtaagagataagttcatcctgacaacatggagaccaagaatgagaattctgatgtttcacgggcagaggagtttaaaagtcaggccaacgaagcttttaaaggtcacaaatactccagtgctattgatctatatacaaaagctattgaactcaacagcaacaacgctgtgtattgggcaaatcgtgcatttgctcacacaaaactgggaggaatatggcantgcaatac

SEQ ID NO: 300 - DNA, 446 bp, Arabidopsis thaliana
  unsure at all n locations
  Clone ID: ARABL1-028-Q1-B1-A10
tganattaagatgacaccaggnccagagctataacgtnacattgcacgcgtacgttaagctcggaattcggctcgagtggctgaggaaatcaagaatgttcctgaacaggaggtgccaanggtagcaacagangaatcatcggcagaggttacagatcgtggattgttcnatttcttgggaaagangaangacganacaaaaccagaggagactccgatcgcttcagagttttcgccacaaggttcatatttcagagccggagccagaggttaaacacgaaagtcttcttgaaaagcttcaccgaancgacagttcttctagctcctcattgaggaagaaggttcagatggtgagangaggatgaagaagaaangagaataanaagccaactactggaattttgaggnaaanggaggaaganangnaaaagggtttatggnaaagt

SEQ ID NO: 301 - DNA, 402 bp, Arabidopsis thaliana
  unsure at all n locations
  Clone ID: ARABL1-028-Q1-B1-A4
gagaagaaaacaaaatcatgtctcgatttgctatcttagtaaccttggnacttgccattgccactgtttcggtggttatagctcaagtccctccggagaaacaattcagagtcgtcaacgaaggagaattcggtgaatacatcactgagtacgacgcaagttacagattcatcgaatcatcaaaccagagcttcttcacatcaccattccagctcttgttttacaacactacccctagcgcctacatcttagctctccgagtcggactcaagcgtgacgagtctaccatgcgttggtatggggacgcgaatcgcaacaancccgtcggagaaaacgctacactctcactcnggcgtaacgggaacctcgtcctcgctgaagctggacggacgagtcaaatgg

SEQ ID NO: 302 - DNA, 406 bp, Arabidopsis thaliana
  unsure at all n locations
  Clone ID: ARABL1-028-Q1-B1-A6
gaggcanacattanngttgagaaaaaaaannangtangaacgagagagagaaagccatgtctgcgaaaacaatcctatcatcagtagttttggtggttctcgtcgccgnatcagcagcggntaatatcggattcgatgagtcaaacccgatccgaatggtctccgatggtctccgggaggtagaagaatctgtttcccagatcttaggtcaatctcgtcacgttctctctttcgctngcttcactcaccgatatggtaaaaagtatcannacgtggaggagatgaagcttcgattctcgattttcaanggagaantcttgatttggttcagattcanncaanaataaaagggttatnttacaancttcggtgttaaaccaatttgctgaatttgacattggcaaga

SEQ ID NO: 303 - DNA, 385 bp, Arabidopsis thaliana
  Clone ID: ARABL1-028-Q1-B1-A7
gagagagatgtgaagacgagtaacgttatgttggattctgagtttaacgctaaactcggagattttggtttagctcggtggttagaacacaagattgatgaaacagagcatgattcgagttacgactctgtttcttccttccgtaaccaccagttccgagtcgcggattcgactcggatcggtgggactatcgggtacttaccaccggagagtttccggaaaaaaaccgttgccaccgctaaaacagatgttttcagctttggtgttgtggttttagaggttgtctccggtagacgagccgttgatctttcgttctcggaagataaaatcattttacttgattgggttcggagattatccgataaccggaaattactcgacgccg

SEQ ID NO: 304 - DNA, 394 bp, Arabidopsis thaliana
  unsure at all n locations
  Clone ID: ARABL1-028-Q1-B1-A8
agaaaagaagcagctttgcttgtanatganctcagaagcaacttcaactctggcagaacgaagagctacgagtggcgaatttctcagcttcaaaacattgcnangatgattgatgagaaggagaaatgcatcaccgaagntttgtntcaagatctttctaagcctgagcttgaagcttttctanctgagatttcgaatacannatcatcctgtatgcttgcaatcaaagagttaaagaactggatggctccagaaacggtcaaaacttctgtgacaacatttcnctcgtctgcacaantagtctcagaaccgcttggagttggtttgggtaattcagcctggaaattccctttccgaatgtcngtcnagncaatcattggggctantgcactgg

SEQ ID NO: 305 - DNA, 366 bp, Arabidopsis thaliana
  unsure at all n locations
  Clone ID: ARABL1-028-Q1-B1-A9
agagattccggtgtccttcttcctttcactcgcgtataacctcttttccttgacgttgtctccgtgagctctctgtgctttgactgcaaccatgtcgacnattatgcagaagatcaaagaaattgaagatgagatggctaanacacagaanaataaagctacttctcatcatctgggtttgttaaaggccaagcttgctaancttcggagggaccttcttgcaccgcctaccaanngtggcggtggtggtgctgganaangttttgatgtgactaaaagtgggngattctagagttggactggtcggatttccttcggttggnnaatctacgctantaaacaaagctgactgggacattttccgng

SEQ ID NO: 306 - DNA, 359 bp, Arabidopsis thaliana
  unsure at all n locations
  Clone ID: ARABL1-028-Q1-B1-B11
cgagtaccattcaaagaaaatgtttgaggtgaaactgagggaaatcaanaccgttcttacaagcaaggtcacagaggaaagtantgtaaacnaagtcattgaatcggtgangcaacagatcaaagatgctaagttacctgacattgaggttgtgcgtgttgtttgggatggtttaatggatgctgttcantggtctggaaaaaaccagcagcaaaatgcaaattctgttctgcgccaggtgaaaacatgggctccacttctgaacacgttctgtaccagcggaaagctaaatctggaactgatgtacaaagtccaaatgcactgctatgatgatgcaaagcttatgaanagttttccca

SEQ ID NO: 307 - DNA, 421 bp, Arabidopsis thaliana
  unsure at all n locations
  Clone ID: ARABL1-028-Q1-B1-B12
agctatgangtcacatgcacgcgtacgtaagctcggaattcggctcgaggattaagttgccatcgggttcgaagaagattgtcccaagtggatgcagggctatgattggacaagttgctggaggtggaagaactganaagccgatgctcaaggcaggaaacgcgtaccacaagtaccgtgtgaagaggaactcatggcctaaggttcgtggtgtggctatgaatccagtggagcatcctcatggaggaggtaaccatcagcacattggtcacgccagtactgttaagcgtgatgcacctcctggacagaaggttggtcntattgctgcanggangactggtcgtctcanaggtcaagctgctgcttcagctgccanggcagactagagttanaagagataaactttgtttctcttgtttcc

SEQ ID NO: 308 - DNA, 381 bp, Arabidopsis thaliana
  unsure at all n locations
  Clone ID: ARABL1-028-Q1-B1-B3
gtgatagtcttgccantgagtgttttcacgaagatttgcatcttgaaagagagagtcgcgagactatcactctcgaggttgagagctctgacaccatcgacaatgttaangcaaagattcaggacaaggaangcattcctccggatcagcaaagattaatattcgccggtaaacagctagaanatggccgtaccttggccgattacancattcagaaagaatcaacccttcatttggttctccgtttaagaggtggtatgcaaatctttgtcaagactctgactggcaangaccattactttgganggttgagagctncnganactattgacaacgtcaaagnaaagattcaaggacaagggaanggaatccctccggatt

SEQ ID NO: 309 - DNA, 392 bp, Arabidopsis thaliana
  unsure at all n locations
  Clone ID: ARABL1-028-Q1-B1-B4
ttctttcaatcganaagattatanagctgagtgactgattggtggtttcttggagttttaatgggaggttgtttcagcaatcggattanaacagatantgcttccantacatggntaagttcgaaattcttgagtagagatgggagcaagggctcgtcgaccgcttccttctcttatatgcctcgaacagaangcgagatcttgcaaaatgctaatctcaanaactttagtctcagtgaactganatctgcaactaggaatttccggcctgatagtgtggntggtgaacgtggatttggtgcgttttcaaaagntggatcgatgantcctcnccncgctcccttctaaaaccgggggaaccgggaattgtcantgctgtgaaaaagacttaa

SEQ ID NO: 310 - DNA, 384 bp, Arabidopsis thaliana
  unsure at all n locations
  Clone ID: ARABL1-028-Q1-B1-B8
cttctctgttgttacagaagtcgacggcgagtagcttcaaccaanaagaaacaccagtanctgtctcagcaatggaatttttccagaaagcaaaagctattcgaatgcgtaacagtcacaacaagtatctaacagcagacgacgatgaagaaaccgtaactcaaaaccgtaacggatctaccaaaaacgctcgatggnccgtcgaaccggttcgtgattctttccatgttattcgtcntaaaagctgttacggtaagtanttaaccgcttctaacgagcggtcntgctcggggctacggggaanaaagtgnntcagttgaaactgagtcgggttgattcgtccgttgagtgggaaccgcntanaaaaagggtctaagattaagc

SEQ ID NO: 311 - DNA, 379 bp, Arabidopsis thaliana
  unsure at all n locations
  Clone ID: ARABL1-028-Q1-B1-C5
gagggcgcagctttttcttcgtcttcttcaattattctattccctctgagagattctctntgcgtttcttagatcgagcgagcgaagcgagagatcatggaaggtggagctgctctctacaatcctcgaactgtcgaagaagttttcaaggatttcaaaggtcgtcgtactgccattgtcaaagctctcaccaccgatgttcaanagttttaccaacaatgtgaccctgagaaggagaatctttgcttgtatgggttaccgaatgaagaatgggaagtgaatttaccagctgaagangtgcctcctgagttancanagccagctcttggtattaactttgctaagggatgggctctctgaaaaggaatggctttcgcnt

SEQ ID NO: 312 - DNA, 294 bp, Arabidopsis thaliana
  unsure at all n locations
  Clone ID: ARABL1-027-Q1-B1-E3
gaggtggcttcaaactgctgtcagaaggtgggaagcatagatgcaagagcgacaggagagtcagggggctcatcntggaatgactgcgtgtccacttgtttacaaagcaacccaacatgtcaaaattccgtcnaggtcacctgagatgctcacagcanaacagagtcctgatctatgtgtttggtgatcacaaaaanagaggggttcccagacactanaacatgcaatgcggttccgaaggtttgtgcgatttctgtaaggnagtcaacgctgctcaatnnaaatcccaaaaaa

SEQ ID NO: 313 - DNA, 390 bp, Arabidopsis thaliana
  unsure at all n locations
  Clone ID: ARABL1-027-Q1-B1-E5
ttccatcatccatagaagatgaaaaaccaatcactggattattagatgggaatggagaatatactcttacatatgaagacaatgaaggagacaagatgcttgtaggagatgttccatggcagtaagaannnnnnnnnnnnnnnnnnnnnnnnnnnnnnnnnnnnnnnnnnnnnnnnnnnnnnnnaaaggagaagtattagattcctagtcacatatttatnatatcttaatcacagtttgattaataacaaacttagtttggttaagctattaagggattgtgggactttttgatcactaaaattgattatttcttaaattgtcagaatggttggtggtcttcggtgaagaggctgcntgtgattaaaacttctgagatttctcagcatt

SEQ ID NO: 314 - DNA, 402 bp, Arabidopsis thaliana
  unsure at all n locations
  Clone ID: ARABL1-027-Q1-B1-E6
atgaagtaagagagaatccaaatctggacacatggatggaggtaggacgggattttatcaggttgcagttcttgaatactgatgggatcagaaccataggatgtgttctgggccagagtattgctctggattactatggccggcaggttgatggtatggtagcagaatttactgagataaaccgtcagttggagataacaggaacgtttacaatgaaaaggaaaaagctgttccagttggttggaaaggctaatgtgattctggctgatgtgattctgaagcttggtctttttgagaagtcagatatagcttggaaggatccaaatatgggtcagtatgggaanttccgaaaagatgaatttgaactgacacagagttttgcaaaccttgattataagctca

SEQ ID NO: 315 - DNA, 404 bp, Arabidopsis thaliana
  unsure at all n locations
  Clone ID: ARABL1-027-Q1-B1-E7
gagggaaagaagaccaaatcggcggcggaatcaacgacggtcacagaatcttcaagctttccgacgtgtttgcgtctccttacaccttcctccgtcgctatcaccatccatgcgaagccaggttccaaagccgcctccatcaccgatgtgagcgacgaagcggtaggcgttcaaatcgacgcgccggctagagatggtgaagctaacgcagctcttctcgagtacatgagctctgtattgggggtgaaaagaagacaagtctctctcggttcgggatcgaagtctcgagataaagttgtgattgttgaggatatgacccaacagagtgtttttcaagctttgtcccaagcatcaaaacctaactaaagtttccaaacctgtaactaactatatggngaaactaa

SEQ ID NO: 316 - DNA, 400 bp, Arabidopsis thaliana
  unsure at all n locations
  Clone ID: ARABL1-027-Q1-B1-E8
gggcactatggttgtgcaatgggtgcgaaagttccccttcttttgtagcgacagggagtatattagnggccgtcgtatatgggatgctggccgagtcttttactgcattactaagggagtacaatacccgtctgtacctagacaaaacaagccaaggcgagtcgacttgtactattcaagctggtgtatccgtgcagttgaatcaaaaagaggcgatggtgagatgacatcatgtgaggtactactatttcaccatgaagatatgggaataccgtgggagattgcaaagcttggggtgagacanggtatgtggggtgcagtcaagaagattganccaggcctaagtncatatcaaaaggcttaagcaaccggaacaaggttatccccganttgcataatg

SEQ ID NO: 317 - DNA, 308 bp, Arabidopsis thaliana
  unsure at all n locations
  Clone ID: ARABL1-027-Q1-B1-E2
aataaacttaacttaggtgctgcgatttatgcgtagaggtttgcttctcatgctctgaggaatctaagagcaaatgcagcagcccgaaattctagattcccacacatgttaattttgttgcctcagaaaccagccgatccttagtttcctatggatgaaacctagttttgtatagttgttgactctatctctctgtaatgtgatcgctagtgatttcttgcaaataacttttgtgtaaaccagtaaagatatttttatgtgaaataataatcaataggaaaatttcttaaaacaaaaaaaaaaaaang

SEQ ID NO: 318 - DNA, 334 bp, Arabidopsis thaliana
  unsure at all n locations
  Clone ID: ARABL1-027-Q1-B1-E9
gagcgactttgatattggtatgatttcgttgcaaaatgatgatgagatgatgaattggtgtacggaactttcttacatggatggtgtggtagatagtggtgttcttgagattgaaggtggtgattattattctcatattaactatgcactcacatttgaggaaccaactctttctctatggcaagagaataatgatgtagttatgtattgattgatttcgtgaagtcataatataacaaaggctgtttcgtaatccgttaacccccaaaaaaagaaggaataagaggctgtttcattaatctttaacaaattaaaaaaaaaaaaaaaanggcgg

SEQ ID NO: 319 - DNA, 417 bp, Arabidopsis thaliana
  unsure at all n locations
  Clone ID: ARABL1-027-Q1-B1-F1
aaacttttatcatctcctttttgtgacaggcccacactatcaanttcgaaaagtcctaaacaaaagtcgccggtcatgaaagtagaacttgtgttcataccatcgccggggcgttggncatatccgagcaacaacggcgttagcaaagcttctcgttgccagcgacaaccgcctctccgtcactctcatcngtcattccttcacgaagtctccgacgacgcttcttcctccgtctacacgaactccgaagacngtctccgctacatcctcctccccgcccganatnaaactacngatcncgtaancttanatcgacaagccaggaaaccaccagttagagccgtcntgtccaaggnccccnggaaatgtttcaacaagnttaagactccacgggtaacctggggattgtccttaaac

SEQ ID NO: 320 - DNA, 350 bp, Arabidopsis thaliana
  unsure at all n locations
  Clone ID: ARABL1-027-Q1-B1-F4
aaactgctgacaagagtcgagcagctcaagcttctgaccaaagccgagaaagcaggnnttttgtctttagcagagaaatcaggtttctctctatcgaccatcgagcgtcttggattgctgaccaaagcagaggagttcggcgttttgtctgccgccacaaacccggaaacgcctggaacgttattcactttgagcctcggtttactccttcttggaccggtttttgcatatgtggttcctgaagattacacttgggaagtagtgattcaggttcttgtggctctactctctgttcttggggggctctgcggntttgcngcctcngggtttggccccaattttgcaaaant

SEQ ID NO: 321 - DNA, 429 bp, Arabidopsis thaliana
  unsure at all n locations
  Clone ID: ARABL1-027-Q1-B1-F6
gagtggtgacgattctatcaactcctctctctccaagacttacatttctctgtgaaacaaaactgtcattatcncggagcaatcgctcggtatgttgttcattgagtgaagaaccaaaagaccaatgcttgagtcggagaagtcttgtttatgttttagttgcttcgccgtgtttgttgttaccagcgttgtcntcanctgngaaagnantaatccaagagtccttangatgagagacggttactaagaacagagcacagagggntacagagagagagaacaatgctcctgacgagtntcnnaactttgtttagaaaatgtgcngggttttggggttaggggtatantctngggaaatttaactcagggggntgnnttggggccacaatattacgggnatttcanatgttgggcaggggtgatttcccc

SEQ ID NO: 322 - DNA, 372 bp, Arabidopsis thaliana
  unsure at all n locations
  Clone ID: ARABL1-027-Q1-B1-F7
tgtcacaacacagacggactttacagcgcaaaacaaaccgctattgttagagcttccgatgatttctacccaagagatcctgcttctcacaccatccacattgcatcggttgcatacaacagccttttccttggagagttcatgcaacctgactgggatatgttccatagtctacacccaantgcagagtaccatgctgcaacgcgtgcaatgggtggatgcgcantctatgtcagtgataagccangcaacacaantttgatctattgagggagctggttcctcctgatgggtcanttcntccnggctnagctcccgggtaaggctaacccgtgactggcttaatccccgattcaaccanagatgggatca

SEQ ID NO: 323 - DNA, 380 bp, Arabidopsis thaliana
  unsure at all n locations
  Clone ID: ARABL1-027-Q1-B1-F9
gagtatatcaaaccccttctctttgctttctcacactgaaatcaaactcctttggtaattaaagatggagaagaatggtcacacggaaagtgaacttcaaactcaaatggttggaaatgagagactacctcaagtaacgtggcaacggaagttgaacagcaaagtgaagaacccttctgagttcaagatgagtataagagatgttcttcatctgtttcctctaggctatagattgtggcgttacactaaagaagaggcaaaaaaaggaagattttcgatgtacgatatcttcaaaaagcgccatgtaagangcgaccatggtgtcccattaggtggaattggtggaggaagcatcngaaggagtttacaaaggtgaattc

SEQ ID NO: 324 - DNA, 412 bp, Arabidopsis thaliana
  unsure at all n locations
  Clone ID: ARABL1-027-Q1-B1-G1
gcacgcgtacgtaagctcggaattcggctcgagcccggcttttctgaaatggtacagagaggctgagctgatccatggccgatgggcgatggcagcggttcttgggatcttcgtcggccaggcctggagcggtgtggcatggtttgaagctggagcccagccagacgcgatcgctcccttctcgttcgggtcgcttcttggaacccaattgcttctcatgggttgggtggagagcaaacgatgggtcgatttcttcaacccggattctcaatcggttgagtgggcaacgccatggtcgaagaccgccgagaatttcgcgaactataccggcgatnaaggataacccggtgggaaaatcctcnattcgttgggtcccgccggggaaaaancgcgacggtgttatgancccgga

SEQ ID NO: 325 - DNA, 381 bp, Arabidopsis thaliana
  unsure at all n locations
  Clone ID: ARABL1-027-Q1-B1-G12
gaggtagattcattccttttacgtatatgttcttcacgcgatgaaatgggttttttggatgaccggaaattacaaagctcatgctgattctcattacgatcctcacgctctaccggagataaccgggattaattacagagatattgtagctgagaatgtttctatggctggaaggttagagggaatctctggagatccttttactgggatttgtatttcgaatgcaacgatttctatggcggctaagcataagaaagcgatttggatgtgtagtgatgttgaaggagttacgagtggtgttgatcctaagccttgtgatttgcttgatggacaaagaatcagagacgacgaaagaagaagatgattgacgggtggatgtna

SEQ ID NO: 326 - DNA, 400 bp, Arabidopsis thaliana
  unsure at all n locations
  Clone ID: ARABL1-027-Q1-B1-G6
gtcatcggttactcgatgggaggacaagctacttgggcatgccttaaatacattcctcacaggttggctggagtaacgcttgttgctccagtggtgaactattggtggaagaactttccatcagagatctcaaccgaagcttttaaccaacaagggagaaatgaccaatgggcggttcgtgttgcacactatgctccttggcttactcattggtggaactcccagagctggttccctggatcaagtgttgtggctcgcaatctcggtatgttgtccaaagcaagacaaagagatcatgtttaagctccggtgctgcaaaggagccaacattaaggacaaattaaggaacaagggacacacgagacattgcaaccgtnacattaattgttggnttttggaa

SEQ ID NO: 327 - DNA, 469 bp, Arabidopsis thaliana
  unsure at all n locations
  Clone ID: ARABL1-027-Q1-B1-G8
acacnacggccagagctatgaantnacatgcacgcgtacgtaagctcggaattcggctcgagggatcccgagaccggcgatgtggggtttgtgggccgtcgctagttagtagattcagagaagaacttgagttccatggtcttcaaggtaaagtgtcaattagcccatgttctcacataggtggtcacaaatacgctgggaatgttatcatctaccgatcaaacatcaacagggaagtcacaggacactggtatgggtatgtgaccccagaagatgtacctattcttttggagcagcacatcaacaaaggcgagattgtagaccggctatggaggggtgaaatgggtccatcagaaagaagttcagannaaactcaagaagggcaatttaacctaatngnaaaatccaatccgttaaagtnaatnggaaaatgatcaagaatcatcggtcanaacgccgatgttcccgt

SEQ ID NO: 328 - DNA, 422 bp, Arabidopsis thaliana
  unsure at all n locations
  Clone ID: ARABL1-027-Q1-B1-H1
gagtttagtgaagggaaagatcgttctttgtgatagaggaatcaattctagagcaaccaaaggtgagatcgtacggaaaaatggaggcttggggatgattatagcgaatggtgtgtttgacggtgaaggtttagtagctgattgccacgtgttaccggcgacatctgttggtgcttctggaggagatgagattcgtaggtatatctctgaatcatccaaatctcgttcatcgaaacatccaacggctacgattgttttcaaaggtacccgacttgggattcgacctgcaccggttgttgcatctttctcctgctcgtggtcctaatccaanagacgccgggagantcctaaancgggatgtaatcgcanctgggtttgaataatccnaactggcttgggccttgaaccggattgggtccaat

SEQ ID NO: 329 - DNA, 412 bp, Arabidopsis thaliana
  unsure at all n locations
  Clone ID: ARABL1-024-Q1-B1-B11
acatctgaattctcttacaggaaccgaacatggagtcatcatcgtcgacttttctcaccacgacaagcttagacaagaaaaaaccatctccggtttcaagaaaatcaccaaagcaaaagaagaagacgacttcgacgaataaacccatcaaagttcgttacatctcaaaccccatgagagttcaaacttgtgcttctaagttcagagagctcgttcaagaactcacaggccaagacgccgtcgatcttcaaccggagcccatctattccccttcctccgacgaccacaacctttctccaccggcggagaatcttgcgccacgtgttcttcatcaggagccgttcggtgagagagacagtgattgttatgagccgttgaatgcgggaagacatgtttttacctgatnagatgt

SEQ ID NO: 330 - DNA, 429 bp, Arabidopsis thaliana
  unsure at all n locations
  Clone ID: ARABL1-024-Q1-B1-B2
cattttgtaacaatantacaattatanattaaaactctccgacgatgcctcaggcaccgatgccagagttctctagntcggtgaagctcangtacgtgaaacttggttaccaatatttggttaaccatttcttgagttttcttttgatcccgatcatggcnattgtcgccgttgagcttcttcggatgggtcctgaagagatccttaatgtttggaattcactccagtttgacctagttcangttctatgttcttccttcnttgtcatcttcatcncnactgtttacntcatgtccaagccacgcaccatctaactccgttgactattcttgttacaaagccaactgtcacgtgtcgtgtccccttcgcaactttcatgggaaaatctcgtttgattctcaagggaaangcctaaaagcgtttagntcc

SEQ ID NO: 331 - DNA, 468 bp, Arabidopsis thaliana
  unsure at all n locations
  Clone ID: ARABL1-024-Q1-B1-B3
nccctcggggaattccaattccacattttcaagaaataaggaggcaaaaatgttcatatatgaattggaattatttgttttcttattaggcctatcctgaagccaaaggaaatgagatcggaattcctcggggaattccaattccacattttcaagaaataaggaggcaaaaatgttcatatatgaattggaattatttgttttcttattangcctatcctgaagccaaaggaaatgagatcggaattcctcggggaattccaattccacattttcangaaataaggagggcnaaaatgttcaaatatgaattggaattanttgtttcccantaaggctanccctgaaanccanaaggaaatganaatcgggaatttccccgggggtaccgagctccgaattccctaanagtggagtcctaantaaaattcgttaatcangtcaaaanctggtttcccggggttaaaa

SEQ ID NO: 332 - DNA, 449 bp, Arabidopsis thaliana
  unsure at all n locations
  Clone ID: ARABL1-024-Q1-B1-B7
gagaagagtttgtggctgctgaaattcttcaaacccaactgatggtgatgctgannnnnnnnnnnnnnnnnnnnnnnnnnnnnnnnnnnnnnnnnnnnnnnnnnnnnnnnnnnnnnnnnnnaacaacaacaaaacttcacacacgtggtgagagagcacacaaaggctcaagctttttcaaacccttgttgaaattcgagctcttttggtgtttctctttttttttgttggtatcaatttggtgtttctcttggtcttgttgaggtactgaatcagcttcttcttcttctccgatcttaatcgattccaagtttccttcacaagcttgggacgaattgacatccaantnctccaattcaattcccgtaaagttgnttttttttcntcctggtgccttgcaaataaaagggattcctccgaaggtgataatcaaacnaaaagccttatct

SEQ ID NO: 333 - DNA, 429 bp, Arabidopsis thaliana
  unsure at all n locations
  Clone ID: ARABL1-024-Q1-B1-B10
tcataacaagttctatctcaagttcaaaaacatccgagcttgaaaanaatctgccgtcaacatcaatagcggcaatagatgaaacanngaagngaaagaaacacagatctagcaaagaagatnaatacaatgcattgtttgatggttggactcctccttccatgtgtattgctgatgcatcttcaaatgacaatggtgattattggntatttgggaacaagacgcaagaggtgcttaagcccaaagcagcagtcaaagttgattgatgacacgatgatganaccgggagattcatccttgggctaagagctcaanttttgtctnaaagtttnggattaatcnttaaccntatactgtccccgttcnaatgccccgantccttttggttcnaaacctttaaacgtaacttggtacaactggtttgacngg

SEQ ID NO: 334 - DNA, 441 bp, Arabidopsis thaliana
  unsure at all n locations
  Clone ID: ARABL1-024-Q1-B1-B8
agagagaaacaaaagtaaagaagctctcgtaacagtagaagcagagtgcaaatctcactgactactaccaaggcaccaatcaccatgaccatgatgatcattacagtgttcttaacagtgattgcagcggttctcgcaatccttgtcaagaattctcaaaccggttctggcatcttcgcaccgcctgaaatctccggttcgcgtgatgttttcccgtcggcgaaagtggttaacttaaccggagcctctggtcctgagagtatagctttcgatccagcaggtgaaggtccgtacgttggtgtctcagatggtcgtatcttgaaatggcgcggtgaaccgcttggatggtcagatttcgctcacacatccgtccaacaagcangagtgtgctcgcccatttgcancaagagttggagcaagtnttgtggaaggcaattaggg

SEQ ID NO: 335 - DNA, 476 bp, Arabidopsis thaliana
  unsure at all n locations
  Clone ID: ARABL1-024-Q1-B1-C1
gccccttanttaaccccggaattcggcncaaggnaatgatnagcaaatagattgttcggactacacgcctgggatctacgctactttacaggtgtaatattcttctccttaatctttacaccattcaggtttaccaattactagcgctccaagtgtctcgtttctttcaaccaggctgttacattactgatcatgtatgcgccagacgcagatctgaggaaaaagacatttgaggcactgaagagggttctttctgatatcccagctcctcataggtttgacgttttaagagcccttgtcacaaattcccggtctccttcaatgacaagcaatccttctgggtctagttaaagacagcatgagcaaaagcaatttgcaagatacagattgtgccgctgttgatacgcatgttaatgaactaatgggatttgncctaaaggcctccanaaagggaaggtcctccaatcccnttccgg

SEQ ID NO: 336 - DNA, 415 bp, Arabidopsis thaliana
  unsure at all n locations
  Clone ID: ARABL1-024-Q1-B1-C10
gttgacagtaatagtgggattgagattggtcgcactataaaaaagtttcccttgttgactccaagggagtatgtattagcgtggaaattgtgggaggggaaggataagttttactgtttcatcaaggaatgtgatcacaatatggtgccgcaacagaggaagtatgtacgtgtaagttatttcagatctggttggcgaattaggaaagttcctggtaggaacgcttgtgagatacacatggttcaccaggaggatgctggattaaatgttgaagatggcaaagcttgctttctcaagaggcatatggagttacgtttgtaagatggaaaatgcactcgcaaagtacattgcaaccaagtcatcgancccaaaggcccacattaaccgctgttagcctaaatgaaaaagatccatc

SEQ ID NO: 337 - DNA, 418 bp, Arabidopsis thaliana
  unsure at all n locations
  Clone ID: ARABL1-024-Q1-B1-C11
gggattaagaaggttacgatatcaaatcccggcgtcggaatcggtaaaggaagcggaggatgnnnnnnnnnnnnnnnnnnnnnnnnnnnnnnnnnnnnnnnnnnnnnnnnnnnnnnnnnnnnnnnnnnnnnnntcgctatcgtcctcccttttatcttcgtcaggttcgcgtttctcgtcctcgaatctgcctccgtttgcgattcaccactcgattgcatgggactcagacttttccgtgggggcgacacatctctgaaaattggggaagagttgacacgggctctaagtggaagagacgacagatnatcaggacgttaatgggaagaggaacnaanggatnattggagtcattcgacgaaccttgttaaaggagatgacntaaaacgccgtgacaataagggcgtttgcntccgtg

SEQ ID NO: 338 - DNA, 404 bp, Arabidopsis thaliana
  unsure at all n locations
  Clone ID: ARABL1-024-Q1-B1-C12
tcccttaaccaaagtcagaccggttaagaaagtagctctcgttgtcgtcaccggtgatcgtggattatgtggtggattcaacantttcatcattaagaaagcagaggcaagaatcaaagagcttaaaggtctaggtcttgaatacacagtcattagcgtgggcaagaagggaaattcttatttcctccgtcgcccgtacatccccgtcgacaaatacctagaagccggaactttacctacggctaaagaagctcaagctgtggctggatgatgtcttctctcctgtttataagtgaagaaatcgacaaagtcgagctccttgtacacaaagtttgtcctccttgggtcaaatcagaancccgtgattcacaacgctactggctttatcacctaaaagggagana

SEQ ID NO: 339 - DNA, 463 bp, Arabidopsis thaliana
  unsure at all n locations
  Clone ID: ARABL1-024-Q1-B1-C3
agaaaaaaaatcagaacaactcttatcttcttcacgagactgactaaacaatcatagatttttccgttttttgggtttcgtctggtgttactctctccttctgagttatggtgaaataatggcagcagctgaagcaagagcagtgtggcaaagaacagttaatcgttgctttgtccaagaagacgctaaaagagctcccaagttaacttattgccaatcatcttcatcctcaactgcttcttcaactaagcaagtggaagtttctggttcttctcctcgagtttctgttgaaccacgggactcaatcatccttggngcaggtttcaaggcctccttcctccgaaaacccgaaatttccctgattctggttnccccacaaacaccaanactngtgggagtcaatcctcaacatcaagttttaanggggaataaanaancaacccanttggagggatgagggtta

SEQ ID NO: 340 - DNA, 535 bp, Arabidopsis thaliana
  unsure at all n locations
  Clone ID: ARABL1-024-Q1-B1-D1
ntgaattttttgaggcccccagaagagctaaaaaatcgcatgcccncntnnnttanctccgaaatncggtccaaaattccttaactcnaacctcaataacaanccccntttnangggttccttccggaatcnantngggaaaatgggatcctttttggtcaaaacctgaatccggccaacaagggacatcccgacaaggcttggtgattaagattctccgacgctatcctcgatgccttgccttgaacaagaaccctgagaagcaaaagtttgcntgtgaagacttgtaccaaagactaacatggtcatgggttttggagaaatcaccaccaaggctaacgttgattacgagcagattgttcgtaaaacatgccgtgagantggattcctctctgctgacgttgggccaaatgctgacaantgcaaaggtcctgggttaacaattgagcaacaaagtcctgacantgcacaaaggggttcaangggcaatctcaacaaagaaacccagaaggaaggtttggancctggtgaacaa

SEQ ID NO: 341 - DNA, 427 bp, Arabidopsis thaliana
  unsure at all n locations
  Clone ID: ARABL1-024-Q1-B1-D12
catttttgggattggtaaagatacaagccaggatgaagctggaacagcagctgtcaagacagttgaacttgatgcagctcttggaggccgagctgtccaatatcgtgaaattcaaggtcatgaatctgacaaattcttgtcttacttcaagccttgcattataccactagagggtggtgttgcgtctggatttaaaaaaccggaggaggaggagtttgaaacccggctgtatacctgcaaaggaaaacgtgctgtccacttgaagcaggttccttttgcacgctcatctctgaatcatgatgatgtgtttatccttgggacaccaaggaaaagatttatcagtttaatggtgcaaattcaaatatccaaggagagaactaaagcgttggtantcattcaatatttgaaagacaanttcatgaaggaa

SEQ ID NO: 342 - DNA, 441 bp, Arabidopsis thaliana
  unsure at all n locations
  Clone ID: ARABL1-024-Q1-B1-D4
gagtaaaacagctgttttgtccgcaatcattatctattactaaataaaaaatctcaacttttgttccttactcttattacttcctaaatccgatcgaaacaactgttgggttagtttctaatttccaagaatggcgcaagatcacgacgagacggagaataaaacctttgccgacgttgtcggtggcgatgatgtcggcgaaattgtcaacggaggaacaaagaatggctatcgtaaaccggactctgtggagaaggaagatgatgaggatttgaagagtctctattccttgatttgtctcacgatcggttcgattctgtttccagattcgaaaaccggtgatgcgtcttcgtttcttgaacgtgtaanaaactccgtcgctgaaaatggggctaagcctccaaaaacntctgaaanaacaagacccaaaatccttcccng

SEQ ID NO: 343 - DNA, 398 bp, Arabidopsis thaliana
  unsure at all n locations
  Clone ID: ARABL1-024-Q1-B1-D5
gagtagtaacggtaaccaagccgacatcaagatacagtttcagcttgacttgagtaagattatgaggggtgaagatccacggacaaccttgatgataanaaacatcccaaataagtatacccggaatatgctcttagctgccatcgacgagaaaaacagtggaacttatgattttctttatttgcctattgatttcaagaataaatgtaatgtggggtatgcatttatcaatatggtgtctcctaaattcaccattgcattgtacgaggcctttaatggaaagaaatgggataagttcaacagcgagaaagttgcttcattggcttatgcacgaatccaangtaaaagctgcgcctaatgctcantttcaannaccaagtttgatgaattaagatang

SEQ ID NO: 344 - DNA, 399 bp, Arabidopsis thaliana
  unsure at all n locations
  Clone ID: ARABL1-023-Q1-B1-E6
ctcgcgcgtcttggttgtaaacaccgacccttctatcgtgtagttgtcgccgatgaaaaatcgcgcagggacggtaaacaaatcgaggtgttaggcttttatgatccactccaaggcaaagaagatgcggatagagtgagcctcaaattcgacagaatcaagtactggttatctgttggagctcaaccaacagacacagtggaaagcatgcttttcagggccggtttgataccaccaaagcctatgggtantggtcggttcgaaaaaatggggcagaaatctacgagccaacatggtttaanccaattacaggtaaatccttgaactaagaattgttgaatccnttgaagcaaagaaaagaacccttttggtgttcggtgttgaaaagggagtttaatg

SEQ ID NO: 345 - DNA, 432 bp, Arabidopsis thaliana
  unsure at all n locations
  Clone ID: ARABL1-023-Q1-B1-E7
gagagtttttgctttttcaaaaaattaaagaagaagaaacatctcgtttccatggctttgcgaggagatgagcatgagtttatgaacttaagagaatgggatcgaagagctcgattaatccgcgaaaacccgagttcaagaagattctcagcttcatacattggaagcttccgagaagatcaccacaagtcttcttttagaacaacaaacttcaacaacatctctagtactgcctcttctcctggctacactctcaangaagagattgacccatcaacatattccttcaccaatgcactcaaagcattacaagcaaagacaatgtacaataacagggaatgggttagcacaagaaagggtttgcattgaattcgaagtggacgaagcagagnaatatatctngcaatccaattgtcnggagaagttaccaaa

SEQ ID NO: 346 - DNA, 423 bp, Arabidopsis thaliana
  unsure at all n locations
  Clone ID: ARABL1-023-Q1-B1-E8
gagaaaacggaattgattacaaattgtatcttcctcattacaagtctcaagaggaatggattcgccattttggaaaccgatggtcgagatttgttgataggaaagctatgtttgatcccatggctatactttcaccgggtcaaaagattttcaataggtctctttgacccctcatatttttactttttttacnnnnnnnnnnnnnnnnnnnnnnnnnnnnnnnnnnnnnnnnnnnnnnnnnnnnnnnnnnnnnnnnnnnnnnntcccaagaaaaaaatcagctggttttttataaaaggtggcctacgaagtcatgtccaaattatgaaataacaaaatcacaagaaaaacgtccttgtttgggttaaaaaaaaaanaaaaaaaaggcggccgcccgactaatgagctccgtcgaacccggga

SEQ ID NO: 347 - DNA, 402 bp, Arabidopsis thaliana
  unsure at all n locations
  Clone ID: ARABL1-023-Q1-B1-F1
tctctctctctttctctctgccagcgaacatccattggagctcctcactatacggcccaagagatagagggagagagaagacatcataattcccaaacaaaagactttgggtataaaattgggtttattgactttgtgaaacctacccagaaaatctaccaactgtctcgaantctctctcctctttcttgaaacgggaaagagggagggaagaacaataagaagatgaagaagattctanaaagatcaatgggaagggttcagggacatggcaagggcttggtgcccgttgggaatngcaaaatgggttcggtcctcctcctaaccgnaaatttaacccataaatttagatttccccttaaaaacaatgggtccctcctcaagtccttgggggtgtncctc

SEQ ID NO: 348 - DNA, 397 bp, Arabidopsis thaliana
  unsure at all n locations
  Clone ID: ARABL1-023-Q1-B1-E5
ccaccggtgatggtcgaggagaccacagaagaagaagaggagaagaagagtcgtgattgtggacgtcaagttgtgagtttaatcggagatttattccggcgattacacggctctaagttggtgaagagcttgaatctctgtagtatcaacgagagtaaagattcgatttcaatggagatcaataaatcattcactgacatggaaggtgttcagctttccagcaaagtcggttgcgagaatccaagaatcttggatactctgagctttatatccggaactaatggttcaaccaanaactgattctccggaaccggngggttcnggcgcctttaaaaagggctttgtttaccgaaccaacgggaaacaaccgttggctgttaaattgcttggcgggaaa

SEQ ID NO: 349 - DNA, 437 bp, Arabidopsis thaliana
  unsure at all n locations
  Clone ID: ARABL1-023-Q1-B1-F12
ggttgacttcaaaaacacacttctcatcatgacatcaaacgtcggaagcagcgtgattgagaaaggaggaagacgtatcggattcgacttagactacgacgagaaagacagcagttacaacagaatcaagagccttgtaacagaggagctgaaacaatacttcagacccgagttcctaaacaggctagacgagatgattgtgttcagacagctaacaaagctggaagtgaaagaaattgctgacatactgttgaaggaagtgttcgagaggttgaagaagaaagagattgagcttcaggtgaccgaaagattcaaagagagagtagtagacgaaggttataacccgagctatggagcaagaccgttgagaagagccatcatgaggctttagaggatagtatggcanagaagatgcntgcgagagagattaaaggaag

SEQ ID NO: 350 - DNA, 436 bp, Arabidopsis thaliana
  unsure at all n locations
  Clone ID: ARABL1-023-Q1-B1-G10
gtgagaaaatgcttggtaagggactaaaggctttgcaagtccctagaagtgactacattgtggctactaagtgtggtagatataaagaaggttttgatttcagtgctgagagagtaagaaagagtattgacgagagcttggagaggcttcagcttgattatgttgacatacttcattgccatgacattgagttcgggtctcttgatcagattgtgagtgaaacaattcctgctcttcagaaactgaaacaagaggggaagacccggttcattggtatcactggtcttccgttagatattttcacttatgttcttgatcgagtgcctccagggactgtcgatgtgatattgtcatactgtcattacggcgttaatgattcgacgttgctggatttactancttacttgaagaacaaaagtgtnggttgttataagtt

SEQ ID NO: 351 - DNA, 403 bp, Arabidopsis thaliana
  unsure at all n locations
  Clone ID: ARABL1-023-Q1-B1-G4
aggctgtgcacactgggttttacagatgatggacacgcacggacgactgcttgtantgctgggttatggactatggccatcgatggttataatctcagaaatagtccaaacattcatattggcaagatttctgttactactacgttaaaagtgttttcggtggccagcttgttctaaggcttccatctggggttgtgtaagttataaaggaaaaaagataagacacattatgacgaaatttgttacacgaagatagatctcagcttggtgtaatcngatagcctctgggtacccnaaatttacncccnaaggcaaattccaaatncaataaccggngtggaaaattttggggnggtnnacnacaaaaacaatnccctgggntaataatgacaaganttttttc

SEQ ID NO: 352 - DNA, 424 bp, Arabidopsis thaliana
  unsure at all n locations
  Clone ID: ARABL1-023-Q1-B1-H12
ataaaaaatattttgctcttctttctatatatttatnnnnnnnnnnnnnnnnnnnnnnnnnnnnnnnnnnnnnnnnnactcattttctccgcagagaaaatacaatccatggcttctacttttaggctctctattagcttcctcactctcatcctcttctctctgtgggtagtggaggcacacacgtctagaaagttgatatcaatcaaggaaaaagaaggtcaagatattagtcatttgctcaaagatggtgaatttgatgacccttcgttgtacatgtatttcacactcaatgatctcaaactagggaaccaaaattgctgattacttcacaaaaacgattctcaaaagcctcctccaattnctcacaagacaacaaagccgatttcaatcctttcactaaagtcaaagcntgacttccctc

SEQ ID NO: 353 - DNA, 437 bp, Arabidopsis thaliana
  unsure at all n locations
  Clone ID: ARABL1-023-Q1-B1-H3
nggctgttatacgcttgggatgatgaaactcgacaatattgagaagacattgacgctagctctgtttaattctacggggcaacaatgctactagcaagagcatcagcacaattgattcacttgcctcaagcacttgggagaaggttgcaccagaaaagacgttgatcacacctgtgcagtgtaaatcactgtggaggcaatttaagaacgagacagaatataccgttacacaggccatttctgcacaggaanctaaccgacggaataacaactgggctgcaactccaatgggcaatccctggccctggntggtccttggattaaattnaattaagaacccccttaagaaaatccccaaagggccctaaattccaattgtccngganaccctttttanccaaaanccttgtnggggtccaattaaatnttcaaggaaa

SEQ ID NO: 354 - DNA, 363 bp, Arabidopsis thaliana
  unsure at all n locations
  Clone ID: ARABL1-023-Q1-B1-H5
gtnaaatgtatangaccaactggggtattggtcatggtataaaagatattttagaggctcataaaggtccatttacaggccaaggccataaaggcctatatgaaattctaacaacatcatggcatgctcaattatctcttaacctagctatgttaggctctttaaccattattgtagctcaccatatgtattccatgcccccttatccatatctagctactgactatgctacacaactgtcattgttcacacatcacatgtggattggtggatttctcataatttggtgctgctgccatggaagcaattttatgggnagnagactatngattcaaactaaanccgataataacnaatttatta

SEQ ID NO: 355 - DNA, 433 bp, Arabidopsis thaliana
  unsure at all n locations
  Clone ID: ARABL1-024-Q1-B1-A12
agtgttgactctgatatcgaaattgatgatgtgtctgattctgagcaggaagatggggaagatgatgagtatgaccagctgccaccatttaagcctcttcgaaaaacccaacttgcaaagctctcaaatgaacagagaaaggcatatttcgaggagtatgattaccgtgtaaagctcctgcagaagaagcaatggagagaggaattaaagaggatgaaagaaatgaagaaaaacgggaagaagctgggtgaaagtgagtttggttatccgggaagaagaagatgattcaagaaaacggggctccagctgcagtgccagttccattaccccgatatgggtttgccaccttcatttgataatgataactcaacttancgataccgatatcctggaacccacttcacaactcctaaccaagccaattgttgggata

SEQ ID NO: 356 - DNA, 417 bp, Arabidopsis thaliana
  Clone ID: ARABL1-024-Q1-B1-A9
aagcatgtacgttacattctgatggcagaaaagaagaaagagagttttgagtctgtggtgatggatcatctaagaatgaatggtgcatactggggactcaccactctcgacttacttgacaagctcggctgtgtttctgaagaggaagtcatttcatggctcatgacttgccagcatgaatctggtggctttgccggtaacactggacacgatccacatatcctatatacactcagtgctgtacaaatcttggccctatttgacaaaatcaacattcttgacattgggaaagtgtcaagttatgttgctaagttgcagaatgaagatggatccttctcaggagatatgtggggagaaatagatacgaggttttcgtacataactatttgctgtcctcccaatattgaaatgtcctga

SEQ ID NO: 357 - DNA, 433 bp, Arabidopsis thaliana
  unsure at all n locations
  Clone ID: ARABL1-023-Q1-B1-B4
agcgtttttttcctgcttgcttctctctttgcttgcgttttctcaaaggttcgaagaaaacgaagaaccacgcttttgcttttttcccaagacttaatctaaaaagcgagatttccttctttcgattcttttttctcaatctggttttcagtcttcggattcaatggcgtctggatcttcgggtcgggtcaactcaggatccaaaggtttcgattttggctccgatgatatcctttgctcatatgatgactacaccaaacaaagaactccctctaaatgggcctcaatcccgattctggcgattgcctggcttncaaatccaacaaagggaattccaataaaacaaggatgggaaagggcctcgggtttccctaaaaagctcctaaaatccaacaagagggaatccttgagccaagacattaatgacantggc

SEQ ID NO: 358 - DNA, 392 bp, Arabidopsis thaliana
  unsure at all n locations
  Clone ID: ARABL1-023-Q1-B1-B6
gaaacaaaataataagatggttagggcaaatatagtgagcatggttctgttgatgcatgccatcgttgggtttccttttcatgcgaggggattaagtatgacttactacatgatgagctgtcctttcgctgaacagattgtnaagaacagtgttaacaatgctcttcaagcngatcccactttagccgctggncttatccgtatgttgttccacgactgtttcatcgatggatgtgatgcgtcaattctgctagattcaacgagagacaacactgcggaaaaggattcgcctgcgaatctgaatctacgtggntacgagatnatcgatgatgcaaangagaaaatcgaaaatanatgtccaagagttgtaacatgcgcaaatttanttgcca

SEQ ID NO: 359 - DNA, 428 bp, Arabidopsis thaliana
  unsure at all n locations
  Clone ID: ARABL1-023-Q1-B1-C12
gagcttcttttttttggctcatcgtcaaaacaaaagtgttggcgatggaacgaactactgtaatactgttcgtcttcttcttgctctctgtagcaatgtgttctcttcactctttttcttccgtagcaatttcattcagaactcaaaagtacgtaaatacctctctcgttcatcgcttatctcctataggatatcgtaattatcctctaccgtgggcagtgacgtcaattgacgaaatccctcctaatgctgttcgccggaaaatagaccggaattggagaggtgggttcagtctcggcgtagatttaggtttatctcgaaccgggaatcgctattagtaaaaggctaacaccgttaaaacctctcacggtttgaaatccganaagggaaaaaactccgaagaaccaaggcttttaanaaaattgctg

SEQ ID NO: 360 - DNA, 416 bp, Arabidopsis thaliana
  unsure at all n locations
  Clone ID: ARABL1-023-Q1-B1-C2
gagctcacagtttcttcgttggggatcgaaatcgtgccatttgagttagcctctgtatagatcgatggctagcctgagaagagctctgctcgtagcagggaagacgaagatcaacctagaaaactgccatttcatcaccggaatcaactacaacggtctcagcgtgaagcaactacaagagctccgtggaatcctccgtgaaaacacaaacacgaagctcctcgtcgccaagaacactttagtctacaaagcctttggaanggaaccaaatgggaatcccctgaaaccaatgttatnaangggaataaacgccttgggtaantccttnaatcctgaaagatanacctgctggcttgaaanactttcaacaattttcaagaaagagaagaagctccaagataacaatttaagnggtg

SEQ ID NO: 361 - DNA, 432 bp, Arabidopsis thaliana
  unsure at all n locations
  Clone ID: ARABL1-023-Q1-B1-B12
ctgtaaacccccacacagttattggccgtcggattcaatggaaggattagctatcaagagcatctcgaccgtcggttttctgttctattccaggtctcggcggcgattcccaccgaaaacctccaagtgacggtttcctcaagctgcctgcgtcgtctattccggcggacagccgaaaattagtagcgaattctacttcctttcatccaaatctcagccgttaacgtctctgctcaagcttccctcaccgctgattttcncgccctttcagaaactatactgaaagaggggaagaaataacggaaaagagaaaacaaganaaacaatcgtgttggcacaagagttcgatatgcagatgcgacagacancaaacttcttcaacaaaagggntgtgtcgnttggattactggtcccaattggtcaaggaaaagc

SEQ ID NO: 362 - DNA, 438 bp, Arabidopsis thaliana
  unsure at all n locations
  Clone ID: ARABL1-023-Q1-B1-C5
aaaatatttcagagatgagagaagcatctcctttggccgaccaaatttcttctanttttgctgtcccaatatataatcgggttttatgtccagcatctccgacttccggagttgtgatggctggccctctgtttggcatcatcnggcttctanaaggagcgttggccagcttcgtcgttttttctagtcgtccggtgtatgaggttcgtatcacgtttaatattcgctgtttggttattataaatccagtagatccggttangtctctacttttgttcaanttatttcnaggattaatagttctgctccgggtgggcctccaacaagggntatgtgntgataagccttgntggatcnagatgttcctttcngannttaggtgtcaangacagttcctgcgcctaaanttanccnggntaaaaagcccaagtaacaatt

SEQ ID NO: 363 - DNA, 431 bp, Arabidopsis thaliana
  Clone ID: ARABL1-023-Q1-B1-C7
agaaaaaacaccatgtcttctctgatctcttttatcttccttttccttttctcattcctcactagcttcaaagcttccgctcaagatcctttttacttaaatcattattgtccaaatacgacaacttactcaagattcagcacttactccaccaatctcagaacccttttgtcctcttttgcttcccgcaacgcctcttactccaccggattccagaacgtcacggtgggacaaacccccgacctggtcaccggacttttcctctgccgcggagacctctcgccggaagtttgcagtaactgcgttgccttctccgttgacgaagcgttaactaggtgtccaagtcagagagaagctgtgttctattacgaaggagtgtatactcagatactcctgacaagaatattctaatcgacgggcaattacaaacg

SEQ ID NO: 364 - DNA, 423 bp, Arabidopsis thaliana
  unsure at all n locations
  Clone ID: ARABL1-023-Q1-B1-C9
aggtgaatccatggcgtccaagattgtctcagccatagtatttgtgtttaacctcattgcctttggtttagccgttgctgctgaacaaagaagaagcactgcaagggttgtgcaggacactgaggtgcaatataactactgtgtgtatgactcggacagagctacagggtatggagttggagcctttttgttctcagtggctaagtcaaatccttatcatgctcgttagccgttgcttctgttgtggaaagcctctcaagcctggcggttcacgcgctcttgccctcattctcttcattgttagctggatgttcttcttgatancggngatatgtctattagcctggatcgtagaaatgcataccacacaaagtacaggacaatgttcanggncaatcctcctgattgtcaaactctacgtaa

SEQ ID NO: 365 - DNA, 370 bp, Arabidopsis thaliana
  unsure at all n locations
  Clone ID: ARABL1-023-Q1-B1-D11
cgacggagagcgttagaaaggtaccgcaagttttaacagtggcgggatcagattccggcgccggagctggaattcaagccgaccttaaagtctgcgcagctcgtggtgtgtattgcgcttccgtcataaccgcagtcactgctcagaacactcgaggagttcaatctgttcatcttcttcctccggaatttatctctgaacagctcaaatccgtcctctctgacttcgaattcgacgtcgtgaagactgggatgcttccttctactgagatcgttgaggttcttcttcaaaatctatcagattttccanttcgtgctttggttgttgatcctgtgatggtatctactagtggtcacgttttgggctgggt

SEQ ID NO: 366 - DNA, 391 bp, Arabidopsis thaliana
  unsure at all n locations
  Clone ID: ARABL1-023-Q1-B1-D12
acgagtctctgggttcttctccttgccctcgtttcaattcagttaaatggttcgtttggatctgaatcaagtaaagtagcttatgtcacacttttgtatggagatgagttcttattaggagttagggtattgggtaaatcgattcgtgacactggatccactaaggatatggtcgctttggtttctgatggtgtctcagactactctaagaagttactcaaggctgatggatggaaagtagagaagattagtttactggcaaatccaaatcaagttcatccgactangttctgggggtgtttatacaaagcttaaagatctttaacatgactgattataagaaagttgtgtaccttgaggctgatacaattggtggtaaagacaattgang

SEQ ID NO: 367 - DNA, 495 bp, Arabidopsis thaliana
  unsure at all n locations
  Clone ID: ARABL1-023-Q1-B1-D5
nattaggtgagccatagaagagctangacgtcgcatgcacgcgtacgtaagctcggaattcggctcgagcccgagtgttaagatcgagactccggagagtttcgcggcggtggattctgttccggtcaagaaggagaagacgagtcctgtttcggcggcggtgacggcggcgaagggaaagcattatagaggagtgagacaaaggccgtgggggaaatttgcggcggagattagagacccggcgaagaacggagctagggtttggttaggaacgtttgagacggcggaggacgcggcgttggcttacgacagagctgctttcaggatgcgtggttcccgcgctttgttgaattttccgttgagagttaattcaggagaacccgacccggttcgaatcaagtccaagagatcttctttttcttcttctaacgagaacgganctccgaanaanaggagaacggtggccgccggtggtgggaatggataagggattga

SEQ ID NO: 368 - DNA, 424 bp, Arabidopsis thaliana
  unsure at all n locations
  Clone ID: ARABL1-023-Q1-B1-D7
gagggaaaacgctgaaattaggctgtcagatccatcacagtaccagtcaatagttgatgcagaatggaatatcatttatgacaaactagacaaatgtgttgagagtggagcaaaagttgttctttctcgattggctattggtgatctagctactcagtattttgccgatcgtgatattttctgtgctggtcgtgttgctgaggaagatcttaaccgtgtggctgctgcagctggaggaacagttcagacaagtgttaacagcataatagatgaggttcttggaacttgtgagatttttgaggaaaaacaagttggtggggagagatttaatatattcagtggttgcccttcaggacgaacagcaactattgttctccgtggtggagctgatcagttcatcgaagaanctgaccggagttacatg

SEQ ID NO: 369 - DNA, 421 bp, Arabidopsis thaliana
  unsure at all n locations
  Clone ID: ARABL1-023-Q1-B1-D8
gcaaatcttaaacgttttactttgtgctgcactactcaacctcaatggccgcctcaacaatggctctctcctcccctgccttcgccggtaaggccgtcaagctttcccccgcggcatcngaantccttggaagcngccgtgtgacaatgaggaagactgttgcnaanccaaagggncnatcaggcannccatggtacggatctgaccgtgtcangtacttgggtcgattctctggngaatcaccgagctatcttaccggagaagttccccgganaactatgggatggtaaaaccggagggacttcaanctaaccncaagacattccgcaatggaaccgtngaactaaaaatttaccaacaagcaaggttgggncaatgctccggngcccctaaggttgcgtccttcctggacctttgggcn

SEQ ID NO: 370 - DNA, 443 bp, Arabidopsis thaliana
  unsure at all n locations
  Clone ID: ARABL1-023-Q1-B1-E1
cgagaaccagtttttttgttgatcctatcaacaatgacgaaaatagagcttcgagctttggggaacacagggcttaaggttagcgccgttggttttggtgcctctccgctcggaagtgtcttcggtccagtcgccgaagatgatgccgtcgccaccgtgcgcgaggctttccgtctcggtatcaacttcttcgacacctccccgtattatggaggaacactgtctgagaaaatgcttggtaagggactaaaggctttgcaagtccctagaagtgactacattgtggctactaagtgtggtagatataaagaaaggttttgattcagtgctgaagaaaagtaagaaanaagtattgaccaanaacctgggagaaaggcttcaaccttgaattaaggtttgacaataacttcaaattgncaatgacaattgaattccgggtccnc

SEQ ID NO: 371 - DNA, 428 bp, Arabidopsis thaliana
  unsure at all n locations
  Clone ID: ARABL1-023-Q1-B1-E12
ttcatcgagagagaacctaaacccgatctgaaccaataacaataagaagacgaatggcgtcttcgtcgttctcagtcacatctccagctgctgctgcttccgtctatgcagtcactcaaacctcctcgcacttcccaatccaaaaccgctctcgcagagtttctttccgtctctctgctaagcccaagcttcgctttctctccaagcctagtcgcagtagctaccctgtggtgaaagcacaatctaacaaggttagtactggtgcatcatcaaatgctgccaaagttgatggggccatcatcagctgaaggaaaggagaaaaactcattgaanggagtcgtctgcttcttctcctgaattaactacagaagagtctanttctgaagttccttacccaagtaacaactccntgtcaagccttgtgggat

SEQ ID NO: 372 - DNA, 155 bp, Arabidopsis thaliana
  unsure at all n locations
  Clone ID: ARABL1-021-Q1-B1-B7
tgttaggtttgtaacgtttgtttttgactttggagaggctcaagttattaattatggatgatgatttgtaattgtcaacataatgatggggtcattttgcnnnnnnnnnnnnnnnnnnnnnnnnnnnnnnnnnnnnnnnnnnnnnnnnnnnnnnn

SEQ ID NO: 373 - DNA, 437 bp, Arabidopsis thaliana
  Clone ID: ARABL1-021-Q1-B1-C10
gtgggacggcaaaaggattggcatggcttcatcatagctgcaacccgagaatcatccatcgcaacataagctcgaaatgcatattgttgactgcagagtttgagccaaagatctcggatttcggtctagctaggctgatgaacccaattgatacccatttaagcacattcgtcaatggagaatttggggatttcggttatgttgctcccgagtattcaagaaccatggttgcaactccaaaaggagatgtctacagcttcggtgttgtgcttctagaagctagtaacgggccaaaaagcaacgagtgtaacaaaagtatctgaaagaaaaagctgaggaagaaaacttcaagggtaacctcgtggaatggattacaaagctatcaagtgaatcaaaactgcaggaagcaatcgacaggtcttacttgggaacggtgt

SEQ ID NO: 374 - DNA, 415 bp, Arabidopsis thaliana
  unsure at all n locations
  Clone ID: ARABL1-021-Q1-B1-C2
gagtttttttttttttttttttaataaaagtacccttaattgattatattatttctccaacctcgttacacaatacagtactataaaacttgtaaatgaacangaattacccacattatcgggtgactaatgttcgttccatcggaaaacaaaaacacaacaaactcaaaaccaaaatctccataaacatatatagagctattaattatcatattaaactctcacacactcttattataaaatgttttgactcctgatattagaccaactgcaaaaactaaactaatcactccaagatttaacantcaaatcattattangnttactataatctaanatattactagttaaantaaacctttttgtaatgaggatattggtgatgatctggtcaaccggtgaaccattccntacg

SEQ ID NO: 375 - DNA, 495 bp, Arabidopsis thaliana
  unsure at all n locations
  Clone ID: ARABL1-021-Q1-B1-C9
gccaagagctanaaatcgcatgcccgcntacgtaagctnggaattcngctcgagcctagcttggttcacnctcagagcattttggccatttgggccacacaagttattttgatgggaaccgttganggctananagtcgcaggaaatgggccattgggagaggccgaggacttgctttaccccggtggcancttcnacccattgggtttggctaccgacccagangcattcgctgagttnaaggtnanngagctcanaaacggaagattggcnatgttctctatgtttggattcttcgttcantccatcgtcactggtaagggaccgatataaaaccttgctgaccatttggccgatccagttaacaacaacgcatgggccttccgccaacaactttgttcccggaaaattagccaanttttaacctggtantttgcctcantccnttgccttcctgagtgttgacaaggagaaaagaagaacttgtttaanatg

SEQ ID NO: 376 - DNA, 366 bp, Arabidopsis thaliana
  Clone ID: ARABL1-021-Q1-B1-B6
tgtcatggaaccaaatgtggcattgacggaacaggggcttgtctccgtctccatgggctgtccaaaactcgagtcggttctctacttctgccgtcaaatgaccaatgctgcattgataaccattgctaggaaccgtcccaacatgactcgcttccgtttgtgcatcattgagccaaaagccccagactatctgactctagagccactggatattggatttggagccatagtagagcactgcaaggatctccgtcgcctctctctatctggcctcttgaccgacaaggtttttgaatacattgggacatatgccaagaagatggaaatgctctcaatggcatttgcaggagacagtgacttaagcat

SEQ ID NO: 377 - DNA, 430 bp, Arabidopsis thaliana
  unsure at all n locations
  Clone ID: ARABL1-021-Q1-B1-D2
gagcaaaaaaaaatggcgacggtacaattgtccacccaatttagctgccaaaccagagtttcaatctcaccgaactctaaatctatctccaagcctccgtttctggtaccggtgacctcaattattcaccgcccgatgatctccaccggaggaatcgctgtttccccccgtagagttttcaaagtccgagccacagatacgggagagataggatcagctctattggcggcggaggaagcaattgaagacgtggaagagacggagcggctaaagagatcgctcgtggattcgttgtacggaacagatcgaggtttaagcgcatcgagcgaaaccaagagctgaaatcgggagattctaatcacaacaagctcgaagtctaaagaaccctactccanctccgacgggaagctctttttcccttctcaacggg

SEQ ID NO: 378 - DNA, 361 bp, Arabidopsis thaliana
  unsure at all n locations
  Clone ID: ARABL1-021-Q1-B1-D3
ggcgatatatgcgcaatccaaaaaccaggagaagaaggcgtgaaccagagtgtaatccttcattgcctgcgtcttgcttcttcaagagcttctgcaacaacaaagataattagagatgcagttgaagcatacaaccgtgagaggagctcacagaaggtgaaacggcatcatactttggctaagtctgaagttttgggacctattgtagttgtgtaggaagaagacataaataaaacatttgctgtggtccgtcgattgtaaataaagattttagttgtagaaaatcttaacaagcaacactaagctataaaaacgtcgatatgatnaaagaaaaanaaacnggnnngaaannaaaaaaagg

SEQ ID NO: 379 - DNA, 407 bp, Arabidopsis thaliana
  unsure at all n locations
  Clone ID: ARABL1-021-Q1-B1-D9
aaattaatggcgagtagttgcgagctttgctgcgagatcttcatcgcaattcttcttcctcctgtcggagtttgtctcaggcatggctgttgcacngtaagtttcatctctctctatcgatctctgaactttcacagcttcttatttcagaaatcgaaaccgtagttgaaattgaattgattacggttatttaaattgaaattggttgcactccggtttacgggaaccaatcaatatgatgaatgtggagatnaattactgaaaatataattgtggtgtttttgttaaaaagaaacactaattaaggggactaaaaaataaaatttttaaattttgnttttcccaactcaagtttttttggnttaacttgtaaggtgagttcctcanttggtttganactgacttgc

SEQ ID NO: 380 - DNA, 413 bp, Arabidopsis thaliana
  unsure at all n locations
  Clone ID: ARABL1-021-Q1-B1-E1
ttaaagaaacgagtattcatgcctagtccagtagcttgtgactccaataccctttcccaattcaaggcagaggagtttgctaagaanggttctgggaggagtgataagatagaagatgtggaattaagcgaggaagaattgaatatgtatttggatttgcacccattctctaatgcctctccgtacactgttgtggagacaatgtcacttgcaaaggcccttattctcttccgtgaggttggcataangcacttactggttanaccaaaaacctccaataagacctccagtggtaagtatatgacacggcatgaacttcatgccggaacatatactaaggcctgcaatcccctccggtttctcggaancaagttgaaaaaggnttccggantccggctggcctttcgtcctna

SEQ ID NO: 381 - DNA, 397 bp, Arabidopsis thaliana
  unsure at all n locations
  Clone ID: ARABL1-021-Q1-B1-E3
tcaataaaaggcgaaaaatctctcactgcactttatctcgagagctcagatctccgatctagagcctttcgcttctcctcttctgttcatataacaactgaataatgtcgatctccgcccaaaatccggatatttccggcgatagacaatccggccaagatgttcgtactcagaacgtgatggcttgtcaagctgtttctaatattgttaagacctcacttggtcccgtcggcctcgacaagatgttggtggatgatattggtgatgtgactattacaaatgatggtgctactattcttaggatgttggaggtcgagcaccctgctgctaaggttcttgtcgagttagctgaacttcaagatagagaagtcggtgatgggactacatctgttgttan

SEQ ID NO: 382 - DNA, 419 bp, Arabidopsis thaliana
  unsure at all n locations
  Clone ID: ARABL1-021-Q1-B1-E6
agaagaaaacatcaaatcatgagtgggcaagagaatcatgatcatggccggatctcttctacgcccgccgccgcgtcggagccttccaaggctgctgctcannnnnnnnnnnnnnnnnnnnnnnnnnnnnnnnnnnnnnnnnnnnnnnnnnnnnnnnnnnnnnnnnnnnnnnncaccggtgccgccgcaaccaccatgccagcggaatccaatccttacgtttctccttcccctgccccaaggaatacgatggattcggtgaaggatacgttagggaaatgggggaaaatggctgccgacgccaccaagaaggcggaggatctcgccggaaatttttggcaagcacttgaaaacaggcccaagtgtagcanatgctgctgtttcacgaaattgctcaaggggacaaaaatactgcagan

SEQ ID NO: 383 - DNA, 385 bp, Arabidopsis thaliana
  unsure at all n locations
  Clone ID: ARABL1-021-Q1-B1-F1
cttcccaagttcaccgcaatggncagcgcntcaatcttcnccgccgccgtgaccgtcaccaganatgtganatctcttcttaatccatctgtctcngataancggaaaatcattatctccttcaaagttcagctcaatcaaagcctccgtttcattttcccgcanaacgctaactcgaattcganactcttcatctcccgccgatcactcanncgccancgccgtggaagcgatcacgagtcgatccaaaacctncttgaaatctcgtctccgtggaggagaaactctctatggnctctttttactctcgttctcgccgacattagncgagatcgctgctcacgccggttacgattacgtcntcgttgataaggaacatggtcnc

SEQ ID NO: 384 - DNA, 391 bp, Arabidopsis thaliana
  unsure at all n locations
  Clone ID: ARABL1-021-Q1-B1-F2
gagggagcagagtgaagtttaaaatcatgagcctgaaggtgaaaggtccaatggactatgtgcctgagctgttcgatgagcaaaaggatgatgtctctaaggagcaaatattgcgtgtgattttcttggatcctgagcgctccaaccctgcattggaaaaactgaagcgtcaattagcagaagcggatgcagcggtggaggcacgaaagaaacctccagaggaaacaggtccaaagatgattggagaagggcttgtgatcgatgaatggaaggagcgtagagagagatatcttgcacagcaacaaggcgaaggagctgactctgtctgagagactaaaagagttttctcaggacaaaaacaagtgcgcttgtgaagatnaagaaaaaaggg

SEQ ID NO: 385 - DNA, 398 bp, Arabidopsis thaliana
  Clone ID: ARABL1-021-Q1-B1-F5
acgtggagaaggaaacgagagtgaagcttcaagacgtatcaaaacagagcttctagtgcagatgcagggtgttggacacaatgatgagaaagtacttgtacttgcagcaaccaatacaccctatgctcttgatcaggctatccggcgacgttttgacaagcgtatctatattcctctcccagaggccaaggctcggcagcacatgttcaaagtccacttgggagatacacctcataatttaactgaacctgattttgaatatttaggccaaaagacagaagggttttctggttcagatgtgtctgtttgtgtaaaagatgttctgtttgaacctgttcgtaaaacacaagatgcaatgttctttttcaagtctcctgatggtacatggatgccatgtg

SEQ ID NO: 386 - DNA, 421 bp, Arabidopsis thaliana
  unsure at all n locations
  Clone ID: ARABL1-021-Q1-B1-F9
tttctagtgatcttctttttgattgagaacatgagtgatcaagaaggagactgggatttttacctcagaatcctaagcaacagcgcgcgggattctacggatcctgcttctgatccatctatactacaatcagtgaagaagctgcatgggttctgtaaaatggagaaatcagatgatcttgtggctagaatttatccacaattcaataaagtcttccatcgttcggttgcttcactaatctcaagtccgaagtcaggggcgtccaaaagggcttcctccttggctaagccaattccttcaattttttcctggatttgggggataatgggttcctgcacgaatcctgaacccaaagttttgaaggacaattccttccggctcatgtcttaagccgttgaagttctcaagatgccgccngtgg

SEQ ID NO: 387 - DNA, 412 bp, Arabidopsis thaliana
  unsure at all n locations
  Clone ID: ARABL1-021-Q1-B1-G1
cttagctnnnnnnnnnnnnnnnnnnnnnnnnnnnnnnnnnnnnnnnnnnnnnnnnnnnnnnnnnnnnnnnnnnnnnnagaaaaaaacaaattgcacaccggtggtctcagtagacagagttttcctaaaggattcgtgtttggaaccgccacgtcagcttatcaagtcgaaggcgagactcatcaagacggtcgtggcccaagcatttgggatgccttcgtcaagattcctgggaagatcgccaagaatgccacggctgagataacagtggaccagtatcaccgttacaaggaanatgtggatttgatgaagaaactgaacttcgatgcttacaagattttccatttcaaggtccaagatattccctgagggaaagtggtaaagtcaactggaaaaggattgccttaataaa

SEQ ID NO: 388 - DNA, 470 bp, Arabidopsis thaliana
  unsure at all n locations
  Clone ID: ARABL1-021-Q1-B1-G3
aagagctaanacatcgcatgcacgcgtacgtaagctcggaattcggctcgaggaaacacagagaatccttagcgttaaatactcaatccctgatgacatacggatatcacctgaatgctgtcatcttatttcaagaatcttcgtggctgatcccgctaccagaataagcataccagagatcaaaacccatagttggttcttgaagaatctccctgctgatctaatgaacgagagcaacacaggaagccagttccaggagcctgaacaaccaatgcaaagccttgacacaatcatgcaaatcatctctgaagccacaattcccgctgttcgaaaccgttgcctagacgatttcatgactgacaatcttgatcttgacgatgacatggatgactttgactctgaatctgaaatcgacattgacagtagcggagagatagtttacgctccctaataaaaagncttttttaaca

SEQ ID NO: 389 - DNA, 389 bp, Arabidopsis thaliana
  unsure at all n locations
  Clone ID: ARABL1-020-Q1-B1-G9
gtcgtcttctccacttcgatactcctctctcttgcctcgttcctcttgttcctcgccgccgctctattctacggntgtcttcttctttttcctcntcctctgaaaccggagctgcgtcagtgcggttgncatcaccganagacatggnggantcgagatcccctcctgtaacgaataaggtggagcatgtgatggatatgttcggtgacgttagggttgacaattacaactggctccgtgacgattctcgcaccaatcccgacatgctttcatatcttcgtgaagaaantcagtacactgatttcgtcatgtctgggaccaagcantttgacgaatcatctgtntgctgaaanaagagggaggatcaaagaanatgatatatctgcagc

SEQ ID NO: 390 - DNA, 390 bp, Arabidopsis thaliana
  unsure at all n locations
  Clone ID: ARABL1-020-Q1-B1-H1
tgatcgaatcaaaaagttttcaactttctaaatttttttagttctaaggaaaaaacctctccgagaatggttttatcggtgaagcaaacactctctccgaaaatcggacttttccgacgaaacccttcatcctcactaggaagatctcctgtttctctctcgtttccatcgacggagcttccaaaacgcaccgttttagccgtgtcaaagccgcttcatctctcttcttctctgagagctaagtctccggtagtgagatgtgaagcttatgaagctgacccgattcagagcccatcccgattgggtgatgaangctggnggcggggggaaaacgaaaatcagaaggcgggtaaagaaaattgaagattngggatttacnttggcaacttg

SEQ ID NO: 391 - DNA, 484 bp, Arabidopsis thaliana
  unsure at all n locations
  Clone ID: ARABL1-020-Q1-B1-H11
atgaattttgagccgccnaagagctaagaatcgcatgcangcgtacgtaagctcggaattcggctcgagctttcttcttcaaaagttcgaaacttttttttttccggcaatggagggactagttccggtacagagacttccaattaaagtggcttcaccttctctgtatcggtgtaacaattctgtctcaatcagacgttcaatttcaggttttgccatggacaggaagataaactttagggctccgtcgcaattctcgatccgagctcaacagtcggatttgaaggaaagcttagctgtgtcttcttcatcagtagaggataaaggaaatgttcttagaatcaaggaatgggaagtagagatgtatcaggaggaattagctattagtcaaggtattaggataaggagaaaaccaccaagtaaggctcctttgggatactctggaccatttgagttgagattgcataacaatgatgcctgaatc

SEQ ID NO: 392 - DNA, 471 bp, Arabidopsis thaliana
  unsure at all n locations
  Clone ID: ARABL1-020-Q1-B1-G8
ttgaatccctgagncctagaaaagctanaacgtcgcatgcncgcgtacgtaagctnggaattcggctcgagcaatagcattgactggtctttagaccacacacctcgtgttcttatcccggtagccaacgggtctgaagcggttgaactggtctcaattgcagatgttcttagaagagccaaagtagatgtcacggtttcatcagttgaacgatctttgcggattacggcattccaaggcaccaaaattatcactgacaaattgattggtgaagctgctgagtcatcatatgatctaatcattcttccgggaggccatactggctcagaacgtctgcagaagtccaaaattctcaagaaactgctcagggaacaacatgaatctgggcgaatatatgggagctaccaactcttcatcnaccgttttgcataaacatgggnttacncaaggngaagaaaaagaacngtttac

SEQ ID NO: 393 - DNA, 401 bp, Arabidopsis thaliana
  Clone ID: ARABL1-020-Q1-B1-H12
gcgaaaaaacaagagaatcgagtaatgcaacaacaaggtgaaccatcggttttgagtttgagacccggcggtggcggcggcaaaagcaggcttttcgtccctcgctttagctcctcttcctcttttgatcttaccaatggcggctccgaagaaaccccttttcccgtcaagagagaaaattctggtgaacgtgtgaggttttcccgagaagagatacttcagcacagagagtctgttcaagtctctgatgaaattcttagacgctgtaaggaaatcgcagttgagctttttggcgaagagcagagttgggggaatcatgcagccgagagtaaaataacaaatcatactcagcatcgtcataccgagactgataaccgtgactggcataatccttcccaaaa

SEQ ID NO: 394 - DNA, 438 bp, Arabidopsis thaliana
  unsure at all n locations
  Clone ID: ARABL1-020-Q1-B1-H3
gcgactgtataatctatcatttcttcacagtaacgctttcatcggaagatctcgccggaaaaaaacttctctctgagatcagatctcttacgattctcagctcaatcttatcttttcctttgttgtgctgcttttcactctcttctgcgcgacgaatttggccttgttttttgtttgtttgtcgtatccgacgcggaggtattgagaaaccgtggcttaagacggaggaagaaagatgggaanctaacggggattgagaaacttgacgaaatcccgnatcagggaaagagaagttaataanggagacatcataagcaatgaagcttgtgggataatcaagtgtaacctccnacgccntggttaaacaanatcaaagctcccggttcaaaattgtgtgggcancttgtgaaaaagaatttgattaagccacaagaaant

SEQ ID NO: 395 - DNA, 244 bp, Arabidopsis thaliana
  Clone ID: ARABL1-020-Q1-B1-H8
ttgatttgggtactgcttgtggtaaatacttccgagtttcttgcctcagcatcgttgatcctggtgattccgacatcatcaagacacttcctggagatcagtgattctgattttgatgattttgccatgttgttctctatgcttgattatgctttgtgttcttcaaagacttaatgttagatttctttggtttcccgacttcctcttaatggttataattaattactacaaaaaaaaaaaaaaa

SEQ ID NO: 396 - DNA, 408 bp, Arabidopsis thaliana
  unsure at all n locations
  Clone ID: ARABL1-020-Q1-B1-H9
atcccttctacaattgggaatcttcatagattggtgaagttagaaatgaaagaatgcacagggctggaggttcttccgaccgatgtcaacttgtcatctcttatgatcctcgatctcagtggttgctcaagtctgagaacttttcctctgatttcaactagaatcgaatgtctctatctgcaaaacaccgccattgaagaagttccctgctgcattgaggatttcacgaggctcactgtacttatgatgtattgttgccagaggttgaaaaccatctccccaaacattttcagacttacaagacttgagctcgccgactttacagactgtanaggtgtcatcaaggcgttgagtgatgcaactgtggtagcgacaatggaagaccacgtttcttgtgtaccattaacc

SEQ ID NO: 397 - DNA, 445 bp, Arabidopsis thaliana
  unsure at all n locations
  Clone ID: ARABL1-021-Q1-B1-A10
ggatcaaacatggcttctcactcgtcgactctcctctcttctcctactttcgctcctttctcctctcatcgtcttcattattctcccaatccctctantctcagattctcccgtccaatcagaaataaacctaatctcgccttgcgatgttcagtctcaattgagaaagaagttcccgaaactgaacgaccctttactttccttanggattctgatgacgtcactccatcttcttcttcttcttccgtcagggctccgtttcgaagactatgattagggctgctcaagacagtgtttggtgatggaattggaagctatanaaggggggtcctaaagtttaaaagaanatgtttgggtctccaacctggtgggtgggcgggtgggaatcangtcgtgtgtttgcaaggacggggaatgtcntttgagaaaagcctgggngtttaat

SEQ ID NO: 398 - DNA, 426 bp, Arabidopsis thaliana
  unsure at all n locations
  Clone ID: ARABL1-021-Q1-B1-A11
acacattgagtgttgtttatgagagaggtctcattggtatctatcatgactggtgtgaaggcttttcaacttatccaagaacatacgatttcattcacgctagtggtgtcttcagcttgtatcagcacagctgcaaacttgaggatattcttcttgaaactgatcggattttacgaccggaagggattgtgattttccgggatgaggttgatgttttgaatgatgtgaggaagatcgttgatggaatgagatgggatactaagttaatggatcatgaagacggtcctctcgtgccggagaaaaatcttgtcgccacnaagcagtattgggtacccgcgacnatggaaacaantctccgttngccttcnaatatgannaagaatanacaaaaacaagaaactcctcaaggttactaaaccttgaagg

SEQ ID NO: 399 - DNA, 403 bp, Arabidopsis thaliana
  unsure at all n locations
  Clone ID: ARABL1-021-Q1-B1-A5
gagagaaagctattgttgtgaatttagaggtcataaaggcaatagttactgcagaagaagtgttgttgttggatcctctccgtcctgaagttcttccattcgttgaacgactaaagcancagtttcctcagaggaatgggaatgaaaatgcantgcaagcttctgcgaatgtacaatctcctcttgatccagaagctgcagagggtttgcagagtgagcttccttttgagtttcaggtcctggagattgcacttgaggtcgtctgctcatttgttgataaaagtgtggctgctcttgagacagaagcttggnctgtccttgatgaactcactaagaatgtcagcactgagattacttttcaaacttcgtaatattcaagattctcagtgctgacattcttgaa

SEQ ID NO: 400 - DNA, 416 bp, Arabidopsis thaliana
  unsure at all n locations
  Clone ID: ARABL1-021-Q1-B1-A6
gagaaagaatccgagctcgaagctgcttgtcatatcttcagaaagtattgttatggttgggaggtgaattctcgaataacggctctgaatttgcttatgaaggttctttgccaggtcaatcgctctgaccttgcgtctcaggtttttcaagagatgaattaccagggttgttatccggacagagacagttacaggattttgatgaaggggttttgtctagaggggaaacttgaggaagccactcacctgttgtattcaatgttctggaggatctcacagaaaggttcaggtgaggacattgtggtttatagaattctattggatgcattatgtgatgctggtgaggttgatgatgctattgaaattcttggtaaaatctttgagaaaagggttaaagggtnccgaaacgatgttac

SEQ ID NO: 401 - DNA, 408 bp, Arabidopsis thaliana
  unsure at all n locations
  Clone ID: ARABL1-021-Q1-B1-A7
agattgtccaagctggtggtagaatccctcaagtggatatataaacaatagacctatcgacaacagaacagcaagatgatgatcatccagttgcattcttcagacgagtactactcgaatttgttgcttcgaaaaagaaaaaaaactcttgagaatgtgtggaaaagagaggtgattgttgttcatagatcaatactatgtatcttttgtatcatcatctcttgaatcttggtactgatcttatctgaatagtatgaatttgcatctcataagaccatatgaacaagagtgagttatgtattcanaaacaggaatatttccagacacaagaagcatcataaagaagcagaaaaattcaagggagagctacacaaagacaacgcgcaaaagaaatagactccgaaaagc

SEQ ID NO: 402 - DNA, 406 bp, Arabidopsis thaliana
  Clone ID: ARABL1-021-Q1-B1-B1
ctgagaaaagccacaacagaagaaatggttggctttgacaattacaaagagaatggtcatccttttcctcactcaatcagtcgttttcatccatcgcatgcctccacgactactttgaatggtcaagaaacatcaagatcaatagacacaatggaagctcatcatcataactacaatgagacaacaccatggactcatcaaagaaaaccatcaatttcaatgccaacttcaccaaatgttctcatgatctccgacccgacaacatctttgtcttccgaaaaccacaagaacagtgggtcgactggcaaatccgtcaagtttctctctcagccgatgaccaaagtctcatctctctacatagaaagcggtaatggtgatgatgatcgtcgtcaaagccatgataatc

SEQ ID NO: 403 - DNA, 386 bp, Arabidopsis thaliana
  Clone ID: ARABL1-021-Q1-B1-B4
aggtgttttgggtggtggaaaccacagagttggaagttcgttggagatcaaaatggattccttactgccaaaagctttagagtctactatagtacttgatgtccagaatattgcttgcggtggacaacatgctgtccttgtaacaaaacaaggagaaagtttttcttggggagaggaatctgaaggtaggcttggccatggtgtggattccaatgttcaacatccaaagctcattgatgccctcaataccacaaatattgagcttgtagcatgtggtgaataccatagttgtgcaagttactctatcgggggatttgtatacctggggtaaaggagattttgggattctgggacatggaaatgaatcagtcactggggtccccaaa

SEQ ID NO: 404 - DNA, 399 bp, Arabidopsis thaliana
  Clone ID: ARABL1-021-Q1-B1-B5
ttttcagagagggagagatgatttccgatcattgctatgtcgtccggatttcttcgtcaaggccgtccggtttgtcaaccggcttcagcccgacatccatatgcctcttgtgatgtggtttgtcggttactttcccggaatcttctggctcctttagcagaattgtccggtgtcgccgtcctccatcggttggttcctctaccaacggtggttggctcttgtctagcttctccgtcgtccctctccggcggtttaggctagcttttggccggatttcttttccggttttgttttatgttctcgttttctatagatccagtttgattttgctcctttgtgttctaactcttagagggctcaattccttgaacctcctttgtttaaagggctcaatttgtt

SEQ ID NO: 405 - DNA, 422 bp, Arabidopsis thaliana
  unsure at all n locations
  Clone ID: ARABL1-020-Q1-B1-D11
gagagaattttcctgggaaaatcangaattttctcggagaaaattcncgtaatcatgaactgtgtttctgcatttgaatttgttccttcaagtgctctatttccatgtgcacaatcatcaatccctgcgaaatttcttcacattttgagctcaaaagcctcgatttctcccanatgtcntagtttcgcttcttcttcttcttccacaattcggaggaagcctctaacnctaagtatcttcaggatcttcagacgcggaggaggtgtcagatacggaggacgaatggctgaagaaactaccagagaagaacaanccactgtattcgcatagcttaccttgtatcgaagcgtggctgaggaaattacggttttaccaaagtaaaagacgataganctgtntggttgaatcaagatacctgattg

SEQ ID NO: 406 - DNA, 523 bp, Arabidopsis thaliana
  unsure at all n locations
  Clone ID: ARABL1-020-Q1-B1-D4
atgaatttggtgtgncctagccnagctaanaacgtaacatgcacgcgtacgtaagctcngaattcggctcgagataatatataagctcgccgtataattttcttgccgggaataatctccgatcatcgtcggaaatttccgaattgttgtaaaagaagtccaatttaggctttggatcctcagtttaatttatctgggacttttggttgctgaaatctctttcgggttttgtcctaatcctcattantttgggtttcgtgagtctcgttttataagaacatgggacaaaagagattgttgttcttgctggcagtttttacttttcttgtttcatcttcatatggtanagttctcaagttgaagagcgatgatgatcgacctgtttacaaccatacgcttgccgtcacgcntgtggagtatgcctccngcggtccaagaatccggatttgacaaaaaccctcaacttggncttgcnaaanatgcnaatggggtttgacaaaagganttccaaattataaaaggt

SEQ ID NO: 407 - DNA, 416 bp, Arabidopsis thaliana
  unsure at all n locations
  Clone ID: ARABL1-020-Q1-B1-D6
aagttcatgattgtattgcataatgcgattggtggccaagatacggataagttccctttcccattctttgaccgcaatgggaagtttgttcaggctctattgactgcaaacaagcgggttagcctcgagggaaaggttattggggctttctgtttcttgcaaatcccgagccctgagctgcagcaagctttagcagtccaacggaggcaggacacagagtgtttcacgaaggcaaaagagttggcttatatttgtcaggtgataaagaatcctttgagcggtatgccgtttcgcaaactcattgttgggaggccacagacttgaacgangaccaagaagcagttacttgaaacaagtgtttccttgccaanaaacaantttcaaaggattctccgggaanatggattttttaaagc

SEQ ID NO: 408 - DNA, 456 bp, Arabidopsis thaliana
  unsure at all n locations
  Clone ID: ARABL1-020-Q1-B1-E1
gagaagaaacggtctcaatcttattttcaagcgatggcgatgtcaattctaaagctaagaaatttatcggcactaagatcggcggcaaatagttcccggatcggagtttcatcgaggggtttctcaaagctcgcggaaggcactgacataacctcggcggcgcctggcgtttctctccagaaagctcgcagctgggacgaaggtgtttcctccaaattctccaccacgccattgtcagatatcttcaaggggaagaaagtcgtcatctttggtcttcctggggcttacacgggagtttgttcacancagcatgtgcctaactacaagagccacaattgataattttaaagccaaanggaattgantcctgtcancctggtgtcccngttaaaggatccctttgcnatcaaatggntggggcaaaaaaaancttggtgccaaaagatgcaaattgag

SEQ ID NO: 409 - DNA, 408 bp, Arabidopsis thaliana
  unsure at all n locations
  Clone ID: ARABL1-020-Q1-B1-E12
gaggttcttcggttacttgttaatgtttaccagaagctggcttctcctgattatttgagcatttgccaatgccttatgttcttggatgaaccacaangcgttgcaagcatattggagaagcttcttcgttcagagaacaaagatgatgctttattggctttccaaatctctttcgatcttgtacagaatgagcaccaggcattcctcatgagtgttagagatcgccttccagcgcccaagacccgtcctgtagaagcaattcaagctgttgaaacctctactgctcacaatgagaacactgcanggggatgttcagatggcggatganactccatctcagacaattgtgcatgaaacagattcctgttgacgctgtgtacgctganaggttaacaaanggctaagggg

SEQ ID NO: 410 - DNA, 435 bp, Arabidopsis thaliana
  unsure at all n locations
  Clone ID: ARABL1-020-Q1-B1-C6
tggactgactacccagcttacacaaatcctgagggtgttgacatgaattctggaatttatggagagaatgggactgttgtgtatcctcagggttatgggtatgcagcgtatccttactcgccagcaactagccctgctccacagcttggcggggaagggcagttgtacggtgctcagcagtatcagtatcctaactattttccaaacagtggaccgtatgcttcatctgtggctacacctacccagccgggattctctctgcaaaacaaacctgctggtgtgaagacactacctgcggatagcaataatgttgcttcngctgctggtatcacaaaaggaantatggntnanctccattgaacccancnnacaagccaacccttaaaacccaagttaattgaagggaanggttccccaaaaggagtttggtgccgg

SEQ ID NO: 411 - DNA, 422 bp, Arabidopsis thaliana
  unsure at all n locations
  Clone ID: ARABL1-020-Q1-B1-E4
gagcgacaaagggcttcttggttgggacgagacatgtaaatctccaagtctcgcaagttgcgatcccaagacatttcactacttcaagatcgaaggagctgatagtttcatgacaaaatataacggtggatcatcgacgacggagagtgcgtgtggggacaagtgtacgagagattgcaaatgtttagggtttttctacaatagaaagagttcgaggtgttggttgggctacgagctcaagacattgactagaaccggagattcttccctggttgcttatgtcaaagctcctaatgcaaacaaaaagtcaactccttgaggnctgaaagtcatatatatatatgaaaattaatgtgttgtgtgtttaanaagggtccttttgggtaccctttttaaaattaaatggggtncggatcccaaaa

SEQ ID NO: 412 - DNA, 420 bp, Arabidopsis thaliana
  unsure at all n locations
  Clone ID: ARABL1-020-Q1-B1-E5
tctctaaaaatctaaactttaaccttttttctcggaacaccacaaatctcatttttagctttttccgattccaaatctttttgcttatttagtcttcttcaagaactcgatttctttcgcgtttatgtcgacgangatgaanagacagggctgcanctcagattccggtgatctacggnggcagcccagtcgtctannaanangatcccggcgttaaaaancgttccggcgactccggcggcgaataactggaatacggntatanctctcctctcgccgttagctctttctcccgaatcatcaccggtngaccaannancggntgacaaaaatcagtcgacggcgggtggcggatgaaaaaacgccngtnttcaagggatgggaacatccgctgcgccntttaattacgagnccatcgaa

SEQ ID NO: 413 - DNA, 419 bp, Arabidopsis thaliana
  Clone ID: ARABL1-020-Q1-B1-E9
gaggccggagctaaatcgctattagggctttcgatggcttctccaaaagggattttcgatagcaattcaatgagtaattcaagatctgttgttgttgttcgtgcttgtgtttctatggatggatctcaaactctgagtcataacaaaaatggatctattcctgaggttaaatccattaacggtcacacgggacaaaagcaaggacctttgtctacggtcggaaactcgacaaatataaagtggcatgaatgttctgttgagaaagttgatagacagagattgcttgatcagaaaggatgtgtgatttgggtcaccggtcttaagtggttcagggaagagtactttggcttgtgctttgaatcagatgttgtatcaaaaggggaagctttgttatattcctgatggtgataatgttaagc

SEQ ID NO: 414 - DNA, 452 bp, Arabidopsis thaliana
  unsure at all n locations
  Clone ID: ARABL1-020-Q1-B1-F1
gagaaggaatattatctaaaagacgagagtacaagtgagaaatggcgttaaaggtgatcaagatctcccgagtcagccctgcaaccgcctccgtcgacccgctcattgtcccactctcgttctttgatttacagtggcttaaactcaaccctaccgagcaagtcttcttttacaaactcaccgaatcatcatcatctcgcgacgttttctactcctccatcctccccaagctcgaagcgatctctttcactcatcctcactcactttcgcctattcacgggtcaccttaagtgggattcacaagattcaaagccgcatttagttggtctctcaaggagacacactctctctcaaaatggctggagactgatgcggatttctcaacgtatccctggcaaaagggcttcgtccaaaagctagaagttacgccctctaataacccgaagctaacn

SEQ ID NO: 415 - DNA, 402 bp, Arabidopsis thaliana
  unsure at all n locations
  Clone ID: ARABL1-020-Q1-B1-F10
aatggctgcttcagtgatgcnatcttcggtgacattgaaancanctggtttcacggtggagaanacngnngcataanaggattaccgtcgctcacaacagctcgtccctccttcaaaattgtcgccagtggcgtcaagaagatcaagaccgacaagcccttcggaattaacggcagcatggacttgagggacggcgtcgacgcctccggcagaaagggcaanggatacggtgtttacaagtacgtccacaagtatggagctaacgtcnatggatacagtcctatttanaacgagaacgagtggtcancgagtggtgacgtgtacaagggangagtcaccggantggcannttgggcggtaactctcnnnggaattcctggccggaagtgatctccctttgta

SEQ ID NO: 416 - DNA, 401 bp, Arabidopsis thaliana
  unsure at all n locations
  Clone ID: ARABL1-020-Q1-B1-F11
tgttggcgcacatttcttcagtccggcccatctgatgccccttctcgagattgttcgttcaaagaatacttctgctcaggtgattctggatctcatggcggttggaaaggccataaagaaagttcccgtggtggttggaaactgcatangctttgcagtgaataggacattctttccttattcacaagctgcacatatgttggccaatctaggtgttgacttgttcagaattgacagcgttattacctctttcggcttgccantgggccctttccancttggtgatttggctggacacgggattggattancagttgggccgatatatgccaangtctatggtgaccgcatgttcaagatctccaatgacagagcttcttcttaagancgggcgaaaatgg

SEQ ID NO: 417 - DNA, 432 bp, Arabidopsis thaliana
  unsure at all n locations
  Clone ID: ARABL1-020-Q1-B1-F6
acaacctttctatcattttccaataatggcccggacagtaagtctctggcggagagaggccgtgttcttgacggccatgctggcgacagaaaccggcgtagtcggaataagtactttgtttaaagtagcaacttcaaagggactcaatctttacgctttcctcggctattcttatcttcttgcttctctccttcttcttccttctctgttcttcaccgacaggtcaagatcacttcctccactaagtttgtcaatactttctaaaataggacttcttggattgctaggatcaatgtatgtgatnacaggatacataggcatcgaatacagcagcccaaccttancctctggcaattancaanacaaccccngccctaacttaacctnncaattacctcaaggttgaaaancnaaatttttttttccaattaa

SEQ ID NO: 418 - DNA, 471 bp, Arabidopsis thaliana
  unsure at all n locations
  Clone ID: ARABL1-020-Q1-B1-F8
agcnaggaattcggctcgaggaaaaaatgagttggtggtgggctggcgccatcggagctgccaagaagaaactcgacgaagatgaaccatcacaaagcttcgagagcgtcgctctcatcatcggcgttactggaatcgtcggaaacagcttggcggagattctccctcnttccgacacacccggtggtcnaanggaaagtctacggcgtcgctcgtcgtcctcgtcctacctggaacgccgatcatccgatcgattacatccagtgcgatgtctccgacgcngaagacacaagatcaaagctttccccttnaaccgatgtcacacatgtcttctacgtcacctggaccaatcgtgaatcggaaannnaaaaactgtgangcaaatgggtcaatnccnccntaaagttccccaangngnatttcccataaggcgcaaaatnccccaanatntttgttcccaaaanaggggaa

SEQ ID NO: 419 - DNA, 448 bp, Arabidopsis thaliana
  unsure at all n locations
  Clone ID: ARABL1-020-Q1-B1-G3
gaggtgaagttgaggtcttgagagggcaacaaaccatgtcgtatcaaggccgtgagcttggtttcggacagtacaccgcgtactaccgtgagatgaggaagatgtgtatggtgaacctcttcagcccgaaccgtgtcgcaagtttcagaccggttagagaagaagagtgtcaacggatgatggacaagatctataaagccgctgatcaatcaggcaccgttgatctaagtgagcttctcttgtctttcactaactgtgtcgtatgtagacaagcttttgggaaacggtacaatgagtacgggacanagatgaagagattcatanatatcctgtacgaaaagcaagcacttttggggcaaccctggtttttccccgaacttttcccctaattcnggttcccttgacaacctcantgggcccaantgcacgtttcaaagaaagctttcaa

SEQ ID NO: 420 - DNA, 425 bp, Arabidopsis thaliana
  unsure at all n locations
  Clone ID: ARABL1-02-Q1-B1-B2
ctcgagaaatanaaatatttctgagaacctcaagtttaattttgcggcttagatttaaattcgtctctcaaactcaaatatctgaaaaaacctttctggnntannnnaataagttacacgagactttcaatttctctgtatattttccttttgattcccagaaaatgtcactagattccactttctagcttgcgttttctcgggaatctgaagtttccttttgtgttgaatcgctgggaaaaatctgatggaagcagcttcaaggttttttgtgtanaagtattcggattccgtcgactacnacggcgacgggcggnggttcacgttcactcgaacgccggtttaaactacgtttgtgttgttcggagtttcgtgttttccccgnacgcgggaaggtcttttngaacgggcgttaaatgggnggg

SEQ ID NO: 421 - DNA, 411 bp, Arabidopsis thaliana
  unsure at all n locations
  Clone ID: ARABL1-02-Q1-B1-B9
tcgagcgaggacggagttcatccactggcttcaggacatcccagatcaaaaggctatcgttggccagtactgccgatacacagctgagatcaagancggagtcaacatcaagcaaatggtcaaccgtgcccttcaattcgcgacgagtgacccggctgggccggtatacttgtgtgctgccagggaagtcatggagtccgagatcgaaccatactccttgaatcaagacttgtggtctccagtcgagatgggcggactccctgaccaggcagccagcaagattgccaacgccctggccggtgccgagaaacctctggttgtgacgggatacgcggctaggaaccacgacgcaccgtctgccctcgtcgaactagctgatacggtgaanggcttganaatcctccaatggtg

SEQ ID NO: 422 - DNA, 397 bp, Arabidopsis thaliana
  unsure at all n locations
  Clone ID: ARABL1-02-Q1-B1-C5
cgagctttgacaaaaccagggaaagagacagagagagataatggcggctaaactaatctgttcgtctttaacagtgcattcaatggcaaataagaagccatcaccttctgctgcaacaagaacaataacctcaaagaagagcacagcgactccacaggtgaaactgctgacaagagtcgagcagctcaagcttctgaccaaagccgagaaagcaggacttttgtctttagcagagaaatcaggtttctctctatcgaccatcgagcgtcttggattgctgaccaaagcagaggagttcggcgttttgtctgccgccacaaacccggaaacgcctgggaacgttattcactttgagcctcggtttactccctcctgggaccggtttttgcatanttgg

SEQ ID NO: 423 - DNA, 414 bp, Arabidopsis thaliana
  unsure at all n locations
  Clone ID: ARABL1-02-Q1-B1-C7
gagcaaaagatcaaacagcggcccccgagtcaccttcttctaatgcagaagctctggttgctgttgagccgcgtccatatgggacctttaatacgattcgagaggtttacgatgaagctggaataactggcttctggaaaggtgtaattccaacattgatcatggtaagtaatccgtcaatgcaatttatgttgtacgagacaatgctaaccaagctgaagaaaaagcgtgccttgaagggtagcaacaacgttaccgctttggagacatttcttctcggagctgtggcgaaactcggagctacagtcacaacttaccctcctccttggttgtaaatcnccnacttcaagccaaacaaggtcacaacaaggggacaaaaggacaacaattacaaaggaacattgggacccaatt

SEQ ID NO: 424 - DNA, 414 bp, Arabidopsis thaliana
  unsure at all n locations
  Clone ID: ARABL1-02-Q1-B1-B10
tcgagctggaatttgagacatcttcgaataaccagattctccgaattcgagccatttctaagaatttcatactctgattaatgtcttactcaaacgcctacgcaccgtcggcaccggagctaccagaatcgttcgttcagcagcagcacgatggtgaaagtagatacacttacgcgtatccatcatatcaaccaactcagcaattcagctcttactccgggatgttttccccggaaacgcatccggagattgtgaggagctttgagtcggcggatagaaaccggagcggatttctcgaagaatcggagctccggcaagcgttgtcgttatctgggtacgatggaattagtaacagaacgattaagttgctgttgtttaattacaaagattcctgtanattctctgcttcgggct

SEQ ID NO: 425 - DNA, 417 bp, Arabidopsis thaliana
  unsure at all n locations
  Clone ID: ARABL1-02-Q1-B1-C8
ctcgagaaacacagagccaaagaaaagcttcattacctcactaatcactctccgttcaaacaacatcaaagaagacacatacttcgtctcagaactcaaacccacggagcaaaaatcacttcaagaactcaaagaaaagctctcagcttcatcctccaaagcttcttcaatgtggggagtctcactcctcggtggagacgacaaagctgacgtaatcctcctcaagttcctcagagcaagagatttcaaagtagcagactctttgagaatgcttgagaagtgtttggagtggagagaagagttcaaagcagagaaattgacagaagaagatctgggttttaaagatttggaaggtaaagttgcttacatgagaggctacgacaaaagaaggacacccagttgttacaatgcttaang

SEQ ID NO: 426 - DNA, 417 bp, Arabidopsis thaliana
  unsure at all n locations
  Clone ID: ARABL1-02-Q1-B1-D1
ctcgaggaaagatccacctgggttgggtcgtgaagaaagagaagaaagaaaccgaagaagctcgaagaagaacgaaggagattcttcctttccccaagatttttcgtttgaagaagaatcgaaaaacttagatttttggttttgctttcggagttattcgaatttgaaatatctgaatctgttgattcatttattctccgcatgaagctgtgttggtgaagtttttcggagatttagggtttctgagttgttcctcgtttggttggtgaataaagcgaagatgaacgtgatgcgtcgtctcaaagagcattgcttcgggtcggacctccatttcctcggattctggtggggactaagccgttgaagaagaactaanctgggatnaagaagaacgacaacttgtggtgttgattcaaa

SEQ ID NO: 427 - DNA, 410 bp, Arabidopsis thaliana
  unsure at all n locations
  Clone ID: ARABL1-02-Q1-B1-D11
gagggttttcataatttttggttcttcagctcctcaagcttcgatagggttttagtaattttccgatggcttcaagctcagagaaaacacctcttattccttcagatgagaaaaacgataccaaggaagagagtaagagtactactaaaccagaatcaggctcaggagctccaccttcaccttcaccgactgatcctgggcttgatttcaatgcttttgatttctccggcatggctgggatcctcaatgatccaagtatcaaggaattggctgagcaaatagctaaagatncttcaattaaccaagttaactgaacaacttcanagatntgtgccaaccggatntcaagaangangtcnanctaactttgatncacaacaatatatgcaaacaatgcaacaaggtaaggg

SEQ ID NO: 428 - DNA, 408 bp, Arabidopsis thaliana
  unsure at all n locations
  Clone ID: ARABL1-02-Q1-B1-D3
aggtacactcaagaagatccaaatcttcctctttagagctcgaaaccctgctgctgatatacccgagtattttcttggaggaatagaccaagatcagtcaaatgatcatatggaacttccatctcctcttcaatgttctgtgaaagtgaagttcccacaatctgatccattcttggtgaacatgcttgactaccagatcattcctttaggctttcaatacataatgatcggttgggatcctgaatcattggcaaatggttacgtangcgttgcttttcttccggtaaagaagaacggaggagacgaattcgttgtgcttcttcgctaacgtaatcanttgttggtgttgaaaaattccgaaatgaagtggatgaaagtcaagaaaanctccaatgcctcaatgcaagg

SEQ ID NO: 429 - DNA, 411 bp, Arabidopsis thaliana
  unsure at all n locations
  Clone ID: ARABL1-02-Q1-B1-D5
ctcgagcccaatgttccctttctcactccaatcgccgctccggctcctcccaaattcagatttttcagttccgaatccggtgagaactcgactactgccactgagtcttcgccgactgattcatccgataagaaggatctcgttgtagaggatgtcagcaacaaagagcttaaaagccgtatagacaagtctttcaatgagggtaatgaagatgctttacctggagttattgaagcacttctacagagaagacttgtagacaaacacgcagagactgatgatgaattgatggaaaaaatcgagagtctacctttcaaagatgatgtcaagggatgaagattttgaatccgatttcgaagaaccgcattcnactgacnaagaacttganggatttgtanaactctcccgagt

SEQ ID NO: 430 - DNA, 422 bp, Arabidopsis thaliana
  unsure at all n locations
  Clone ID: ARABL1-02-Q1-B1-D7
aagcttttctcagntcagggagagacaaaattgcatgcntncaggtcgactctanaggatcccctcggggaattccaattccacattttcaagaaataaggaggcaaaaatgttcatatatgaattggaattatttgttttcttattaggcctatcctgaagccaaaggaaatgagatcggaattcctcggggaattccaattccacattttcaagaaataaggaggcaaaaatgttcatatatgaattggaattatttgttttcttattaggcctatcctgaagccaaaggaaatgagatcggaattcctcggggaattccaattccacattttcaagaaataaggaggcaaaaatgttcatatatgaattggaattatttgttttcttattaggcctatcctgaagccaaaggaaatgag

SEQ ID NO: 431 - DNA, 426 bp, Arabidopsis thaliana
  unsure at all n locations
  Clone ID: ARABL1-02-Q1-B1-D9
tcgaggtttgtctattaaagatggaatcaaagacgttctggatcgttactcttcttctctgtggaacaattcaattagcgatttgcagatcagnngagaanagcacagagaagacgatgatgctaggaggcgttcatgatctccgaggaaatcagaacagtggagagatcgagagtctcgctcgatttgccattcaagaacataacagacaacagaacaaaattcntgagttcaaagaaagaatgtcaaagcaanggaagcaaggaatttgcagggaaccaatgttacaacttaaaccctaagaaacaaaaagaangngattaagaccaanaaattttgaaancaaaatgtnggtnaaaccatggntnaacttcaaacaatttcaaggagttcaaaggatcaacctccctggaattcancttgttc

SEQ ID NO: 432 - DNA, 411 bp, Arabidopsis thaliana
  unsure at all n locations
  Clone ID: ARABL1-02-Q1-B1-E11
gagatcggatccactttcttcatcctccagccttctctctctcgtttaggcgccgctgagtccacctcgttaatcaccagatctgtttcctacgccgtcaccgattccccgccttccaggtcgacttttaattccggaggcggcggaggtagaaccggtcgtgttcccgtcggtatcggacggaagagactgaggattgttgtcaccggtggagctggtttcgtcggtagtcatcttgttgataagcttatcggtaggggagatgaagtgatcgtgattgataacttcttcactgggtaggaaggagaatttgggttcatctattctcgaatcctaagtttgaagctaattcgacacgatgttgttgagccaatcctccttgangtcgatnagatttaacaattaacctgt

SEQ ID NO: 433 - DNA, 415 bp, Arabidopsis thaliana
  unsure at all n locations
  Clone ID: ARABL1-02-Q1-B1-E3
ctcgagcacagttcaagcttcacgccaagttaggtggaggagatggagaagtgaagcctaaagataagaagaagttcattaccaaagatgaagaaccagaacagttagttcatcttaattctcaattttttccatcatgagattgtagaaaataaacagaaactcattggatggtaatgtaattttagtctcctttgcagaatttagattttgtttggtatgtgacaatgacatgtagactagtggtttgtgttagtattgtatcaatacacgaaccataaatttgatcgaaaatatttggtttttgtaagttaagtcaaaagaatcttaaactcttgcatgcacatttttcataaacatgcaatattgtgactggacgaaaatggntatgggatgagatttgcattacaactta

SEQ ID NO: 434 - DNA, 178 bp, Arabidopsis thaliana
  unsure at all n locations
  Clone ID: ARABL1-02-Q1-B1-E7
cgagagctgatcaagaccgtttcttcaacgccttctcttccgcgtttgtaaaattgtcgtcttacaaagtgttaaccgggaatgaaggagtaattagaagcgtgtgtgacaaggttgattgatgtatatttataattatcaaatgttnnnnnnnnnnnnnnnnnnnnnnnnnnnnnnn

SEQ ID NO: 435 - DNA, 414 bp, Arabidopsis thaliana
  unsure at all n locations
  Clone ID: ARABL1-02-Q1-B1-E8
ctcgaggctctctagtgaagaatccgccatggctgttccatttctaagctcttctctacaactcacacccacttctccgattctcttcactaaagtaacaccaacaccaataatccacaaccacagatcaacatgcactatacccacaaagcctcgtctacgtctcctccgccgctccgccgtcgctggaaccgccgtatctgatcaaacagaaggaggtggagatgttcttttaaaccctgaagaagagaaacgtgttgaggtggcggattatgattggacagaggaatggtatccattgtacttaactaaaaacgtccctgaagatgcgcctcttggcctcaccgtctacgattgtcaaattggtttgtataaagacggtgaangaacacttcgttggtacgaagattcggt

SEQ ID NO: 436 - DNA, 422 bp, Arabidopsis thaliana
  unsure at all n locations
  Clone ID: ARABL1-019-Q1-B1-F3
gaaacgggcaatttatcaagtttgtttactgagttttattgcctaaaggagaaaggcaagagttagagatatatctcccctgttccagttccagagctgggagaaaacagtggactgtcacagccctggcccggggctaatgccagcgagttttaaagtgaaatctgcgccacttgagggaaatgatggttcatttgaggagtttttagatccagactttggtggatcagccattggacgtgttagccctgttgactctggtttgtggtggatcatattgctgagagcttatggaaagctcacgggtgactacacgttgcaagagaaaattgatgttcaaacagggatnaaagttgatactcaagctttgtccaaccgacggttttgacatgttcccgactcctacttgtcactgacggatn

SEQ ID NO: 437 - DNA, 409 bp, Arabidopsis thaliana
  unsure at all n locations
  Clone ID: ARABL1-019-Q1-B1-F6
tccgtcgatggnnnnnnnnnnnnnnnnnnnnnnnnnnnnnnnnnnnnnnnnnnnnnnnnnnnnnnnnnnnnnnnnnnnnnnnnnnnnnnnnnnnnnnnnnnnngaccacgaagctaaaccctcaatcttccccactcattttcactggtacacttcctctcttgcctcactcacctcttctcctccctccattatccacacatacgacaccgttttccatggcttctccgctagactcacttcacaagacgctagtcaactcttagaccatcctcatgtcatctctgttatcccggaacaagtccgtcacttgcacaccactcgttcccctgagtttcttggtcttaggtccaccgacaaagcgggtctactcgaagagtctgatttcgggtcggatctaagttatcgg

SEQ ID NO: 438 - DNA, 434 bp, Arabidopsis thaliana
  unsure at all n locations
  Clone ID: ARABL1-019-Q1-B1-G5
aaccccnnnnnnnnnnnnnnnnnnnnnnnnnnnnnnnnnnnnnnnnnnnnnnnnnnnnnnnnnnntggatcttctctttctctttttctctcttctcctctcttacctctttttcaagatctggaaactcatagactcaaagcaagacaaagattgctacattttagactaccaatgtcataaaccaaccgacgatcgaatggtgagcactcaattcagtggagagatcatttatcgaaacaataccttgggtttaaccgaatacaagttccttctcaaaggccataagtaagctcagggattgggagaaacaaaacctacgcctccaanggaacttggtcntttgaagggnccgaagaaagagcgttccttccgttacaaagatngggattctcccgaagatgggaannagttctacgtgggacaagcatccg

SEQ ID NO: 439 - DNA, 423 bp, Arabidopsis thaliana
  unsure at all n locations
  Clone ID: ARABL1-019-Q1-B1-H1
catgacttgtgaaaccaaaggatattggaatccttgttgtgaattgtagtctctttaatccaactccttcgttatctgcaatgattgtgaacaagtataagcttagaggtaacattagaagctacaatctaggcggtatgggttgcagcgcgggagttatcgctgtggatcttgctaaagacatgttgttggtacataggaacacttatgcggttgttgtttctactgagaacattactcagaattggtattttggtaacaagaaatcgatgttgatacccgaaactgcttgtttccnagttggtggctctgcggttttgctatcgaacaagtcgaagggacaagagacggtctaagtacaggcttgtacatgtagtcaggactcaacgtggagcanatgataaagctttcccgttgtgttaa

SEQ ID NO: 440 - DNA, 424 bp, Arabidopsis thaliana
  Clone ID: ARABL1-019-Q1-B1-F2
gagcagtaatgaagcacatttcatggagggtgaaagcatgcgagcagcttttgaggagtggtttgtccaacacaaagttgatgtaatctttgctgggcatgttcatgcctacgagagatcgtaccgaatatcaaatgtgcggtataacgtgtcaagcggagatcgttacccagttccagataagtcagcgcctgtttatatcacagttggagacggaggaaatcaagaaggtctggctggaaggtttacggaaccacagccagattattctgcatttcgggaagctagctatggccactctactctggatataaagaaccgaacacacgctatataccactggaaccgcaatgatgatgggaagaaagtggcaacggatgaatttgtattacacaaccagtactggggaaagaacattcgacgg

SEQ ID NO: 441 - DNA, 454 bp, Arabidopsis thaliana
  unsure at all n locations
  Clone ID: ARABL1-019-Q1-B1-H12
ttggagatatttacagataaaaaatgggagcttcgaaactttccgggatgcaaaagcaagtcttgagtctctacagaggatttctaagagcagctcgttcaagaccaatagaagacaggaagagaatagagatgattgtgtcaacagagttccgccacaactctaaggaggtcgaccgtaagaattttcagtacatcgagtatttgcttcggttaggtactaaacagcttgatcaactcaaaagccctgccatagttagcctctcctcgatcaaggtcgttacatctaaaacctgataccttattttatagcttgttgctctagtgaccatagataacaaagctgaggaaattgattcgttttcctctttttacattgagttatgtatgtatgatgatggatgttcaaagnccattataaaataaagagaaatgtgatcacaaatggatatata

SEQ ID NO: 442 - DNA, 496 bp, Arabidopsis thaliana
  unsure at all n locations
  Clone ID: ARABL1-019-Q1-B1-H2
agaatgttnttaagccgcccaaagagctaanaaatcgcatgcacgcntacgtaagctcggaattcggctcgagaactattccttcttcgccaagttctctgagctatagaagaaggagggatttcttcagaccgccattgttgcccaccttctctcctttctatttttcgccgcattttactcgcttactgacaaaagtcttctactcaagtctctctctcgctctctttggaggctcaattagggttttgttgtcgtgagatttgattacacaaattgctgaatttggtttcgattattggtgttattgttttcgaagatttccagtgagtttccgtttatggatctgactggaggatttggagctagatccggcggtgttggaccgtgcccgggaaccaatangccttgaatcgctacatctcggtgacgaatttcggcaactagtgacgaactttacctcccgagaaccccgggggttcgttcaagggctttg

SEQ ID NO: 443 - DNA, 450 bp, Arabidopsis thaliana
  unsure at all n locations
  Clone ID: ARABL1-019-Q1-B1-H4
cttaaccncggaattcggcncaancttnccncngaaatncctttgtctgatcgtgaacttgtagtagtgttttcgtgatagaaaattttcaaagttaatgtgcatacactagctagtgaagaagaagaagactaactaagaatggaaggaacttgttttctccgtggacaacctctcacaacaataccctctcttcccagcagaaaagggtttcttctccaaagatggaagaccaatcggattgtcaggttttcaggttttaagaatcactcggtttctggaaagtcgaggtctttcgatcttagcctcagagcttcaggtcccattagagcaagctctgtagtaacaagaagcaagccctaccaacttaaattccaaagaagaagaccttgtctttgtagccggtgctactggtaaagttggttctagaactgtgagaanagctactga

SEQ ID NO: 444 - DNA, 424 bp, Arabidopsis thaliana
  unsure at all n locations
  Clone ID: ARABL1-019-Q1-B1-H6
gaggtggantgggatgcaagctggtccactgcctttgcattcgancaagccacngtggcacctccancaaccgttagtctcgcaganttctgcgggaanaacctttcaaanatcattctgtnntancaancttctttantgtttggagtgttgtgagggaagatatgccccgcgttcgacatcatcttgtcattgacattttgagcaccgtgatctttcangccatcgatccaactgtagccaacancatcactgaactgttcgactgcaaaggcattggagtgggatgcaagctggtccaacaatatggatccatcaggaacagccgctatcggagttcacctttcgggctacgatggcaacancgtgggattggncataccaccacttaangcaantgacaacatgccgatgatgatgggtc

SEQ ID NO: 445 - DNA, 432 bp, Arabidopsis thaliana
  unsure at all n locations
  Clone ID: ARABL1-019-Q1-B1-H9
gtgagagaagaagatcgatcaatcaatcatcaaactctctgtgtgccacatgcattactactgttgacttgttcaataaaggtaaagtaagatcaatccggcgaatcttctttcgttttccggcaccgatctcggtggatctccgattcacatggcggcggataatgcttatctgatgcagtttgttgacgaaacctctttttacaaccgaatcgttctgagtcatcttttgccggcgaatctatgggaacccttacctcattttctccagacatggctccgaaattacctcgccggaaccctactatacttcatctccggtttcctctggtgcttctacatctattaccttaaaatcaacgtttaccttcccaaagatgcaattcctacaataaaggctatgcgtttgcaaatgtttgtgggnaatgaaag

SEQ ID NO: 446 - DNA, 353 bp, Arabidopsis thaliana
  unsure at all n locations
  Clone ID: ARABL1-02-Q1-B1-A1
ctcnaagccaagaagatttcntgggttccaaattccaaaaccggttattacaagacccgaaaccgggttccaaacgaagatttgacgccngctgaagctacgaancaagctctctttgaaacaacaagcagtgatttgattattattacatgtaattttgtcaaggtcnttaagaggagattantgggtaatgatctggtgcantgaaccctattttcatatgttaagtgcggttctgtaatgaataaaatagagaagcgtttggtttcctctaattgtaacaaaaggatcgttggatgtatgatagaagtttttcntataaaaccatttcaagaaaaaaaaaaaaaaaaggg

SEQ ID NO: 447 - DNA, 413 bp, Arabidopsis thaliana
  unsure at all n locations
  Clone ID: ARABL1-02-Q1-B1-A10
cgagctcaactttcctggtggatccactgtcaaggatgaagaggacaatcttaagagaaggataaaggagactatggagagagctttctgggataatgtcatggaatccatgaaattggagaagccagactatagctgcatctctaaccttatgaaagaagtgagtgacgaactttgccagatggtaccagatagctggaaagtagaaataactgaaactattgatctggacattctctcacagttgctcaactccggcaccttggatatcgattaccttggaaagatgcttgagtttgcgttggctactctgcggaaactctctgccccaactaatgaccgtgagaatgaaagcaaccaacgggatttactcaanggacttcacaaggttgtgttaagctgaaaatgaatcc

SEQ ID NO: 448 - DNA, 417 bp, Arabidopsis thaliana
  unsure at all n locations
  Clone ID: ARABL1-02-Q1-B1-A12
ctcgagattcactttttctgtatttgcatnnnnnnnnnnnnnnnnnnnnnnnnnnnnnnnnnnnnnnnnnnnnnnnnnnnnnnnnnnnnnnnnnnnnnnnnnnnnnnnnnnnnnnnnnnnnnnnnnnnnnnnnnnnnnnnnnnnnnnnnnnnnnnnnnnnnnnnnnnnnnnnnnnnnnnnnnnnnnnnnnnnnnnnnnnnnnnntcgcgtgcttttttattgtcccctttgnnnnnnnnnnnnnnnnnnnnnnnnnnnnnnnnnnnnnnnnnnnnnnnnnnnnnnnnnnnnnnnnnnnnnnnnnnnnnnnnnnnnnnnnnnnnnnnnntattcatggattaaccctttcantccacttccaagtacctattttactaaggagttggacttcccccttttccgacaagcaacaaaaaa

SEQ ID NO: 449 - DNA, 419 bp, Arabidopsis thaliana
  Clone ID: ARABL1-02-Q1-B1-A2
tcgagctcaatttcattctctcttctctctccaatttcacaacaatgggagtcaaaagtttcgttgaaggtgggattgcctctgtaatcgccggttgctctactcaccctctcgatctaatcaaggttcgtcttcagcttcacggtgaagcaccttccaccaccaccgtcactctcctccgtccagctctcgctttccccaattcttctcctgcagctttcctggaaacgacttcttcagtccccaaagtaggaccgatctcactcggaatcaacatagtcaaatcggaaggcgccgccgcgttattctcaggagtctccgctacacttctccgtcagacgttatattccaacaacaaggatggggtctatacgaagtgctaaagaacaaaatggactggattctgaatcaagggaaat

SEQ ID NO: 450 - DNA, 414 bp, Arabidopsis thaliana
  Clone ID: ARABL1-02-Q1-B1-A6
ctcgaggccgtgagctagaaggctaaaaccctcttcttatagatttcaaagcaaccattttcgaactctgtttgattccactgtcgatttaatcatcttacctaatggccggaagggctgcgacgtcgtcggcgaaatgggcgagagagtttttgttcagaagggtttcgtctaatcctcttggagctacccgtaactgttcttcggttcctggagcttcttctgcaccgaaagtccctcatttttccaagagaggaaggatattgacaggagctaccattggtctggccatagctggaggagcttatgttagtactgcagatgaagcaaccttctgtgggtggctattcaacgcaacaaaggttgtgaatcctttctttgctcttctgggatgctgagtttgcgcataagctg

SEQ ID NO: 451 - DNA, 413 bp, Arabidopsis thaliana
  unsure at all n locations
  Clone ID: ARABL1-02-Q1-B1-A9
tcgaggctttggattccatcacagaggttgtgcaaactataagacatcgtaagtctcaagttcaggaatccgtgagcaatgacactatggtaaagcctgatagttctactacacctacacctggtagacaaacaagacagtcagatgaggcttcaaagtctttcaggacacctggacgtgtttctactccaacggggtcaaagctcaaaagctcgaataacaggcatgaagatcttttacgtatggaacccgaagaattgatgttgagcacagaagtaatagggcagagggacagttgggacctatcggatagagaaagggatatacgccaagggattgatctagctaccactcttgagcgcatagagaagaatttcgtcatcagtgatcctcgtctccctgataatcccant

SEQ ID NO: 452 - DNA, 162 bp, Arabidopsis thaliana
  Clone ID: ARABL1-019-Q1-B1-B7
gagaagggacctgaagcaggcgactttcctcttctcctcttacggattgtatagattcttctcttcaaatttttggaaaattcaatctatatgttataccaaaatagctcctttgtgaagtcctattgaatctctcgcctttcaaaaaaaaaaaaaaaaaaa

SEQ ID NO: 453 - DNA, 425 bp, Arabidopsis thaliana
  unsure at all n locations
  Clone ID: ARABL1-019-Q1-B1-C2
agtgcaaaccannnnnnnnnnnnnnnnnnnnnnnnnnnnnnnnnnnnnnnnnnnnnnnnnnnnnagtttcatggagatcactaatcgttggatgtttaggagatccagaaaccctaatggcatcttcaaagaaacctaaaagaaaaaatgacgtcatcaagaaacagagctcttttcaaagactatcgatacttgatatgagcaatccaagttccaacactttgtcagaagatctatcgatttctttggccggatcagatcttcatgtgtttaccctagcggagcttaaagtcattacacaaagcttttcatcgaccaattttctaggtgaaggtgggtttggtcctgttcataagggtttcattgatgataagctacgtcctgggtcttaaagctcagcctgttgctgttaaattgcttgatct

SEQ ID NO: 454 - DNA, 402 bp, Arabidopsis thaliana
  unsure at all n locations
  Clone ID: ARABL1-019-Q1-B1-C3
gtcgcccnnnnnnnnnnnnnnnnnnnnnnnnnnnnnnnnnnnnnnnnnnnnnnnnnnnnnnnnnagagagaggaaacgatcgaagcttcttaatctgataacgattgctacttcagcatctgttgatcgttcacgatggcttctgaacagaatcctatggctttctcancatagatgtctggctcttgtccgttaacgtttgtcttttcgacaacgtttgatcggctctcttctgacaccatcttgtttctcttttacggtggtggttggcttgtgtctggcttccgttggcttctacagtancggtgggctanctaagttctagaaattcaccatatagctctggtgtttcttttaacttttgggccagattgtttttgggttcaaaaattaagctttcnt

SEQ ID NO: 455 - DNA, 410 bp, Arabidopsis thaliana
  unsure at all n locations
  Clone ID: ARABL1-019-Q1-B1-C4
caacattcaattgaaattgcgactttcgatttaaaactctcnnnnnnnnnnnnnnnnnnnnnnnnnnnnnnnnnnnnnnnnnnnnnnnnnnnnnnnnnnnnnnnnnnnnnnnnnnnnnnnnnnnnnnnnnnnnnnnnnnnnnncggattctgagctgcgatgcttctttgattcacttgagagtgttttggagttttgactacgacttgtgatggcatctagacaaggatcaaaatcgagaaaagcaggnnnnnnnnnnnnnnnnnnnnnnnnnnnnnnnnnnnnnnnnnnnnnnnnnnnnnnnnnnnnnnnnnnnnnnnnnnnnnnnnnnnnnnnnnnnnnnnnnnnnnnnnnnnnnnnnnnnnnnnnnnnnnnnnnnnnnnnnntaccacaaactgctcagcggtcta

SEQ ID NO: 456 - DNA, 470 bp, Arabidopsis thaliana
  unsure at all n locations
  Clone ID: ARABL1-019-Q1-B1-B6
atagaagaatanaacgtcgcatgcncgcgtacgtaagctcggaattcggctcgagttcgggtccaccagcgaagagaggccgtcccttcggtagtacaagnnnnnnnnnnnnnnnnnnnnnnnnnnnnnnnnnnnnnnnnnnnnnnnnntcaccgtcagctttacttggtccttctcttctagttcacaattccttcgtcgagcagaacaatagaagaatagttcttgcgttgcagagtggtttgaagagtgaggtgacatgggcattgaacacacttacgttgctttccttcaaggaaaaagaagatattcgaagagatgtcatgcctcttgctaagatagctgggcttgcttgatgcccttctcttaattatagatgattggcgtgacatagctctcccaaaggacctgacaagaaggaaactagagttagaactttangtacaaatgcttcagttacngggatttgg

SEQ ID NO: 457 - DNA, 400 bp, Arabidopsis thaliana
  unsure at all n locations
  Clone ID: ARABL1-019-Q1-B1-C5
agcttaatatcatctttcaagactcaaattgcagtggatttatcggcaccatgggagctttgcagctgatggaaaacaaagtggttgcagccattggtccacaatcttcagggattgctcacatgatctcctatgtanctaatgagcttcatgtacctctcttgtcatttggagcaacggatccgactctctcctctctgcaatttccttatttcctccgcaccacgcagaatgattacttccaaatgcatgcgatngcagattttctatcatattccggatgggagacangtcattgcgatattcgttgatgatgantgtggcangaacgggatatctgtccttggcnatgtattaanccaanaaacgctcgangatctcttacaaggctgcaatttac

SEQ ID NO: 458 - DNA, 420 bp, Arabidopsis thaliana
  unsure at all n locations
  Clone ID: ARABL1-019-Q1-B1-C8
aaaaaaaacaaaccttccttaaccagaaccaaatttcagatttttaaacaacataagctctaatggcgtcaccaaagtcacccacaagaccaacccaacaaaacccacaacccaatttccacgattttcttcctaccatggccggaaacctaggcggtgaaggtctgatcggagagctatgcaacggcttcgagcttttgatggacagagagaaaggtgtcatcacgttcgagagtctccgacgtaacgctgcggcggttctgggtttaggagatttgactgatgaagatgtccggtgtatgattaaagaagggtgattttgactgcnacggtgcgttgaatcagatggagttngtgtgttgatgtttaggcttagccctgatttgatggaagcgtcacggtgtcccgtcacgggaggtc

SEQ ID NO: 459 - DNA, 471 bp, Arabidopsis thaliana
  unsure at all n locations
  Clone ID: ARABL1-019-Q1-B1-C9
caagactataacanccatgcacgcgtacgtaagctcggaattcggctcgagcacatctcatttctccgctgtttcgtcggcaaattttcccatttttgattccgaagataatagatattatcaacagaggataaggataaaacccagaacantcattataatttagtggtgaagttgaccaaatttataaactgatccaattttaaaatctaagagatatggagaacatggacgatttctcaccggagaatgttttagcaccaccaccaccacctcctccaatgaagaagtcaacggatctgtttatgcaaagaagcaatagctttgtttctaaagctacnnnnnnnnnnnnnnnnnnnnnnnnnnnnnnnnnnnnnnnnnnnnnnnnnnnnnnnnnnnnnnnnnnnnnnnnnnnnnnnnnnnnnnnnnnnaatgtcatcggaatgggttcagatgtnatccgagggatga

SEQ ID NO: 460 - DNA, 381 bp, Arabidopsis thaliana
  unsure at all n locations
  Clone ID: ARABL1-019-Q1-B1-D1
gatctacctagattccgatctaatcgtcgtcgacgacatcgcaaagctctggatgacgaaactgggatcgaaaacgatcggagctcccgagtactgtcacgcgaacttcacaaagtatttcacaccggcgttctggtccgacgagaggttctccggagctttctccgggaggaaaccgtgctacttcaacacgggagtgatggtgatggatctagagagatggaggcgcgtagggtacacggaggtgatagagaaatggatggagattcagaagagtgataaggatttacgagctgggatnattgccgccgttccttgttggtgttcgccggagaagtagctccgatagagcatcngtgggaaccagcatgggcttggtgg

SEQ ID NO: 461 - DNA, 495 bp, Arabidopsis thaliana
  unsure at all n locations
  Clone ID: ARABL1-019-Q1-B1-D4
aatgaattttttagccccccaagagctaaaaatcncatggncncntncnttanctcngnaatncggtccaaggncaacaacaanggcttcccnggntaaaaactttccggttccggtgcgaactccgtttcaacctttcaaattcaaatgcaaantcgaatctcccgcgaaaacgcgattgctctctccggcgaccgaagaaacatgttgtcagatcgtcaagagcctggcgtattcgttgcttatccgatgatcctggttcgagtcatgttttcgttgcaagtagaaggaaaatggtagtcttgttgtcgacggtgcagcttctgtctcatatgcttccgcaaaacgggaacgcagctgagatttatccggtgatgcaaaacgaaataaggaaagtggtgacaaagggcaaggctgctggtgtgcttcgtttagtgtttcatgatgctggaacctttgaactggacgatnattctggtggcatcaacggattct

SEQ ID NO: 462 - DNA, 419 bp, Arabidopsis thaliana
  unsure at all n locations
  Clone ID: ARABL1-019-Q1-B1-D8
agnnnnnnnnnnnnnnnnnnnnnnnnnnnnnnnnnnnnnnnnnnangcnttaagaaatgatcatgttacataaaaacgacatacatgaaagcacaaataanaaggcttctctanttctaacagtagttaaatanaaaaattcntttttcgaaatgtaaagaaatataaaactccctgatatccacatgattttcccaaacccccccaacaaagtacaganaaagaacatagaaaaacnctancggatanatgtgtttanataatcaatccttcnncttcttttttntgttcngcntcgctctgcnctgcttccggannatgtatagattcggcaccgctgttgtttaaccatttcacanaagcntccattcagaaatctcctttccggaaggagaaggtggcgtcaagacgtaacagan

SEQ ID NO: 463 - DNA, 372 bp, Arabidopsis thaliana
  Clone ID: ARABL1-019-Q1-B1-E2
ccaatttctcttgtctcaaatttcagattctcttcctctgaaaaaaatcaaaaaccaagtcttctaattccatctcctctctgtacccatctcctaaaaatctcaactttgagtcaaaattttgtcttctctcaaaccaattcatagttctaaaaatctcacctttatctcaaatttttaatctttcatctgatttctgaaacccaaattctctaatctcatctttgagccaaaaagtttcaatctttcctctgatttctgaaaccaaaaatctctaatttcaaaaaaaaaaaatctcacctttgggtcaaaaatgtcagtagcttgtggactagaatgtgtcttctgtgtaggattcagtagatgggcatg

SEQ ID NO: 464 - DNA, 364 bp, Arabidopsis thaliana
  unsure at all n locations
  Clone ID: ARABL1-019-Q1-B1-E7
tttcatttcttcttgtgtggggaaatctgcatctttgtccactctcttttattttcccaagaaaggaaacaaattcccacaatttcttgtcttctcttaaagttcttcttaagttgaagcttcttgtctgtttttgagatttccagtaagaagaaacttcgctaattttcccgcggaaattctcttacaatcataaagttttcttttttttttgctctcgagaaagttttgagaatttttanttcttcaaatggcgtcaagaganatatcaacgatgattaaacaagggtttaacgcaggaccattactcnctttttctccgttaagaanctcaactccnattaaactccccaancgcctctca

SEQ ID NO: 465 - DNA, 408 bp, Arabidopsis thaliana
  unsure at all n locations
  Clone ID: ARABL1-019-Q1-B1-E9
attagtacagattagggttttattcgttattattgtctatattactccttgattgtggtcgatgacctcgctacttcttctcagaacgcttccgcttctccgcaacggatttctcaaccatcgtcatcaagttggtatcgtagctggtggaattctcagtcaccgtcggcgtttgttgtgttctcttgctgatagaccacagttttacgagaataatgattctgtttctccggtggagggatccggcgcggcggcgatgaacgtgacatcgcctgttgttgataatagctggcgttatgaagattctgattatcggaaatggaagaatctagaagctgagattcctcgagatattgaanctanttctcctctcgctaaaaaaaatcttcaatccgataagtatttngg

SEQ ID NO: 466 - DNA, 407 bp, Arabidopsis thaliana
  unsure at all n locations
  Clone ID: ARABL1-019-Q1-B1-F1
ctacgcacggattcgccgcccaaagatcgcctgcatgaggcagcactgacagtcagtgttgaatagcagaccagttgacctgtcacgacagtaaacggcgagttgaggactgcatgcttagcgcatccagttgttgtgagtcgaatgcgggggacagcacgacaatatagtttgttgatgcttgttaagtagcattgttcttctggtgttcctacagcacagcatcttgtagcagtgcatccaagtcttatctagccttcgtatttacagctgtaaatagcctgcaggctgtacggtacattcacttcaccaatgcttaaattttaaagcccttgttggcccctgttgatacttcattacacaagtgggtttttaaaagccagccagccccaaaaaaaaaaaaaaan

SEQ ID NO: 467 - DNA, 514 bp, Arabidopsis thaliana
  unsure at all n locations
  Clone ID: ARABL1-019-Q1-B1-F10
atgaatnttgtgacagcccgccaagagctataaaatcgcatgcaccnttacttanncccggaattcggctcgagtggaaaacaaagagaccaagcaagaaccagcagcagcagctgagcaaaagaccgttccgttgatcgaagatgagatcgagaggagcaaagtcgggatcatgagagctctctgcgaccgacaagatcctgaaactaaggaggtggatgatctgatgataaggaggtttctgagagcgcgtgacctggacattgaaaaggcttcaacgatgtttctaaattacctgacttggaagagaagcatgctcccaaaggggcacataccagaagcagagattgcaaatgatctatcgcataacaagatgtgtatgcaaggtcatgacaagatgggtcgacctatcgctgttgccattgggaacagacataacccttccaaaggcaaccctgacgaattcaagcgttttgttgtctacacgctcnaaaagatttgtgctaaaatgccn

SEQ ID NO: 468 - DNA, 526 bp, Arabidopsis thaliana
  unsure at all n locations
  Clone ID: ARABL1-022-Q1-B1-E3
ggggaatgaattttgtgacncnctagangccctaanacgtcgaaagcacccgtacgnnagctcgnaattcggctcgagttcccccgcagctcgagcttagtctcggcggaggaggcggcggctcgtgttatcagatcccgatgtcgcgtcctgtctactttttggacctgatggggatcggtaacgtaggtcgtggtcagcctcctcctgtgacatcggcgtttagatcgccggtggtgcatgttgcgacgaagatggcttgtggtgcccaaagcgactctgattcgtcatcggtcgttgatttcgaaggtgggatggagaagagatctcagctgttagatctagatcttaatttgcctcctccatcgggnacaagcctgagcttttaacggtgtcgtttcaattcgaaagcgcaatgcgtttcttcctcctttttgagctgtgaaaaattcgttttctcaatagntttcctctcctctctctcccaagtccaaatttaataccaagtttttnagaaaggaaaaaa

SEQ ID NO: 469 - DNA, 436 bp, Arabidopsis thaliana
  unsure at all n locations
  Clone ID: ARABL1-023-Q1-B1-B9
gagacagcaacaaacagagaaaatgtgtggcggtgctattatttccgattatgcccctctcgtcaccaaggccaagggccgtaaactcacggctgaggaactctggtcagagctcgatgcttccgccgccgacgacttctggggtttctattccacctccaaactccatcccaccaaccaagttaacgtgaaagaggaggcagtgaagaaggagcaggcaacagagccggggaaacggaggaagaggaagaatgtttatagagggatacgtaagcgtccatggggaaaatgggcggctgaagattcgagatcacgaaaagggtgttagagtttgggcttggtacgttcaacacgggcggganggaacctgcatggcttatgatgttgcggcaaancagattcgtggtgataaagcaagctcaacttccaaatntgc

SEQ ID NO: 470 - DNA, 461 bp, Arabidopsis thaliana
  unsure at all n locations
  Clone ID: ARABL1-019-Q1-B1-C10
cagcaacaaacagagaaaatgtgtggcggtgctattatttccgattatgcccctctcgtcaccaaggccaagggccgtaaactcacggctgaggaactctggtcagagctcgatgcttccgccgccgacgacttctggggtttctattccacctccaaactccatcccaccaaccaagttaacgtgaaagaggaggcagtgaagaaggagcaggcaacagagccggggaaacggaggaagaggaagaatgtttatagagggatacgtaagcgtccatggggaaaatgggcggctgagattcgagatccacgaaaaggtgttagagtttggcttggtacgttcaacacggcggaggaaactgccatggcttatgatgttgcgggcaaacaaattcgtggggataaanccaaactcaactttccaaatttgnaacatcctcctcctcccaaatttaaaccncc

SEQ ID NO: 471 - DNA, 369 bp, Arabidopsis thaliana
  unsure at all n locations
  Clone ID: ARABL1-023-Q1-B1-D4
tccaaactccatcccaccaaccaagttaacgtgaaagaggaggcagtgaagaaggagcaggcaacagagccggggaaacggaggaagaggaagaatgtttatagagggatacgtaagcgtccatggggaaaatgggcggctgagattcgagatccacgaaaaggtgttagagtttggcttggtacgttcaacacggcggaggaagctgccatggcttatgatgttgcggccaagcagatccgtggtgataaagccaagnnnnnnnnnnnnnnnnnnnnnnnnnnnnnnnnnnnnnnnnnnnnnnnnnnnnnnnnnnngccacaatcaaccgattagcctccggcnaaaaaggtctgcnttgtccctcaa

SEQ ID NO: 472 - DNA, 440 bp, Arabidopsis thaliana
  unsure at all n locations
  Clone ID: ARABL1-025-Q1-B1-F8
gagcaacaaacagagaaaatgtgtggcggtgctattatttccgattatgcccctctcgtcaccaaggccaagggccgtaaactcacggctgaggaactctggtcagagctcgatgcttccgccgccgacgacttctggggtttctattccacctccaaactccatcccaccaaccaagttaacgtgaaagaggaggcagtgaagaaggagcaggcaacagagccggggaaacggaggaagaggaagaatgtttatagagggatacgtaagcgtccatggggaaaatgggcggctgagattcgagatccacgaaaaggtgttagagtttggcttggtacgttcaacacggcggaagaagctgccatggcttatgatgttgcggccaagcaaattcgtggtgataaagncaanctcaacttccaaattctgcaccatcctcc

SEQ ID NO: 473 - DNA, 510 bp, Arabidopsis thaliana
  unsure at all n locations
  Clone ID: ARABL1-030-Q1-B1-G2
tntgagccctctgaatttatgcnacactataggccacctatgacgtnnaaancancccttacttaacctcggaattcggctcgagcacagcaacaaacagagaaaatgtgtggcggtgctattatttccgattatgcccctctcgtcaccaaggccaagggccgtaaactcacggctgaggaactctggtcagagctcgatgcttccgccgccgacgacttctggggtttctattccacctccaaactccatcccaccaaccaagttaacgtgaaagaggaggcagtgaagaaggagcaggcaacagagccggggaaacggaggaagaggaagaatgtttatagagggatacgtaagcgtccatggggaaaatgggcggctgagattcgagatccacgaaaaggtgttagagtttggcttggtacgttcaacacggcggaggaagctgccatggcttatgatgttgcggccaagcagattcgtggtgataaagccaagctcaacttccca

SEQ ID NO: 474 - DNA, 433 bp, Arabidopsis thaliana
  unsure at all n locations
  Clone ID: ARABL1-037-Q1-E1-G8
tttttttttttttttttacataatcataataaaattgcattatagatgaagaaactgaagctacaaattacataagacaaaagaaaaaaagattacataaaatgaaaactgtggcatggtcgagcctgacaaaaaaccgcaagctggaccgacacagagagactaatacaaaccataatacaaatattaacatacgaaatttaacactaatccatatttaattaattactcttgggccagtcatgcaatttcacaaaaactccattgcaagcggctgaatttcctattttgcccctaagctagaatcgaatcccaatcgatctcgtacgacggatacttctccaacgagaacgtctcgttccactgcgggcggctcctccgggtcagcgaacgtcaagtccgacnacggcgaaagattcaagcggtgggactc

SEQ ID NO: 475 - DNA, 399 bp, Arabidopsis thaliana
  unsure at all n locations
  Clone ID: ARABL1-041-Q1-E1-H7
ttttttttttttagcatacaaagaagatttatttgattaaacagatgagaggttcaaacacattatgacaaatgttaaaggagttttggggcatnnnnnnnnnnnnnnnnnnnnnnnnnnnnnnnnnnnnnnnnnnnnnnnnnnnnnnnnnnnnnnnnnnnnnnnnnnngcctctacttaacttcatcacaactaccctcaagatagaggctcatggcttctcgcaatgcaaacaggaactcctgnnnnnnnnnnnnnnnnnnnnnnnnnnnnnnnnnnnnnnnnnnnnnnnnnnnnnttttggaggttgataaacgaacgatgcgggaaactcacaaacatgcagccttatttacatgaaactgggatctcttcagaagactcctccaatcatggaat

SEQ ID NO: 476 - DNA, 414 bp, Arabidopsis thaliana
  unsure at all n locations
  Clone ID: ARABL1-08-Q1-B1-B2
cacagcaacaaacagagaaaatgtgtggcggtgctattatttccgattatgcccctctcgtcaccaaggccaagggccgtaaactcacggctgaggaactctggtcagagctcgatgcttccgccgccgacgacttctggggtttctattccacctccaaactccatcccaccaaccaagttaacgtgaaagaggaggcagtgaagaaggagcaggcaacagagccggggaaacggaggaagaggaagaatgtttatagagggatacgtaagcgtccatggggaaaatgggcgggctgagattccgagattcacgaaaaggtgttaaaatttggcttggtacttcaacacggcgggaggaaactgccatggcttatgatgttnccggcaaacaaattcgtggtgataaagccaa

SEQ ID NO: 477 - DNA, 348 bp, Arabidopsis thaliana
  Clone ID: ARABL1-08-Q1-B1-E7
tctctcagagtgagagcgagttaagtcagccgagtttcccggtggagtgtataggatttggaaatggggacgagtttcagaacctgagttacggatttgagccggattatgatctgaaacagcagatatcgagcttggaatcgttccttgagctggacggtaacacggcggagcaaccgagtcagcttgatgagtccgtttccgaggtggatatgtggatgcttgatgatgtcatttgcgtcgtatgagtaaaagaaaaaaaaataagtttaaaaaaaagtttaataaagtcctgtaataatataatgttaaccgccgttaactttaaaaaggttttaaccgtccgca

SEQ ID NO: 478 - DNA, 402 bp, Arabidopsis thaliana
  unsure at all n locations
  Clone ID: ARABL1-01-Q1-B2-A2
ggtaaaaggaagatacaggatctggtttcgcaggtggatgtacatgcgaaactggatcctgatgttgaagacctccttttggaggtggcagatgacttcattgattcggtcacatcttttgcatgtagcttggctaagcatcgtaaatcatctgtattggagcccaaggatatattactccacctagagaaaaacttgcacttgacaattcctggattctcaagtgaggataaacgtcaaacaaaaactgtaccaactgatctccacaagaagcgacttgcaatggtgcgtgcattactaagaatcctcaaaaccagagacgaatgcaagcaattccaagggaaactatganacaagcgatggtgaanccaaatggtcccgaatcatctcttaagaccctcc

SEQ ID NO: 479 - DNA, 419 bp, Arabidopsis thaliana
  unsure at all n locations
  Clone ID: ARABL1-01-Q1-E1-G4
tttttttttttttatattggttaaaacttgaaactgaaattagagataaccgatttgatcagacaagaagagaaggagaaagacaaagtacttggggagcagtaattataataacatcgacatcaacagattacaacgcaagtctttcttcattaaccgagcttggcaagaacattgttcaaactcgagacagtttctgagtaatacttctcagcatctgggctactctttgatctcgccgcatantccaagttgtcaatggtttggaaaagctttgcggtgagatctttaaggctttgcttctcttccttaggcttaacggagataacngtgttgagatngtaacggaggtacgatgccccttaaaccgggnattcgttccggaacaaaanggnccaaagccttttttgnccgataaa

SEQ ID NO: 480 - DNA, 437 bp, Arabidopsis thaliana
  unsure at all n locations
  Clone ID: ARABL1-05-Q1-B1-A5
gcataancanaaacggcccnggcncgcgtacataagaacggaatttgattgcgagtgagatatttatgccaagccagccagacgcagacgcgccgagacagaacttaatgggcccgctaacagcgcgatttgctggtgacccaatgcgaccagatgctccacgcccagtcgcgtaccgtcttcatgggagaaaataatactgttgatgggtgtctggtcagagacatcaagaaataacgccggaacattagtgcaggcagcttccacagcaatggcatcctggtcatccagcggatagttaatgatcagcccactgacccgttgcgcgagaagattgtgcaccgccgctttacagggcttcgacgccgcttcgttctaacatccgacaccaacaacgctggcacccaatttgatnggcgccgaaganttaatccgcc

SEQ ID NO: 481 - DNA, 526 bp, Arabidopsis thaliana
  unsure at all n locations
  Clone ID: ARABL1-01-Q1-B1-B4
ggtgtcnagtttgggacgggncctagagcaaataanacgtcgcatgcacgcgtacgtaagctcggaattcggctcgagggtattttgataaactggcaanttccanggncacaaattgaggctgtgaccaatgacaacttgattatcaatgtatacaacaccttggacnaacctttcctcttatcttggaatggagtgctgcagaggagaaactcgtggcaggatggagtgtatggtaccaattgtccaattctaccaagggcataacttcacttatgttcttcaagtgaaggatcagatatgtagctagttctactacccttcncttgcttttcacaaggcagcanggangttatggtggattcaaaattgctaagcgncccggggaatccgagtgccttttcctacgcccagcaggagatttcacatattgncaggaaaactgggtacaangagaaaatcacncaggattttaagggccatttttgggatgntgnaattgacctttcccttccctnaaggggaa

SEQ ID NO: 482 - DNA, 405 bp, Arabidopsis thaliana
  unsure at all n locations
  Clone ID: ARABL1-040-Q1-E1-B10
nnnnnnnnnnnnnnnnnnnnnnnnnnnnnnnnnnnnnnnnnnnnnnnnnnnnnnnnnnnnnnnnnnnnnnnnnnnnnnnnnnnnnnccaaaagttcantgctgcaacattgaaacgaatacacanaaggagaacagattacaataatgatgtaagaaagatatataggtcntaggttcncttganagggtcaaagttgganacnccgacgacgacaccaatgatgacagtgaggacnaggccaccanaancaatgctgagcaanaaattcttgagggaaggagaaattccanaaccaagcagcttcagctatctccggaatcaccatcgaagcagtaagaagcagccgcgggaaataccgggtcaaagccttgtccancttgaggggccttaactnaaacccccg

SEQ ID NO: 483 - DNA, 467 bp, Arabidopsis thaliana
  unsure at all n locations
  Clone ID: ARABL1-040-Q1-E1-D8
ttttttttttttttttgacttttatccaaaagttcattgctgcaacattgaaacgaatacacagaaggagaacagattacaataatgatgtaagaaagatatataggtcttaggttctcttgacagggtcaaagttggagacgccgacgacgacaccaatgatgacagtgaggacgaggccaccagaagcaatgctgagcaagaaattcttgagggaaggagagattccagaaccagcagcttcagctatctccggaatcaccatcgaagcagtaagagcagccgcggagataccggtcaaagccttgtccatccttgaagggccttaacttgaaacctcctggtgctcctgcctccaagtttgcaaaccaaaagcccttgggatggntttcagaaggtaatgggcttaaaggaaaaggagaacgaaacggggtcctgggttnaagttggtgttgaccaaatgacaa

SEQ ID NO: 484 - DNA, 396 bp, Arabidopsis thaliana
  Clone ID: ARABL1-041-Q1-E1-D10
ttttttttttttatccaaaagttcattgctgcaacattgaaacgaatacacagaaggagaacagattacaataatgatgtaagaaagatatataggtcttaggttctcttgacagggtcaaagttggagacgccgacgacgacaccaatgatgacagtgaggacgaggccaccagaagcaatgctgagcaagaaattcttgagggaaggagagattccagaaccagcagcttcagctatctccggaatcaccatcgaagcagtaagagcagccgcggagataccggtcaaagccttgtccatcttgagggccttaacttgaagcctctgtgctctgcctccagttgcaaccaaagccttggatggtttcagaggtaatggcttaaggaaaggagac

SEQ ID NO: 485 - DNA, 411 bp, Arabidopsis thaliana
  unsure at all n locations
  Clone ID: ARABL1-021-Q1-B1-G10
cggaaacagtgaggtcagagtatgatttcttcgacacgaggaagcaaaagcagaagcagttcgaatcaatgagaaatcaggtggaggaagagacggagacggagagagaggaagtacagtgtagtgaatgggaggatcacgatcattacagcaccacgagctcctcggacgcagcggaggaagaggaagaagatgatgatagagaatcaatttccgaggtcgggacacgctccgagtttggatctacggtgagaagtaattcgatgagacggcatcatcaacaaccttcaccaatgccgcaagtatacggcggcgctgaacaaagtaaatatgataaagcagatgatgctacgatatcttctggtanctatagangcggaggagatatcgctgacatgaagatngtaattt

SEQ ID NO: 486 - DNA, 398 bp, Arabidopsis thaliana
  unsure at all n locations
  Clone ID: ARABL1-041-Q1-E1-E8
nnnnnnnnnnnnnnnnnnnnnnnnnnnnnnnnnnnnnnnnnnnnnnnnnnnnnnnnnnnnnnnnnnnanccaaaagttcattgctgcaacattgaaacgaatacacagaaggagaacagattacaataatgatgtaagaaagatatataggtcttaggttcncttgacagggtcaaagttggagacgccgacgacgacaccaatgatgacagtgaggacgaggccaccanaagcaatgctgagcaagaaattcttgagggaaggagagattccagaaccagcagcttcagctatctccggaatcaccatcgaagcagtaagagcagccgcggagataccggtcaaagccttgtccatcttgangggccttaacttgaancctctgtgctcctgcctcc

SEQ ID NO: 487 - DNA, 400 bp, Arabidopsis thaliana
  Clone ID: ARABL1-041-Q1-E1-G1
tttttttttttttttttgatgcaatccgagaaagatttaaacttaaaatgaaagcatattctgtttcaacaagaccaagttctgaacaattactcagctagtagttttatcatgcattcaaaatcttctcataagcagaaaaacgtcatagatatcaaaactactaaagcaaaacatctgcgaacggatgaatgattcgtgagatctcaatctcacttcttcctgaaagagcatccctcttgtagcctcgctttaccaccggtgggctggcacagaactgtctgacagtttccacataccacaacagtttgagaatggctgaacacagtggttatgttgaagcatccctgacacttaacatccatgaagaaggagttgggagattgcacgagacgcttga

SEQ ID NO: 488 - DNA, 395 bp, Arabidopsis thaliana
  unsure at all n locations
  Clone ID: ARABL1-18-Q1-B1-G11
tgaatcaaagacagactttgacttttctttgtgatcgaagatatggcggatgctttcacagatgaacagatccaagagttttacgaagccttctgtctcatagacaaagattccgatgggttcatcacgaaggagaagctaacgaaagtgatgaagtcgatggggaagaatccaaaggcggaacaactgcaacagatgatgagcgatgttgacatctttggcaacggtggcatcacttttgatgatttcttgtatattatggctcaaaacacttctcaggaatcagcatcggatgagttaattgaggtattcagagtgttcgacagagacggagatggtctcatatctcaacttgagttgggaaaaaggaatgaaggncatggggataagataac

SEQ ID NO: 489 - DNA, 423 bp, Arabidopsis thaliana
  unsure at all n locations
  Clone ID: ARABL1-019-Q1-B1-G4
aggtgaaatcgaaaaaaaaagcgagatcttcttctctaatggcgacgaccttaagcagagatcaatatgtctacatggcgaagctcgccgagcaagccgagcgttacgaagagatggttcaattcatggaacagctcgtaagtggagctacaccggccggtgagctgaccgtagaagagaggaatcttctctcggtcgcgtataagaacgtgattggatctcttcgtgcggcatggagaatcgtgtcttcgattgagcaaaaggaagagagcaggaagaacgaagaacacgtgtcgcttgttaaggattacagatctaaagttgagactgagctttcttcgatctgttctgggattctcaggttacttgattcgcatctaattccttcagctactgccantgagtctaangttttttacctga

SEQ ID NO: 490 - DNA, 482 bp, Arabidopsis thaliana
  unsure at all n locations
  Clone ID: ARABL1-01-Q1-E1-C10
ggtttagccggncgtacggttntnaaatggnctcgnncggtcgttaagctcaangnccggcggccgccctnttttttttttttttactcatacgacgcaatgacatcatcaagcatccacatatccacctcggaaacggactcatcaagctgactcggttgctccgcggtgttaccgtccagggcaaggaacgattccaagctcgatatctgctgtttcagatcataatccggctcaaatccgtaactcaggttctgaaactcgtccccatttccaaatcctatacactccaccgggaaactcggctgacttaactcgctctcactctgagagacaacgcagaccttcttcgccggaggctgatcggttgatcgtggcgatgacggnggaggagtataattaggaggangaggatggtgcaaatctgggaagttgagcttggctttatcacanggntttgcttgggcgcaanatcataagcc

SEQ ID NO: 491 - DNA, 423 bp, Arabidopsis thaliana
  unsure at all n locations
  Clone ID: ARABL1-18-Q1-B1-E4
ctcgagtttccctgagctattggctagggaaaacgcagcctagggctccgagcatggcccatctgctgtggataacttctagctcacggttcctancgaaggtctcgggatcggcggatnnaccggcagtgtcccacccgtaatcaccggggaactctccagtgaggtagctcggaggctcaccgganaatggncccaagtacttgactaggaacggagtgaaattcggataancggtttggttcaangctggttcacaaatcttcancgacggangattggnctacttgggcaaccccgaagcttggtccangctcannagcatcttaaccatttgggctacncaagtntacctcaagggganctgttnaggggctacaaangtcccccggganatggtccaatngggaaaaagcaaaaggg

SEQ ID NO: 492 - DNA, 410 bp, Arabidopsis thaliana
  unsure at all n locations
  Clone ID: ARABL1-18-Q1-B1-E8
ctcgagccaagaagccaaaacgtcaagatgctaacaacccttgtagtctaaccactcccaagatttaagaattttcttacttttgttctagttttgttgagaaaaagatgcatccgatcttcgatgccatccttcaaaatgaccttccagcttttcttggtttggtggaagcgagagaatcttccctggaggagagaagcgaggaacagaacaccaacaacacggttttgcacgtagctgcaaagctcggtcaccgagaantggtcgccaagattattgagctccgaccttcccttctctcttcccgtaacgcgtacggagacacacctttgcaacttgctgctcttcttggagacgtaaacatagttatgcaaatgtnaagacactggattggaactatattccgcacg

SEQ ID NO: 493 - DNA, 419 bp, Arabidopsis thaliana
  unsure at all n locations
  Clone ID: ARABL1-18-Q1-B1-F1
tcnnnnnnnnnnnnnnnnnnnnnnnnnnnnnnnnnnnnnnnnnnnnnnnnntcaatttcccaaaattggagaaaccaacaggcaagaaacagacagcgacggttgttgtgggagtgttggcggtgggatggctggcgatagagctcgtgtttaagccattgttcaagaagctgagctcctccaaggacaaatccgattccgacgatgccaccgtccctcccccgtcgggcgcctgaatatggtgagtgagaatttaacaaagcctctgcgggagacacgtgtgttgaagctcattttattagcaaatcctggtgtttccttttgtaataaccgttccggacttttacgtactgctttgatgatgtcccttttttaaattaaccccccctttnaaattaaaatcccgacaaggntaataa

SEQ ID NO: 494 - DNA, 409 bp, Arabidopsis thaliana
  Clone ID: ARABL1-18-Q1-B1-F11
ctcgagaaaacgtacttcttcttcaaaacgcgaaaccacactgtaagttacgtacaccaccacctatcctcaccattcatcatcgacacgtggctggtttaactcaaatcaacggaagaagatgacgtctgacggagcaacgtcgacgtcagctgcagctgcagcagcagcgatggcgacgaggaggaaaccgtcgtggagagagagggagaacaatcggagaagagagcggcggagaagagctgttgcggcgaagatttatactggtcttagagctcaaggtaactacaatcttccaaaacattgtgacaacaatgaggttcttaaggctccttgttctgaagctggttgggttgttgaacaagacgggactacttatcgcaagggacacaagcctctacctggtgac

SEQ ID NO: 495 - DNA, 388 bp, Arabidopsis thaliana
  unsure at all n locations
  Clone ID: ARABL1-18-Q1-B1-F6
tcgagcttttaccctcatcatcctccactatttacagttttgccactctgactttatgctagcttcttccggtgactggcgataacacnagagagccttcgccttctccaagctncatactcttccgacgataaagattagaagacatgaanaacggtaaccggaaaacaacgccggaaacaganaagtctcaccggagaaagttatcagagaaagcgatgtcgtttcacggcagaggaacaacgccgttatcaaatccaggcgaagcttcgaagaccgaaaacgttaccggagttattctccaccggtcaaaagcatcaccgtnccggagacggtttcacttccgccacgtttgacgaaacttttacttaacgtgacggtacaanga

SEQ ID NO: 496 - DNA, 417 bp, Arabidopsis thaliana
  unsure at all n locations
  Clone ID: ARABL1-18-Q1-B1-G1
ctcgagggttcatggaacatnttncacattccgtttcactcngtgttgttggntcccccananaaaatnanttgctttgggtgttgtggngaggatgatgatatgcataaaactgctgattanggaggtcgtcataaccaagccaaacactttcctccangaaatgatgcaaggcaccaccaagcctctgaaactgcacagaagggtcctccagttgtgaagttgcagcctattgaagtacctattatcccttttagtgaactcaaagaaacaactgatgattttggatcgaattctctcatcggtgaaggctcttatggaagagtatactacggggtattaaacaatgatctgccttcagcgattaaaaagttggattctaacaaacagncctgacaatgaaatccntgctcaggt

SEQ ID NO: 497 - DNA, 415 bp, Arabidopsis thaliana
  unsure at all n locations
  Clone ID: ARABL1-18-Q1-B1-G5
tcgagctccagaacattttgcacattccgtttcactccgtgttgttggatcccccaaagaaaatgagttgctttgggtgttgtggggaggatgatgatatgcataaaactgctgattatggaggtcgtcataaccaagccaaacactttcctccaggaaatgatgcaaggcaccaccaagcctctgaaactgcacagaagggtcctccagttgtgaagttgcagcctattgaagtacctattatcccttttagtgaactcaaagaancaactgatgattttggatcgaattctctcatcggtgaaggctcttatggaaagagtatactacggggtattaaaacaatgatctgccttcaagcgattaaaaagttggattctaacaaacagnctgacaatgaattccttgctcangt

SEQ ID NO: 498 - DNA, 418 bp, Arabidopsis thaliana
  unsure at all n locations
  Clone ID: ARABL1-18-Q1-B1-G6
tcgagttttcgaattcggagctcaagtttgaaattcggagaagctagagagttttctgagatggctcgtactaagcaaacagctcgtaagtctactggaggaaaggctcctaagaagcagcttgctacaaaggctgcacgtaagtctgcaccaaccactggaggagtcaagaagccccatcgttaccgtccaggaactgttgcactacgtgaaattcgtaagtaccagangagtaccganttgctgatnangaagctccctttccaaaagntaattcgtgaaaantgnccaagatttcaagactgacttgcgtttccaaanccaatgctgttgccttgnactccaagganggctgctgaaagcaaaaccntgtgggtcnccnttgagggaaactaacctctgggccatccaagccaaa

SEQ ID NO: 499 - DNA, 412 bp, Arabidopsis thaliana
  unsure at all n locations
  Clone ID: ARABL1-18-Q1-B1-G7
tcgagcttaacagaatttagctaccaattactgtctccggcgagatctcaatttgatccttcacggtggcgtcgacgtccgggcaacaacaagctctctcgagaagaaagcnnnnnnnnnnnnnnnnnnnnnnnnnnnnnnnnnnnnnnnnnnnnnnnnnnnntgttcgagctcctgcggcgaagaaaccgagtccggaatacccattttggcagcagaactggtttatcggtctgctattcgtgatggctttaggattcttctgtctcgctatcttcctttacctaagtctcgatcctgattccggttacacgtctgcctccgccgctgcttctggtaaagaaggtgtcgagattacttatggaagtgcgatnaagttgatgcacgagaaaactaaatttcgattacantc

SEQ ID NO: 500 - DNA, 426 bp, Arabidopsis thaliana
  unsure at all n locations
  Clone ID: ARABL1-18-Q1-B1-G8
tcgagctctttcaaacagtggaaacactttttatcttttagttccccaaagtttttgaaaaggtcaaaatgtcaatggagaagccacctttggcctccggtttagctcgaacacgatcggagcagctatatgagacggttgcagcagacataaggtcacctcacggctccatggacgctaatggtgtgcctgcgacggctccagcagccgttggaggangaggaacgttgtcgaggaaatcaagccngangttgatgggggatgtctccggggaaggagtaacngcgccgggacacacataagggaatccaaggaccgctcaacntaaactccaagctaaaaggaaattaantaaccggcgcaacntttgagcccttgcgtccaancgcatccgctccggcctttcaattttcccttcaacngggg

SEQ ID NO: 501 - DNA, 408 bp, Arabidopsis thaliana
  unsure at all n locations
  Clone ID: ARABL1-18-Q1-B1-G9
ctcgagcttccaactcctacaatgaggtctagactgggtcctacaatgccaccaccacctatcaatgtgaggaatacgatagaccgggcagactggagtaatcgccaaccaactacaacacctggaagaacaccgaccagtgcaacaccttctggaaggacacctgctctgaagaagccaaaggcaaacgaaccaaataaaagagatatgacgtatgaggagaagcagaagcttagtggccatttgcagaacttgcctccagataaactagatgcaattgtacaaatcgttaacaagaggaatactgcggtgaagctacgggatgaagaaattgaagttgatattgatagtgttgattcagagaacctgtggganttggacaaatttgtancaactataaaaagggct

SEQ ID NO: 502 - DNA, 433 bp, Arabidopsis thaliana
  unsure at all n locations
  Clone ID: ARABL1-18-Q1-B1-H2
ctcgaggcagatgggccatgctcggagccctaggctgcgttttccctgagctattggctaggaacggagtgaagttcggagaagcggtttggttcaaggctggttcacagatcttcagcgacggaggattggactacttgggcaacccgagcttggtccacgctcagagcatcttagccatttgggctactcaagttatcctcatgggagctgttgaggggctacagagtcnccggagatgggtccattgggagaagcanaggacttgctttacccaggtgggagcttccacccattgggcctcnctactgaccccgaagctttcgcggagttnaaaggtgaaagaactcaaagaacgggaaaggttggctaatgttccccaangttttgggattccttccttcaaggccaattgtnaaccgggaaaagggga

SEQ ID NO: 503 - DNA, 414 bp, Arabidopsis thaliana
  unsure at all n locations
  Clone ID: ARABL1-18-Q1-B1-H7
ctcgagaaagaagaagaaaaaaacggaggaggaacagttagcgccgtccatggcgggtcttcagagatccaccatctctttccgtcgacagggctcttcgggtatagtctgggacgatcgtctcatcgccgagctaagccaacaagcggccaacgaccggaaaggcgagactctacancaggacgaacangccaagctgattacgtcggaagtacaggatcagacaaccaaacctatcgccggagaaggactcaaacctatcagaactgacggaggtatggagaggagtcgattcaacggaggangagccatccgccaccatcgaaacacanggagagtgtctccggcggtggacccgccgtcgccgaaactgtcggcgtttgggtgctgctctgccttcgggaaaaaacaacc

SEQ ID NO: 504 - DNA, 392 bp, Arabidopsis thaliana
  Clone ID: ARABLI-04-Q1-B1-A9
ctcgagcggctcgagctcgagccgattctctcaatcttatgatcgttaagggtgaaacaaagattactaaaaacagaggaaaaacagagtaaagattactcaagagtcaagagctggtttgatcttaatgggaaacatctgtcctggctctggatcttccactgttaaccacgaacctgtctccaccaaacccctcccagtgagacgtgtgcagaccccagagaataaaaagtttcctccgccgctggtggcgatgccggcgttacatcccacgtttccactgccggaaacaggacataaactgagacccgccgctaccccgcctcgtgaaaaaccgcaacataggacgacgagattcgtcgagaaccactcgtgaaaaaacgcaggagaaa

SEQ ID NO: 505 - DNA, 445 bp, Arabidopsis thaliana
  unsure at all n locations
  Clone ID: ARABLI-04-Q1-B1-B9
gagttacttatcggaccggcccgtacgtaaactcanaattcggctcgagtagaaaacccgaaaggagaaaagcaaaaaaagccagatcacaatctcaaactcgcttcttcttcttcctcactctcttattaggttcagttcnntttcgattcttcgtgtggatcgctgtcggtagatttccgatttcnttaggttctgcncgaaatcgtggtttaagtgtttattatcatngattcagaaaacggtgggtaaacttgtagcggaagatgangcggtggccggtggntnaccggcggcgaggtagaangagattgtcgaagttgggatatggtttctccttggntctttcnctgncnctggtttaanttctcgtcatcgttcaagcattntcaccatnaagaaggattcngccccaagntttttacttgaggagaggacactngga

SEQ ID NO: 506 - DNA, 420 bp, Arabidopsis thaliana
  unsure at all n locations
  Clone ID: ARABLI-04-Q1-B1-C12
gtcggnccgacccgtacgtaaactcagaattcggctcgagggcaggagcaagatcaagctgctgttgactcgcacagaaaggcagctgctgctactgctgctggtaaattcaaggatgagatcattcctgttaagaccaagcttgttgacccgaagactggtgatgagaaacccattacagtttctgttgatgatggtatccgaccaaccacaactcttgcttctcttgggaagctgaagccagtgtttaagaaggatggcaccactactgctggaaattccagccaagtaagtgatggtgcaggagcggttctcctaatgaagagaagtgttgcaatgcaaaaaggacttcccgttcttggtgtattcaaggacatttgcctgcaattggtgtttgacccctgcaatcaatggggtatn

SEQ ID NO: 507 - DNA, 400 bp, Arabidopsis thaliana
  unsure at all n locations
  Clone ID: ARABLI-04-Q1-B1-D12
ctcgagcttcttctctctacacctcttaacatctcccatattcgaataatagctcaaagttccgatttttataatttaccttcataacaaacaactgattcacttacttatcagccggtgactgtttttgggtctgcttcaattgcagtggaagagatggtgttcttgagttggggccgtccatcttccgagcaacagcaacaagtcatcaacaaaacaggaaccttcaattatgacaacaagtacagaggagtttcgtctaggtctattgctaaacttaaggaagattcagagattgataaagatggattcttgatcaatcatgctccgtgttttaatcggttctgggtagagagagttatgaagaanggnaaaaaagctcctccaanaattgggaagc

SEQ ID NO: 508 - DNA, 454 bp, Arabidopsis thaliana
  unsure at all n locations
  Clone ID: ARABLI-04-Q1-B1-E10
ntcggccagaagagacatgaagtcggacncacncgtacgtaaactcngaattcggctcgagatttgcaattcgatcttctatgccttcattttgtggagctaatctgtgctgggaactgcaccgaagctctcaaatttggtaagacaagattggctccttttgggaaggtcaaaaaatatgtagaaaagcttgaagacgtaatggcattgctcgcttatgaagaccctgagaaatccccaatgttccatcttttgagctctgaataccgccaacaagttgctgataatctgaaccgcacaattcttgaacacacaaaccacccgagctacacaccaatggaaaggatcatacaacaggtgacagttgtgagacaatacttgactgaggagaatggcaaagatgcgtttcccccaatcctctccgaaaggatcccccaaaagggntaaaattgca

SEQ ID NO: 509 - DNA, 398 bp, Arabidopsis thaliana
  unsure at all n locations
  Clone ID: ARABLI-04-Q1-B1-E9
ctcgagctcggatcaccacatgacttgatcttcttgccgttaccaaaaccaaaatccctaaatttgccctcatttccctctgattagatcccttaccccgacaaagacaccaaaattcttgagggcgagagagctgattgatgtctttggtatctggagccagggacatggggttnnnnnnnnnnnnnnnnnnnnnnnnnnnnnnggatggagatgatgagaactcctcctccagaacaagagccgacgacgatgctcttagtcgacaagatgagcgaatcttctctttgtgctaccgaggaggaagaagacgacgattccaaattgcaattgggtcctcagtacactatcaaagaacatctccgagaaagncaaaggatgatnagaattccgaagga

SEQ ID NO: 510 - DNA, 424 bp, Arabidopsis thaliana
  unsure at all n locations
  Clone ID: ARABLI-04-Q1-B1-H11
ccnacccgtacgtaaactcaagaattcggctcgagctcactgtattcctctgctaggtactgtgtgaaaggtgaaaagcttatctcccaagactgcaagaaagtcaaggcaaccactaacgtatggcttcaagttgaaggtcaacagtttgaccctaacgcctctaagcttgccttcgagcgtgtctttaaaggcatgttcggcatgaccactgaccctgccgctgtccaagagctcgaaggtaagctccagaaagtcttggatgtctacgaggctaggctcgccaaatctgagttcttggctggtgattccttcactcttgctgatcttcaacacctcccagccatccattacttgttgggtactgactccaaagtgctcctttgactcccgccctaaaggtaaccgaattggattaaaaaaa

SEQ ID NO: 511 - DNA, 415 bp, Arabidopsis thaliana
  unsure at all n locations
  Clone ID: ARABLI-06-Q1-B1-A12
tcgagtcctaatgtacttaagttagaagggttgatcactgcctctgtttcatcttctctgtacttggtttttgagtatatggatcatgatctcgncggacttgcttccatacctggtatcaagttttcagagcctcaggttaaatgttatatgcaacaacttctaagcgggcttcatcattgtcacagtcgtggtgttctgcatcgtgatataaagggctctaatctactgattgatagtaatggagtcttgaanattgcanattttgggttagcaacgtttttcgattcacagaactgcgttccattaactagccgtgttgtgacccttggtatcgacccccagagcttctacttgggagccttgtcattaaggtgttggggttgatttgtggagcacaaggctgtaaccttaa

SEQ ID NO: 512 - DNA, 431 bp, Arabidopsis thaliana
  unsure at all n locations
  Clone ID: ARABLI-06-Q1-B1-A9
ctcgaggaaaaatgggattacctcaaaataagctcagttttttctgcttcttcttcctcgtctctgtactaactcttgccccattggctttctccgagatcttcttagaggagcatttcgaaggtggatggaaaagtaggtgggtcttgtctgattggaaaagaaacgaaggcaaagctggaacctttaagcacactgccggtaaatggcccggcgatcctgacaataaaggtattcagacttataatgatgccaagcattatgcgatttctgcaaagattcctgagtttagcaacaaaaaccggactcntgttgtccaagtactcaatcaaagaattgaacaagacaattgaangtgggtggtgcntanattaaaccccctggtctggcnangttaaccagaagcaattttgggggggngataccccata

SEQ ID NO: 513 - DNA, 487 bp, Arabidopsis thaliana
  unsure at all n locations
  Clone ID: ARABLI-06-Q1-B1-C11
aaatccttagcacgccagatgagatnnaagtcnggccnacncgtacgtacantcngaattcggctcgaggttaatatgtctaaagagaaatcatatgtaattgctcttcttctatctttgcttctctgtctttcttttcaagttggtgtctctgaggnnaactacaacgcagttactacaaggtactcggattctcctcgatgcgccaatggatcttctgcaagtccaccaacaagacactgtccaagggggcgtccccgtcctcctacaccgagagtagcggtgcactctaactcaaccaaaggaaaaggcccataagtgatgaaattattttatgtctcaacactatgatttttgtatttaagtttgatgtaaaatttacagggcaaagagattcaatctttgtaaatcagatgattacattnnnnnnnnnnnnnnnnnnnnnnnnnnnnnnnnnnnnnnnnnnnnnnnnnnngggcggccgccc

SEQ ID NO: 514 - DNA, 465 bp, Arabidopsis thaliana
  unsure at all n locations
  Clone ID: ARABLI-06-Q1-B1-D10
ccagaagagngggaagtcgngnccacncgtacgtaaantcggaattcggctcgaggtcgcgtacaatgggttctgcattcgatccccttgtcacggccactgaggatctcgccgccgtcaactcggcgccgccactctcaaacctcacgcaagaagaactcaagaaaatcgccgcttataaagccgtcgaattcgtcgaatctggaatggttatcggtctcggcactggctccaccgcgaaacacgccgtggctcgtatcagcgagcttctccgagaaggaaaactcaaggatataatcggaatccctacttcaaccacaacgcatgagcaagcggtgtctctanggataccattatccgatntagattcgcatccggtggtggatctatcaatcgatggcgccgacgaagtcgatcggctcttaatctggtgaaaggacnccgcggattgttantgaaaaaaaa

SEQ ID NO: 515 - DNA, 481 bp, Arabidopsis thaliana
  unsure at all n locations
  Clone ID: ARABLI-06-Q1-B1-D12
atgatccatntggtcgccagaagagagntgacgtcgngacccacgcgtacgtaaantcggaattcggctcgagcaaagtctcatttctcgttaatttccattttcgttatctctctctctcgccgatcaaaccctaggtgtatcaattcgttcagattcccggcggttggtctcactgtcatgtaggtttgattcatcttctcttctggatcttgagtgacgaagagagaagagatctgagtttttctgagagagagatttttctccctcgttgacccgatcagttttttttcgtcgctggggattttcaaattttttttgagggatcggttttgatttgttacgtagatggcggattcttcacccgattcgtgtttcaaaggaggcaaatttagtgctccaaggtttcgatttcatccaactgatgaagagcttgtgatgtattaattgaagaggaagatttgtaggaagaggcttagag

SEQ ID NO: 516 - DNA, 424 bp, Arabidopsis thaliana
  unsure at all n locations
  Clone ID: ARABLI-06-Q1-B1-D9
ctcgagtacgaacgaagaatggagagcgactccgagatggtagcgttgcctctgttaccgactccgatagaatcgaactacagggcttgcaccattccttatcgattcccttctgataatcctagaaaggctactcccactgagatctcctggatcgatctcttctccaattccatcccttctttcaaggaacgtgcagagagcgatacaaccgttccagatgctcctgttcgagctgaaaagtttgccaaaaggtatgcggagattcttgaggacctgaagaaagattcggagagccatggtggtccaccggattgcattcttctctgcagaattcgtgaagctgatactaaagagaattgggatttaaggacatatttaagaaagttaanggatgaggagaatgcaaagggnaatttcacta

SEQ ID NO: 517 - DNA, 422 bp, Arabidopsis thaliana
  unsure at all n locations
  Clone ID: ARABLI-06-Q1-B1-E9
ctcgaggaagattgtcaagaaatgagctggcttaacacgacgttgttttgggctatgttaccagcgggtactccgaagaccgtccttctaggtagacctacggatccagtattctttaagagtaaatcggattacgtcaaaaagccaatccccaaagaaggactggagaagatttggaagacaatgttgaaattcaacaatattgtgtggctgcacttcaacccttacggtggaatgatggatcggattccgtcaaacgccacagcgtttcctcaccggaaaggaaacttgttcaaggttcaatacnataccacatggttggacccaaacgccacagagagtaacctgagtattatgaaggagctcctacgangtttcaanaaccgtacgtgtcaagtaacccgaaaaaaggccttcnttaa

SEQ ID NO: 518 - DNA, 430 bp, Arabidopsis thaliana
  unsure at all n locations
  Clone ID: ARABLI-06-Q1-B1-F11
ctcgaggcgaaactcgtcgattttcaaaaccggagctcagagactgatctcggaaagtaaatcgcagccatggcggaaaaagctgtcactatcaggaccagaaacttcatgaccaacaggcttctcgccagaaagcaattcgttattgatgttcttcatcctggaagagccaatgtttcaaaggctgagcttaaggagaaattggcgangatgtatgaggttaaggacccaaatgctatcttctgtttcaagttcaaaactcactttggagggtggtaaatcctcctggatatggnttgatcaatgatactggtcaagaacgcctaagaaattttgagnccaannttaanacttatcaagggattggncttgacaacaaagattnggaaatccaagggaaccagnttaanggggaagggaanaacaaggc

SEQ ID NO: 519 - DNA, 430 bp, Arabidopsis thaliana
  unsure at all n locations
  Clone ID: ARABLI-06-Q1-B1-F12
tcgagcggagctcaagtttgaaattcggagaagctagagagttttctgagatggctcgtactaagcaaacagctcgtaagtctactggaggaaaggntcctaggaagcagcttgctacaaaggctgcacgtaagtctgcaccaaccactggaggagtcaagaagccccatcgttaccgtccangaactgttgcactacgtgaaattcgtaagtaccaagaagagtacccgagttgctgatcaggaagctccctttccaaaggntagttcgtgagattgcccaagatttcaagactgacttgcgtttccaaanccatgctgtgcttgcactccaagaagctgctgaaacataacttgtgggtcccccttngagggacactaanctctgngccaatccatgccaaagcgtgtngaccaataatgcccaaaag

SEQ ID NO: 520 - DNA, 443 bp, Arabidopsis thaliana
  unsure at all n locations
  Clone ID: ARABLI-06-Q1-B1-G10
ncgtacgtaaaatcggaattcggctcgaggatatttttcagaacaatttcantnctannatctnagaantcacancancncngtcncatgatcatattagcaggaggaccaaacacacnngactcaatcttctcacttctcactccctcctccgtagaatccgccacaacatcattcaacactcacaatcctccgccaccgccgcagctcgggtcctccgtctatctccgccaacgagatatcatcgagaagttccaccttcagaacagagcaatctccactcctcatcctcctctgttttcctcaacgtacgatnatcatcaaacttccgagctaatgctccaagcggnggccgggtctccanccgccgcnttcgccgctgcgttagcggctggganggtgacgaaaaagaaganactttacagtggatgaggcataagaca

SEQ ID NO: 521 - DNA, 421 bp, Arabidopsis thaliana
  Clone ID: ARABLI-06-Q1-B1-G11
ctcgagtcgacatcggccgtgaggtaaaccttccttcctatatcttcatgacttccaactttggtttcttaggggttctacagtatctcccggaacgacaacgtttgactccgtcggagttcgatgagagctccggcgaggaagagttacatattccggcgtttgtgaaccgtgttcccgccaaggttctgccgccaggtgtgttcgataaactctcttacgggtctctggtcaaaatcggcgagcgattacatgaagccaagggtattttggttaattcatttacccaagtggagccttatgctgctgaacatttttctcaaggacgaagattaccctcacgtgtatcctgttggggccggttctcaacttaacggggccgtacaaatccgggtctaacttcggcccaatataaaagaga

SEQ ID NO: 522 - DNA, 418 bp, Arabidopsis thaliana
  unsure at all n locations
  Clone ID: ARABLI-06-Q1-B1-H10
ctcgaggtttaagcaatggtataatcctccttggttcaatgaatctgttccttcaacgccttatgagcctcttgcgataagacgcgcctttgaaaacgctgtgattaagcggttgatgactgatgttccatttggagttttgctctctggtggtcttgattcttcccttgttgcctccatcactgcacgtcacttggccggtactaaggcggctaagcaatggggtcctcagctccattccttttgcgttggtcttgagggctcaccggacttgaaggcaaggaaagaggtggcggaatatttggggacggtgcaccacgagttccacttctcggtgcaagacgggattgatgccatagangatgtgatttancaagttgagacctatgatgtgacgactatcaaagcgagcacaccg

SEQ ID NO: 523 - DNA, 418 bp, Arabidopsis thaliana
  unsure at all n locations
  Clone ID: ARABLI-09-Q1-B1-A1
tcgagcaagagactttgcattggcattgaaagacaggttttacttacagccattgccaccaacagaagctgcagctagagccaaagaatctgcaaaggatatcataaatgtgaagccattgatcgacaggaaagcttggccatatgttcaaaacgatcttcgttccaaggcttcttatcttcgttatgatcttaacacaatcatttcctccaaacccaaggatgagaagaagtcactcaaggatctcaccaccaagctcttcgataccatcgacaatctggattatgcggcgaagaagaagagtccttcgcaggctgagaagtactaagctgagacagtctccngcnttgaacgaaattcctgccaaacctggggtaaancatttaanttctgcatttttcctgtaaattaatatcct

SEQ ID NO: 524 - DNA, 469 bp, Arabidopsis thaliana
  unsure at all n locations
  Clone ID: ARABLI-09-Q1-B1-A10
atagaataganatgacgtcccatncacgcgtacanaanctcggaattcggctcgagaaatcatattgagaacaaatagatttggttatatatggcttttacgcacgtttgtttatggacgttagtcgccttcgtgctgacgtggacggtgttctaccttaccaacatgaagaagaaggcgacggatttggctgatacggtggctgaggatcaaaaagacggtgctgctgacgtcattatcgtcggggctggtgtaggtggttcggntctcgcatatgctcttgctaagtgtgcgcctgnaagaaggaacggtgaagtctttactagaagaaaaaggagtggtcaaanggagtgacatacaagaataatgaangcgaanaancaacagccttgggcacctctcactgtggnaagcgacggttgctactcaaaccnttcgtccggtctcttaatgaangacaacaattgct

SEQ ID NO: 525 - DNA, 416 bp, Arabidopsis thaliana
  unsure at all n locations
  Clone ID: ARABLI-09-Q1-B1-A12
tcgaggcaaagtgttgaagactttttagaaagcagaaaaaaaagcagagagtgtattcaaagtcggaaagaaaccctaaagaagaggattatgggtgctgtatcgatggagtcgcttcctttaggtttcagattcagacctaccgatgaagagctcgtcaatcactacctccgtctcaagatcaacggacgtcactccgatgtccgtgtcatccctgatatcgatgtctgcaaatgggaaccttgggatcttcctgctctctcggtgattaagacggatgatccagagtggttctttttctgccctcgtgatcggaaataccctaatggtcatcgctctaacagagcaactgactctggctattggnaagctactgggtaaagattcgtancatcaaagtctaagaaagactttaa

SEQ ID NO: 526 - DNA, 406 bp, Arabidopsis thaliana
  unsure at all n locations
  Clone ID: ARABLI-09-Q1-B1-A2
cgaggctaaagcagtggtggctcagtcttatgctagaatctttttcaggaactctgttgctactggtgaggtttatcctttggattctgaagttagggtttgtgatgagtgtacaactggtgatgttgcgactgttgagttgagggaaggagatagtattttgatcaatcatacgactgggaaagagtacaagcttaagccgattggtgatgctggaccagtgattgatgctggtggtatatttgcttatgctaggaaagctggaatgattccatctgctgctgcttgattttgacttcaagtgtcaatggaaattcaatgagagtcacntcaagggttcttgattcaataatnanaataagttaatgtttccaaaaacctaataacctaatccaagttttatgaa

SEQ ID NO: 527 - DNA, 408 bp, Arabidopsis thaliana
  unsure at all n locations
  Clone ID: ARABLI-09-Q1-B1-A4
gagcaaagataacgacattaacaacatccnnnnnnnnnnnnnnnnnnnnnnnnnnnnnnnnnnnnnnnnnnnnnnnnnnnnnnnnnnnnnnnnnnnnnnnnnnnnnnnnnnnnnnnnnnnnnnnnnnnnnnnnnnnnnnnnnnnnnnnnnnnnnngtcagaccctggatccaaagataacgacattaacaacatccttatcggtctttatggatcccaatatagatacaaggaaatgcggcagatcataactcccgtaggcaggaagcaactggaaccgatgttacaaagctaccgcaaggttgtgggcgctgagctttcaaanagaatggtgtnnnnnnnnnnnnnnnnnnnnnnnnnnnnnnnnnnnnnnnnnnnnnnnnnnnnnnnnnnnnnnnnnnnnnnnnna

SEQ ID NO: 528 - DNA, 363 bp, Arabidopsis thaliana
  unsure at all n locations
  Clone ID: ARABLI-09-Q1-B1-A6
gagccgggaagaagctcaggagtcgcaatgaaatcgctgccttcgttgaagccaatccggaattcaggaacgcaccacttggagacttcaatttcactgtccccaaggtcatggaagatactgttccccctgatccgaagcttggctctccttttccaagcactactaccactacttcagagaagagcagtgtcaagcagagccataactaatatgttctcttctaccttctttctgctccctaaagcaatgcgttttgagtctttatagatttgatgttctctaaaactgttatgatattaacatctctaagcaaaaaatatgatcttttgtctcaaaannaaaaaanaaaaaaaagggcgg

SEQ ID NO: 529 - DNA, 452 bp, Arabidopsis thaliana
  unsure at all n locations
  Clone ID: ARABLI-09-Q1-B1-A9
cccgatncacgcgtaaataanctcggaattcggctcgagggcgaagattatccatcttctcagttactcctactggaaccaaaagctcagaaccttaaaacatggagtctctatctcttcccgttctaaatcctctgttagcttctggttctaatctttttagaaaccagcactcgaggatgacctcttcaatggtatcttcacttaaatcccccattggaggcacatcgctctccactgttcgtcgctttggagtangtgttgttaggatgcaagctgttgatgaagatattgatttgaagcaaatgagagacatagctgctgctaaaaagcgttgggatgggttgttaagggaanggaaagtgaagcttcttacaccaagagaagcanggcaatgctattcccctttcaaacaaactccccntgaaggttcgtccctccaacgaagggca

SEQ ID NO: 530 - DNA, 108 bp, Arabidopsis thaliana
  unsure at all n locations
  Clone ID: ARABLI-09-Q1-B1-B1
tcgagtttttgaggttttcacattctgagtttatattaataaagggaataatattttggttnnnnnnnnnnnnnnnnnnnnnnnnnnnnnnnnnnnnnnnnnnnnnnn

SEQ ID NO: 531 - DNA, 477 bp, Arabidopsis thaliana
  unsure at all n locations
  Clone ID: ARABLI-09-Q1-B1-B10
gccgcnctatagaaaaagaatgacgtcncatncacgcgtacntaanctcggaattcggctcgagcattttttaacaggaaatccaagtgggaatgggacctgcaggagagctgcgttacccttcgtaccccgagcaagaagggacatggaagttcccagggattggagccttccagtgctatgataagtactcgttaagcagcttgaaagcagcagctgagacttatgggaagccagagtggggcagtactggcccaaccgatgctggtcactacaataactggccagaagacacccagttcttcaaaaaagaaggtggtggttggaactcagagtatggagatttcttcctctcatggtactcccagatgctgttggatnacggcgaagcggattctaacctcaagccaaaatcaatattcgaaaacattgggtgtcaaaatatcggtcaaaatcgctggaatccactgggcacta

SEQ ID NO: 532 - DNA, 463 bp, Arabidopsis thaliana
  unsure at all n locations
  Clone ID: ARABLI-09-Q1-B1-B12
ataganagaatgacgtcccatncacgcgtacntaanctcggaattcggctcgaggttaaaaaacaagaaatcagacaactccttgtctcgagacacattacaaatcaaaaaaagaaaaaaaaccacgatggctcaaaatggttcgaatactactgtgaagctgatagggacatgggcaagcccattcgctataagggctcaagtggctctacacctcaagtcagtagagcacgagtatgtcgaagaaaccgatgttctgaaaggaaagagcgatcttcttattaaatccaaccctatacacaagaaagtccctgtcctcatccatggtgatgtatcaatctgtgaatctctcaacatcgtccaatacgtcgatgaatcttggccgtctgatctttccatcctcccaacacttccctcgggaacgtgcctttgccgtttttggggctcacttcgttgacggnaa

SEQ ID NO: 533 - DNA, 416 bp, Arabidopsis thaliana
  unsure at all n locations
  Clone ID: ARABLI-09-Q1-B1-B3
cgagctcatgtctcctctaatggcgtcgatatcaggtatgtggcagttgggaatgagccttttctaaaagcattcaatggaacatttgagggtataactctacctgctcttcagaatatacaatcagctatcatcaaagctggtttagcgactcaggtgaaagtcacagtgcctcttaacgcagatgtgtaccaaagtgcgtctaatctcccttcggatggagatttcaggcctgaaatccgtgatctcatgttgaacattgttaagtttctgagtgataacggagcaccattcactancaacatttaccctttcatcagtctctacaacgacccgaanttccctgtggagtttgcttctttganggnactgggtactcccgataaacggacnatgggaagaatcctacnaacaat

SEQ ID NO: 534 - DNA, 406 bp, Arabidopsis thaliana
  unsure at all n locations
  Clone ID: ARABLI-09-Q1-B1-B8
tcgaggacgctggcaaggtggagcttgtagatggatcgtcctacttggggcagccattacctttctcgatctcgacattgatatggatcgaggtgttagtgatcggctacatcgagttccagcgcaacgccgagcttgattcggagaagcgtttataccccggaggcaagttctttgacccgctaggtttagcggctgacccggagaagactgctcaacttcagttagctgagatcaagcatgcacgtcttgcgatggtcgccttcttgggattcgcggttcaagcggctgcaacaggtaaaggtccactcaacaattgggctactcacctcaatgatcaactccaaaaccaacatcatcnataaccttctcctcaaccttaanatcaataacaatgtganaatcc

SEQ ID NO: 535 - DNA, 416 bp, Arabidopsis thaliana
  unsure at all n locations
  Clone ID: ARABLI-09-Q1-B1-B9
tcgagtcctcctcttacgtaaccctaacgaagtcgaagattctctggtagatctatctcgattcgattcgattcctcttttttcccagaaaagtcgctattgaaatcgaacgaaagtgttgaagattttaccagtcagaggtatatatatatagagagagagttatggatttggatcaatggatttccaaggttaaagatggtcagcatctctccgaagacgagcttcagcttctctgcgaatacgtgaaagagattctgattgaggagtcaaacgtacagcctgtaaacaagtccagtcaccgtatgtggtgatatccatggncagtttcatgatcttaagaagcnttttcagaccggaggtcatgttcccgacaacaattacattttaatgggggactcgtggataaangttac

SEQ ID NO: 536 - DNA, 392 bp, Arabidopsis thaliana
  unsure at all n locations
  Clone ID: ARABLI-09-Q1-B1-C4
cgaggcatgtctttcttctggctttttccttttctccttcatctttcatttgccgattccttatctcctctttcagctccagttcaaaattttattcacctaaaccattcttgtccaagtagtatattaacgtattcaagaaacagcacttacttcaccaatctcaaaacacttttgtcctctctctcttcccggaacgcttcatactctaccggattccaaactgccacggcgggacaagctcccgaccgtgtcaccgggacttttcctttgtcgcggagacgtctcacaaagaagtttgccgtaactgcgtcgccttttcccgtcaaagnagacttaaaatgggngtccgtanaacaaaagaagtcngtggccttaatacgangagttgt

SEQ ID NO: 537 - DNA, 422 bp, Arabidopsis thaliana
  unsure at all n locations
  Clone ID: ARABLI-09-Q1-B1-C6
ctcgagcggctcgagcggctcgagctcgagccgagtttcgtgtgtttggagaagaagaagaacagatcaaatacgaggagagatctctaaagaganttatcgnttcaaatttgttcacgttgagaagtttaatttanattaaacaacaaaaagatgggttactggaattcnaaggttgttccaaaattcaagaagttattcgacgaaaaatagtgctanagaaggctgctgctgctgaagctaccaagacctttgatgaatctaaggaaacaatcnacaangaaattgangagaaaaaagacagaactccaaccaaaagggtcgttggaaanctatgaaancaacntctggcagaaagtccaagggntttgggtgaaaagaccctaaaggtggctgggtttgaaagaaaaactcaaccggct

SEQ ID NO: 538 - DNA, 394 bp, Arabidopsis thaliana
  unsure at all n locations
  Clone ID: ARABLI-10-Q1-B1-G12
ctcgagccanganaaaaagaacaatggcagcgagtgcatctccaatggcgagccagctaaggagcagcttcnccnccgcttctctttctcagcgtctcgccgtcccgaagggcatctccggtgctcctttcggtgtttctccgaccaaaagagtctcttccttcactgtccganctgttaaatccganangacaacattccaagtagntcaaccaatcaanngtgatccattcatcggaagtttggaaactcnggtgacatcaagcccattgatcgcgtggtancnttccaacctccctggataccgtaccgccgtcaancctctcctcngcggtgtggaaatgggcctggcccatggnttcttcataagtgggcccattcgtcaaaagctggc

SEQ ID NO: 539 - DNA, 391 bp, Arabidopsis thaliana
  unsure at all n locations
  Clone ID: ARABLI-10-Q1-B1-H10
agctccaaaactctatctctctctctcctccacacaccaatttcttcatgaccttcttcttctagcagagaagattaaagaaacccccaaagtccagcttatactaaatgggtcatgatancatcacaaagctcgggagtctactcgtaaagctacacaaaggtccttcaagttggctttgtcttcatcctcgaccagaccgaaccagcaacggcggacgaatcaagctcgtcagatccgacggttctttacaagtctacgatcgtcccgtagtagtctcagagctaacaaaagacttcccaaaacacaaaatctgtagatcagacttactctacatcggacagaaaacccctgttctgtctgaaaccgaaacacttaagctangtctcaa

SEQ ID NO: 540 - DNA, 392 bp, Arabidopsis thaliana
  unsure at all n locations
  Clone ID: ARABLI-10-Q1-B1-H11
ctcgagaagaccggcgctattgagtgcgttgaggaaccaatcgtcgctcttggcagagctctcaaggatctgacccatagattgagtagcctcaggcttggaggtgaatagaaacaaccggagacgcgaaggtttggtggaattggaagcggaaatggtacggtcatactctgttaaaagcgccaagcaacagcaacctccaccgccgcagcagcaagaacaacagcaaggaggccaagatgtgaactgcttaccggattctccgatgttagatacatcctcttctttcggctccacttcttcgtctccctcgctcgccaatttgcctccgatncgtgtccatgtanaggaacaagcggagtaangactttgccaaattanaagaaatctgg

SEQ ID NO: 541 - DNA, 400 bp, Arabidopsis thaliana
  unsure at all n locations
  Clone ID: ARABLI-10-Q1-B1-H7
tcgaggccgtgcatacaacattccagtatgcaggtaccgaaggaaaacgccacaggcttcgagaggggatggttttctatgacccaccagaatattatgattcaccaggaggtttcattgcgtttaaaccatcgattccaaaaagcttgttacttgacgggaagcataccattgaatcgcattttatcctcgttaatcaccaaatgaaacagatcagatcagctctagccattgcatctcttcttaatcgtacactggtgatgccaccaatatgggtgcaggttagataggctttgggtttgggcatcctgggtactcctcaaggatttaagacccgacaacctttcatctgcccactgatcatgtcnttgaggtcaatatcatgcttaagggagctanc

SEQ ID NO: 542 - DNA, 441 bp, Arabidopsis thaliana
  unsure at all n locations
  Clone ID: ARABLI-11-Q1-B1-A10
acncgttacttaagatcaagaattcggctcgagaggagttagagcaaatgctcaaggaaatactaatccgaccctttccattgatcgcattgacaagtcacatgctaaatggaagcgagctgacattcttgtctttaacactggacattggtgggttcatggaaagaccgccagaggtgcaggaaaaactactacaaagaaggtgactacatctacccgaaatttgatgctactgaagcatacagaaggtcgttgaagacttgggcaaaatggatcgatcagaatgtgaatcccaaaaagcagcttgtattttatcgcggatactcctctgcccattttcggggangtgagtgggactcgggaaggtcatgcaacggggaagtagaacctgttaaagaaagggttcaatccatcgaattcctaaccctttgaaaaatgaaa

SEQ ID NO: 543 - DNA, 472 bp, Arabidopsis thaliana
  unsure at all n locations
  Clone ID: ARABLI-11-Q1-B1-A3
tatagaacacttntgacgtcgccacgccgnatatataananggaattcnggctcgagggtctgttgacagtatgcagacaagtaatgctggagggtctgtgtcaatgtctgtcgataacagtagcgttggttcgagtgatgctcttattggccatcctggtttgaagcctatgcgccatccctactctctctcggatggccaaagcgtatttcggccaggaaaagttactcatgcacttaacgatgatgccttagcacaagcgttgatggatagtaagtatccaaccgagggactggtgaactatgaagagtggacaatagatctgaggaaactacatatgggtcctgcttttgctcaaaggggcttttggaaagtttatacagagggacttacaaccggagaaaatgttaccattaaactactcnaaaagtcaaataacaancctgaaaaggnacaagccctcgaacaaca

SEQ ID NO: 544 - DNA, 410 bp, Arabidopsis thaliana
  Clone ID: ARABLI-11-Q1-B1-A4
ctcgagcacacgtttgcgaatctccgacgtccgtttctcctcgccgtagaatcgccgttcattctttcgccgccttcagtcttccctccattgaccctttttttgaagaagagcgattacaagcgcaagtgtgtataatgacttaaagagagctcctgttactccgagtgatagatagtctacaattatatcttactctgagtgaaagcaatggcgtacggtggtccgtccatgaatccaccggctttgagtggagctgttcccgggtctgctaatctgaagcaagtgaaattggagagagaaagcgagctcaggatcgaagtctctgaagagcctctcaaactccgtgtgggtaacgggaacgctgaaatttttggctccgaactgcctcctgaaatatggcgtacctt

SEQ ID NO: 545 - DNA, 408 bp, Arabidopsis thaliana
  unsure at all n locations
  Clone ID: ARABLI-11-Q1-B1-B10
ctcgagaagaaatcggaaaactggagaaaccctaaatcgacgaaaaggagagacctttgaatcgaagcttggtgtgtttatactatgaagagtcaatggtctaattttcatcagattgggagaaactctttcttagctgcttctactgtttacgtttcaaacgaattcaacttcttaaacacttctcttcttaatcgaagaagcttctgttttgcagaaggagatcgatccagctttgtagtgttgaaatcggaagcagagttcaacagtgcattgagtaaagctcgagatggatctttgccatcggttttctatttcactgccgcatggtgtggaccttgcttatctctcctgtgatattggagctcaagtaataaatatcctgatgttacaacgtataaaggncga

SEQ ID NO: 546 - DNA, 452 bp, Arabidopsis thaliana
  unsure at all n locations
  Clone ID: ARABLI-11-Q1-B1-B11
taggcgtncgatgagagaganagtcgcntngacncgtacgtaagntcngaattcggctcgagagaaaaagaagagagaatgctctcagtctcagcctctcctcaccaccactaaccccagaagaatcctcnnnnnnnnnnnnnnnnnnnnnnnnnnnnnnnnnnnnnnnnnnnnnnnnnnnnnnnnnnnnacaacactagaggaatgggtnnnnnnnnnnnnnnnnnnnnnnnnnnnnnnnnnnnnnnnnnnnnnnnnnnnnnnnnnnnnnnnnnnnnnnnnnnnnnnnnnnnnnnnnnnnnnnnnnnnnnnnnnnnnnnnnnnnnnnnnnnnnnnnnnnnnnnnnnnnnnnnnnnnnnnnnnnnnnnnnnnnnnnnnnnnnnnnnnnnnnnnnnnnnnnnnnnnnnnnnnnnnnntggntttcccgccgtttcctcntctcgtctcaacgg

SEQ ID NO: 547 - DNA, 414 bp, Arabidopsis thaliana
  unsure at all n locations
  Clone ID: ARABLI-11-Q1-B1-B12
ctcgagcattactgctccaggcaaaggagatattccaacttatgtcgttggtgtcaatgcagatgcttacagtcatgatgaacctatcatcagcaatgcatcttgcactaccaactgtcttgctccctttgtcaaagttcttgaccagaaattcggtatcataaagggtacaatgacgactactcactcttacaccggtgaccagaggttgctagacgcgagtcaccgtgatctaaggagagcaagagcagctgctttgaacattgttcctacttctacaggagcaagctaaagctgtggctcttgtgctccctaaactcaaagggaaactcaacggggatttgctccccgtgttacaacaacaaaacgtnncaatgggttgatncccntggtgcaaggcccaaaagaaaaaan

SEQ ID NO: 548 - DNA, 407 bp, Arabidopsis thaliana
  Clone ID: ARABLI-11-Q1-B1-B2
cgaggtcggtttcgggtaaaggtacccttttgttgaaggtcgttcgagcttttcctgggagtatagcatgggttacttcagcgccgtagcgcctggtactcgaacattggctcggggcattttctctaccccttcttaccctgaaaaaacagggacaccttgcgtccttgaaccgataaccatctttcggctaacctagcctcctccgtccctcgggaccaacaaggggtagtacaggaatattcacctgttgtccatcgactacgcctttcggcctgatcttaggccctgactcaccctccgtggacgaaccttgcggaggaacccttgggttttcggggcattggattctcaacaatgtttgcgttactcaagccgacattctcgcttccgcttcgtccaacgcc

SEQ ID NO: 549 - DNA, 411 bp, Arabidopsis thaliana
  Clone ID: ARABLI-11-Q1-B1-B4
ctcgagctcatttcttcttcttcgctcagctccgacaacgaagggcgaagaaatctcgctccctcaatttcgcattgccatcgattttcttagaggttaaaatggttgaacagactcagcaccccacgattcttcagaaggtttctggccaactcttgagctcgagtgtttctcaggacattcgtggttatgcttcggcttccaaaaggcctgctacataccagaaacatgcagcttacggaaactactccaatgctgcatttcaatatcctcttgtggctgcatctcagattgcaactactacttctcctgtgtttgtccaagctccaggagagaagggatttactaactttgctattgatttcaagatgggtggtgtttccgctgctgtgtcaaagactgctgctgctc

SEQ ID NO: 550 - DNA, 414 bp, Arabidopsis thaliana
  Clone ID: ARABLI-11-Q1-B1-B5
tcgagggtttgtgagggtgtatctgaaaaaaaataaagtttggttgattcaaaaaatattcttatcctcggagttgcgatccaacgattggtttggaacgttccgaggagtctgttgaagatcctcgattctaaaaagcttccagaggacaataatttgtgacggagtaactctcgaggacatggaatgcaacaaggatgaagcgaaaagggcaatggatattgctgagaggaagatgacagagaaggattacactggggcgaaaaagtttgctaacaaggctcaaaacttgtttcccgagttggatggtctgaaacaattgtttgtggcaatcaatgtttatatctccgggagagaaaacattcgccggagaagctgattggtatggtgtccttggtgtaaacccctttgcta

SEQ ID NO: 551 - DNA, 410 bp, Arabidopsis thaliana
  Clone ID: ARABLI-11-Q1-B1-B6
ctcgagatccgaagcggttccacttgatctcgaaggtatgttggattcagaagaccaaccagagacggattctggactcagaaagcggcgattcgatttcaaaacccggtaaaactccttctccaaatgcttcatagctttccgcatcaaatcctgtcctttagcaagcttagcggagtccggattcatagcaacggtgctctgaatggcgtattgtaacttgccgagaacctcgaggaagcgtctgccttctaggcggttttgagcggagaagagggaagagaggctgcatgaagaagaagaagagtcgcagaggtgtggagtaacccattggcatatgaaggcgtcagctgcctccacactatcgccgattagagactcggagaagccctgttgctgttgcggcccga

SEQ ID NO: 552 - DNA, 136 bp, Arabidopsis thaliana
  Clone ID: ARABLI-11-Q1-B1-C6
ctcgagttttctttctatagttatttcctctttgccagaaagttttgtcttcactggcttgtgattgtaacaatgtaaacaattagattcttcaagaaaatagtgacttcaccttttccataaaaaaaaaaaaaaa

SEQ ID NO: 553 - DNA, 410 bp, Arabidopsis thaliana
  Clone ID: ARABLI-11-Q1-B1-C7
ctcgagctctgcaaaaaaaaaaaaaaaaaattcttcttttatggcattaacccttttgtctcacgaattatctgacctctgtatcggtaagccacctttacggtgtctctccgtcgccacagccaccgtagctgacgccatcgccgctctcaaatcctctgacgaaccgttcctcaccgtatggagctgtaatcacgatgagaaaacagatgataatgataagtgtgagtgtttgggtaagatctgtatggctgatgtaatctgttacctatccaaattcgacaacaatgttttgtctctttcctctgctttcgacgcatctgtctctgttcttcttcccaaatctcgtgccctcgtcgtccatgttcaatcttcttgcagtttgattgaagctattgatctgataatca

SEQ ID NO: 554 - DNA, 436 bp, Arabidopsis thaliana
  unsure at all n locations
  Clone ID: ARABLI-11-Q1-B1-D11
ccacccgttacgtaaaatcngaattcggctcgagaagaaatcggaaaactggagaaaccctaaatcgacgaaaaggagagacctttgaatcgaagcttggtgtgtttatactatgaagagtcaatggtctaattttcatcagattgggagaaactctttcttagctgcttctactgtttacgtttcaaacgaattcaacttcttaaacacttctcttcttaatcgaagaagcttctgttttgcagaaggagatcgatccagctttgtagtgttgaaatcggaagcagagttcaacagtgcattgagtaaaagctcgagatggatctttgccatcggttttctatttcactgccgcatggtgtggaccttgcttaactctcctgtgatattggagctcaataataaatatcccgaagttacaacgtataanggccac

SEQ ID NO: 555 - DNA, 422 bp, Arabidopsis thaliana
  unsure at all n locations
  Clone ID: ARABLI-11-Q1-B1-D12
cngaattcggctcgagaagaaaacacagagagagagagattcacttccccatttcagaaaatcaaaatgggtggtggtggtgatacaacagataccaatatgatgcagagagttaattcttcttctggtacatcgtcttcttcgatccctaaacacaatcttcacttgaatcctgctcttatccgctctcaccatcacttccgtcaccctttcaccggagctcctccaccgccgattccacccatttctccttactctcagatcccggcgactttacaacctagacattctcgctctatgtcgcaaccgtcttctttccttctcctttgattcattgccgccgttaaatccttctgctccgtcggtttcgggtgtccgtggaggagaaaaacgggtgccgggatttagtccntccgtttgcc

SEQ ID NO: 556 - DNA, 422 bp, Arabidopsis thaliana
  unsure at all n locations
  Clone ID: ARABLI-11-Q1-B1-D4
gtccnngcngtcttcncaccncttacaagacngtttttgtgttcaatttttgaggtagatatggaagtggttgctgttgggtcaatgaagacgcagagacaggagacatgggcttgctctgtcactgagtcttttctcctcctcgtcggaaagaatctggcttgtcttctccttgtggcagaatcattactgataggtttggttgctgttgaccagaggttgtctgtcaaggagggttacaaaagaggaagccgtattgangaaaacaaaagatgctaatgacaatnaacaataacgaanaanatgaaagacccgatgaaggaccaanatnatgaaggatgatgccnatgaatnaanatttcncaaggggggtgaaagggaatnaaaggagaaagaaaaaactgattcaaaangatgattct

SEQ ID NO: 557 - DNA, 410 bp, Arabidopsis thaliana
  Clone ID: ARABLI-11-Q1-B1-D5
ctcgaggttgaccgcgacgaatccgtcggaaaccggaatcaccatggattttcctccgacgaagcttgattatcatgtagacatgttcaatcttcagtctcattccagatttctctccttatttaaggcgcaagatggacgcatagctctaatactagaatcaacggtgtttcatccacaaggtggtggccagccgtcagacaccggtttaattgttttctccggttcggatttgaaattttccgttcaagatgttcgatcgaaagacggaattgttctccattacggagttttcgaaggttcgaatcctgaaagtggaattgatagtgagaaagggaaagaagtttacttaactgttgatgaatcaaggcgtaaactcaattccaaggttgcactcagctggacacttg

SEQ ID NO: 558 - DNA, 408 bp, Arabidopsis thaliana
  unsure at all n locations
  Clone ID: ARABLI-11-Q1-B1-E12
ctcgagctcagcctttgggcttcgttagtgttggtttgctttcagaatttaacttagttacggtaaaagcaatgcttagcgttatacgagtgcatctaccgtcggagattcctattgttggctgcgaacttacaccttacgtacttctccggcggcctgataagaccccctccaccgatgatgtgcctgagtcagccccgcttgaaggtcacttcttaaagtacagatggtttcgagtacagagtgataagaaagttgcgatttgtagtgtgcatccatccgagacggcaacattgcagtgtctgggatgtctaaagtctaaagttcctgttgccaaaagctancattgctctactaagtgcntttcggatgcctggcaaacatcanccgtgtntttgcatgacgtgc

SEQ ID NO: 559 - DNA, 482 bp, Arabidopsis thaliana
  unsure at all n locations
  Clone ID: ARABLI-11-Q1-B1-E2
atgttcnagggcgactagaagagannaacgtcgcgnncncgcgtacgtaaaaacgggaattcggctcgagcttccctgttttcacagcgatctttgcgtttccgcaagagcgaagcgatgttaaataaggagagagcagcggatatgtacagattaagcgcatatttcctagctcgaaccacgagtgatctccctctcgactttattctaccttctctcttccttcttgtcgtctatttcatgacaggtcttcggatcagcccatatcccttcttcttgagcatgctcacagttttcctttgcatcatcgcagctcagggactcggacttgcaattggtgccattttaatgggatttaaagaaggctacgaactttggcttcaagtaactgtcatgacantcatgctccccgggagggattcctcngcaaanaaagtggcgggtttcaanatcctgggtaacgttatccanccttcaaatta

SEQ ID NO: 560 - DNA, 408 bp, Arabidopsis thaliana
  unsure at all n locations
  Clone ID: ARABLI-11-Q1-B1-E4
ctcgagattcttgtgaataccttctttgagctagagccaaatgctataaaggccttgcaagaaccgggtcttgataaaccaccggtttatccggttggaccgttggttaacattggtaagcaagaggctaagcaaaccgaagagtctgaatgtttaaagtggttggataaccagccgctcggttcggttttatatgtgtcctttggtagtggcggtaccctcacatgtgagcagctcaatgagcttgctcttggtcttgcagatagtgagcaacggtttctttgggtcatacgaagtcctaatgggatngctaattcgtcgtattttgattcacatagccaaacagattcaatggcanttttaacaacggggattttaaancgggctaaaaaaaanaggtttgtgatc

SEQ ID NO: 561 - DNA, 408 bp, Arabidopsis thaliana
  Clone ID: ARABLI-11-Q1-B1-E7
ctcgagatcgaaccatcatcccggttcgattaggctaggtggtaccggtagtgttagaggaaattcagtaacaagtccgagcggtgactcggtacgagcagaccggtgggcttttcttagaaacccatcgtttctctggaggaatacgacgccggttccttcgccgagagttgaagtcaataataaggacggtgaaggaacatcgtcagttcaacatatcggtacagttggttcaactagcggttcccttaggctaccggtttagtgttcggtgatgttttgtgcattgttcataaacacgcaatagattttacgtaattctttaattttgtttgtccttttctgtaagatatttaaatcgacaatccaacggaaaaaggagattgttttacttaatttaaaaaaaaa

SEQ ID NO: 562 - DNA, 407 bp, Arabidopsis thaliana
  unsure at all n locations
  Clone ID: ARABLI-11-Q1-B1-F1
anaaangaatggattgggcnacttnaaatttnatnggaagaantncgttcaacaaacaaccttatctaattttcatctactgaatattttagtcctgcgttctctcaagcctctgcatcgtctatctttctctttctctgcctcagcaatggagagtgatgcatcttgtagcttagttttgtgtgggaaatcctctgtggaaactgaggtagcaaagggtttgaagaacaagaactctcttaaactcccagataataccaaagtttcactcattttagaatctgaggctaaagaatttggttaaagatgatgataattccttcaatccttcaatccttaagaactcnattataactcancggtttggacggtttctcaattggtccccgcgtttgtcctccantcac

SEQ ID NO: 563 - DNA, 410 bp, Arabidopsis thaliana
  unsure at all n locations
  Clone ID: ARABLI-11-Q1-B1-F2
ctcgagtgagaattctgatggttggtcttgatgctgctggtaagaccaccattttgtacaagctcaagctcggagagattgtaaccaccattcccactattgggttcaatgtggagactgtggngtacaagaacatcagtttcacagtgtgggatgtcggcggtcaggataagatccgtcccttgtggaggcattacttccagaacacccaaggtcttatctttgnggtggacagcaatgacagagaccgtgttgttgaggctanagatgaattgcaccnaatgttgaatgangacgatctgcgtgatgctgttctgctcgtatttgctaacaagcaagatntcccaaatgctatgaatgcagctgagatnacggntaagcttggtctccactctctccgtcanccgtca

SEQ ID NO: 564 - DNA, 410 bp, Arabidopsis thaliana
  Clone ID: ARABLI-11-Q1-B1-F3
agcatgaggggaagtcagaacagtggtgtactctcagtttttggaatcttacaaaagtgtgacagttgaagcaatggcaaaggcctttggcgtttctgtcgatttcatagaccaggagttgtcgcgcttcattgctgctgggaagcttcactgtaagatagacaaggttgcaggtgttttggagacaaaccgtcctgatgcaaagaatgcactttaccaggcaacaatcaagcaaggggatttcttgctaaaccgaatccagaagctgtctcgtgtgatcgatctgtgagcatgctacatgtttctgtttcactccttcgtcaaagctttgcaacttggaaactcccgaacggtaaaatcctaaaggtctgagaaacgatatgaactttggattttgagatgaatggctg

SEQ ID NO: 565 - DNA, 407 bp, Arabidopsis thaliana
  unsure at all n locations
  Clone ID: ARABLI-11-Q1-B1-F4
cncaagcaaagcaaaacccttctccttcttggcggctgcggcnatttttttcttctttctctcttcnattcnatctcttaaaccctagatttgatctgggtnnnnnnnnnnnnnnnnnnnnnnnnnnnnnnnnnnnnnnnnnnnnnnnnnnnnnnnnnnnnnnntggtcgcatccccttttatccgagaaggatctatccaaatctttgtttgtcgaatctcctctcatggctaccgttgctcctcctgctgatcaagctacagatctgttgcagaaactatccttggactcgccagcaaaagcttcaaaagattcctgagcctaacaagaagaatggcgtctaacaagtatggaggcgttgangttcaagggcnagttccttctaagatngatctttgacaacaaa

SEQ ID NO: 566 - DNA, 272 bp, Arabidopsis thaliana
  unsure at all n locations
  Clone ID: ARABLI-11-Q1-B1-G12
cgccgaggcggggaaaaccgtgatcacaacgatacatcagccctcgagtaggctcttccataggtttgacaagctgattctactaggaagaggaagtcttctctactttggaaaatcatcagaagctttagattacttctcttccattggatgctctcctcttatcgccatgaatcctgcanagttcttgctcgatcttgccaacggtaacatcaacgatatctctgtaccttctgagttagatgatagagttcaagttggcaattcaaggt

SEQ ID NO: 567 - DNA, 416 bp, Arabidopsis thaliana
  unsure at all n locations
  Clone ID: ARABLI-11-Q1-B1-G8
ctcgagngncaaaattggcngngganancatngtctcatcatcggtgtcggtaacagtcgcccacgaccttcttctanccggccaccgctatctagacgtcangactccagaagagttcagccagggacatgcctgtggggcgatcaacgtgccttagatgaatcnaggagcatcagggatgtcaaagaancccgacttcctggaacaagtctcctcccatttcggagaatccgataacatcattgttggctgccagagcggtggtagatctatcaangccaccaccgatcttctccatgcaggtttcacggggagtcaaagatatctcggtggctaanagtgcctgggccaaagaatgggcttcctaaaaanggcttgagtgactcaacaatcnacaaaaatccttttccttanc

SEQ ID NO: 568 - DNA, 440 bp, Arabidopsis thaliana
  unsure at all n locations
  Clone ID: ARABLI-11-Q1-B1-H4
cacgcttnttaaaacgggatntgggccnnntnncacnnacccaaaancnagngncttcaacttacccccatttctcgnganacccctagnaantccncctcttgttccgcnactgccgccgcngctactcaacggtggtgaattttctatacggtcagttcgatcctctttttatcgacaatcctacacaaatccataatcatggccgccactgcttcctccgaagcttctgaaggaccagtgatgggtctcatcaacaagcgtctccgtgctctccgtaagaaatacaaccgaatcactcaaatggaagaatcgatttctcaaggcaaaaccctaaacaaggagcaaagaagaagtcctccgctctaaacctgccgtcgtcatcctaatcgacgagcttgaaaagattcgtgctcctctctccgccgctgtgacagaag

SEQ ID NO: 569 - DNA, 218 bp, Arabidopsis thaliana
  Clone ID: ARABLI-11-Q1-B1-H5
ctcgagggaagatacaaatcatacaatcaccaatcagaaaaagcagaaccgtgactctgatgttctactatttcagtagcaactgtactgatccaccccaatgtattcacttactgtatatccacctatccaaaatttattcgtttgtatccattactttgtatcacgattcgaacacacctctctttttttttccccttttcaaaaaaaaaaaaaaa

SEQ ID NO: 570 - DNA, 412 bp, Arabidopsis thaliana
  unsure at all n locations
  Clone ID: ARABLI-11-Q1-B1-H6
ctcgagaaagaaacagaacaacaatggcgaaattaaatcgttccaacattggtctctcactgttactatctatgttcctcgcaaactttatcaccgatcttgaagcttcttctcatcaagatctcaaccaaccgtaccggaccggttatcactttcaacctctcaaaaattggatgaacgatcctaatggaccaatgatatacaaaggaatataccatcttttttaccaatataacccatacggtgccgtttgggatgtgagaatcgtgtggggacactccacgtcagttgacttagtcaactggatttcacaacctccagcttttaatccatctcagccgtcaagatatcaacggttgttggtcangctccgtcacgattctaccaaacggnaaacctgtgatcctctaca

SEQ ID NO: 571 - DNA, 456 bp, Arabidopsis thaliana
  unsure at all n locations
  Clone ID: ARABLI-12-Q1-B1-A2
catgcgtcnacgtcgactctaaannatcccctcggggaattccaattccacattttcaagaaataaggaggcaaaaatgttcatatatgaattggaattatttgttttcttattaggcctatcctgaagccaaaggaaatgagatcggaattcctcggggaattccaattccacattttcaagaaataaggaggcaaaaatgttcatatatgaattggaattatttgttttcttattaggcctatcctgaagccaaaggaaatgagatcggaattcctcggggaattccaattccacattttcaagaaataaggaggcaaaaatgttcatatatgaattggaattatttgttttcttattangcctatcctgaagccaaaggaaatgagatngggnattcctcgggggtaccgaactccgaantcccnaaagtggagtccgtattaaattcgtaat

SEQ ID NO: 572 - DNA, 429 bp, Arabidopsis thaliana
  unsure at all n locations
  Clone ID: ARABLI-12-Q1-B1-A3
cnttcggctcgagcaaaccaagacaatatttgatcaatttatcaaattctctcaacccctagtctaaacacaaaaatgaactccaatagtttcttaatctcagcagccttaatcttctctctactatcatcaaattctccaacatcgattcttgctcaaatcaatacaccatgttcaccatctatgctctctagcgttacaggttgcacgagttttctaacgggaggtggtagttttccgacctcagattgttgtggggctcttaaatcgttaaccggaaccggtatggactgtttgtgtctgatagtaaccgcaggtgttccaatcagtattcctataaaccgaactttagccatctctctccctcgtgcatgtggcattcctgggtgtccccgttcaatgcaaagcttctgcagcaactctccctan

SEQ ID NO: 573 - DNA, 432 bp, Arabidopsis thaliana
  unsure at all n locations
  Clone ID: ARABLI-12-Q1-B1-B3
angaattcggctcnnnnnnnnnnnnnnnnnnnnnnnnnnnnnnnnnnnnnnnnnnnnnnnnnnnnttgctacaatggaatccatcgtataaaaagggttcatcctctgattcactctctcacatttcatcgattctcctcatcttctcttccattcaaatctcacattccctcttcacaacaacagcttcgtattcgctcatcttcttcgctttctgatcttggaaatcgcaggcattgttcgtctactcgaggatttcaattttggtcatnnnnnnnnnnnnnnnnnnnnnnnnnnnnnnnnnnnnnnnnnnnnnnnnnnnnnnnnnnnnnnnnnnnnnnnnnnnnaccggcggttcgtatttccgacgggaatctaatcatcaaaaaccggacgattctaaccggtgtaccaagataatgtcatcacgaa

SEQ ID NO: 574 - DNA, 413 bp, Arabidopsis thaliana
  unsure at all n locations
  Clone ID: ARABLI-12-Q1-B1-B6
ctcgaggtttgattttttcgatctgagagcaagagaaaaccctttccatggcctcagcggcgatattctcatcgttacgacggaggagatcgccgtctttggaagcattcttagcccccgttgacctttccggcgtcgcacttgttcaaaccctagcttcaatctcttcggaggttgtttcttgtttcacctctgttcgattctcgtttcaacgcaagaacgctcgttctttgattcgtaagatcgagatctttgtcgtattattcgaatttctcgtagattcaaattggggctnnnnnnnnnnnnnnnnnnnnnnnnnnnnnnnnnnnnnnnnntctgtttctgaatcaacagctttgctttgtctcaaagagctttancttcctctctatcgttccaagatccttgttgat

SEQ ID NO: 575 - DNA, 67 bp, Arabidopsis thaliana
  unsure at all n locations
  Clone ID: ARABLI-12-Q1-B1-C10
ctcgnnnnnnnnnnnnnnnnnnnnnnnnnnnnnnnnnnnnnnnnnnnnnnnnnnnnnnnnnnnnnnn

SEQ ID NO: 576 - DNA, 410 bp, Arabidopsis thaliana
  unsure at all n locations
  Clone ID: ARABLI-12-Q1-B1-C3
atgcggcgcctcnactctaaaanatcccctcggggaattccaattccacattttcaagaaataaggaggcaaaaatgttcatatatgaattggaattatttgttttcttattaggcctatcctgaagccaaaggaaatgagatcggaattcctcggggaattccaattccacattttcaagaaataaggaggcaaaaatgttcatatatgaattggaattatttgttttcttattangcctatcctgaagccaaaggaaatgagatcggaattcctcggggaattccaattccacattttcaagaaataaggaggcaaaaatgttcatatatgaattggaattatttgttttcttattagggcctatcctgaagccaaangaaatgagatnggaattcctcgggggtanc

SEQ ID NO: 577 - DNA, 416 bp, Arabidopsis thaliana
  Clone ID: ARABLI-12-Q1-B1-C4
ctcgagagagaagttgggagccgattcactgagctccctagcattgctgtggaacgtggaagcgcaagcatgtttgaaggaataggttctcgatccggtggttcctttggaggaggcatgagggatcgtggttcaagctttggtggtcgttcaggcggtggtggttatggtggcagcagtggtggttatggtggtgggcgttcaggcggatcaagcaaccgttattctggtgattctgaccgttctggttttgggagcttcggtatgcgttctcctgagggatatggttcggatcgttcatctcagtcaggtggaaggagcagctttggtgggtggtcgttcaagcggatcatcaaacaatcgttcctctggtttcggggactttggctctgaccgttccttctcagtcaggcgga

SEQ ID NO: 578 - DNA, 417 bp, Arabidopsis thaliana
  unsure at all n locations
  Clone ID: ARABLI-12-Q1-B1-C6
ctcgagagaacaacaacaccaccaccaaaccttagccaagatcttggtctctctcttcacccatttcaagggaacaacaacacagtcgtagttcccgagaccaacaatttcaccacgactcatttcgacacgttcgggagaatctctggatggaatcatcacgacttaactatgacgtcatcatcctcatcagaacatcaacaacaagaacaagaagaaaggngtaatggtggtttcatggngannnnnnnnnnnnnnnnnnnnnnnnnnnnnnnnnnnnnnnnnnnnnnnnnnnnnnnnnnnnnnnnnnnagtgtttcntggtgggcaacaacaacaacaacaaaggggtncccttcagtccaatttaatcccnattcgtttcgttccttgggattatcaacaaacgaagtcgggt

SEQ ID NO: 579 - DNA, 414 bp, Arabidopsis thaliana
  unsure at all n locations
  Clone ID: ARABLI-12-Q1-B1-D1
ctcgagctaaaaactcctcctttcatttccanacaaaaacttctttttattctcacatcttaaagatctctctcatggcgatgtctttctcaggagctgttctcactggtatggcttcttctttccacagcggagccaagcagagcagcttcggcgctgtcagagtcggccagaaaactcagttcgtcgtcgtttctcaacgcaagaagtcgttgatctacnccgctaaaggtgacggcaacatcctcgatgacctcaacgangccacaaagaaagcttcagatttcgtgacggataaaacanangaggcattagnanatggtgaagaaancgaaagactatcgttgttgaagaanacanntgnaaccgcagatncattgggtnaaagaagcttaagaaaagctgcgggntatg

SEQ ID NO: 580 - DNA, 426 bp, Arabidopsis thaliana
  unsure at all n locations
  Clone ID: ARABLI-12-Q1-B1-D10
ctcgagaaaactctcaagaaacaatggatgcttcattgtctccattcgatcaccaaaaaactcaaaacacagagccaaagaaaagcttcattacctcactaatcactctccgttcaaacaacatcaaagaagacacatacttcgtctcagaactcaaacccacggagcaaaaatcacttcaagaactcaaagaaaagctctcagcttcatcctccaaagcttcttcaatgtggggagtctcactcctcggtggagacgacaaagctgacgtaatcctcctcaagttcctcaagagcaagagatttcaaagtagcaagactcctttgagaaatggcttgagaaagtgtttgggagttggagaagaagagtttcaaaagcaagagaaaattgncaagaangaagatttgggggttttaaaaggatttg

SEQ ID NO: 581 - DNA, 415 bp, Arabidopsis thaliana
  Clone ID: ARABLI-12-Q1-B1-D2
ctcgagagcatgacttgggacaaatctgactatttttggtatataacagacattacaatcggttccggtgagacatttttgaagactggtgattcacctcttcttacagttatgtcagctggacatgctcttcatgtgtttgtcaatggtcagctttcaggaactgcttatggaggacttgaccacccaaaactaacctttagccagaagatcaaactacatgcaggtgtcaacaagattgctcttctgagtgttgcagtgggtctcccgaacgttggtacacattttgaacagtggaataaaggagttcttgggtccggtcacattgaagggagtaaactcaggaacatgggacatgtcgaaatggaaatggtcctataagattggtgtaaagggtgaggctttgagtctcata

SEQ ID NO: 582 - DNA, 422 bp, Arabidopsis thaliana
  unsure at all n locations
  Clone ID: ARABLI-12-Q1-B1-D3
ctcgagatcaagtcatggagatttactttttatctagaggctcctctgttggatactggcgtggcgacattcggtacctgatggatgatgttcaagctcttaaacctactgtgttttgcggtgttccacgagtttacgacaaactatatgccggtataatgcaaaaaatatcagctagtggcttgatacgcaagaaactgtttgattttgcttataactacaaattgggaaatatgagaaaaggattctctcaagaagaagcttctcctcgtctagacagacttatgttcgataagataaaagaagcattaggaggaagagctcatatgttgttatcaaggagcancgcctctacctcgtcatgtanangagttcttgagaatcantcctgcctcctaatctcctctcaagggtatggattg

SEQ ID NO: 583 - DNA, 405 bp, Arabidopsis thaliana
  unsure at all n locations
  Clone ID: ARABLI-12-Q1-B1-D4
agagacaacgnagcatgccggccacgnccaatccaagaagattccccncggggaattcnaattcnanattttcaagaaataaggaggcaaaaatgttcatatatgaattggaattatttgttttcttattaggcctatcctgaagccaaaggaaatgagatcggaattcctcggggaattccaattccacattttcaagaaataaggaggcaaaaatgttcatatatgaattggaattatttgttttcttattaggcctatcctgaagccaaaggaaatgagatcggaattcctcggggaattccaattccacattttcaagaaataaggaggcaaaaatgttcatatatgaattgggattatttgttttcttattangcctatcctgaagccaaaggaaatgag

SEQ ID NO: 584 - DNA, 418 bp, Arabidopsis thaliana
  unsure at all n locations
  Clone ID: ARABLI-12-Q1-B1-D7
ctcgaggcacgatcagacatgtcgggttttatgcaaacctcgtttttcttcggatacatggcttgcatttgctacggattcttcttaatgctcggaacagttggcttccgcgcagccctcctctttgtccgtcacatttaccggtcgatcaaatgcgagtaagaaggtctgtacaccaannnnnnnnnnnnnnnnnnnnnnnnnnnnnnnnnnnnnnnnnnnnnnnnnnnnnagaacaaagaagataaagagataggttgttagaaagaagagagacacanagacaatgtctgattattttctaaagaagcatctcttctcattagaggttttancgagaagtctctcttcttctcctctttaatttggggctacaagaaattaaaattacttgtatcctttccaataatagtttaac

SEQ ID NO: 585 - DNA, 429 bp, Arabidopsis thaliana
  unsure at all n locations
  Clone ID: ARABLI-12-Q1-B1-E4
cggaattcggctcgagggaaaaacctccttgatgaatcaatatgtgcataagaagtttagtatgcagtataaagcaacgattggtgctgattttgtaaccaaggagcttcagattggggaaaagcttgttactttacagatttgggatactgctggacaagagagattccagagtcttggtgctgctttttatagaggagctgattgttgtgctttggtttatgatgttaatgtgttgaggtcttttgataatctcgaaacttggcatgaggagtttcttaaacaggcaagtccatcagatccaaagacatttccgtttatagtgcttggaaacaagattgacgtanatgganggagcagtagagtggnctctgataagaaaagcagctgactgggtgtgcctcaaatggtaacatanccctaattccg

SEQ ID NO: 586 - DNA, 419 bp, Arabidopsis thaliana
  Clone ID: ARABLI-12-Q1-B1-E5
ctcgagctttctctctcagcttacgaacaagaaaaaaagaagaatctttagccacctttgagatcaaaagatgaacatcgctcacactatcttcggcgttttcggaaatgcaactgctctgtttcttttcttggctccttcgataacattcaagagaatcatcaagaacaaatccactgaacaattctctggtatcccttatccaatgactctcctcaactgtctcctctctgcttggtatggacttccctttgtgtcaaaagacaacacacttgtgagcacaatcaatggcacaggagcagtgatcgaaacagtctacgtgttaatctttcttttctacgcaccaaagaaggagaaaattaagatctttggtatcttctcttgcgttttgggctgtattcgcaacagtagctctccgt

SEQ ID NO: 587 - DNA, 429 bp, Arabidopsis thaliana
  unsure at all n locations
  Clone ID: ARABLI-14-Q1-B1-A8
ctcgagaaaaagaaggtcattttcattttctccatttgatttttgccgaccggagaaaatatcttcttgccgtcttcttcttcatttcaccaggaacttttatttgaaatcggtttgatttagccatggcaaacgcggcatcgggaatggctgtgcatgatgattgcaagctgaaatttatggaactgaaggcgaaaagaacattccgtaccatagtctacaagattgaggataagcaagtgattgtagagaaactcggtgaacctgaacaatcatatgatgacttttgcagctagtccttccaactgaatgatggccgataattgcatttacgaattccaacttgnnaactgcgggagaactggccaaaaagaagcaagattcttccttcaattgcaaggggtctcccggacactggccaaaattgag

SEQ ID NO: 588 - DNA, 406 bp, Arabidopsis thaliana
  unsure at all n locations
  Clone ID: ARABLI-14-Q1-B1-A9
ctcgagctggaattacattctctggagctgatattggtgggttttttggaaatcctgaaccagaacttctagttaggtggtaccaagtgggtgcttactatccatttttcaggggtcatgctcatcacgataccaaaagacgagagccttggttgtttggtgaacggaacacagaactcatgagagatgccatacacactcgttacacactgctcccatacttctacacgttgttcagagaagcaaacgttacgggtgttcctgttgtacgcccattatggatggaattcccgcaagatgaagctacttttagcaacgatgaagccttcatggtcggtagtggtctactggttcaaggagtttacaccaagggaacaacgcaagcttccgtgtanttgcctggcaa

SEQ ID NO: 589 - DNA, 429 bp, Arabidopsis thaliana
  unsure at all n locations
  Clone ID: ARABLI-14-Q1-B1-B10
cgcgtacgnaaactcggaattcggctcgagttattaactaaagagccttttacntgcgccacactctcaccgcantggccgcctcgacaanggntctctcctctcctgctttgaccggaaaggncgttaagctatccccggcggnctccgaagnatttggaaccggccgaatcancatgcgcaaagcctccaagcccaccggtccatccggcancccatgggacggatncgaccgagtcaagtacttgggtccattctccggtgagcctccgagctacctcactggaganttccccggtgattacgggtgggacactgccggtctatccgccgatnccganaccttcgctaggaaccgtgagctanaanttatccacatcagntgggccatgctcggagccctaaggtgcgttttcctgagctattggc

SEQ ID NO: 590 - DNA, 406 bp, Arabidopsis thaliana
  Clone ID: ARABLI-14-Q1-B1-B11
ctcgagcaagaggaaacagagatgagcagagacggcggagatgtaattgagacggcggttaagagtcttggcaaaggtttcgatttgacggcggatttccggttgaaatactgtaaagacggcgacggctccgccggagatgacagattggttgtgcttgaccaaactcaaaacagagaattgcatattcctggtttcggtgtttttcaaaatgtctccgccgatataaactgcgacaaaggagaacgaactcgattccgttccgacattcttgacttcaacaagatgtcggagtattttaaccaagaggtcgtcggtgaccggaaaaataccgtcgggaaatttcaacgcgacgttcgggtttcaaagcgggtcatgggcgacagacgccgcaaacgttaaatct

SEQ ID NO: 591 - DNA, 419 bp, Arabidopsis thaliana
  unsure at all n locations
  Clone ID: ARABLI-14-Q1-B1-B5
ctcgagagtttcgacgcctctctattcttcgatctctttcatatttgaatcgttcaccttcttgccgatcttcggagtatattacaaggttcttaacggatctctaaatcttctgatttaagaagatgcttcctctatcgctgcttaaaactgctcaagggcatcctatgctcgtggagcttaagaatggagagacatacaatgggcatttggtgaattgtgatacttggatgaacatccatctgcgtgaagtcatatgtacatcaaaggacggagatagattttgggaggatgccggaatgttatatcccgtggtaacacaatcaagtaccttccgagttccgggatgaggtgattgataaagtacaaggaggagaaagacacgccacaagatagaaaancaacaaggtggttggacg

SEQ ID NO: 592 - DNA, 404 bp, Arabidopsis thaliana
  unsure at all n locations
  Clone ID: ARABLI-14-Q1-B1-B9
ctcgagaggggttagcccagtcttgtcagtaatcatcaaagttgggactcgctccagttctttggatcatgatcctgctgcttctgctcgtatatacgaattcggttgttttggcatccaatctgccaaagttaacgactgggattggtgcgcttgcatggctgggattcattcttgcaactgcaggattatttttgttctaccgctgtagcaggaaggatccaggttacatcagaatgaatatccatgatccgcaaaccatgaaagatgatgaaccactcttaaaaatagagctaaacaatcctgctttgcttgctgggaattggacacagctctgtgcaacatgcaagattatcagacctcttcgagctaagcactgttccacctgtgatcgttgtgtanag

SEQ ID NO: 593 - DNA, 417 bp, Arabidopsis thaliana
  unsure at all n locations
  Clone ID: ARABLI-14-Q1-B1-C1
ctcgagaaaaaacaatggcggataagctcactgacgatcagattacagaatacagggaatctttcaggttattcgacaagaatggtgatggttccattacgaaaaaggagctcggtaccatgatgcgttcaatcggtgaaaaaccgacaaaagctgatcttcaggacttgatgaacgaagcggatttagatggtgatggaaccatcgatttccctgagttcttgtgcgtaatggctaagaatcaaggtcatgatcaagcgccgcgtcacactaaaaaaacaatggcggataagctcactgacgatnagattacaagagtacagggaatccttcaagttattccacaagaatgggtgatgggtccaatacgaaaaaagggctccgttaccgtggagttttccctccggaaaaaaacgg

SEQ ID NO: 594 - DNA, 419 bp, Arabidopsis thaliana
  unsure at all n locations
  Clone ID: ARABLI-14-Q1-B1-C2
ctcgagcatccttcaagaacacaaagctagacagaaaaaaaaaaatgtgttcctcaaaattaaaaaatctgacccaagaaaacatttctcagatcaacggccgtccggttcttcaaccgaagtcgaaccaagttccgacattagaccgacgtaactcactaaaaaaatcgcctcctaagcctttgaatccaattgcatcaaagataccctcaccaagaccaatttctctaatctctcctcctttgtctcccaacacaaaatccttaagaaaaccggccggttcttgcaaggaacttcttaggtctaagctctacaaaatcgaaaccagtgatatcaccaagagaacagtgatgggggntacaaagaggttatgcctaaggtgattgttcaaaagcagcctggaagtatagcagctgcca

SEQ ID NO: 595 - DNA, 417 bp, Arabidopsis thaliana
  unsure at all n locations
  Clone ID: ARABLI-14-Q1-B1-C4
tcgagaacatgaggaaagtaacaaaaggaaatgttaaacccnaccgtagggatcttggtggtcaaccaagattccgcagcatgtgggaacgttactgtcgcgctgtttctgccattgtgtatgtagttgatgctgcagatcctgacaacctaagtgtgtcgaaaagtgaactccatgatttgttgagcaagacttcgcttaatggtatccctcttctcgttcttgggaacaagattgacaaacctggagctctgtccaaagaagccttaacagacgaaatggggacttacatcacttacagatagagaantctgctgtttcatgatatcatgcaagaactctaacaaanattgatnaagtcattgattggctcgtaaagcattcaanagtccaagnactaatcctcancaaagaaca

SEQ ID NO: 596 - DNA, 410 bp, Arabidopsis thaliana
  Clone ID: ARABLI-14-Q1-B1-C5
ctcgagtccgaatccaattgcttcaattgatttcagaggaactatagttgggattaaaccggctccggttattgcttctttctccggtagaggaccaaacggtttaagcccggagattcttaaaccggatttgattgctcccggagttaacatcctcgccgcatggacagacgctgttggacctacaggtttgccgtcagatccaaggaaaacggaattcaacattctctccggtacttcaatggcatgtcctcacgttagtggtgcggcggcgcttctcaaatccgctcatccagattggagccctgccgtgatacgatcggcaatgatgacaacgactaacctcgtcgataactctaaccgctcgttgatcgatgaatccaccgggaaatcggctacgccttaagatt

SEQ ID NO: 597 - DNA, 432 bp, Arabidopsis thaliana
  unsure at all n locations
  Clone ID: ARABLI-14-Q1-B1-C6
ctcgaggctcaacattgttctctgactctataaataactgttcttggaaattttccaagagaacaagaaacaaaaacaaaacgttgtttaagtgtggttctatagatttcttgtgaatgtcttctgaacaaggaaatggatcgaatccttccacgtcaccggaggtagaagggactaaaacaatcccctttcgccggagattgcaaagaggacaaagagttttcgctccaaagctgatggaggctctacgtcgatcaagggtaagctctgaagaagctccggtaaggcatcttagtcgtagattggaaaagccacaaacgcccaaaaaggtanattcccctaaagntcctangangcctccttcnaacgatttgcgggcggaaccgccaacanttccgggggacaacgggccgaacaaaantcccttgcgaa

SEQ ID NO: 598 - DNA, 418 bp, Arabidopsis thaliana
  unsure at all n locations
  Clone ID: ARABLI-14-Q1-B1-D2
ctcgagtttctcgtcgaagaagcttacagatcttcttaacgtggcacgtgtaaccccggctgttaaccaagttgaatgtcacccagtttggcagcaacaaggtcttcatgagttatgcaaatccaaaggagttcacttatctggttactctcctttgggttcccaaagtaagggagaagtcaggctaaaggttcttcaaaacccgattgttaccgaggttgctgagaaacttggaaagaccaccgcccaagtggctctccgttggggactccaaactgggtcatagtgttctaccaaaagagctcgancggggctcggctcaagganaatcntgatgtttttgactggtccaaaacggnaagattcggtttaacaaagttccccaacaatccccaggagaagttttgccganctactg

SEQ ID NO: 599 - DNA, 418 bp, Arabidopsis thaliana
  unsure at all n locations
  Clone ID: ARABLI-14-Q1-B1-D3
ctcgaggcttgaaannnnnnnnnnnnnnnnnnnnnnnnnnnnnnnnnnnnnnnnnnnnnnnnnnnnnnnnnnnnnnnnnnnnnnnnnnnnnnnnnnngagaatgtcttctacaacaatcggcgagcacatcagactccgacgagctagaaaccaaacaatccgtcatctccacgccgccgacgatgatccgccgctaagccacgtcgttcttccgatttcacaacctaatcgcttctgtaactccgcaatgtcttccttctttcccctcccgacttcctcctccaacgaaagcacgaggaagaaaccgtaccaaacgtcgtcgtttcgagggatgggttgctatgccgcaagcaagcaagcaagcaagctcaagaggtttctgttccctccgtcattcgctactccgcgggatttgga

SEQ ID NO: 600 - DNA, 421 bp, Arabidopsis thaliana
  unsure at all n locations
  Clone ID: ARABLI-14-Q1-B1-E10
ctcgagctgggctcagcttggagctggagagagacgccaggctgaagggcctgagcacacagtttttgttggagacttggcacctgatgttaccgaccacatgcttactgaaacgtttaaagctgtgtattcctctgtcaagggagctaaagttgtgaatgataggactactggacggtccaagggttatggatttgtcaggtttgcggatgaaagtgagcagattcgtgccatgactgaaatgaatggtcaatactgctcatcaaggcctatgcgtactggtcctgctgccaacaagaagcctcttacaatgcaaccaacttcaataacaaaaacactccaagggaanttaaggngaaaattgttcaaactaacannaacaatttttggttggnacccttttggttttaaaattgtaaan

SEQ ID NO: 601 - DNA, 405 bp, Arabidopsis thaliana
  unsure at all n locations
  Clone ID: ARABLI-14-Q1-B1-E11
ctcgagatccaaagaacctggtaccgagagtgctgatgtgtctttacaccaattagctgatatccagcccgggccatccattttggttgatcaaatggatactgaaaaatccaaagaacctggtaccgagagtgctgatgtgtctttacaccaattagctgatatccagcccgggccatccattttggttgatcaaatggatactgaagaattcaaaaatcctgatgtgtctttacaccaattagctgatattgagccctcactgtctatttcagctgtgcaaaagaatattgaggataaggatcaaagtcacgttgaaactgctggatctgagttagttgatgtctccgccgaatgttcaacagaacctcaagttcaattacggcatcntcaaagccaatggga

SEQ ID NO: 602 - DNA, 413 bp, Arabidopsis thaliana
  Clone ID: ARABLI-14-Q1-B1-E3
gagcttcgaattggtggggatagttctctctctattcatttacctttgagatggtaggggattcttgaactcatgattacagagggcgtaaggtttgaagcggagaggcatcagggataaagtagagattcaaacagtttcagggtttcaaacaggataacagggatacacatgattaaaagtttgaaaagggttacaaaacagaattagagagtaaaagcagagacactaccgggatgcatagagaagatacctccacttctcggtgaggtgaaaacagttgaaaacgccggaaaaaggtcactgggaactccatctttgcccgttgtgtaaagccatttttgggaaggaactgttggataattctgttttaataaaaagagtaactgaagatctggtttttcaaaagtttc

SEQ ID NO: 603 - DNA, 411 bp, Arabidopsis thaliana
  unsure at all n locations
  Clone ID: ARABLI-14-Q1-B1-E5
tcgagcggctgcgttctcgacttgggttcgtcttcttcttctttctattcagattcacaataattgccaagcgaacaagtctttgcctctttggtttactttcctctgttttcgatccatttagaaaatgttattcacgaggagtgttgctcggatttcttctaagtttctgagaaaccgtagcttctatggctcctctcaatctctcgcctctcatcggttcgcaatcattcccgatcagggtcactcttgttctgactctccacacaagggttacgtttgcaagaacaacttattcattgaaatctccggtttttggtggatttaagcaatcaactctatcaacanagtaactccttgggttgangaagaacttgacccaatttcgcctggttgccgatgaactgtcac

SEQ ID NO: 604 - DNA, 419 bp, Arabidopsis thaliana
  unsure at all n locations
  Clone ID: ARABLI-14-Q1-B1-F10
ctcgagctctttcttgtatttattttcctcccaaaaaacatctttaagagtcctcatggcgatgtctttatcaggagctgttctcagtggcatgggttcttctttccacaacgtaggagcaaagcagagtggtgttggtaccgtcagagttggccggaagagtgagctcgtcgtcgttgctcagcgcaagaagtcgttgatatacgccgttaaaagtgacggcaacatcctcgatgacctcaacgaagccacaaagaaagcttctgatttcgtgacggataagacgaaggaggccttggcggatggcgagaaaacaaaagactacattgttggagaaaaacaattgaagncaaatgaaactggcaatganggaagctaaaaaaacctttggattnagttgacctgagaaaagggaaaag

SEQ ID NO: 605 - DNA, 410 bp, Arabidopsis thaliana
  Clone ID: ARABLI-14-Q1-B1-F11
ctcgagctcgagccgaattcggctcgagaaaaacgccaaataaatggttttgatctcgtgaagccaaatcgccattagtcaccaccttaaatgactcacctagtatatatatatatgcaccatatgagtttgatcaatctcattcaatacaatggctgaagaaaagatcaagaagagcttgcttgctgcggacgacagcgacgatgagtactcaagaggtgatacagtttcagatcagacagaactgagttcgattcttgataaacttagtctagaacctaagacggagaaaaagaaactcttggtcttgagtctaagtggtcttcttcttcacagagtccacaaaaaagagttgcgtaagaaacccaaagaaccgctctcctggatgcctcctggtggggcaaatcctg

SEQ ID NO: 606 - DNA, 409 bp, Arabidopsis thaliana
  unsure at all n locations
  Clone ID: ARABLI-14-Q1-B1-F2
ctcgagagactgtacggtccgtttgtgttgacagatggagacagtctcgtgatggaagccaagaagctagtcttgtactacacgacaaacaaaactccgaaaccaatcgcttattttgaatacgaattcttcaccaagataacacaattccagtcaatgacgttccaagctgtggaagattccgacacaacgtggggtctagtcatggaaggtgtcgattctggttctaaattcaacgtttcaacgttcctctcacggccgaaacacaacgcgacgttgagttttattcggttagaatcagacggaaacatcagagtttggagttacagtacgttgggcgacttcacgggctgggacttgacatacaccgggtttaacaaagccgacactgaagggtaacgaanaagtg

SEQ ID NO: 607 - DNA, 416 bp, Arabidopsis thaliana
  unsure at all n locations
  Clone ID: ARABLI-14-Q1-B1-F6
ctcgagctcctccaatggcgcctcagcttctctcctccagtaacttcaaatctctctttgactctgtcgatacgttcctcttcgactgcgatggtgttatatggaagggtgaaacgctcatcgatggcgtctcccaaactctcgaccttatccgttctaagggtaaaaatgttgtctttgtgaccaacaattccgtaaaatcgaggaggcaatacgctgaaaagttccgatctttgggtgtcacttctattactcaggatgagatcttctcttcgtcatttgcggcagctatgtatctcaaagtcaataactttcctaaggacaagaaggttaaggtgaattggtggaaaagggtgtccttgaaggagctgcaanattgccggtttaaaaggcctgggtgggtcctgaanatggtg

SEQ ID NO: 608 - DNA, 472 bp, Arabidopsis thaliana
  unsure at all n locations
  Clone ID: ARABLI-14-Q1-B1-G10
gattatccagccgnactataganaagacatgacgtcccatncacgcgtacgtaaactcggaattcggctcgagcggtgttatatcttcctgccttgaatgtttccttgccggaggtgatctctatgtctttgagtacagtgtttcccctgctatctttcttgccaaacctcgaggcggcgtatgcactatagcatcttcagatcctccagaagaagtcatctatcgagcaaattttctcttgcaaaatggttttggtgtgtacaatgtcttcaagaacaactgtgaagattttgccatctattgcaaaacgggtttgctagtggcaaacaccgacgtgggaaggagtggtcaagctgcttcaattgttgcagctgccaagtgttcttctttcctcaccactcangtttgtaacaagttttgggtggnttggctgtggctgggctaagggatgtactgcaacaagtccnctta

SEQ ID NO: 609 - DNA, 406 bp, Arabidopsis thaliana
  unsure at all n locations
  Clone ID: ARABLI-14-Q1-B1-G11
ctcgaggtgctagcttgggggccatctggactagcagtggtcgacggtttatccaatctattgaagtgtcgtctaccagcaacaatacggtgcctttcacacccaagtgcacacgtacgtgccttaagcacgtcagtactacgtgatatcatgaaccaaagctccatacccatcaaagtaactccaaaactgccaacaacagagaagaacggaatgaatagtccgtcctatcgattcttcaacgccgcctcaatagactggaaagccgatatccaaaactgtttaaactgggaagctcacagcttgctctccacaactatgcctactcagtttctcgacactgcggctcgggaactcggctgtactanatccttgtcccaataacgaacaccacttttggttttgg

SEQ ID NO: 610 - DNA, 423 bp, Arabidopsis thaliana
  unsure at all n locations
  Clone ID: ARABLI-14-Q1-B1-G2
ctcgagctttcgataaacccagatcgaaaaatcagatttttccagatcaatcagagagttagagatggagtataataacaacaatcagcaatctttttggcagttcagcgaccagctgagagttcagacaccgaatctagcgaatctgtctctcaacgactcgatctggagcacaaactctgtcttcaaagagcgtcgaaacttagacatagccgccaccaccgacaagaacaacaaccagatcgactattatcagaagaagacaacttccgacaacatcaattccaactgggaactgggaagtcttctggttcaaaacaacgacatggggttaaggatccganctgtggggtcaaaatccaacgtcgatttaaacccaatccgacaaattcaactcaaccgttcaacgacacgtgggaaaat

SEQ ID NO: 611 - DNA, 434 bp, Arabidopsis thaliana
  unsure at all n locations
  Clone ID: ARABLI-14-Q1-B1-G5
ctcgaggaacacgttctctgggattgacaactacaaattgatcttctgggcacttagatttcatggcaagattctcttcagggatatctcacttgagatcttcagggtttggcaaccatcagagaacatgattctcatcaggtggaatcttaaaggtgtacctagagtcccatgggaggcaaagggagagtttcagggtacttctcgctataaactcgaccgaaatggcaaaatctatgagcataaggtcgataacttggccttcaacttccctcaccaagctcaaacctgccacttctgttttgggatatgggtcaccgcttgccctggcaaagtcccaaatccaaactttcaatgttttgggcgccaatgggattcatactcatccttccntggganttgaagtttctacaaaagcaattgcaaaagggaca

SEQ ID NO: 612 - DNA, 410 bp, Arabidopsis thaliana
  Clone ID: ARABLI-14-Q1-B1-G7
ctcgagactactttcagtgttctcttcttctccactaattcagatcacattcaagaatcttcttcactcacatctctgaaaaaatggcgagcaacatggaagttttctgcgagatcttaatcgcgatccttcttccacctcttggagtttgtctcaaacgtggctgttgcactgtagagttcttgatttgcttggtgctgacaatcttaggatacatcccagggataatttatgcactatacgtgatcgtgtttcaaaaccgtgaaggctctaccgaacttggagctccacttaactcagcttgatctgttttggtccattacacggatcaatatgttgttgaaactgttttacttatcatgtaccaaataataagttgctttgcaatttttatgtattgaagatttgag

SEQ ID NO: 613 - DNA, 411 bp, Arabidopsis thaliana
  unsure at all n locations
  Clone ID: ARABLI-14-Q1-B1-H10
ctcgaggatttcttgataagaaatcacctagatcaagtcaattggcaagagatatcactgtgagagcagatctttcaggagctgcaacccctgactcttcttttcctgaaccagagattaagttgagctcaagactcagagggatattcttttgtgttgttgctggcatttcggctacttttctcattgtcctgatgattattgggcatccgttcgtccttcncttcgatccctataggagaaaattccaccacttcattgctaaactttgggcttccataagcatttanccgttttacanaatcancatcgagggtttggagaatctggcatcatcangacactcctgctgtatatgtttcaaaccaccaaagtttctggatatctacacacttcttaagtcttgggaaa

SEQ ID NO: 614 - DNA, 417 bp, Arabidopsis thaliana
  unsure at all n locations
  Clone ID: ARABLI-14-Q1-B1-H12
ctcgaggcggggccaaatggagatttctgaggccatggacatcagaacaagacaagggttgcttaatgccctagcgggaaaagttggcaaaagaatggacagcctcctggtgcctttagaattgctatgttgcgtgtctcgtaccgagttctctgacaagaaagcatacttacgctggcagaaaaggcagttaaacatgttagcagaggggctcattaacaatccagttgttggatttggagaatcaggtcgtaaggcaactgacctgaagagtcttctgctaaggattgaagaatcagagtctcttccatcctcagctggagaagtgcaaaagagcagaatgtttaaaatctcttagagaanttgctatctcactttgctganaaaaccggctcnttggtgatttgaccggttgaa

SEQ ID NO: 615 - DNA, 491 bp, Arabidopsis thaliana
  unsure at all n locations
  Clone ID: ARABLI-14-Q1-B1-H3
gatccatgtgtagnctagaagagtgcnnacgtcgcgtccacgcgtacgtaaaatnggaattcggctcgagagcaaaaccgcgagctctcatggcttccggcggcaaagattccgatcgtaccttagggtacatgacacggaaagatacagaagtcaagcttccaagacctactcgtgtcaagaacaaaactccggcgccgattcaaataactgccgaacagatattaagagaagctcgagagagacaagaagctgagatccgtcctcccaagcaaaaaatcactgattccactgagctttccgactacagactccgccgggngaaaggaatttgaanaccaagattcgtcgcgcgagatggaacattcaagtttgggtcaaatacgctcaatggggaaagagtcacaagaaagattacgctcgtgctcgaaagttgttttgggaaccaagccatanaaaggnngattatagggaaccatacgctttggntc

SEQ ID NO: 616 - DNA, 432 bp, Arabidopsis thaliana
  unsure at all n locations
  Clone ID: ARABLI-14-Q1-B1-H6
ctcgaggaaaaaaaatatgtannnnnnnnnnnnnnnnnnnnnnnnnnnnnnnnnnnnnnnnnnnnnnnnnnnnnnnnnnnnnnnnnnnnnnnnnnnnnnnnnnnnnnnnnnnnnnnccgctggacgtcgaaacaacctgcctcgtccaaacctcagaagacgatgtaaggtcaccgcttcacgggctaatattgaacaagaaggtaacacagtgaaagaacccattcagaatattaaagtaaagggatacataacggcccaagaagagtttctggagggcataacttggtccaagaggtctcgatgacattgctggatatccgcgggnanantaattgctccgtcgagcttattancgccaangactggaccaaacggganttacgggtagaagantangncanaacngtgttatggggcccaaagncccct

SEQ ID NO: 617 - DNA, 413 bp, Arabidopsis thaliana
  Clone ID: ARABLI-14-Q1-B1-H7
ctcgaggtttttttcagttcttcccggaagcaaatgaagtcaaatttgctcaaaagacagtctttggaggaacttacttcaagttggactatctaacaaaaccatctctttttgaggattttggtttctttgagagagtaaaaatggcagatcgagtgaagccagaagacgaactgtttcttgtcgcatacccgtattttaatgtcaacgagatgcttgtagtggaagagctctacaaggaagctgttgtgaacactgaccgaaaactaatcatcttcaatgggagaacttgaccgcatacgatcggggttgtatcctttttcttctcataaatgaaacaaagtagattcctttttccatttgcatcacaacttgagaaccaaatgagaaagctgaatcaagagagagagact

SEQ ID NO: 618 - DNA, 414 bp, Arabidopsis thaliana
  Clone ID: ARABLI-15-Q1-B1-A5
ctcgagcgaacgatccgagcttttttttccggcggcaattgggagattttgtggaagatcatagttggttctcttctcgattcttaggggttttagagacttggtgctcttgatttcgagtgatcatacagtattacaaggcatggacaaatcgagtggtttggatttcatcaaccagatgttcccagtagaagcttctctatcttgtgttgagtcttttatgcaaaagatttgtgacgagattcggcgagttgatgctaccattttagctgttgttagtcaacagggtaactccggaactagagctaaagaaaatcttaatgatgccatatgtgctgcggaggaactctctcataagatacaagagataaaatcaaaagccgaacaaaaccgaagcaatggtccaagacatat

SEQ ID NO: 619 - DNA, 417 bp, Arabidopsis thaliana
  unsure at all n locations
  Clone ID: ARABLI-15-Q1-B1-A7
ctcgagctgagaagtttggaaggccccaaaacagaggtttcgcttacgtcgacttcaccaacaagaaggcactgaaagaggcaattggtctcagcgagcagctcatgactggccgccgtgtactcatcaaagacgcaaagaacttcgagggtcgtcctgacaagtctgagagggaagcaaatgcctccggcgccgccgccaagtccggtcaccccccgtccaagcggctcttcgtcggtaacttgagcttcgatgtcaccaaggaggccctcgaggaaaatttcagcaagtgtggaacagtcaacaacgtgcatatggctaccttccangacacaggaaaatgcaagggatatgcttgggtggaattcgaagagcttgccgcancaagaagcagcggtgagangatcatgctaatga

SEQ ID NO: 620 - DNA, 422 bp, Arabidopsis thaliana
  unsure at all n locations
  Clone ID: ARABLI-15-Q1-B1-A8
ctcgaggaagttgttaaattgtcgcctcatgctcgtgccattagagatgttgaagatgatgagcttcgaggtttctttcaaggaatgtcagcttggcagtttatcttagtagttactgcaagttcagttggagaagagctcttctatcgtgctgcgtttcagggtgcactagctgatatattcctaaggggcacagatcttatctcggattctcgaggaatggttgctttgactggactcttgccaccatttgtaccatttgctcaaagtatttgcanccactaataaaagccgctctcacnggntcccccaacnacatagctgcttcccctaaagatccaacttanataannggaaccgggtcttgaaaactcnctctgcccgaaaacaacctgaanaatttgtttgcaccgtggtatnac

SEQ ID NO: 621 - DNA, 201 bp, Arabidopsis thaliana
  Clone ID: ARABLI-15-Q1-B1-B11
ctcgaggctgcccaggagggagacactagttaagatatagctttaaagggaggaaaaaaaaaatgtagtaatggaaacaatgtgagggatataatctatctatctagtcccaaagggtaagcaatattttgttgttatgtctttgtagcaatgcactgaaagctatatttaattacattgctgtacaaaaaaaaaaaaaaa

SEQ ID NO: 622 - DNA, 373 bp, Arabidopsis thaliana
  unsure at all n locations
  Clone ID: ARABLI-15-Q1-B1-B2
tcgagnnnnnnnnnnnnnnnnnnnnnnnnnnnnnnnnaagtacttcgtcttacattacaaatcttatttacacatgtaagtttttccatctaagnngctaataataccacaaaccgtaatataacgtccatttggtcacattctacacattacacaacagacatcatcagcagtccaatgcgacggtaaaaaccttttaaaagtaacggcggttacatatatattacagactttatttaactttttttaaacttattttttttcttttactcatacgangcnaatgacancatcaagcatccacanatccacctcggaanagggactcatcaagcngagccggtggcccgccgtggtaacggtcanctcaagg

SEQ ID NO: 623 - DNA, 426 bp, Arabidopsis thaliana
  unsure at all n locations
  Clone ID: ARABLI-15-Q1-B1-B3
gggagagacaagatgcatgcgnccaggtcgactctagaagatcccctcggggaattccaattccacattttcaagaaataaggaggcaaaaatgttcatatatgaattggaattatttgttttcttattaggcctatcctgaagccaaaggaaatgagatcggaattcctcggggaattccaattccacattttcaagaaataaggaggcaaaaatgttcatatatgaattggaattatttgttttcttattaggcctatcctgaagccaaaggaaatgagatcggaattcctcggggaattccaattccacattttcaagaaataaggaggcaaaaatgttcatatatgaattggaattatttgttttcttattangcctatcctgaagccaaagggaatgagatcggaatccccnggggtaacg

SEQ ID NO: 624 - DNA, 433 bp, Arabidopsis thaliana
  unsure at all n locations
  Clone ID: ARABLI-15-Q1-B1-B4
ctcgagcgaagaagattctccttctctccgtcagacaaatctacgaacaagcgagcctgagcttaagaccaaactcatagagatgggtttcttctcttntcttggaagagttctcttcgcttctctctttatcctctccgcttggcaaatgttcaatgatggtggtcctgcagctaaagaattggctccaaagcttgatttggttaaggcacatttatcttctagattaggagtaacattgcccaaaatagaggtgagacaagtcgttgctactattattgccctgaaaggagtcggaggcttactctttgttatcggaaacaccttccggtgcttatccttctggcttcctactttggtggtttttcggtccctaatcctcctatgaatttctacaaactaacggacctcaaggaacgttaattttctcctc

SEQ ID NO: 625 - DNA, 531 bp, Arabidopsis thaliana
  unsure at all n locations
  Clone ID: ARABLI-15-Q1-B1-B9
gggggaatgtatccnaccgcgtcnagggcgatatnantcgcatggncncgtacgtaagctnaagaattcggctcgagcaaaagaagaagagaaacaacaagaagaagtaatggcttcctctatgttctcctccaccgctgtggttanctccccggctcaagccaccatggtcgctccattcaccggcttgaagtcatccgcttctttcccggtcacccgcaaggccaacaacgacattacttccatcacaagcaacggaggaanagttagctgcatgaaggtgtggccaccaatcggaaagaanaagtttgagactctancttacctccctgaccttagtgacgttgaattggctaangaagttgactaccttctccgcaacaagtggattccttgtgttgaattcnaattggnncacgggtttgtgtaccgtnagcangaaacactcccggatattaatgatggacgataacggntcaatgttngaacctccaattggtccggatgcaaccgaacccgctcaaattttta

SEQ ID NO: 626 - DNA, 465 bp, Arabidopsis thaliana
  unsure at all n locations
  Clone ID: ARABLI-15-Q1-B1-C10
gagattcccgatcagatctcaacgacgacgagccatggcttcaactttcagcggcgatgaaactgctcctttcttcggattccttggcgctgccgccgctctcgttttctcctgtatgggagcagcgtacgggacagcgaagagcggggttggtgtagcgtcgatgggtgtgatgagaccagagcttgtgatgaaatcgattgttcctgttgttatggctggagttttaggtatttatggtttgatcattgctgttatcatcagtaccggaatcaaccctaaggncaagtcctactatccattccatggctaagctcaatctcctcctccggtccntgccttgtggtccccgctggtcctcctccgccggtatggctaatggaaattgtccggcgatgccggtgttaaagccaatgcacaacaacctaagttgtttgtgggaatgattccgaatcccaaccttgc

SEQ ID NO: 627 - DNA, 457 bp, Arabidopsis thaliana
  unsure at all n locations
  Clone ID: ARABLI-15-Q1-B1-C11
agatttctctggatttttcaaaaatgtttctccaatcgcaaaaactatggacgatgcttctaattctagcgatttggtcaccaatttcacactcgcttcacttcgatctacactcaggtcgcacaaagtgtatcgccgaagacatcaaaagcaattcaatgactgttggtaaatacaacatcgataatcctcacgaaggtcaagctttaccacaaactcacaaaatttccgtcaaggtgacgtctaattccggtaacaattaccatcacgcggaacaagtagattcaggacaattcgcattctcggctgttgaagcaaggtgattacatgggctggttcactgctgttgatnaaaagccctgaaggttcnttggagtaattgactttgagtgggaagactgggggtcaaaccaaaagccggggtaaagttgctaaaaagaatccagtccaagtttat

SEQ ID NO: 628 - DNA, 421 bp, Arabidopsis thaliana
  unsure at all n locations
  Clone ID: ARABLI-15-Q1-B1-C6
ctcgagctcgagccgaatcggctcgaggattactttaaggagccgagttctgcagcggaaccaagcgagagttctcagaaagcgagtcagtttcaggagcaagagttagctcagggtcgtgggacggctaatgtggtgcctcaacctatgtgggcggttgcgccagggactacgaatggaggtagtgcgttctggatgcttccgatgagcggttcgggtgggcgggagcagatgcagcagcagcctggtcaccaaatgtgggcgtttaatccagggaattatccagttgggacaggacgagtagtaactgcaccaatggggtcaatgatgttgggaggtcaacagctaggattaggagtggcagagggcaacatggcggctgcaatgcctggcaattanaagcgatggtttgggccatgac

SEQ ID NO: 629 - DNA, 380 bp, Arabidopsis thaliana
  unsure at all n locations
  Clone ID: ARABLI-15-Q1-B1-D1
ctcgagccaaaacctcccaccgtgaaaccccatcctaaaccaccaaccgtcaannnnnnnnnnnnnnnnnnnnnnnnnnnnnnnnnnnnnnnnnnnnnnnnnnnnnnnnnnnnnnnnnnnnnnnnnnnnnnnnnnnnnnnnnnnnnnnnnnnnnnnnnnnnnnnnnnnnnnnnaaccaagcctcctccgtccacccctaaacctcccaccaaacctcccccgtccacacctaaacctcccacgacnaagcctcctccgtctactccgaaacaacccaccacangcctccggctacaacatggccaacnagaanaccaaggncgnatccaacagttgttanaacggcnatacaacccanccgtcattagtcaacaagcanc

SEQ ID NO: 630 - DNA, 460 bp, Arabidopsis thaliana
  unsure at all n locations
  Clone ID: ARABLI-15-Q1-B1-D10
ctcgagcttgttctctttctcatcgcctcttgattcacgcgaacgagaaagcgacgatcgtaaccaccggcgctgaccaaaaagtaatcgattctcttcccgagctgatctctcaggtgtcttgaatctgaatctgtggctatatttggtgctcggtggtgagcaggaagggagggggatattgtcagggttttaatgtacgtcagatgaatagagcaactaatgttactggcagtagaaggagggggtttattctcagcgtccgcgtctgggtatagtaagggattgacccttcttttctctggtgataaagacgtanataggcccatgagagttgtcccgtggaatcactaccangtggttgaccaagagcctgangctgancctgttcttcanctggattctattaagaancgantttcccgcggttgccctgcttccttnaattgttttgggggcg

SEQ ID NO: 631 - DNA, 460 bp, Arabidopsis thaliana
  unsure at all n locations
  Clone ID: ARABLI-15-Q1-B1-D12
cgagagcaaatccgagagcttagtgtgaagtgaagaagagtttcaatggcggcaattttttctctcttccttttcttcattctcttcatcgtctctcttctcancatcttatctttcatcgtacggccaagatccgtcacgatccccatcaagtttcgccacgtcttcatcaccggtggatcaagcggnatcggtctcgctctcgctcancgtgccgtctccgaaggcgctaaagtctccatcctcgctcgttcaactgaaaagctcgccgaagccaaacgatccatccaagctagctaccggtgtcgaggtcgccacgttctctgcggacgttcgcgattatacgccgtttcgaaagcnattgatgaatcgggaccgattgangtgttgantgntaatcaangngtgtttaatgggaaagagcttnaaaaacaangtcctgaangaaggtaaatttatg

SEQ ID NO: 632 - DNA, 421 bp, Arabidopsis thaliana
  unsure at all n locations
  Clone ID: ARABLI-15-Q1-B1-D3
tcgagttcatgcttcaaaccatggttatggcctcaagtggatctaatgtgaagtggagccagaaacgttatggaccaggaagcctgaaacgtacccantgcccatcggaatgtgataggaggtgtaaaaagacacagtaccanaaggcttgcattacgttctgcaacaaatgctgcaggaagtgtctctgtgtgcctccgggttactatgggaacaaacaangtttgctcctgctacaacaactggaaaactcaagagggtggaccaaaatgcccttgaaaaaatctcncttcgntcccnttttanaataaaanttttcaactatnactaaatttcctttgatnaatgttttatntactnaatcctaangttgtnatgttangtcactcngtttccggatttgatccaaatccctaaaaaa

SEQ ID NO: 633 - DNA, 383 bp, Arabidopsis thaliana
  unsure at all n locations
  Clone ID: ARABLI-17-Q1-B1-D6
tcgaggacgcggagaaggctactgataagactaatgtccatctctcctcggaccatgagcgttgtccggtggaggaagtggctcttgttgtgcctgagacggatgatccaagcctaccggtgatgacattcagagcttggttcttgggtctgacctcttgtgttctgctcatctttctcaacacgttcttcacataccgtacgcagccactcaccatctcagccatcctcatgcagatcgctgttttgcccatcggcaagttcatggctcggactcttcccaccacttctcacaaccttcttgggtggagttttaacctcaatcctggtccttttaacatcaangnacatgtcaattaacanncatcctttggcaaattgggg

SEQ ID NO: 634 - DNA, 449 bp, Arabidopsis thaliana
  unsure at all n locations
  Clone ID: ARABLI-17-Q1-B1-E1
gagctcatcttcaagccatctccgatcatcatcagacaatggcagcagctatggcaacagcaaccaagtgcatgtctctaaacccatctcctcctaaactccaaaaccaaaccaaatccaaaccattcatctccctaccaaccccaccaaaaccaaacgtctctctcgccgtcacaagcaccgccctanccggagccgtcttctcttccctcagctactctgagccaagctttagccatccaaacagatcgctcagctcgctgcaagcaaacgccagtagcgacaaccgtggcttagctcttctccttcccatcgtcccagccattgcatggggtccttaaacatcctccaancaagctntttaccaagttcaacaaagaatgcnttgagaattaaanggtancctttgttgggccaangnaattggnggggngggccttggcaccgtc

SEQ ID NO: 635 - DNA, 455 bp, Arabidopsis thaliana
  unsure at all n locations
  Clone ID: ARABLI-17-Q1-B1-E2
tcgaggaaaaatgccggctgggacatggagttcgagcgagaacgagggatctgttcgcgaggcctttcaggaagaagggttacattcctctatcgacttacctgaggaccttcaaggtcggcgattacgtcgatgtgaaggtgaatggtgcgatccacaagggtatgcctcacaagttctaccatggtcgtactggtcgtatctggaacgtcaccaagcgcgccgtcggtgttgaagtcaacaaacagattgggaacaggatcataaggaagaggattcatgttcgtgtggagcatgtgcagcagtcaagatgtgccnangaattcaaagctgaggaaagaaagaaaaacgatgaactcaaaggctgcaanccaaaagccaattggtgagaacatcancaaccaaagngancaacctaaaagggncccaaaccaaggtttcagggnccaagggaa

SEQ ID NO: 636 - DNA, 437 bp, Arabidopsis thaliana
  unsure at all n locations
  Clone ID: ARABLI-17-Q1-B1-E7
gagctacacaatcacattagccaaaaccatggcctcctcaagtctccatttcttcttcttcttgacacttctcttgccattcactttcaccaccgccacacgtgacacatgtgcgaccgccgctcccgatggttccgacgacctctcaatcatccccattaacgccaaatgctcacctttcgcacccactcacgtctctgcctccgtgatagacacggtccttcacatggcctcctcagactcccatcgactcacctacctctcaagcctcgtcgccggcaaaccaaaacccacctccgtccccgtcgcctccggtaatcaagctccacatcggaaactacgtggtccgagccaaaactcggnactcctccanaagctaatggttcaagggcctaanaaacaagttaacgangccgttttgggtcccttgccccngg

SEQ ID NO: 637 - DNA, 437 bp, Arabidopsis thaliana
  unsure at all n locations
  Clone ID: ARABLI-17-Q1-B1-F1
tcgagactttgagcaacttgctaaaaagcttgaagatgcttctccacttgaaatcatggataaagctcttgagagattcggagaccaaatcgcaattgcttttagtggagctgaagatgttgcattgattgaatatgcacgtttaactggaaagccatttagggtttttagtttagatacagggagattaaaccctgaaacgtacaggctctttgacgcagtcgagaagcagtacgggattcgaattgagtacatgtttcctgatgcagttgaggttcaagctttaagtgaggaacaaagggtttgttctcattctaagaagatgggtcatcaaagagtgttgcccgtgtgaaggaaagttagacctttgcgtcctgcccctaangggcnttaaagcntngnttacaagggcaaaanggaaaaaaccaatcncccgg

SEQ ID NO: 638 - DNA, 406 bp, Arabidopsis thaliana
  unsure at all n locations
  Clone ID: ARABLI-17-Q1-B1-F2
cgaagtgaaaagatgagctgcaatggttgccgtgttctccgggaaaggttgcagcgagaattgtatcctccggccatgtattcaatgggattgaaaccgccgatgctcaaggccacgccaccgtcttcgtcgctaaattcttcggccgtgctggtctcatgtcctttatctccgctgttccggattctcaacgtcctgctttgtttcagtcgttgctctacgaagcttgtggaagaactgtcaatccagttaacggagcaatcggaatgttatggactggaaactggaatatctgtcaagcggctgttgaaacagtgcttcgcgggggttctttaagaccgattccggagcntctcaatcacggggggggtttccccgggttttccttggccaaaatttaanaaac

SEQ ID NO: 639 - DNA, 442 bp, Arabidopsis thaliana
  unsure at all n locations
  Clone ID: ARABLI-17-Q1-B1-F4
cgccngccagagacaaacttacatgcctgcaggtcgactctagaggatcccctccggggaattccaattccacattttcaagaaataaggaggcaaaaatgttcatatatgaattggaattatttgttttcttattaggcctatcctgaagccaaaggaaatgagatcggaattcctcggggaattccaattccacattttcaagaaataaggaggcaaaaatgttcatatatgaattggaattatttgttttcttattaggcctatcctgaagccaaaggaaatgagatcggaattcctcggggaattccaattccacattttcaagaaataaggaggcaaaaatgttcatatatgaattggaattatttgttttcntaatangcctatcccgaagccaaagggaaatganatttgggaatcccccngggggtaccgaact

SEQ ID NO: 640 - DNA, 425 bp, Arabidopsis thaliana
  unsure at all n locations
  Clone ID: ARABLI-17-Q1-B1-F5
agcctcaatttccaagcagagatgacggtgaagataaggctcgcgcgtcttggttgtaaacaccgacccttctatcgtgtagttgtcgccgatgaaaaatcgcgcagggacggtaaacaaatcgaggtgttaggcttttatgatccactccaaggcaaagaagatgcggatagagtgagcctcaaattcgacagaatcaagtactggttatctgttggagctcaaccaacagacacagtggaaagcatgcttttcagggccggtttgatancaccaaagcctatggtagtgggtcggttcgaaaaatgggcagaatctacgagccaacatgtttcacccattacangtgaaatcntgaactaaaaantgttgatgcgttnagcaanaaanaaccntttggggccggttttaaaaggatttaagtt

SEQ ID NO: 641 - DNA, 421 bp, Arabidopsis thaliana
  unsure at all n locations
  Clone ID: ARABLI-17-Q1-B1-G1
gagagcttccaccgaatcgtcgttgtatcaactgcaatagccttggccctcaatatgtttgcacaactttctggaccttcgtatgcatggcttgtagcgggatacaccgcgaattcactcatcgtgtgaaatctgtgtcaatgtcaaagtttacttctaaagaagttgaagtacttcaaaatggtggtaatcagcgcgcccgagaaatatatttgaaaaactgggaccaccaacgacagaggcttccagaaaacagtaatgctgagagagttcgcgaatttatcaaaaatgtgtatgtgcaaaagaaatatgcaggcgcaaatgatgcgggcaagcccttcgaaaagatancaggacaagttaagttctgaagatatgacacnacgggcaaantcctaacaatcctaatcccaaagncctc

SEQ ID NO: 642 - DNA, 405 bp, Arabidopsis thaliana
  unsure at all n locations
  Clone ID: ARABLI-17-Q1-B1-G3
gagattcctcttcaaaggcaaacaatttacacagctatatatatatttttagggtttttgagtatctcgcgaggttttacatagatttctccattatggattcgatgatgaatcagaagactgttttggctgtgacggatgatgtggtgttacctgttagctctgttttagctataatgaaagagcttggaaaggaagtgattgagagttttgatcctctgattattactcaagcatccacaataaatcagtttcctttggatgcttcctctgtggaggcggtattanccatttccaaaacatctgatttcccaaagtgataaaatatgtggtgaattctcaagaaaccttgaaacctggcggcacgggtttcggtgtgcaaanttttggangggttaaaacggg

SEQ ID NO: 643 - DNA, 439 bp, Arabidopsis thaliana
  unsure at all n locations
  Clone ID: ARABLI-17-Q1-B1-G4
cgagcgaagaagattctccttctctccgtcagacaaatctacgaacaagcgagcctgagcttaagaccaaactcatagagatgggtttcttctcttttcttggaagagttctcttcgcttctctctttatcctctccgcttggcaaatgttcaatgatggtggtcctgcagctaaagaattggctccaaagcttgatttggttaaggcacatttatcttctagattaggagtaacattgcccaaaatagaggtgagacaagtcgttgctactattattgccctgaaaggagtcggaggcttactctttgttatcggaaacaccttcggtgcttancttccggcttcctactggtggttttcggtcctaatcccnaagaattccaaaactanngncctcaagggangtnaattncccccctccggttaaaaaatttctgg

SEQ ID NO: 644 - DNA, 438 bp, Arabidopsis thaliana
  unsure at all n locations
  Clone ID: ARABLI-17-Q1-B1-G6
ctcgagtctcattctctctcgctctggcacagtagaaactgagctcacgaaagcaggtagtcagtgtttttgtttcgaactcttccaacatgcagaaggaaattgctggtgatgctccatcagcaccaaccactcgtgttcggcatcggaagcgaaacagcgatgttggtgcaggggcaggcaaaccaaatggaaaccatttacttgtcaatgacagcaaaaaatacaaatcgtttctcattcgagcatactccactttctggatgataggtggttttgctcttatagtttacctgggtcatctctacattacagccatggtggttgttattcagatattcatggnacgagaactttttaatttgctgagaaaaactcatgnagatnaanaaatcccngggtttnaantnnagngaaattgggaatttctttttaana

SEQ ID NO: 645 - DNA, 400 bp, Arabidopsis thaliana
  unsure at all n locations
  Clone ID: ARABLI-17-Q1-B1-G7
ctcgagacagaggaaagcatctcgtctagaaataactatttgaacaatggaggaatatggagtatgtccggtatgaatgcagcagatgctagaagatatagcatgagtgtccagatgtacagaggtggaggtggcggcggaggatctgaaagaccaagaactgctcctccagatttgccttctttgctattggatgctcgcatatgctaccttggcatgccaatcgtacctgcagttactgagttactcgttgctcaatttatgtggttagactatgataacccaacaaagcccatctacttatatataaattcacccgggacccagaatgagaagatggaaactgttggatnagaaacagaggnttatgccataacccatacnaattcctaatgccaat

SEQ ID NO: 646 - DNA, 439 bp, Arabidopsis thaliana
  unsure at all n locations
  Clone ID: ARABLI-17-Q1-B1-H1
gagtataagttatgaaaggtaatcgaaaagtatgcggattcagtggaaggatgaaagaaagagagaaaaaattgaatattaatgatatattattccaatttggaaagtctatgaggtcactgtaagaaaagcaatgtaataaagcatcaatacagattcattcagaataattagataaatctgttccgaaaacaaaaaaaatttaagagccttgagccaataaaaactaagaaaattgactcaaaaacaaataaaaaaaatgaaattcccgatttcatataagagctccattgtagaattcgggcctaatgattaatcaagaagcgatgggaacgacgggaaccatgaatatagagggatccaattggaaaattaatctaanaantcaattgggcaanggttgngggataaacccannnttattaccaatcctaatttt

SEQ ID NO: 647 - DNA, 438 bp, Arabidopsis thaliana
  unsure at all n locations
  Clone ID: ARABLI-17-Q1-B1-H4
cgaggagttccccggtgattacnggtgggacactgccggtctatccgccgatcccgagaccttcgctaggaaccgtgagctanaagttatccacagcagatgggccatgctcggagccctaggctgcgttttccctgagctattggctaggaacggagtgaanttcggagaagcggtttggttcaaggctggttcacagatcttcagcgacggangattggactacttgggcaacccgagcttggtccacgctcagagcatcttaaccatttgggctactcaagttatcctcatgggaactgttgaaggctacaaantcccccggagatngtccaattgggagaaagcagaggacttgccttaaccaagttgggagcttcnacccaattgggcctcgctaacggacccccaagggnttccccggatttaaaggtaang

SEQ ID NO: 648 - DNA, 381 bp, Arabidopsis thaliana
  unsure at all n locations
  Clone ID: ARABLI-17-Q1-B1-H5
gagtagcaaggtatcattggttagagctgtgtcgtacatggtggctcagtgtctcggagccacttgtggagttggtttggtgaaagtcttccagtcgacttattacaaccgctacggtggtggagccaacatgctctccgacggatacaatgttggcgttggggttggtgctgagattatcggcacttttgtcctcgtctacaccgtcttctccgctaccgaccctaagcgaaatgcccgtgactctcacattcctgtattagcaccattgccaattggattttccgtgttcatggttcatttagccacaattccaattactgggcaccggaataaacccggctangagttttgganctgccgtcatccanaacaatcaaa

SEQ ID NO: 649 - DNA, 155 bp, Arabidopsis thaliana
  Clone ID: ARABL1-032-Q1-E1-D10
gccgacaacaagtttcccctttttttttggttgctcatttgtttgaagagtacaacgctaaacagaacagagaaagtaaaatcaggagggaaactagcgccacagagtaattcaagtttcatgaacaatggagaagacaagcacaaccttcaaaa

SEQ ID NO: 650 - DNA, 300 bp, Arabidopsis thaliana
  Clone ID: ARABL1-032-Q1-E1-F7
caacagaagtccctaacactgggatgccaaaaacaagtttcccctttttttttggtttctcatttgtttgaagagtacaacgctaaacagaacacacaaaataaaatcaagagggaaactaaaccaaaaactaatttaagtttcatgaaaaatggagaaaacaagcacaaccttcaaaagccaataacccttattaatactgatatttggtcaacttcatcagaagaccaatatctcaaactgttccactctcgcaccacagaccagcacaaaatcacaagtagatccgaacctgaaccg

SEQ ID NO: 651 - DNA, 320 bp, Arabidopsis thaliana
  Clone ID: ARABL1-025-Q1-B1-C5
gcaagcagtaagtaggagactacagtatgattacctcccacgcatttggatgacaaggttacagtacctcacttaggcaatcttggacccaagcgtacagggctgtcaaaggaccaatctgactacttcagcattccaattgcgggaccatacaatcctcatcaccagaggtacttgatagagatagagagtcgacttcgcggttcatgttcggatccacatgtagttttgtgttgggttgtggtgggagagtggaacagtgtcagatattggtcatcggacgaatttaaccaggtatcagtactagtacgggttattgg

SEQ ID NO: 652 - DNA, 307 bp, Arabidopsis thaliana
  Clone ID: ARABL1-01-Q1-E1-G6
gccgaaaacaagtttcccctttttttttggtttctcatttgtttgaagagtacaacgctaaacagagcacacgggataaaatcaagagggaaactaaaccaaaaactaatttaagtttcatgaaaaatggagaaaacaagcacaaccttcaaaagccaataacccttattaatactgatatttggtcaacttcatcagaagaccaatatctcaaactgttccactctcccaccacaacccaacacaaaaccacaagtagatccgaacctgaaccgctttgtcgactctctctctctctcagtacctg

SEQ ID NO: 653 - DNA, 314 bp, Arabidopsis thaliana
  Clone ID: ARABL1-032-Q1-B1-D10
ttgacatgcttggacttgagacttaccctggtgtgaagcgtatcaccatcaagccacagactgacaggtgggtgttcccagagaccaaggctggaatcattgtcttggctgagggtcgtctcatgaacttgggttgtgccactggtcacccaagtttcgtgatgtcgtgcacgttcaccaaccaggtgattgcccagctcgagctctggaacgacaaagcaagcggatagtaccagaagaaggtgtacgttcttccccagcattttgatgacaaggttgcattagtctcacttgggcaagcttggagccaggcg

SEQ ID NO: 654 - DNA, 368 bp, Arabidopsis thaliana
  unsure at all n locations
  Clone ID: ARABL1-03-Q1-B1-A3
aagcaagcggaaagtacgagaagaaggtgtacgttcttcccaagcatttggatgagaaggttgcattacttcacttgggcaagcttggagccaggcttacaaagctgtcaaaggaccaatctgactacgtcagcattccaattgagggaccatacaagcctcctcactacaggtactgagagagagagagagtcgacaaagcggttcaggttcggatctacttgtggttttgtgttgggttgtggtgggagagtggaacagtttgagatattggtcttctgatgaagttgaccaaatatcagtattaataagggttattggcttttgaaggttgtgcttgttttctccatttttcaaganacttaaat

SEQ ID NO: 655 - DNA, 361 bp, Arabidopsis thaliana
  Clone ID: ARABL1-021-Q1-B1-H2
gttcgacaacttgtatggttgccgtcactcactccctgatggtctcatgagggccactgatgtcatgatcgctggaaaggttgctgttatctgtggatatggtgatgttggaaagggttgtgctgctgccatgaagactgctggtgctagagtcattgtgactgagattgatcccatctgtgcccttcaagctttgatggaaggacttcaggttcttacccttgaggatgttgtctcagaagctgatatctttgtcaccaccaccggtaacaaagacatcatcatggtcgaccacatgacgaagatgaagaacaacgctattgtgtgcaacattggtcactttgacaatgagattgacatg

SEQ ID NO: 656 - DNA, 378 bp, Arabidopsis thaliana
  Clone ID: ARABLI-06-Q1-B1-C9
tctgtcaccaagagcaagttcgacaacttgtatggttgccgtcactcactccctgatggtctcatgagggccactgatgtcatgatcgctggaaaggttgctgttatctgtggatatggtgatgttggaaagggttgtgctgctgccatgaagactgctggtgctagagtcattgtgactgagattgatcccatctgtgcccttcaagctttgatggaaggacttcaggttcttacccttgaggatgttgtctcagaagctgatatctttgtcaccaccaccggtaacaaagacatcatcatggtcgaccacatgaggaagatgaagaacaacgctattgtgtgcaacattggtcactttgacaatgagattgacatg

SEQ ID NO: 657 - DNA, 400 bp, Arabidopsis thaliana
  Clone ID: ARABL1-032-Q1-B1-F7
cggctcgagccacgccgccgcagccatcgctcgtgactccgccgctgttttcgcctggaaaggtgagactcttcaggagtactggtggtgtaccgagcgtgctctagattggggtccaggtggtggtcctgatctgattgttgatgatggtggtgacgctactcttttgattcatgagggtgttaaagctgaggagatctttgagaagactggtcaagttcctgatcctacttctactgataaccctgagtttcagatcgtgttgtctattatcaaggaaggtcttcaagttgatcctaagaagtaccacaagatgaaggagagacttgttggtgtctctgaggaaactaccactggtgttaagaggctttaccagatgcagcaaaatggaactcttttg

SEQ ID NO: 658 - DNA, 408 bp, Arabidopsis thaliana
  Clone ID: ARABL1-01-Q1-B2-G6
gaacaacgctattgtgtgcaacattggtcactttgacaatgagattgacatgcttggacttgagacttaccctggtgtgaagcgtatcaccatcaagccacagactgacaggtgggtgttcccagagaccaaggctggaatcattgtcttggctgagggtcgtctgatgaacttgggttgtgccactggtcacccaagtttcgtgatgtcttgctctttcaccaaccaggtgattgcccagctcgagctctggaacgagaaagcaagcggaaagtacgagaagaaggtgtacgttcttcccaagcatttggatgagaaggttgcattacttcacttgggcaagcttggagccaggcttacaaagctgtcaaaggaccaatctgactacgtcagcattccaattgaggg

SEQ ID NO: 659 - DNA, 373 bp, Arabidopsis thaliana
  Clone ID: ARABL1-023-Q1-B1-D2
ggcgtttgctgcccagaaggtcgttgaagtgaacgctttggccaaggctttggctggtcagaaggacgaggctcttttctctgccaatgctgcggctttggcttcaaggagatcttccccaagagtcaccaacgagggtgtccagaaggctgctgctgctttgaagggatctgaccaccgtcgtgcaaccaatgttagtgctaggctagatgctcagcagaagaagctcaatctcccaatcctaccaaccacaaccattggatccttcccacagactgtaaagctcaggagagttcgtcgtgagtacatggccaaaaaggtctcacaggaggacaactttaaaccaatcaaggaaaaattcacaaaatttgtt

SEQ ID NO: 660 - DNA, 384 bp, Arabidopsis thaliana
  Clone ID: ARABLI-14-Q1-B1-H1
ccaaggcaatgaccgtcttctggtccgcaatggctcagagcatgacctctcgcccaatgaagggtatgcttactggtcccgtcaccattctcaactggtcctttgtcaggaacgaccagcccaggcacgaaacctgttaccagatcgctttggccatcaaggacgaagtcgaggatcttgagaaaggtggaatcggtgtcattcagattgatgaggctgcacttagagaaggactaccactcaggaaatccgagcatgctttctacttggactgggccgttcactccttcagaatcaccaactggtgagtccaagacagcaaccagattcacaatcaaatgtgctactcccacttcaaagacatcatacactccatcatcgaca

SEQ ID NO: 661 - DNA, 243 bp, Arabidopsis thaliana
  Clone ID: ARABL1-027-Q1-B1-G5
aaaaataaaaaaaaaaaaaaaaaaaaaaaaaaaaattaaaaaaaaaaaaaaaaaaaaaaaaaaaaaacatggggtaatagaaaaatagggccggcccccacctattaacctcttcaccccggaatttatttccggccttttcctgcttgggttaccagttttcctaatgttaatccctttcatcccttgggttatccagggacaaaatttttcctggtttaaattttttacccgtcgcaattt

SEQ ID NO: 662 - DNA, 223 bp, Arabidopsis thaliana
  Clone ID: ARABL1-025-Q1-B1-A12
aaaaaaaaaaaaaaaaaaaaaaaaaaaaaaaaaaaaaaaaaaaaaaaaaaaaaggcagacaaaaaataaaaaaactaattaaactgggaataaattaaagtggggtacggggaggaattcttcctttccctgtaaagattggttttactgcttgcattcatcgtcgtcggtggctgtttcgtgtgtgcaattgttagccgctcattgttggatacagtcattt

SEQ ID NO: 663 - DNA, 342 bp, Arabidopsis thaliana
  Clone ID: ARABL1-028-Q1-B1-C12
acttgcggtaccactaagctcctcctctctatcccatcacttctaaagctggctggtgagctctctctgagtgtcaagtctgtgaagtacactcgcggttccttcctctgccccggaggccagccttttcctcaccgcagcttctctgaagaagtctctgttcttgatgggcactttactcatctgggcttgcagagcgtagcctacatgatgggcaatgatgatgatagtaacaattggcatgtctatgctgcctctgccgatgactctagcaagtgcaacaacaatgtctatacactcgacatgtgcatgactggactggacagacagaaagctgctgtc

SEQ ID NO: 664 - DNA, 297 bp, Arabidopsis thaliana
  unsure at all n locations
  Clone ID: ARABL1-028-Q1-B1-A2
attaccaaatcatcaacttaatcgtttctctcaaatttagggttttctcttttctcgaaagtcttgcggttttctgaatcatctctatctggtttgagggtttcgtttgatatctggagaaaggggtttctggaaacaaggagttcataattcgcgatcttgatctatcgatcttcatttatatataaaagcgtgaatgagattatgatggagtcgaaaggtggtaaaaagaagtccagcagtagtagttccttattttacgaagctcncctcggttacagcattgaagacgttcgt

SEQ ID NO: 665 - DNA, 342 bp, Arabidopsis thaliana
  Clone ID: ARABL1-022-Q1-B1-D5
acaagccagagattactgtagacttggaagactatgggtgcagagagaggacatttgagtctctaggagaagagagtggaacagtgatgtatcagacgtttgagaagcttggtaagtactgtggatcgcctagatctaccttgaagtgtgaatggagcagcaacaatagctgcagcagcgaggacgagaaggacgagggaatctagcagaatttttcttcctaataactattttcgagctttctgtttttgttctttctttttaaaaaacttattaagttcttatgaataatgacttgtgaagtttgagttcgtctccttcacaagcaagttgtattggtgt

SEQ ID NO: 666 - DNA, 406 bp, Arabidopsis thaliana
  Clone ID: ARABLI-14-Q1-B1-C3
atcctgagtaccagcgtgcaccgatcttcataatatagttatagctttctttactttccagtttataattttcttctttcaaagctccttttctgctggttcccggatccaatcgttctctcctcctactacaagtcctgtcgctcacacaacaaggcgagatggccttatctgcaatcggtttcgaaggttacgagaaacggctcgaggtgactttctttgagccaagcatctttcaagactccaagggactgggactccgtgctctgaccaagtcccagcttgatgaaattcttacacctgctgcatgcacgatcgtttcatctctctccaacgatcaattggactcttacgtactctctgagtccagcttctttgtctacccctacaaagtcatcatcaagac

SEQ ID NO: 667 - DNA, 236 bp, Arabidopsis thaliana
  Clone ID: ARABLI-10-Q1-B1-F5
attgattccagacaaggagatactaaagattgtgaaggagagcttcgacttcagaccaggaatgatgacaattaaccttgacctaaagagaggaggaaacggaaggttcttgaaaactgaggtttgtcccaactgtgtgacatgcctacctcacatcacctgtgaagtcggcatcccactcaagtgcgggacaccgcaggcttaaatttacctactctgtttctgtcttcattcca

SEQ ID NO: 668 - DNA, 406 bp, Arabidopsis thaliana
  Clone ID: ARABLI-09-Q1-B1-C5
ctcttttaacacttgttcttttaaggcaaaaaggctcgagccacagagatctgagtttctcttcttcgagatctgatcgccgaatctcagaatctcccatcgaagcagaatggagacttttctattcacatctgagtctgtaaacgagggacacccagacaagctctgtgaccagatctctgatgcagtcctcgatgcctgccttgaacaagaccctgacagcaaagttgcttgtgagacatgcaccaagaccaacatggtcatggtctttggtgagatcactaccaaggctactgttgactacgagaagattgtccgtgacacctgtcgcgccattggaattgtctctgaagatgttggtcttgatgctgacaaatgcaaagtcctagtcaacattgagcaacag

SEQ ID NO: 669 - DNA, 399 bp, Arabidopsis thaliana
  Clone ID: ARABLI-11-Q1-B1-F10
ctcttttaacacttgttcttttaaggcaaaaaggctcgagccacagagatctgagtttctcttcttcgagatctgatcgccgaatctcataatctcccatcgaagcagaatggagacttttctattcacatctgagtctgtaaacgagggacacccagacaagctctgtgaccagatctctgatgcagtcctcgatgcctgccttgaacaagaccctgacagcaaagttgcttgtgagacatgcaccaagaccaacatggtcatggtctttggtgagatcactaccaaggctactgttgactacgagaagattgtccgtgacacctgtcgcgccattggatttgtctctgatgaagttggtcttgatgctgacaaatgcaaagtcctagtcaacattga

SEQ ID NO: 670 - DNA, 406 bp, Arabidopsis thaliana
  unsure at all n locations
  Clone ID: ARABL1-023-Q1-B1-E9
gcagctaagagcgttgtggctaacgggatggctcgtagggctcttgttcaggtctcatacgccattggagtccctgagccattgtctgtctttgtggacacttatgagactggattgattccagacaaggagatactaaagattgtgaaggagagcttcgacttcagaccaggaatgatgacaattaaccttgacctaaagagaggaggaaacggaaggttcttgaaaactgcggcttacggacactttggaagagacgaccctgacttcacctgngaagtcgtcaagccactcaagtgggacanacctcaagcttaaatttttactactctgtttccgtcntcaatccacaaaccaattatctggtcaattttttaattccccgtttttgggggttaatgggttt

SEQ ID NO: 671 - DNA, 398 bp, Arabidopsis thaliana
  Clone ID: ARABL1-02-Q1-B1-F10
ctttagctcaaccttcattactaatctccttttaaggtttctttcgtgaatcagatcggaaaaatggaatcttttttgttcacatctgaatccgtcaacgagggacatcccgacaagctttgtgatcagatctccgacgctatcctcgatgcttgccttgaacaagaccctgagagcaaagttgcttgtgagacttgtaccaagactaacatggtcatggtttttggagaaatcaccaccaaggctaacgttgattacgagcagattgttcgtaaaacatgccgtgagattggattcgtctctgctgacgttggtctagatgctgacaattgcaaggttctggttaacattgagcaacagagtcctgacattgcacaaggtgttcatggtcatctcac

SEQ ID NO: 672 - DNA, 405 bp, Arabidopsis thaliana
  Clone ID: ARABL1-01-Q1-B2-F4
ctttagctcaaccttcattactaatctccttttaaggtttctttcgtgaatcagatcggaaaaatggaatcttttttgttcacatctgaatccgtcaacgagggacatcccgacaagctttgtgatcagatctccgacgctatcctcgatgcttgccttgaacaagaccctgagagcaaagttgcttgtgagacttgtaccaagactaacatggtcatggtttttggagaaatcaccaccaaggctaacgttgattacgagcagattgttcgtaaaacatgccgtgagattggattcgtctctgctgacgttggtctagatgctgacaattgcaaggttctggttaacattgagcaacagagtcctgacattgcacaaggtgttcatggtcatctcaccaagaag

SEQ ID NO: 673 - DNA, 381 bp, Arabidopsis thaliana
  Clone ID: ARABL1-024-Q1-B1-G8
gctaaactcactgaagttcgcaagaatggaacttgcccttggttgaggccagatggtaagactcaagtcactattgagtacatcaacgaaagcggagccatggttcctgtacgtgtccacactgttctcatctcaacacagcatgacgagactgtgactaacgatgagatcgcagctgatcttaaggagcatgtgatcaagccagtgatcccagagaaataccttgatgagaaaaccatcttccatctcaacccatctggtcgttttgttatcggaggtcctcatggagatgcagggcttaccggccgtaagatcatcatcgatacttatggtggttggggtgcacacggaggtggtgctttctctggaaaggacccaacc

SEQ ID NO: 674 - DNA, 357 bp, Arabidopsis thaliana
  Clone ID: ARABL1-01-Q1-E1-F4
accatataaataattatataaattcccagctgcttagcttttttcttcaaagttgaaaacaaaatgaataaacccagctcagggttgaaactaaagaggcagaaagagcctaaaatacagagaacaagactgattctggacagaagtgaaacagaggctgacaggtttcaagcttggaccttgttagacttgagtggcttgactacctcccaggtgaaatcagcatcgtcccttccaaagtgaccataggcagcagtcttcaagaacctaccattacctcctctcttcagatccaagttaatggagatcatacctggcctgaaatcaaaactctccttcaaaatctcaaaaatctcc

SEQ ID NO: 675 - DNA, 353 bp, Arabidopsis thaliana
  Clone ID: ARABL1-02-Q1-E1-F10
gagactaatgtcgaatattattctctgagatgggtgttcttcgcaaaaggggtaagaaatacatattatgaatttaactttcttagcacaagaataccatataaataattatataaattcccagctgcttagcttttttcttcaaagttgaaaacaaaatgaataaacccatctcagagttgaaactaaagaggcagaaagagcctaaaatacagagaacaagactgattctggacagaagtgaaacagaggctgacaggtttcaagcttggaccttgttagacttgagtggcttgactacctcccaggtgaaatcagcatcgtcccttccaaagtgaccataggcagcagtc

SEQ ID NO: 676 - DNA, 427 bp, Arabidopsis thaliana
  Clone ID: ARABLI-15-Q1-B1-H9
ttcttcttctacttcgtcctcatcatcgtcacatagatcctcctttttcgttaattggggagagatatactttcttttgaggatcagatcgtgacagggtttagctcaaggagaggtattagatccgtactttgtgataaactttctcaagggtgagaaaaagaagaagaaggtgagacatgtgaaggcaaggctttgaggatgtcttttacaggaactcaacagaaatgcaaggcttgtgagaagactgtttatgctgttgagcttctctctgctgatggagttggatatcacaagtcttgcttcaaatgcactcactgcaaaagcaggcttcagctgagtagttactcatcaatggcaggtgtattgtcctgtaagcctcattttgagcagctctttaatgagagtggcagtttcaacaacaact

SEQ ID NO: 677 - DNA, 286 bp, Arabidopsis thaliana
  Clone ID: ARABL1-029-Q1-B1-C2
ctttcttttgaggatcagatcgtgacagggtttagctcaaggagagggtgagaaaaagaagaagaaggtgagaaaagtgaaggcaaggctttgaggatgtcttttacaggaactcaacagaaatgcaaggcttgtgagaagactgtttatgctgttgagcttctctctgctgatggagttggatatcacaagtcttgcttcaaatgcactcactgcaaaagcaggcttcagctgagtagttactcatcaatggaaggtgttttgtactgtaaacctcattttgagc

SEQ ID NO: 678 - DNA, 407 bp, Arabidopsis thaliana
  Clone ID: ARABL1-022-Q1-B1-H10
ctcaaaaccaaaatcactaaagaggagaagattgctaaagtttgataaaacattccaaaatcaatggctgataggatcaaaggtccatggagtcctgaagaagacgagcagcttcgtaggcttgttgttaaatacggtccaagaaactggacagtgattagcaaatctattcccggtagatcggggaaatcgtgtcgtttacggtggtgcaaccagctttcgccgcaagttgagcatcggccgttttcggctgaggaagacgagacgatcgcacgtgctcacgctcagttcggtaataaatgggcgacgattgctcgtcttctcaacggtcgtacggacaacgccgtgaagaatcactggaactcgacgctcaagaggaaatgcggcggttacgaccatcggggtta

SEQ ID NO: 679 - DNA, 401 bp, Arabidopsis thaliana
  Clone ID: ARABL1-022-Q1-B1-D1
accaaaatcactaaagaggagaagattgctaaagtttgataaaacattccaaaatcaatggctgataggatcaaaggtccatggagtcctgaagaagacgagcagcttcgtaggcttgttgttaaatacggtccaagaaactggacagtgattagcaaatctattcccggtagatcggggaaatcgtgtcgtttacggtggtgcaaccagctttcgccgcaagttgagcatcggccgttttcggctgaggaagacgagacgatcgcacgtgctcacgctcagttcggtaataaatgggcgacgattgctcgtcttctcaacggtcgtacggacaacgccgtgaagaatcactggaactcgacgctcaagaagaaatgcggcggttacgaacatcggggtta

SEQ ID NO: 680 - DNA, 365 bp, Arabidopsis thaliana
  Clone ID: ARABL1-019-Q1-B1-G3
aaatcactaaagaggagaagattgctaaagtttgataaaacattccaaaatcaatggctgataggatcaaaggtccatggagtcctgaagaagacgagcagcttcgtaggcttgttgttaaatacggtccaagaaactggacagtgattagcaaatctattcccggtagatcggggaaatcgtgtcgtttacggtggtgcaaccagctttcgccgcaagttgagcatcggccgttttcggctgaggaagacgagacgatcgcacgtgctcacgctcagttcggtaataaatgggcgacgattgctcgtcttctcaacggtcgtacggacaacgccgtgaagaatcactggaactcgacgctcaag

SEQ ID NO: 681 - DNA, 377 bp, Arabidopsis thaliana
  Clone ID: ARABL1-02-Q1-E1-G10
gaaaaacaccatcatagttcttaaaaatcgtcttaccaactcaacaacataaaatcccagatggatccaatagaaacggagaacataaatcagaaaaccaaaatctttgcctagatataagagactttgcgatgacgagagcatcattactgactagcgccaagccacttggtgaagttatcgaactcggtgtagtcactgtctgaaatcatagtctgataccaagccttgcctgctgctttgatcgcttgggcctcctccttagtgacgactttcctcttcttctcgagcctctccttcttagccttaacccttgaagcttcagccaacagagacattctctttgcggtcttagcataaggattcaacttgaacat

SEQ ID NO: 682 - DNA, 411 bp, Arabidopsis thaliana
  Clone ID: ARABL1-033-Q1-B1-A7
aagagaatggcaactttgaaccggtcaagaaatatacaattcggaattttccgacagagactttggccaaaatggtcaaaaccggtaccctaacccttaaccaaccaacccagttcctggtacaatttgacagctcaatgactgaactctctggagagccatgtgaagaccagtgtgtccatcaggggacacctgcacacttacaggttctgtgacaatgtctggaccttcatattacaggacgcaatgttcaagagtgacgatcgtcaagagaatgtgacccgggtgaagatagtggcatgtgattcgaagctgctcacacagtgaagatgcaaattgtctgcagggaatttaccttccctttgtactagatttttgagttctctcacctttgtaaactcagcacttgct

SEQ ID NO: 683 - DNA, 387 bp, Arabidopsis thaliana
  Clone ID: ARABLI-12-Q1-B1-C2
gagtcttttagtctgatctcttacaagaatggcgttcgcaggaacaacccagaaatgcatggcatgtgacaaaacagtttatcttgtcgacaagttaaccgccgataaccgggtccaccacaaagcttgtttccgatgtcaccattgcaaaggaactctcaagcttagcaattacaactcctttgaaggagttctctactgcagaccacatttcgatcaaaacttcaagagaactggaagtcttgagaaaagcttcgaagggacaccaaagattgggaaacctgataggcctttggagggagagagacctgctggaaccaaagtttcgaatatgtttggtggaacacgagagaaatgcgttggttgcgacaaaaccgtgtatccaat

SEQ ID NO: 684 - DNA, 392 bp, Arabidopsis thaliana
  Clone ID: ARABL1-031-Q1-B1-E8
aagagaacaaacgtcgtacgcttcagaaaaacgatatcgctgctgcgattactagaaccgatatcttcgatttccttgttgatattgttcctagggaagagatcaaggaagaggaagatgcagcatcggctcttggtggaggaggtatggttgctcccgccgcgagcggtgttccttattattatccaccgatgggacaaccggcggttcctggagggatgatgattggaagaccggcgatggatcctagcggtgtttatgctcagcctccttctcaggcatggcaaagcgtttggcagaattcagctggtggtggtgatgatgtgtcttatggaagtggaggaagtagcggccatggtaatctcgatagccaaggttgagctatggaacca

SEQ ID NO: 685 - DNA, 382 bp, Arabidopsis thaliana
  Clone ID: ARABLI-14-Q1-B1-A11
ttcttcccaacacacacaaaaaaaaaaaactgtaacgaccaaaaaaaaagaggacgcgttagaagaaaaaaaaagaacaatccgataaaaagatccggcgatgtcaaacccgacccgtaagaatatggagaggattaaaggtccatggagtccagaagaagatgatctgttgcagaggcttgttcagaaacatggtccgaggaactggtctttgattagcaaatcaatccctggacgttccggcaaatcttgtcgtctccggtggtgtaaccagctatctccggaggtagagcaccgtgctttttcgcaggaagaagacgagacgattattcgagctcacgctcggtttggtaacaagtgggctacgatctcacgtcttctc

SEQ ID NO: 686 - DNA, 393 bp, Arabidopsis thaliana
  unsure at all n locations
  Clone ID: ARABL1-047-Q1-E1-C4
nnnnnnnnnnnnnnnnnnnnnnagaatagaacaaaactttgattaattcttctctaaaccattcaacatttcaagccatcaacaagactaccatagaggtgctatagacttttagcaatttgtagaagacaaaaaacgagagagagagagagaagaatctgaaaaacaaaaatacaacaaaagtttggtgtgcaataacaaatagtaatacatgtttttggtaaagaagagcattgatagagagaaagatttacttcttctaaggtttataaaagagtgttttttgagtccatgtaatcaaatccagtcttcttggaagaagcttatttctactactcatcnaangngctcaagaacccnccaaaggaaaccagctccaaatggcagtnccca

SEQ ID NO: 687 - DNA, 342 bp, Arabidopsis thaliana
  unsure at all n locations
  Clone ID: ARABL1-047-Q1-E1-C5
tttttttttttttatctgaaatattttatccattcctgtctaaaaagatgagaaacaaaaagctgggagataaggtcccttcagtgccaataatacattcatagttatgatgaacaatgagcatcatactaaaaagtgtaaaaactatggtttctgagttttgaaaatgctacaagaatatcataagatgagggaggttcatatcacttaagtaactgttgcagttatctcacaaaagtgttgtcgttgtcgcgcggttttancggattattttaaantacaanagacgctgattcatcagtggaaaacaaatcctccgcccgagtgttcaacttcctgang

SEQ ID NO: 688 - DNA, 410 bp, Arabidopsis thaliana
  unsure at all n locations
  Clone ID: ARABL1-047-Q1-E1-B9
nccnnnnnnnnnnnnnnnnnnnnnnnnnnnnnnnnnnnnnnnnnnnnnnnnnnnnnnaaatacttggagtacacctccttacaactagaaacaacatggaaacaaacgtggagtaacaacttctacaaacttggaaaagatggaaactgtaatcgtggaagactccttgcttattgtaactaaatcgaaaacagagactaagtaaaatgacttagtgttgggaatactttggattgggcatgcgagnnnnnnnnnnnnnnnnnnnnnnnnnnnnnnnnnnnnnnnnnnnnnnnnnnnnnnnnnngcataaatcgtncgtccntggttgatatctcggttaagcaantttgtccaccagncttcngagtcntccagcagcggnaaacaaancgccgggagaagttcgcncc

SEQ ID NO: 689 - DNA, 392 bp, Arabidopsis thaliana
  unsure at all n locations
  Clone ID: ARABL1-047-Q1-E1-C6
tttttttttttttaaaaaaaagagaggtaaatttgatatttgggaaaaaaatttacaagcagtcatataattatataataaatcccgttttaaacccatcaaataaaaattaaaaaaaaccacttcatcgaactttaccttatgtgtataaaatatatatttttgggttaagaagaacaagctatgatcagaatcaaggaaggtagagaccactctgatcttggtcagacgacgtccattgactttgactccagtatgcatgatcaacggtactggttaaatcaaacagtgtttgatctccaccgccacttccccaatccaacgggttcaaaacccatantcggntncgaaanatcntcctttaaantcaacctgggccattccgttcccaa

SEQ ID NO: 690 - DNA, 284 bp, Arabidopsis thaliana
  Clone ID: ARABL1-047-Q1-E1-C7
tttttttttttttttggataaaaagtagaatttacagtaattgctacattgttcaacgagaagaaacaaagaaagagaacctaagaaactttcaaaaaacaacattgaagaaagagttgcgaagtgttaagtattcatgttttcttgaaaaatttcccacctttttccccaattccggtccctgtaaggcttgaagagagatgggatctggtgtctggtctccactgcaattctactaatgctgagaacagagctgacagcgaaggagagacttctgctcgagc

SEQ ID NO: 691 - DNA, 349 bp, Arabidopsis thaliana
  unsure at all n locations
  Clone ID: ARABL1-047-Q1-E1-D12
nnnnnnnnnnnnnnnnnnnnnnnnnnnnnnnnnnnnnnnnnnnnnnnnnnnnnnnacnccttgtanaaaatagaaagccaaaataaccaaaaatgaaacaaatttaagtcgtaagaaagagggaccagtcgatctctttgtatcttttctctccatttctcgaccgaacaagtccataagtgtcaagctcaagcatatcatctcaaaacctggacaagactcatggtacaaccaaaaagacacaaaaacaaactttgatgcaacaaagattcgacatgaatacaaatcacgagattaataaaacacaaactatatcacttcttanaatgtccttttagttnaacgagtt

SEQ ID NO: 692 - DNA, 358 bp, Arabidopsis thaliana
  unsure at all n locations
  Clone ID: ARABL1-047-Q1-E1-F1
nnnnnnnnnnnnnnnnnnnnnnnnncatgacaacatcatcatgaacttgtattactaagtactaactatcgccaatgaacgaaacccttgaaaaccgaagacaacaagagattacatctttagcatttgacacgaaaccaaaagaaaaaaaaaaaaaagagtttgaatcatgttgtaaacattantattgngtaattttgcnccatcatctaaagaagaacctcaagagtaaagaaattcgtaactcgaaaatggggtttggtttgcctcanacggagataccataattgntgatcttggttcacttcctttggcaaagcgtttcncnccntgcttcacttcaacanagcacggcttc

SEQ ID NO: 693 - DNA, 386 bp, Arabidopsis thaliana
  Clone ID: ARABL1-047-Q1-E1-F12
ttttttttttttaacagaaagatattacaatttatactgtaaaaatttataaaaatataatttttctttttcttttcgatatatctaaaggtctccgaaaaatttagcaaaattgtcaatagcattttttgcagcgaaattacgagcagtttctttcttgacaggatggtgaccacatccaacaaacttatcctcaatatggaaacaataggtttgattttcttcccaagtgtctttggacgtcaatttcaagttcctcttctgacacatctcattgagttctgtcattggatggctcttcattttgtctaaatgtattattggctccaacaatggttttatcaccttccagacggtctcgggtggagttgcaatccatgaagata

SEQ ID NO: 694 - DNA, 398 bp, Arabidopsis thaliana
  unsure at all n locations
  Clone ID: ARABL1-047-Q1-E1-F7
tttttttttttttttgacacattcagagtgttcttattatcgaaatctactaaaatgtcaacaatggagtacagaaccaaagtagtatcaaacaaaccacaatatgacctgaaacaaaagctaaacaagcagcatgatgaagaccaaatgtattgtcggctaatttgaaacgatcaagactagttgcaggctcgggataccatcacgaccagcataacgatgatggatagcaggaccgaagtggtcagcttttcctcgagccaattgttgaatttggcatctttccccttgttgttaacaccatcaccattgtaacaattgaagagctcggtcacgacctttgttattttcacaaacacttccgtggggcctaaacantgggttgtcnaatacccaac

SEQ ID NO: 695 - DNA, 328 bp, Arabidopsis thaliana
  unsure at all n locations
  Clone ID: ARABL1-047-Q1-E1-G1
nnnnnnnnnnnnnnnnnnnnnnnnnnnnnnnnnnnnnnnnnnnnnnnnnnnnnnnnngaaaatccttgagaaagaaaaaagaagcagatatgaagatttcacaatgcatcagaagctttttatctacattatataattactccctcanaagcttccttagtagacttcaacattccactgttcactcctcttcaattgcttcttgtactccaaccaatcgatcccatctttagcagcaagcgagaccataatgtcatcgatacccttctccatacccttaagaccacacatgtaaacaaaggtgttgtctttcttcagcaactcncac

SEQ ID NO: 696 - DNA, 403 bp, Arabidopsis thaliana
  unsure at all n locations
  Clone ID: ARABL1-047-Q1-E1-G12
tttttttttttttttggttaaaaatgatgaagtaaaatacattttttaaactatcaatgacaatgattgagtgtctttgttgttaagaacaaaacacacacaatggttctcaaaatacaacaactgatctgtcatcgactgcaaaatctttcacacttgaagaagactcaattctgtttgtagctttcttggcctcttcatcccaatttgtaaaaatagtgacgaggccaangaccaaaaacttgaacaacgagggcacatatgattccaagccaaagcccccgaccaccaacgtgaaagtgaaaagcaagtaacaatcctgaaggaactccaacaaggataatatggaaccaagatttaaatgattgggcccaaacttctgncatccaaaatctctaaccaa

SEQ ID NO: 697 - DNA, 365 bp, Arabidopsis thaliana
  unsure at all n locations
  Clone ID: ARABL1-047-Q1-E1-G2
ttttttttttttttagaataaatttttataaggaaaaacagactccacaaagcatttgaaaagacacaccaaatcactactcatcaccttaataaaacatatacatcccaactgaagaaaagcctcgacaaaaagactctctttaagaacacatttatacggtatggcaacaactgaaaccgaacccaatcttccattgttgcnattgcacagaanaatcaggcttcctgggactggtacagctgctgctgttgatgacctcaacaatggttgaacgagcttttaccacantgctcatgtttgggcctaaactctgantcanattggcanacacnaatgcctgctactgcaacgagccttgnaac

SEQ ID NO: 698 - DNA, 259 bp, Arabidopsis thaliana
  unsure at all n locations
  Clone ID: ARABL1-047-Q1-E1-G6
nnnnnnnnnnnnnnnnnnnnnnnnnnnnnnnnnnnnnnnnnngaacttcacattagatagaatctcagcagacagctcaattgcttggttgaaaccattctctcctccgtaagaaacatcaaccacattcaatatcttagcttgaagacgaggatcaaacagttctgattgacttagctcggtcttaaaatccgctgaaccagcaagtataagaccagagacattaggctgacncgtagctggattaatgtaaaactga

SEQ ID NO: 699 - DNA, 391 bp, Arabidopsis thaliana
  unsure at all n locations
  Clone ID: ARABL1-047-Q1-E1-H11
tagaacttcccattcaaccaaccaatgaagctttactcaagcctttggaacgcggatgattgggccacgtactcctagatccttagcattcttgaacgttcggattggtatgttgtcaacaaagaatacgatctggtacatgttccaaaggattgagtaagtgtgataagccttagaaggatcaaaccagagatagattcgttgttctctgtttccctttcctcctgtgaatacatttgtctgtaatatagctggttgtcctgttctgtttccaaggaactcaaagtctatctcgtcatgctcattgttggtagatgataagatagaaagctgtgacaactccggctgtgtcaccanctgggaactttatgtgnaataccaaaatgttcaa

SEQ ID NO: 700 - DNA, 413 bp, Arabidopsis thaliana
  unsure at all n locations
  Clone ID: ARABL1-047-Q1-E1-H4
ttttttttttttttggaaagaatgccctttctgtgtgttttatctacagtaacacatcagcgaaatgctttgatgaacaatgcgatattattcttatgaactgtgtggttggatacatctggattctgtttctcagtagtcagctctcagttcttagttagctgtcgctggatttgtttgttaggctcaacagtactccggtactgagagaaagtgcaacgacaccaagtgatgcctctgttgatatgtggaagccaaagaaatcaaggatcatcttgactcctatgaagccaagaacaactgctattgatggctgcaagtattccagctcgtccattccttcagaaatcagtgtataagagagaaccttantccctaaggattgcaaaagagaattagaagtccaaggacaa

SEQ ID NO: 701 - DNA, 405 bp, Arabidopsis thaliana
  unsure at all n locations
  Clone ID: ARABL1-047-Q1-E1-H6
ttttttttttttaaaacaaataaaccagaccatgtattgcctattgccagggtagactggccggtcaggatttcgaaaactggtatagtaaacaattctggacggaggcgaaacattaacaaagaactaaaaagacttgtccttgacactcgattagaaaagaaaaaaacagtctatgcgacacgtcacagagcaaaacccctatgtgagacagacagatagaaagatatgtaaagccccagctgcaaaacctgtaaatggaagtaccaaaccattctctcttctcacttgaagcacttggcgtccaagagagcctcaccttcaaatggctctgcgtcttcaatcatccgggctaacacgctccttctggggctcaaccngaaatttcaacccttagtncaatca

SEQ ID NO: 702 - DNA, 401 bp, Arabidopsis thaliana
  unsure at all n locations
  Clone ID: ARABL1-047-Q1-E1-H8
nnnnnnnnnnnnnnnnnnnnnnnnnnnnnnnnnnnnnnnnnnnnnnnnnnnnnggccattgacattgtcatttcttacaaaacacgaatatgtttacacagggtgttacaatacgaanaanccaatggtancgaaagatggaaatattgtacgatacaagagacataaaaacacatgagatgatgatcacctcagtggaacttgaggctggtcaagacgttgttgttgacgggatcagccaagtgatcaagcaggttctgataaggtcccacaccggtcactagtccttggataaagtaaccgagggatggggagcatanccagtctaccgtncntgacccccntgagntcnaaaccccttcaggtgnccttcccnacctttcccaaaccccaaagngggg

SEQ ID NO: 703 - DNA, 388 bp, Arabidopsis thaliana
  unsure at all n locations
  Clone ID: ARABL1-046-Q1-E1-C3
antcgtattacaaataattccaattcatatatgaacatttttgcctccttatttcttgaaaatgtggaattggaattccccgaggaattccgatctcatttcctttggcttcaggataggcctaataagaaaacaaataattccaattcatatatgaacatttttgcctccttatttcttgaaaatgtggaattggaattccccgaggaattccgatctcatttcctttggcttcaggatangcctaataagaaaacaaataattccaattcatanatgaacatttttgcctccttatttcttgaaaatgtggnattgggattcccgaggggattctncaagatcgacctgcaaggcaatgcaaactttgtcctcncccctttaggtg

SEQ ID NO: 704 - DNA, 425 bp, Arabidopsis thaliana
  unsure at all n locations
  Clone ID: ARABL1-046-Q1-E1-C5
gncgaccnnnnnnnnnnnnnnnnnnnnnnnnnnnnnnnnacgagggaaatagttttggatattactaacatactacaagttgagaaacagtaggaccaatgtacatttactcacttgtaggatgaaatatacatttggaaacttacatgagaaaggcctaaaatgttcatttcttggagagcattttatctatttggccgtttttgttgtacatttccactatctttttggcatatgatggcatgtgggtgtttgctctttgctttccccatttgcggtttacgtacaaatagtttctgatggtatggtagtccaacgagtaccgagcaaattctanacccttaggaccaaccaaatttangatnaacncaanaatgtttccaacaaanagtggncccgggntnaacnagacccttgaccaaact

SEQ ID NO: 705 - DNA, 410 bp, Arabidopsis thaliana
  unsure at all n locations
  Clone ID: ARABL1-046-Q1-E1-C6
nnnnnnnnnnnnnnnnnnnnnnnnnnnnnnnnnnnnnnnnnnnnnnnnnnnnnnnnnnnnnnnnnnnnnnnggnacagcaagaaaacataagggncanattagtcatgacaaaaaacacttgggtttaagctttttgntangacttgcaaggacacncaacaatagccacgcgaaagaaaaataanccaaaagaaaaaaaaaagagttgaagaganaatcngagacaagaagagctaatacacatccacttcaataattcattcaccattgtcaaacggttacagctttctacaacttcagctcgatcacgacttacacatcatgcttcacngctgttgccgctggtatccaccaggctgctggnantttccaaaagccgcccccagcanaaccaccgtagtaggngtta

SEQ ID NO: 706 - DNA, 409 bp, Arabidopsis thaliana
  unsure at all n locations
  Clone ID: ARABL1-046-Q1-E1-B8
nnnnnnnnnnnnnnnnnnnnnnnnnnnnnnnnnnnnnnnnnnnnnnnnnnnnnnnnnnnnnnnnnncaagacnganatgcttcattccatanaaagaaagaaaaaccattacataaatttagcaatganataattgcanagaangtcncatctaanagtatcgactacaacaacagcaacaacaaacacgttcaaagcaaaactcagagaataaactaatcccagttttgcccctaccaaaagaatctacacanggacttagattctccagtctcaatgtgcttcttcntcttcntcatcttctttcttgggttacaataacaaacccttcccaagcttanttacananaaancacaactccgcaaattgttgaacggggtgctgcngncccttggaaaanctccacgg

SEQ ID NO: 707 - DNA, 430 bp, Arabidopsis thaliana
  unsure at all n locations
  Clone ID: ARABL1-046-Q1-E1-D2
gacctttttttttttttttcatcgagaaggtttttttcattatttagtattctacgtcccgtaaacaaagatccaactcaatattactataacanaaacaaacgcattacaaacttataaaaactccattgatttaaattatttcgtttaacaaccatcgtcatataaaggttcaaggacatttggattttccaccacgtgtcttcatgttggcgtaacaagatccacacttctccttattaccgtaggtgcctgggggaacacacttgcaagcggtagcagcacgtgacgcacgctctcatacatacgttcctcctcgagtgttgcccacacctcgtcccacataaaggcacgcaatctatccngagttcttacggggangttgtgtttggnnngttttgacanggcggggcctgtnaagtgggttaaa

SEQ ID NO: 708 - DNA, 405 bp, Arabidopsis thaliana
  unsure at all n locations
  Clone ID: ARABL1-046-Q1-E1-E5
ttttttttttttttagtattcaattccttccagtccatggaacttaaatgccattaaatgcaaaacatgagcagatagattttgtatctatgggaatcgttacataatccataaataattcaaccataaaacgatgatctctcaagatttaagtatccagatcttacgattcattcagatgactgaaacaaaacccaagaatatttgttcgcatattatgaacacttgaaacagagcaacaagtagagcatttcacccattatcacangtaccatanataaanccaaccataagntagcaaanccaaaggaagagtcctaatccggaacccancaggaaaaanccaactaccaannggatggaggnttcatcataantaggcaaaaaggtggggtattngagaga

SEQ ID NO: 709 - DNA, 480 bp, Arabidopsis thaliana
  unsure at all n locations
  Clone ID: ARABL1-046-Q1-E1-F3
ggcngccgtcaaaagactcaatcccnggtcgacnacctcactattcngcggccgncctttttttttttttttttttgtatcaataacgcgacaatgttctcaaatcttcaatacataaaaattgcaaagcaacttattatttggtacatgataagtaaaacagtttcaacaacatattgatccgtgtaatggaccaaaacagatcaagctgagttaagtggagctccaagttcggtagagccttcacggttttgaaacacgatcacgtatagtgcataaattatccctgggatgtatcctaagattgtcagcaccaagcaaatcaagaactctacagtgcaacagccacgtttgagacaaactccaagaggtggaagaaggatngccattaagatntcgcagaaaacttccatgttgcccgncaatttttcaganaagttgngtnaaagaaagatcctgaatgttattctggaattantg

SEQ ID NO: 710 - DNA, 410 bp, Arabidopsis thaliana
  unsure at all n locations
  Clone ID: ARABL1-046-Q1-E1-F8
tttttttttttttcnnnnnnnnnnnnnnnnnnnnnnnnnnnnnnnnnnnnnnnnnnnnnnnnnnnnnnnnnnnnnnnnnnnnnnnnnnnnnnnncaccacaccaattattcgcataaatagtatagatatatcaaacgatccaattcgggttcagtttagaaaccgtggatcttgatctgatccttcttagcaatcccagtttggaccaagaactgagacactttcttcctttgatcaccttgaagctggatgatcttgcctagttctttgtcctgcacaacgttaccgttgcagcagaaatctttcttcaaatccttgagaatcctctcgtagctgtactctttcttaagcccttgaacagtcgtcaagctctttttcccattcctcctgctgggattcgaatgtgaat

SEQ ID NO: 711 - DNA, 429 bp, Arabidopsis thaliana
  unsure at all n locations
  Clone ID: ARABL1-046-Q1-E1-G1
gnacgaccnnnnnnnnnnnnnnnnnnnnnnnnnnnnnnnnnnnnnnnnnnnnnggaaaaagcatagaaacaaagatagggaacatatggataataaagaggtgaagtaatgtttttgtttgagattaaagaggtttcaaacaaagagatgataaaacataggaatctaacttatttcatggaagatccctatgtgaagaagtcnnnnnnnnnnnnnnnnnnnnnnnnnntaaaaccgagtctgtgagggatcaaaggacacaaactttcatcccattgcatatttctgagtccagcttctcgcagtagactcatacnttgccnctatcgggttttgtacatgtgaagcaatctctggaaccaatggatnatcngggtttgggtccgttnacaatgaagatatccgaaagccaaaacctttctagaatgn

SEQ ID NO: 712 - DNA, 429 bp, Arabidopsis thaliana
  unsure at all n locations
  Clone ID: ARABL1-046-Q1-E1-G7
nncgaccnnnnnnnnnnnnnnnnnnnnnnnnnnnnnnnnnnnnnnnnnnnnnnnnnncccctctgaattagattattacatttccaacgaccatactaaaagaatacatgtataatattacctgaatagaaaaataagaaaaatacncaaactatttaagtcagctctttttcttccccagcctgaattaagagctaactnnnnnnnnnnnnnnnnnnnnnnnnnnnnnnnnnnnnnnnnnnnnnnnnnnnnnnnnnnnnnnnnnnnnnnnnnnnnnnnnnnnnnnnnnnnnnnnnnnnnnnnnctaattataacactaattattaagacgacgcttgattantcctcctcntcctcangtcaancacaacgaacgcccacgttaacggaacccctggcctggcaagagccaactttgggtnaagagca

SEQ ID NO: 713 - DNA, 417 bp, Arabidopsis thaliana
  unsure at all n locations
  Clone ID: ARABL1-046-Q1-E1-H2
tttttttttttttgtaggagaacacaaacatgttttttttttctggtcatagcttcctaggcacaatcactcttattgccatattgtgtgagaaacaaaatcatgagaaagattctataatctcaagaaggcgttgaagccatgaactctaaaggaaccaaagaaggaaagagttctgtaaatctaaaaccatgtcgttgattctttgtcttcaagcagtttgagcaactggttcatcagatgcttcaagcctttcgattccttccccaacctcgactctaagaaaatcggtaaccttcactggagaacctacctccttggacaaattatccaccaagtgtcntaatgtttataagcatcgttcacaataaacttttgctccattagaagcaacttcttcaaaatacttacggagac

SEQ ID NO: 714 - DNA, 389 bp, Arabidopsis thaliana
  unsure at all n locations
  Clone ID: ARABL1-046-Q1-E1-H3
nnnnnnnnnnnnnnnnnnnnnnnnnnnnaagttcaaagagttgttataacatccgcaagattttacatgtagtgtgatccctttttaaatttgttttgtttgtctagcattattatataaaatacgaattaaaatcttacaaatcataagattgtttcccagtgaatttaacctcaatgggactaacatttttaccgatggatctcatgtttagtccaacaccttctcttcctggattcgctttctctggataaactccatctttcgggtgaagatattgaacctctccgttagggaacactctgtaaaactggtaagtgatcttgtactttgacctcaacctcngtacctaaangccaacacgggntcttcctccgccangtttcaat

SEQ ID NO: 715 - DNA, 421 bp, Arabidopsis thaliana
  unsure at all n locations
  Clone ID: ARABL1-046-Q1-E1-H5
tttttttttttttttttgattaaactcaatgcataacaagtggtgtagaagtattgatacattcctgtaatgtcactagcaatctcaaacaatcatgatacatcatatttctctcatggagccaaaatccccggctggtggaaaaataatagtttgcgcaagtgtgtatgattatttctattgaggtgaaaaacaatctaaggttttctttttacttttatttccaacacaaaattgattacgcatatgtattccacatgcaaagaattttaaataccgggatttgatagtgaacttatgctgcgacagactgtttctcctcgtaatccgtcaagccttaaaagcttccaatanccttggccnagaactcctggggaagcctncaggtnaagtccaaactccaataaagctttcccctggg

SEQ ID NO: 716 - DNA, 412 bp, Arabidopsis thaliana
  unsure at all n locations
  Clone ID: ARABL1-047-Q1-E1-A4
nnnnnnnnnnnnnnnnnnnnnnnnnnnnnnnnnnnnnnnnnnnnnnnnnnnnnnnnnnnnnnnnnnnnnnnnnnnnggaaaaagcatagaaacaaagatagggaacatatggataataaagaggtgaagtaatgtttttgtttgagattaaagaggtttcaaacaaagagatgataaaacataggaatctaacttatttcatggaagatccctatgtgaagaagtcctctctctttctctctctctctcnattaaaaccgagtcngtgagggatcaaaggacacaaactttcatcccattgcatatttctgagtccagcttcncgcagtagacncaaaatttgccccaaccgggntttggncangggancaatcccctggaaccaaatgggttanccgggggttttgggggc

SEQ ID NO: 717 - DNA, 404 bp, Arabidopsis thaliana
  unsure at all n locations
  Clone ID: ARABL1-047-Q1-E1-A7
tttttttttttttagaaaatacgtttccacaattaaaacagaaatcgtagtgacacaaggacataacatcgatcgagtaagaataaaaacattggaactggaatttaaataaagcatagacacaaaatcattatataaaatcaaactaaccctttttgtctaaccgaaccaacgtagctatgaactacactgtagctnnnnnnnnnnnnnnnnnnnnnnnnnnnnnnnnnnnnnnnnnnnnnnnnnnnnnnnnnnnnnnnnnnnnnnatgttgttgtgaaccctagtagtctccaccaanaccatctcttcattagtctttttcttcntcttcnttannagaagttttgctcctcaatctcntggagcangtttgaaganagtgagggtggcttccatggggaa

SEQ ID NO: 718 - DNA, 77 bp, Arabidopsis thaliana
  Clone ID: ARABL1-047-Q1-E1-B11
ttttttttttttagaaccaaactaggacatatattagtctaaaagtcactgagacaaaacaacagtattgtagaata

SEQ ID NO: 719 - DNA, 365 bp, Arabidopsis thaliana
  unsure at all n locations
  Clone ID: ARABL1-047-Q1-E1-B12
tttttttttttttttttgaagaactcgaagcatcatataatctcttaaaagtacacaaggacataagaacttggtaaaagaaacaacaccacaaagcatttatacaacaattttcagaaatttgaaatgcgcacccaaaaaaccttaacaatattggnaaataggtccaaggaagatagcagagacacttcaacttgagcgaatgaggccgtgcaagtaagctccagtcatgacgagtgacaccaccgacacaagtccagccggtaccactttcctcgtccttangtaacgtgatcccatcatccctgtcagtgccgncgaccccanaatgccaatggangattctaangaatggatttcctggg

SEQ ID NO: 720 - DNA, 388 bp, Arabidopsis thaliana
  unsure at all n locations
  Clone ID: ARABL1-044-Q1-E1-G11
nnnnnnnnnnnnnnnnnnnnnnnnnnnnnnnnnnnnnnnnnnnnnnnnanaaagtttcgaataccatgtgaaattccacaaaccagttacagatctgaagtaaactactgatacagttatgaatatttacagaacatgccacacaatcatcacaanggctatgataaaattccaagtaaacaacaatatcgatgtccttcanaatcatctaagaccttcccaatgaatatccagctttcatgaaaaagcgaattgtattgagtgaatctgagtcagcccactgtcttgaaatcagaagagccactcatctcctcaattcttggntttattgggggaatttcataccttcaagagagggcgttccaaacgactaancaatatgtttcca

SEQ ID NO: 721 - DNA, 419 bp, Arabidopsis thaliana
  unsure at all n locations
  Clone ID: ARABL1-044-Q1-E1-G4
ttttttttttttnaaannataananacaaaccttcaatacattaaccttnagtncaacaaggctnctggtaaatnggnaaatacataatttgacattacacactgacgaacggaaatgatactgagatatacananagaatactgatttaatcataacaaatcgaaatatgaatatttggggattggtggtataaacaaatgcgaagacggtttacggtttctatgcactgaatccacggttaagcgagctccanngaccanttggcagtgtggtacaancctgtgaagctgcctcctccatttgctccatttgaatccctgcattgcagatgtttgcnaanaggactcaatttccttgatacgttccgaagacagncgattcaaantgcctccccgaaagctctcacctgaattttaa

SEQ ID NO: 722 - DNA, 407 bp, Arabidopsis thaliana
  unsure at all n locations
  Clone ID: ARABL1-044-Q1-E1-G6
tttttttttttttcaataacaaataatttcattacatacgtgattaaagaagattacaaaaacgantatataaagtanaaataanagannatcgtatcnaacgtanactaataggtattcaaaacagagtcgagcaagaatctgttttagggtcagacaaagccggtaacaaatattttctcccattcagtcccttaacgttataactcccaccggtcgttgcatccacangtaactctccagcanaaccaggatacgaacctttcccatanactccagtacaagccgatccancctcaagcggtgccgttttaggcccttggnaatanccatctccgaacgggttcgttgccgtcgcaaccaagagactcgccaaggttaanccccaacccgttcaaancaaagtc

SEQ ID NO: 723 - DNA, 404 bp, Arabidopsis thaliana
  unsure at all n locations
  Clone ID: ARABL1-044-Q1-E1-F3
ttttttttttttttttttaacataaagtgatgttattatagaaagtaggaatattcacagaattacaaaaaacaagaaagcagaaaagatcagattcagccataaacacagacacgactctgattatcatctcgaaagaagaagaagaagagctttgttccttctagaagcttcaccgtggctgatagatatgatgattccggcgacaattaaagttcggattcatgtacttcttctgattatactttggtgaacaagacgaaaccttcgatctataaatcttctctttcgtagactccgctatgttcaaaagcatcttcaaataactaagccacatctgcttccggtaactgtatcagccatggnttcaacatcagacgatgcgattatcccctccgaactcc

SEQ ID NO: 724 - DNA, 387 bp, Arabidopsis thaliana
  unsure at all n locations
  Clone ID: ARABL1-044-Q1-E1-G7
ttttttttttttttttttttgagctcatgtanctagagctaaacattgtaaaacagaattgaacttacanaacgttctctaattganacaagatgaattcaaattaaccaaggcctaggcttttanagacttaagaagaacctgaaactgttgatcagatttataggccatttggatattcgaaacacacaacancgaaaaccgccntcactattccacgcattcgaaggcgccctggaatatgaaaagaaacctgttgtgttgcacaatctnatgtgtttttggnacttgtttaatggcnagaatcggatgaagcagaggacggcttgttgtcgccgccgtgctcctcttgttcgccttgaaancgtgctggtatacgaaaaccgg

SEQ ID NO: 725 - DNA, 383 bp, Arabidopsis thaliana
  unsure at all n locations
  Clone ID: ARABL1-044-Q1-E1-H2
tttttttttttttttagttataaatgttcttaantaattgaaaagatatantnactacaacttgtcaacaaaaatgtannacaagttaaataagtaaacaagatatttcagttttacaccgtacacttttcccggccaaatacagatgaatcgccgtcacacanaacanagcaagacggcgaacagagcaaagaggagagaattctgtaaacgagccgagcctgaatatccctgaggaggagtatgatagtaanacggcaaataaggaacgatcggattcngtggtggtggtgtcccgtaattgccgtagtaaggaggcggataataaccaacgtnaccgtccgccgccgttacggagggcgggtattaacancaacgggact

SEQ ID NO: 726 - DNA, 148 bp, Arabidopsis thaliana
  unsure at all n locations
  Clone ID: ARABL1-044-Q1-E1-H3
nnnnnnnnnnnnnnnnnnnnnnnnnnnnnnnnnnnnnnnncataatccaaggcttgctttgatcttttagaanattctaanattcacagagatgtnaccaanctatacagttgcatccagaaaatccgactcaagcgatttcataagc

SEQ ID NO: 727 - DNA, 399 bp, Arabidopsis thaliana
  unsure at all n locations
  Clone ID: ARABL1-044-Q1-E1-H9
nnnnnnnnnnnnnnnnnnnnnnnnnnnnnnnnnnnnnnnnnnnnnnnnnnnnnnnnnnncaagttctaagcaggaaacaacaaacattttaaagaacaaagcagtgaagaaaacacgcttcctgttttgatgagcagatcacttagatgggtctctatggctctcctccaagctcaactctcaggttgtcatatggatacactctcggtgtaaatggaaccttagaagctttgtcgttcaaaacagcgagcagaccgagaccaacaaagaaccctaatccgccactcaaccatgcnaatgcttcatactttccgacggtatcagcaatccgatctatgcaaggctccggaaacgcagtcccgttgtcncacatnaagctccgtccgtttaccgatancg

SEQ ID NO: 728 - DNA, 459 bp, Arabidopsis thaliana
  unsure at all n locations
  Clone ID: ARABL1-045-Q1-E1-A10
gnccggcacaggtccaaggacnnnttcccgggtcnacnaccncacnatncgncggccgnccttttttttttttttttttaagaaaagacttgggaaaccttatgaatgttaaaagtgttgccacttcaatacaaacatcgtacttaaaaatacaagtaaccacttgggccattacaaagtaaatcaaccatcatatatatatacacaatcacgatgaataatgttttttgagtatattaatgagaaagcttgtatgagatgatcaagatgatggcgagaacgagagccacgattaccgatgtaatgatccatttgttcctagtcattctccttgacatagccgtcaacaccttcttgctcttgtcaatggcgtcatccacaccatgaagcttgttgtgcgcatgaagganggtttggcgttgctgactcaaatcttgggacaaantgagatgccaacct

SEQ ID NO: 729 - DNA, 417 bp, Arabidopsis thaliana
  unsure at all n locations
  Clone ID: ARABL1-045-Q1-E1-A11
tttttttttttttgctacagtcactctcatatgccaaaaagccaaattgtgtcaaaataccaacaaaaaagacaagaagaaaatgcaacttcaactacaaccaatctcgcaggattcgaacagacaagaaacatgggttctctgctttaatctaattgttatctttctcaaaaaaagaccattccttaacgaccttcatgcatcaaagggcgggatnaaacctagcgtgcaccagcagtnagttttagttactgtccgaaaacgccattttccaataancctaaatgcttnaaagaaccctccaagaaanttgcaatttttggngaataatggaaagaaggtgtnaccgctcaaaaattgggcctctngggnggccaaccctcancctcngaanactcctaattggtccttccaacn

SEQ ID NO: 730 - DNA, 276 bp, Arabidopsis thaliana
  unsure at all n locations
  Clone ID: ARABL1-045-Q1-E1-A5
nnnnnnnnnnnnnnnnnnnnnnnnnnnnnaagaaagaaaccatccatgtcntagatagagttaacatagtaacatcatcccaacacaangcaaaggaacagacnangngacgcancacgaaacnanactaanagatcaggttttatttagaaaanataattattcccgatagataanagagatagagaagagttgccagaanccaaagagctcatcaagcctccttcncccctgtgaggagatccatnaccacgcctttgangcttccactcgagc

SEQ ID NO: 731 - DNA, 410 bp, Arabidopsis thaliana
  unsure at all n locations
  Clone ID: ARABL1-045-Q1-E1-C8
nnnnnnnnnnnnnnnnnnnnnnnnnnnnnnnnnnnnnnnnnnnnnnnnnnnnnnnnnnnnnnatatgcatccgcgaaagcggtgtaaccatatccgagtcactgctactcacatagccgaattcttcattatcatcatcagtagaatcttcaattttcacaactgacttcacatgttttgattcggcagccagtgatcctttcttcagggatttatatttggctttcttcgcctttttcttcttcttaggcttcangtacatgagcactttcgttcctgtgtcaaaacnatttcagccacctctgccgcttccctctctctaagcttcattttccaaatcttccattaactacanacatnagtaaatangtgacaagctgaaaatgcagggacatggtaagaggcaacaa

SEQ ID NO: 732 - DNA, 367 bp, Arabidopsis thaliana
  unsure at all n locations
  Clone ID: ARABL1-045-Q1-E1-D12
ttttttttttttgannnnnnnnnnnnnnnnnnnnnnnnnnnnnnnnnnnnnnnnnnnnnnnnnnnnnnnnnnnnnnnnnnnnnnaccacaccacaccaattattcgcanaaatagtatacatanatcaaacgatccaattcgggttcagtttagaaaccgtggatcttgatctgatccttcttagcaatcccagtttggnccaagaactgagacactttcttcctttgatcaccttgaagctggatgatcttgcctagttcnttgtcctgcacaagcgttaccgttgcagcagaaatctttcttcaaatccntganaatcctctcgtaactgtaacccgttcttaagcccttgacaagtcgtcnaag

SEQ ID NO: 733 - DNA, 375 bp, Arabidopsis thaliana
  unsure at all n locations
  Clone ID: ARABL1-045-Q1-E1-G11
ttttttttttttcacaacgagaaattttgtattaaacatatccaactcatacaaggcctaagaaaagcctattcaaaatgcaagattacagaaattatttaggacccaacaaggcccaaagagatttcctacagaagaagaaactggaatttgtctctatctcacgatcacgtgtcgtcaataggagaaagacctanacgtgtgagatnagaagcctaaaagtgaaccgacttcttcctttgtcngtccgagcaccgattccggtgaagaaggaatcacaaccgannacantcnacatacattcttctgattttttcngccggtacaaagtaatcngaagactccganttnaagcaagagcttaangggactgag

SEQ ID NO: 734 - DNA, 402 bp, Arabidopsis thaliana
  unsure at all n locations
  Clone ID: ARABL1-045-Q1-E1-H12
ttttttttttttctcattccacacaaattttcccattaaacacacaaaaacgagttacaattacttaacacggcaacgaggttgctttctccttctgttcgtctcactgtacagttaaaaatggctctatggactgtgcaagttctttagctgctcaaccacatcaagagtattgcttagctgatgataatcggagcgatgaagagcgtttatttgtcccgaggttttggttccatcattgaaatggttctttgcangtccaccacgagggcagtgacgcacacggattctatgctttcttgtctcagtcgagaaccttccgtggaccacgaggaccaatatgacttccttgtcncttgtgtcctcaaaccaagagttctgaagcaacaccgtccaaaaaac

SEQ ID NO: 735 - DNA, 399 bp, Arabidopsis thaliana
  unsure at all n locations
  Clone ID: ARABL1-046-Q1-E1-A10
gncgaccnnnnnnnnnnnnnnnnnnnnnnnnnnnnnnnnnnnnnnnnnnnnnnnnnnnnnnnnnnnnnnnncaatacattattaaggctacatattcggtatttaatatttaatcctatatacaattaaaatcttatgtgatcctcatgggcttcacaagtcaatgaagattgggctgggccgaagtagactctgacttaacaaaacgaacaagagacaactttgcgatatcggaaacggcaagcatttcgaacggcggcggaatcactgatgagaaactcatacgccgcttcgaaagcttctcgccagaaccgaggaaccttaacgccaccggagcgtccgtacacatccacatctgtctcancantttccctctcctcctcaaattttcaanaacgt

SEQ ID NO: 736 - DNA, 425 bp, Arabidopsis thaliana
  unsure at all n locations
  Clone ID: ARABL1-046-Q1-E1-B1
nccnnnnnnnnnnnnnnnnnnnnnnnnnnnaagaaaaagaaaagtctctgaacatgtcaatgtatattaacatacagtatgtatagatcgaagctaattggnattattacaagccaattagttgattttaagaaacatataactcggcttgtccgtcaatgaaaagactcatgaactcttctccatccacagtttctttctcaataaggagctgtgcaagcttgtgtangatatcaatttgtgttgttangatctctttcgctctcacntacgccttctcaacgagcnctctcacttccggcatcaaccanatccgnctgttgccatcgagtaatccgntctgcgaagacataccttnggccccagaaaagggggttccnccctgngtncaacaanggggagctgggcagacacgttttgncggg

SEQ ID NO: 737 - DNA, 400 bp, Arabidopsis thaliana
  unsure at all n locations
  Clone ID: ARABL1-042-Q1-E1-C12
tttttttttttttttttaaaacaagacttttgaaaatgttcagacgcaaaatagagcataaaagggataaaacattcgcgtcttaaacaagcagaaaacatacctcgagtcccatgaataaaaattatagaacataacataagaatttatatgtaagagatgcaaaccaagtttatagagccattgtttggttctaaaannnnnnnnnnnnnnnnnnnnnnnnnnnnnnnnnnnnnnnnnnnnnnnnnnnnnnnnnnnnnnnnnnnnnnnnnnnnnnnnnnnnnnnnnnnnnnnnnnnnnngtaagcttctcaccaaggtttgtcatcacatggcggagctcagctgctgagatgaaaccgttctggtccttgtcgaaaacccggaatgcttccttgagc

SEQ ID NO: 738 - DNA, 443 bp, Arabidopsis thaliana
  unsure at all n locations
  Clone ID: ARABL1-042-Q1-E1-C3
tttttttttttttttttttttttttttttttttttttttttttatttgttgagaattagataaacatgatgctgaaaacaaagattcttcaggtagagtaaattttgccgagattcagaacacaataatgacaactcaaacaactagtttctttttcttcttcagagttcatcaaaacaaaagagcatttcacctttttgattcaatcagattcacaacttgatcattaaaatatcgcaaaatgctcccaaacaaccatcatatctgatcaagatcaacggttcaggggcaaaagagcatgctcctgggcaacgggtaaagtagggcacattagggagacctaagcaaggtggnagaacgcaatcccccctgaaagcttcnatccccgaagccgaatttcggagcctaacgtncncntggaagcgaactcaaaactcctccaa

SEQ ID NO: 739 - DNA, 432 bp, Arabidopsis thaliana
  unsure at all n locations
  Clone ID: ARABL1-042-Q1-E1-C6
ttttttttttttcaaaccataaaccaatgaccaatatttgatattctgtgttaaaggtgattaacaatggaaatctttgtaagacgtcgcccatgtatatacatgttttttggccttgaagctgatcaatgctagtcttgttcgtcggtatatataaatcttaacattgatttcaacattacatgagacagctcaattctcaaaccgtctaaaccagtcaacgatcgtcctggaaagaactcgagtttcgctaagaggaatggtctttagcgcctgagccacagcgtctgctggcgtgtacacagtcccaatttgccactttggatcctgtatgcaangtgtaagatggtttccgttcagccgaaacctttcaaagtgtaccacaatagaatccaanccgaagcctaaagaatttcttcgancaaatcagtc

SEQ ID NO: 740 - DNA, 419 bp, Arabidopsis thaliana
  unsure at all n locations
  Clone ID: ARABL1-042-Q1-E1-C9
ttttttttttttttaatatcataaagcttcttaaatatttcacacacatacaaagtaatttacaagatatgaaatctgcatcacatttccaagatgcaacaaaccggatacacacaactcgatcacaaattaaactcactttccggggacgaagttggtagcgaaggcccatgcattgttgttgactggatcagccaagtggtccgcgaggttctccaacggtccctttccggtgacaatgggcctgaacgaaagaatccaaacatagaagaacataaccaaaccttccgttccttgaactccctcaccttcaaactccggcgaaaagcctcggggtcaagttagcgaaggccaatgggtcgaaagctcccaactgggtaaagcaagtcctctgcntctcccaatggaacatctccggg

SEQ ID NO: 741 - DNA, 184 bp, Arabidopsis thaliana
  unsure at all n locations
  Clone ID: ARABL1-042-Q1-E1-E3
ttttttttttttttttttttttttttataacaacttttctcaataccatatatataaatcttttagtaactactacttgggaattttaaatattttganntttctcttaagcatcacattcaaaacaggcagaaaatgtgaaaacatgtctgcctcaattgttttcttctcgagccgantcggc

SEQ ID NO: 742 - DNA, 75 bp, Arabidopsis thaliana
  Clone ID: ARABL1-042-Q1-E1-E4
tttttttttttttttttttttttttttttttttttttttttggccattgacattgtcatttcttacaaaacacga

SEQ ID NO: 743 - DNA, 430 bp, Arabidopsis thaliana
  unsure at all n locations
  Clone ID: ARABL1-042-Q1-E1-C1
tttttttttttttttttttttttttttttgatgaaaagacccaagttattatattgatatgagtttatgagatagagattccatcaacgaaacaaacattcaaacggttttgctttcttacaatcagaaaatattcttcttggcaaagttacggcattagacgaaagcattgattcttgttacttgctacatcagtagaacttggctcacttctttccacgaagcttagctccaagcgctctctccagcttagaaaggatttgctggttgggtatagctttgccaagactcatactcttgaatcacttgtggctcccattgatgatttgagcaagttgggactgggttagcttcctggccgtcctggcttgcaataaaggccttccttancccaattaggnacaacgttcaagaantaaggtcccaatgg

SEQ ID NO: 744 - DNA, 407 bp, Arabidopsis thaliana
  unsure at all n locations
  Clone ID: ARABL1-042-Q1-E1-E6
tttttttttttttttttttttttttttttttccatcaatatcataaagcttcttaaatatttcacacacatacaaagtaatttacaagatatganggctgcatcacatttccaagatgcaacaaaccggatacacacaactcgatcacaaattaaactcactttccggggacgaagttggtaccgaaggcccatgcattgttgttgactggatcagccaagtggtccgcgaggttcnccaacggtccctttccggtgacaatggcctgaacgaagaatccaaacatagagaacatagccaacnttccgtncntgagctccttcaccttcaacctccgccaangcctcggggtcagtatcgaaggcccactgggtcnangctcccaacctggggtnaggcaggtcccg

SEQ ID NO: 745 - DNA, 436 bp, Arabidopsis thaliana
  unsure at all n locations
  Clone ID: ARABL1-042-Q1-E1-F1
tttttttttttttaagcgaatgttttcatattataatttgattggcctttcttagacatcccaataaaacacttacactagagaggaaataataaggccaaaacatacacacgcaagcaagaaattaactttgaaaccatgtattattacggacttgattgcctcttcatcaagattgaaggcttggttcaaagaggacctggaaaagttccactctccctctgctcgttccacttgtcaacccattctccaggacagagggcacggtaatacttggcaaacctttcacagtcattagactcctctccctttgcaagttgtacacctgtgaaactccatgtaccgagtgaagcagtgcctcgtcctccaaggctgatctgatnaaagaaatggngaaantnccagaagcaagagnaagaaatcaacgtccagtggg

SEQ ID NO: 746 - DNA, 445 bp, Arabidopsis thaliana
  unsure at all n locations
  Clone ID: ARABL1-042-Q1-E1-F3
tttttttttttttaatgtcgaatattattctcttatatgattttcttctcaaaataagtaagaaatacatattatgaatttaactttcttagcacangannaccatataaataattatataaattcccagctgcttagcttttttcttcaaagttgaaaacaaaatgaataaacccatctcagagttgaaactaaagaggcagaaagagcctaaaatacagagaacaagactgattctggacagaagtgaaacagaggctgacaggtttcaagcttgggaccttgttagacttgaagtggcttgancanctnccaagtgaaatnangcaancgtncccttcaaanttaacnttaggcagcaatcctnaagaaacctaccattaactcctccccttaagattcaaagttaatgggaagattaatacctgggcctggaaatcaaaaa

SEQ ID NO: 747 - DNA, 415 bp, Arabidopsis thaliana
  unsure at all n locations
  Clone ID: ARABL1-042-Q1-E1-G1
ttttttttttttttttttttttttttttttttttttttttgatccatcaatatcataaagcttcttaaatatttcacacacatacaaagtaatttacangatatgaaatctgcatcacatttccaagatgcaacaaaccggatacacacaactcgatcacaaattaaactcactttccggggacgaanttggtagcgaaggcccatgcattgttgttgactggatcagccaagtggtccgcgaggttctccaacggtccctttccggtgacaatggcctgaacgaagaatccaaacatagagaaaaatancaaaccttccgttcttgaagccccttcancttcaactccngnaaannccccggggtcagtaaccaaggccaatgggtccaaacccccaactgggtaaancaagtc

SEQ ID NO: 748 - DNA, 397 bp, Arabidopsis thaliana
  unsure at all n locations
  Clone ID: ARABL1-042-Q1-E1-G9
ttttttttttttttgataaactatttgttatagattgggttagaataagaatgtagcaaaactagcaacaacaagttgtaacgataannagctttaggcgataataggattattagtcannaacaaagttaaacagattcctcctcattagagaatgattgatggatccttctattcccagttggattcttggagatccttccttgcttagcagatttcctgccacgaacacctttcaaaattgtagagattttttgtttttgggggctataaccacttcagatgggatgcaaccaccaaganaacatatcantattgancttcaatccttcggccgccnactttaccataatatatacccgtggattcnactttgtccatctgaccacanaacatc

SEQ ID NO: 749 - DNA, 439 bp, Arabidopsis thaliana
  unsure at all n locations
  Clone ID: ARABL1-042-Q1-E1-H1
tttttttttttttttaaagttaaattattatcctcattcctctctaccatatatatctgtattacatttttattctcacaatcacccgatctccttgaaagaacccaatttagtaaaaacagacaacatttctttagccttctcatacaagaaaatatatataagcaagacctttttgccttatataaaaccctacaccacaaacaccctttcagtattactcatctcatttcaaaagcattagagattaaagaaaatcatatttntnataaaaaccacactgggcttatacgaagaaccttagaaataaaacaatggccatcttacgggttacgaagcactgaggagcttaacatcatcgattacgggcccacacaagtgatgaagaaatcatcgctccaaccgaagtaaaatggtgctgtaaaacataactcctggt

SEQ ID NO: 750 - DNA, 399 bp, Arabidopsis thaliana
  unsure at all n locations
  Clone ID: ARABL1-042-Q1-E1-H11
ttttttttttttttttgagaaaactcgaccattgtacagattttcagaagtaaaaccaatgtcttgccacattaaagaaagtagacgaaaaagaagattaaaatatctgagatcataacagattctctacgtctcatttcatctcttaggcttcagtgatgggaaactcaaagacgacatctttgccagtgagcttcttgtaaaccgcagagaaagcctcaaccttgtactctgtgttgttcctttcctttgggtccaagaagaccttcatgattttggtaccgtcgagtctgtaccttgtgcgcttcccaacaatctctgcaggtaagaccacatcatcaagaatagcttcatggactgaggtcagagtacngttgcgtggtctctttgccgctgaac

SEQ ID NO: 751 - DNA, 397 bp, Arabidopsis thaliana
  unsure at all n locations
  Clone ID: ARABL1-042-Q1-E1-H12
nnnnnnnnnnnnnnnnnnnnnnnnnnnnnnnnnnnnnnnnnnnnnnnnaatgtaatgtaactgtatatattataacatgaanagtttggttatacataaaaactcctgttaattgcatgttttggtactcnagataacacaaggatgtcaaaaagaaggaagaaaaaacaaacagatcacggaattgagggtcttgaaaaacagtaaggaaacttgatatgatcggtgaactattcgtggtatagatacaagccgagaccaaatcgagcacatgctctgcagaatgctatttcctcagctgcagtaactgggatcctcgatgtgatcatcagtcgtccgttactgtcccagttgattcacgatgtgcctcaccatcagagccacgaatagtgagacg

SEQ ID NO: 752 - DNA, 434 bp, Arabidopsis thaliana
  unsure at all n locations
  Clone ID: ARABL1-042-Q1-E1-H2
ttttttttttttaaacaagcgatacaaattactttagaagcagcttaactttcacattcagagttcaagccaaaaacaatcgttgaagagtgtaagaatctcgtctaaacaaaatgcaagatagggagagagagagggcacagctagatctcagctttaatatccacgccttggaggacgctcttccgctacattcactctgattgctctaccctccaagttctgtccatcgagggcagagatggcttcgttgagttcatccacgtcagacattgtgacaaacccgaatccacgtgaacgacctgtctcacggtcgtaaaccaccctagcttccacaactttancatgctcactgaaaagctgttctaaacgggcattgtccacatcccatgggtagattccctacatatactccgaatgcaaggtcatatanc

SEQ ID NO: 753 - DNA, 436 bp, Arabidopsis thaliana
  unsure at all n locations
  Clone ID: ARABL1-042-Q1-E1-H3
ttttttttttttttacattattaagtcttttaattttatatctaatgtaacgagtccagagatttcatgtgaagaatgaagaaagacatatatacaatacaactgaattaagcaagaaactccacaacattgtctatcgatttcaatgtcttctcgtagtaaagataggactcgtacacctttggcgtccgtacatagaaatccaactcactcatgttttcgacaagctcgtttgccgcctgaacgtaatcattccggcgactctccggcaagatgttcatggcgttggtgagattctgagacagataagcctgtttcaatcctatgtanaatataacgtacctccacgacatgtgggtccaacatctccctcanggtctcttaatccttcagccgtctgttttaaacgcgccgccgcaatcctcaaggtgaatan

SEQ ID NO: 754 - DNA, 162 bp, Arabidopsis thaliana
  Clone ID: ARABL1-041-Q1-E1-G5
tttttttttttttattataaacattgtctctactcaccatattcaacagatatatagtatatatcatgtacatgtattaattttacactgaataaatctataaaaaaatatatattgcaacccccaataatatgaaaaaaaaaaaaaagggcggcctcgagc

SEQ ID NO: 755 - DNA, 397 bp, Arabidopsis thaliana
  Clone ID: ARABL1-041-Q1-E1-G7
ttttttttttttgacaagactttatggtcaatgtgtaaactgttatacaaaatcatacaacacaggaggagcctgaagattttctgaaggacaaacaacaaaatggaaatggaatatagaaacaccaaagaataaatatcaaacctatttcaaatcattttgatgcttataaaaaatacagtaatctaacactctcacaaacccaattcttcttcaggttcatggcccgtaccttccctcgttcaccctatttaacccatgtttgtattcgatttaatacctccttatagtcttatactacaccttagaacacaaacgcaatcctcatgcataacatagctctcgtgagctaatattctcgctctttcttacccaaatgggtttcctcctgattgga

SEQ ID NO: 756 - DNA, 393 bp, Arabidopsis thaliana
  unsure at all n locations
  Clone ID: ARABL1-041-Q1-E1-G8
ttttttttttttagctgaaatcatgttcatctcatatgagccgtgggaaatgaaagagcacagtgtagcataagaagttacaaatgaagaacaaactttatggcgtatttgatcaagcggccactggagttttgagggcttcgagtatcttatcgtctaactcaaacttaatctctttcttgtctctgccaatcttcacatactcttcgaatctctccttgagatcttcaggcagattcgttttactctcccaccctaataagtccttagcggctcttggctctgcgtagaaatgcatgtttctgaatagaaaagccttcttggcgtcaaccccaatggctttagggtcataatgaacgatttcaacagttttgcaacaacnggaacaaaaaa

SEQ ID NO: 757 - DNA, 399 bp, Arabidopsis thaliana
  Clone ID: ARABL1-041-Q1-E1-G9
tttttttttttttttcatggaaaagtctgttacgcaagaaaacgaaatttcagagtccagtgacaccattctgttcttgtagcatttgggacgtgtttagattacaactaactcgtaagagtaactttaaaatgctattcttagagaggaagttctccactgtctgcaattacgactttgctcttaggagttccgctttgtttgccctcagcttcaatcttataaactacatccattccttgcaccactttcccaaacaccacatgccttccatctaaccagcttgttgtcaccgttgtgataaaaaactgcgaaccatttgtgtcttctcccgagttcgccattgaaagtacacctggtccagttgtgcttcagcttgaagttctcaatcagcaaact

SEQ ID NO: 758 - DNA, 66 bp, Arabidopsis thaliana
  unsure at all n locations
  Clone ID: ARABL1-041-Q1-E1-H1
tagaactagctcgagccgnnnnnnnnnnnnnnnnnnnnnnnnnnnnnnnnnnnnnnnnnctcgagc

SEQ ID NO: 759 - DNA, 399 bp, Arabidopsis thaliana
  unsure at all n locations
  Clone ID: ARABL1-041-Q1-E1-H10
tttttttttttttttttttttgcaaaaacttgtaactgtgtgtttatatgaaaattgttccaaaaatctcaacaaaaacaaaaaaannaaacctcaaaggagtgatcagttggtcttaggatcaggcatggggaacaaaccaccagcaccancagctcctcncggcggagaaaaccctagaaatttctgtanattggttctgatactaattgaacacagcagatagagaaaagccatggaacaatccgtcggatcatcacctttcagtcccctgtgactcatcttcttcactatcgtgatcggatggaaaggaagcttcgcgacgactttaccttcgaatagtgaattgagcaatccgaagacgacgaagagaaccagtgccacaacggggccggattt

SEQ ID NO: 760 - DNA, 387 bp, Arabidopsis thaliana
  unsure at all n locations
  Clone ID: ARABL1-041-Q1-E1-F9
nnnnnnnnnnnnnnnnnnnnnnnnnnnaacaacaaaatacatattatattttaaacacacattttggatattatttaagaacactagngatactggaccaacacacatattatacattanatattcgagaaatgaaaaacttggcttgtgaaaacagaaattaaacatatactacaccaacgcatacgttatacgtgatcgagaattaaaagcttcgcttgtgagtccttgattacncattaatatatatatacnagggggctggagtgcgacccccaccatgcccactgcctgatggtcctgtaaatatgtctccattgggtctanatctacgcatcaanttcctcccattacngcctggancgtggtcactcgttgatgatggng

SEQ ID NO: 761 - DNA, 395 bp, Arabidopsis thaliana
  unsure at all n locations
  Clone ID: ARABL1-041-Q1-E1-H11
nnnnnnnnnnnnnnnnnnnnnnnnnnnnnaaaataaaataaagcttaatcgaattatacacgactgtgttaagtatataaatacatagagcgcagaaagattcttatgacaaaacccacaccaatccaactcccatagctcaaagtaaatacaaaatccaaagaatcacgcagctctcaagaatatatcagacacggagcaaaaaggaaagagagggagagagattcaggggcctcgaggtttgaagaaacagaggcacccctgaaactggtccggagctatcattccaccacctttgcttgtgtctatggcttcaagcagcttcaccacctcctccatctccggacgcctgtctggattcgggtcccagcatctcttcatgaagtttgccaccg

SEQ ID NO: 762 - DNA, 401 bp, Arabidopsis thaliana
  unsure at all n locations
  Clone ID: ARABL1-041-Q1-E1-H12
nnnnnnnnnnnnnnnnnnnnnnnnnnnnnnnnnnnnnnnnnaaacatcatcatatcatacaagagcttanacanaagctccaactttggnattacataaagcccaaaaaaaggcccattagataaccttctgcagaagaaattctatcggaactccatccatgaacacatgtcgacaaccgggatataccacgtcacacgctggatgaataatcaagagttttccggcaacaaccttcggcgttgagctgattccggtganatgattcgtgtgttttgcaccaagaatgaaaacatcaaagctccaaattaaagataacggcttaaggaatcntgataaacgacgggaagaatcctcaatccttcaacaaaagagaaaaattctttgaaaccaataagtta

SEQ ID NO: 763 - DNA, 402 bp, Arabidopsis thaliana
  unsure at all n locations
  Clone ID: ARABL1-041-Q1-E1-H2
tttttttttttttatgaaaaacacatgcatataataaataaagagcccacatacatcatacatgatacatcgcaaatatgacaattgacaaacacatgcatataatagataaagagccacatacatgatacattgcaaatatgacaaacacgtgacatgcatataatagataaagagccccacacatcacaaatgaaacaaattaacgtgcatacatttattgacgcaatttcgtagctatagtgacatcagtgacttggtgagttttttgggaaacctttgggggaagnagnaggntacnnaaanggnancttcngggaacaaaaggggggaaatggcggaaaatttggcccccaaggnggaaacccgggacaatgaatgggganaatgggcccagttaaa

SEQ ID NO: 764 - DNA, 449 bp, Arabidopsis thaliana
  unsure at all n locations
  Clone ID: ARABL1-041-Q1-E1-H4
anctgccggtgccggtcaaggtcanatctngggtcgacgaccncaatattnggnggccgcccnnnnnnnnnnnnnnnnnnnnnnnnnnnnnnnnnnnnnnnnnnnnngagcggattaaacttaatttccccttaattttccaaagatatgacaaggaaaaaaaaaaacgtaatcaaaggggaaagtaagtcaaaaagtgccctttcgctgctgcaaaatcataggaagcctaaaatcaccaacactgatccgtctcccatctccgggtcgtagcgtaaacccgccccgaccgacccatcgctccggcgtgtacccgtctccgtggtactctaagcgtcgaagtcgtaaatcgctcttgtagtcggattcgcaagtgtcncgtaagctttgtgaatccccaaaaaatctcgaacgtccgantccgaancatccggatgaaaatactttan

SEQ ID NO: 765 - DNA, 399 bp, Arabidopsis thaliana
  unsure at all n locations
  Clone ID: ARABL1-042-Q1-E1-A12
nnnnnnnnnnnnnnnnnnnnnnnnnnnnnnnnnnnnnnnnnnnnnnnncacaaagcaaattttattgataaactcacactacaagtacaaatgcataccaaaagttgatacatttatatatacgctcataagcaaactattagattatttttttgacacaatacataataaaagcattaatacatttaagtaanggtttataaattccttttgggactggctgatcccgtaaatacaagctgaacaaggagtatctctanaattgctcaaaaaccatggatttttangttanccttcttcacaagcccagcctgaacaaggaacgtagatacgttcttcctctgatcaccttgaagctgaataacctgtccnaattcagagtcctggacgacggtggcc

SEQ ID NO: 766 - DNA, 489 bp, Arabidopsis thaliana
  unsure at all n locations
  Clone ID: ARABL1-042-Q1-E1-A2
gccgcgggtccggaaataaattcccggggtcgncgaagctcactantcngcggccgcgattgggacgcaagcgagaagtttcaatacgatcctttgagttactctttgaacttcgatgacgacgacgaggaggatgaatacgtcggactaggtggattacgaagcttctcgacccgattcgcttctgtcccggtttactcaggtaaagctccggcgatttcgccgacgtcgttgtctgcgttgacgccgcgtaatgagatcattgaaagttagtgggcgcgtgtgagaaacgcgtttgcgtttctggcggcggggaaaaggctgtcaaaatggttgactggtttggtttacatcgtttttgggagtctgtcgcgttttcttatttaatcattctgtttatataatcaactttgaattaantttaataatttcccaatttaattaanttaattaanaaccaaattttaagtttcccccaagcnaaatccc

SEQ ID NO: 767 - DNA, 445 bp, Arabidopsis thaliana
  unsure at all n locations
  Clone ID: ARABL1-042-Q1-E1-A3
ttttttttttttatgaaatatcataactggcatttaccgtacagaccaagaagacctcaaaatagatttttggtctgttacatttgtaagaacagaacataagagaagtgaataaattgttcacaatcagacgagcgagtgtttgtgtgtggtatcagagtcattcttcatcccttttattgttcttgtatgaaatgagtgtgttcgaccttgtcaatcactctcttgatccaggtgaacggtacagccacatcggtatcagtaaatgctcccaacacaacagacacaccttatccaaccgccaaagcccgattaatgtctcctcctctccttacatgtttcaatggagacaaaggcaagccaagttatgcnnggaagcaacnttgncccaattaanancctggaaaccncccccgtggattcccctaanaactttccccctttg

SEQ ID NO: 768 - DNA, 101 bp, Arabidopsis thaliana
  unsure at all n locations
  Clone ID: ARABL1-042-Q1-E1-A5
ttttttttttttttttttttgaaccaaaatccaaaacacttantattgcttttttaggtagcttcctattaaaaaagcaataataagtgttttggattttt

SEQ ID NO: 769 - DNA, 426 bp, Arabidopsis thaliana
  Clone ID: ARABL1-042-Q1-E1-A7
tttttttttttttttttttttttttttttttgggtagaaagaattgcatttaagaagaatgaatgaatatagtaaaacatttttttacaatcagctaatctagaagctttgaaaacaatccaatgttgattttttccagtttgaccctctgaagcttaagtaactacgagttgagagtgtccaagagatggacaaggagataacagaggcacggaaaatattcccatgtctttactgtctgctccgtcccaaaaccccttccaacttgatggcgttaatggacaagcatcagcctgaacctgagcttcttccctcttaacaagctttacggctgatcagctggctttcatcctccgtcacctgtctcttcccccttggctttaaagaaataagcctcctggtgtcccccaagtcctcaaggcttcc

SEQ ID NO: 770 - DNA, 454 bp, Arabidopsis thaliana
  unsure at all n locations
  Clone ID: ARABL1-042-Q1-E1-B4
ttttttttttttttgttttctctcacactttcttaagatttttttcttcggctcggacgcagatgactaacagttacgctctgtcaccggcgattatcgccgccgttcgtcctccggcatctcaagactatcnagttgctgcttctcttagtggacgcaaatcgatcaactcttcatcttcgtccattttcgtacctatctcattatctacttcctacggtcgaagcanatgcagccttctcaatctcgcggaagaatccaaagtcgacgattcgttgcgaatattgcngtgaaaatcggcgggnttntgtaaacncnngacgctgatctaaccgtcaatctacgtcngttgggatnactggangannacgataaaagccgaaaggagaaagaatgggaagctangggttaatggttaacaggttcccgtttgaaaaagttnaacaaaggtggg

SEQ ID NO: 771 - DNA, 439 bp, Arabidopsis thaliana
  Clone ID: ARABL1-042-Q1-E1-B8
ttttttttttttcatatgtcatcgaggacaattaatgacttagacgtttccaacaatcgaattagttcaccttggagtgtatcttgtgtcatctccatgattttcttttcttcctctttgggtttgaggtccctcaagatcttttgccatacattcattcgggtaaaatcttgtgaaacacacacccatgagagcccatcaaactgatgtttaacatcctcatggttaaaaacctgtttagcaagtgtggttttacctagaccacccataccggttatggaaaccacttgaacgtttgcttcgtccaccaaaatatccaaccaattttcttaacaattttgcctccaaaccccacaaaatccgctggtcgtccgtccttagaaaaatttttgtcgcaacctccctttgttaatcaccttgaaggttgcttatacccacc

SEQ ID NO: 772 - DNA, 379 bp, Arabidopsis thaliana
  unsure at all n locations
  Clone ID: ARABL1-041-Q1-E1-B11
nnnnnnnnnnnnnnnnnnnnnnnnnnnnnnnnnnnnnccaaaaaaagaaaacattatctattactcattacgcaaaatgtgataaaantctcaaaagttaaaaaaacaattacatagggtaagattttcggaatataacgataaatggagggcatttctagaaatattacatgctctctctcttctctgacagttacttgagaaaatgattgaagtaagccaaaaattaaaggaaaactccaaaagtttccaaatatttaatcttggaacccaaatttttcaaaaattgcatttcgaaccctactcagatctcttcctttcaatgtcntcncnannccttcatgaancgagaacgaagccattctcgtcttcgccanaa

SEQ ID NO: 773 - DNA, 401 bp, Arabidopsis thaliana
  unsure at all n locations
  Clone ID: ARABL1-041-Q1-E1-B2
nnnnnnnnnnnnnnnnnnnnnnnnnnnagcaaaggacatataattacatattcagcgtagtcctccacttgaaaatataggtattgcgagcatttagtgctcagaaacgaagataccggccatacccatgccagttccaacacacatagaggtcacggcgacccgcttgtcctggcggcgcagctcagagagagcagtgacgacctggcgcgcaccggtggcacccagagggtgaccgaaggcaatggcaccaccacgggggttgaccttggactcatccagagcaagcttgttgacacagtagacacccattgaggagaaggcctcgttaatctcgaaaatatcaatgtcatccttgctcaagttgaacttgccaanggtcttanggatagccaagagat

SEQ ID NO: 774 - DNA, 402 bp, Arabidopsis thaliana
  unsure at all n locations
  Clone ID: ARABL1-041-Q1-E1-B3
nnnnnnnnnnnnnnnnnnnnnnnggacaattcataattttaattaatcataacagaacgttaatctctctacattagcctgcctgcgacggcncatctcccttactttaacgtttacactttaatatgtgtcactctaatcaagattagagctcacaaatcacagttttcaaatattaaatcctataggtaaaatcatagccattattactatttaatcaaagtgagagaaaacgcttatttaaccaaacattaatatacgggttaaaaagaactaatcctttcctttccttttgaacagcggttaaaaagactattcaagaagactaacattacgtataaaccatacttaagattttacgaaaagtcggactaatgatgtttgaatcccctcgagtgttcc

SEQ ID NO: 775 - DNA, 397 bp, Arabidopsis thaliana
  unsure at all n locations
  Clone ID: ARABL1-041-Q1-E1-B9
tttttttttttttttttttagggtttctatagtactgaaactcatggaaaaaacacagtacaaaagatgctatattctaagacattgnagaaccccaaaattaagagagaacataaattatgcaagtagaaaacaaacccagtagaagaaagccaagaccagttttagtttcgtttgcctcgaaggacacccttactacgacgattcttcatccccagcttaaacttcttcttcaacttcttcccaataggttttagcgacttgtttttcttctcatcatccatttcctcatcactatcgttggcgattgtagtggaggcaagatgcagactcagaggaaggcgtcgcaacttccataaacggagaaactggggcttgacgaactggtaacttcgga

SEQ ID NO: 776 - DNA, 398 bp, Arabidopsis thaliana
  unsure at all n locations
  Clone ID: ARABL1-041-Q1-E1-B1
ttttttttttttttttttttatattactaacttagccgtagaaccctgtttggctccaaatcgcgtctcgaacgcgccttaattctcgtcctttaagagttcttccaactccttcaaacaccgagccaccgccgccagattttctgctccgtcgctgttggctcttcgccaagtactcatgcggcggcatcatcatcccggaatcttcctcctcctcttcatcagactcgtgtatcgactcaaccgagttgactcggtatatcttactccaatccggcacgttcaccgggagcccgacgannnnnnnnnnnnnnnnnnnnnnnnnnnnnnnnnnnnnnnnnnnnnnnnnnnnnnnnnnnnnnnnnnnnnnnnnnnnnnnnnnggggaagatgacgcgt

SEQ ID NO: 777 - DNA, 395 bp, Arabidopsis thaliana
  unsure at all n locations
  Clone ID: ARABL1-041-Q1-E1-C10
ttttttttttttgattcgaattatatatcaactattaacaataatggagcaatacatttaacgttgatacatgatactctgttggcgttttacaaatcctagagagtcaaaaccattatccaatcgctggcttgtttcctactttgcatctctcttctcatcatcatcaatatcctttatagcatcctttgcaaggcttgtcacatatgttccagccaatgcagtaaccaacagacccaccccgagagttaaaagctggccgtttcctccaggcaagccaacattagattcttcttgaatgattgctcgtccaaaanccccggcgctgacataagcccangnagcctggaagcatacccaancagcttcctaatacctaaggcataaacttcaca

SEQ ID NO: 778 - DNA, 382 bp, Arabidopsis thaliana
  unsure at all n locations
  Clone ID: ARABL1-041-Q1-E1-C11
nnnnnnnnnnnnnnnnnnnnnnnnnnnnnnnnnnnnnnnnnnnnaagcaatcagaatatcgaaatggatacgacaaaaggcatcaannttccgccaaaattaacaaatttatttgaagttgaaaatcgacattgcttgattttgtttatatcaatcgtttaaccacatagcatcatanacttaattctccaaacagaaatcanatatacacacataaaggcttttggattctcttatagttataaactggatcacatcactgaagcatcgttttatgcctttcagttgtcgccttgcctcagtanacgcaatatgggtcaagannanattgaggatgtccaagttagaagaagctactganngctagggatgtatccgtcnt

SEQ ID NO: 779 - DNA, 399 bp, Arabidopsis thaliana
  Clone ID: ARABL1-041-Q1-E1-C8
tttttttttttttcagataaagctacattacatataatcttgtaaagctgaatgatacatattctagtaaaaataattaaacgttacataaaattacactcgtagatttcacaccaacacatcttctattgagaagattctttttcaatgtctggtatagggaagttttactagcttgttccatactcaagtaattcccacctgaatggctgaaagacatatagcacttccgggcaactcttgaacaaaagagcgacacaaacgcaaaccgctgctatcgctaccatcgaaagcattgctggcctgtaggcaacaagacttgtggtgcgttgtgacaaacacacgtttgtgatcacagagcttacattgggtttatctgtgttatctccaagcttgaag

SEQ ID NO: 780 - DNA, 400 bp, Arabidopsis thaliana
  unsure at all n locations
  Clone ID: ARABL1-041-Q1-E1-D11
nnnnnnnnnnnnnnnnnnnnnngacagtgtaaaaagattcatgtaacgatccaacatttcttcataaaattctaacgtaaaaaacaatcatattgtgagatggttttagagaaagaaacaaagttccaaaagacacattcgttctcaaatcaaaggtactatgtaaccttaaataagaccaaaaagaaacaagaaagtccttttcaaggaagatnagatncagcagcaccaccaccgaaaccaccaagctccacgaccaaacccttgcctagctccaccaagctccacccctgaagccaggctggtaatcagcangtgctccagccttgtcaccatactctccacctgatttaggacctccacggtatccatctctgtcaccaaaacctcctctctccat

SEQ ID NO: 781 - DNA, 400 bp, Arabidopsis thaliana
  unsure at all n locations
  Clone ID: ARABL1-041-Q1-E1-D2
tttttttttttttaagattcaaggttttagagcttcacatacgaatgttctacacttgaaacaatgaatccaaaccaaactacataagtagcaaatatgttcaccctacccttgaaacaacactattctgcaggtcataaatcagttggggaatcttgtagctcttctcacccacgggaccatcgaacgctgctgctgatgagatccagctccattgttgcctacattgcttctattgtctgcaaaccttctcattctcattctctcttccttcatgtttgcaaaccgagaatccagtgtctgaggccatnnnnnnnnnnnnnnnnnnnnnnnnnnnnnnnnnnnnnnnnnnnnnnnnnnnnnnnnnnnnnnnnnnnnnnttccgacaaaccctctttgt

SEQ ID NO: 782 - DNA, 391 bp, Arabidopsis thaliana
  unsure at all n locations
  Clone ID: ARABL1-041-Q1-E1-D5
ttttttttttttttttggcacattaaaccagattctcattgatgcataatgaaatctcaacttacaatgcttttctgatctatgcatcnaagataaaatagtgtttacaagtagcatcgtattgaaccaattgatccagccatgtggtgtatgtcagccattacttgtttgcgttccctattatcggttagtgtccctctttaggctcggtttgcctcccctagtatctgattggtccatcgaggctgcctgtagcaaactgttgaactattggattagttgaggttgtgaattcatgtgtcattccttgccaaacgatctttccttcatacagaaacaataacctgtctacagctctttgaatggtgctatgttgatgggtaacaacaag

SEQ ID NO: 783 - DNA, 401 bp, Arabidopsis thaliana
  Clone ID: ARABL1-041-Q1-E1-E4
ttttttttttttgttgttcatgaaaagatttgtagattgacacacgagactacccattggtttgttgcggtttaggttcaaactccaaagatgaataggttttccattagacctccaagaagcagccagcttgaacatgaccaccgtgtgtttccaattttacccatcgtgagctacttaaatcacatatataccctacggtggcttcaccgtatccagccaacgccttcccgttgccgatcacaatcagcatcccgggcctcaccgctacgtaagtaacattgtacacatcagcagggatctggcccaccttttgccacttgtcatttagaaacatcatcacatcgccaccccagcacgcgtacaaatccccaacggcgaccaagtcggaagggctaacg

SEQ ID NO: 784 - DNA, 244 bp, Arabidopsis thaliana
  unsure at all n locations
  Clone ID: ARABL1-041-Q1-E1-E9
tttttttttttttttantccaaaagtttcnantgcaagacaacatggtataggtatacaacaacacgaggtaagcccanggntcacatncattanctgaccaaacaaaattcgttttancnataacttacagacataaaaatcaactcgtttttaaacctgaatctgacaacaaccctccatatcaacagttttgagtttcnttttgaaactctctcaaagtgcgtcacaacttcanaccctac

SEQ ID NO: 785 - DNA, 400 bp, Arabidopsis thaliana
  unsure at all n locations
  Clone ID: ARABL1-041-Q1-E1-F1
nnnnnnnnnnnnnnnnnnnnnnnnnnnnnnngaaagaagagcaaacacataagcattctttctcttgaccaaagttaaaaacacacaacatttgaaacatgacaaactagatgtacttgaagagcaaatggaggatctaacttccgaagacagcgacttcgagattcttggcggagtcaacaatggaaggaggatcaaagcgagtaaagagcttataagaggagattagagagagaacgatgtagaaacaaaccacaaagaatgtgattataacagaagcagtggctctatgacagaaaccgccataggagctacatgcatcgctccaagtaatggctgagtctccattgtaagccaagtatagaacctcagctgatacagctccagcagcaagaaccan

SEQ ID NO: 786 - DNA, 410 bp, Arabidopsis thaliana
  unsure at all n locations
  Clone ID: ARABL1-041-Q1-E1-F3
nnnnnnnnnnnnnnnnnnnnnnnnnnaataaaaaaaaagtatacatattgaaattcttaaaattcgttacaacatcacgaatctgtaatatttgctattcgtataagcaaaatgtacaattcacatcactaagacagattacttaacgaagacgtttagttaccttatttttcttcgtcgccgtttcacacactaacactacaactagtggtaaacgtatacttaacggcgttgtctccgacgataactccgttagctttgttacccgaagtttatatatgctggacacttcacatgaagatgatacttcccggtgataaaagtcccaaccttccaactcaactcctaacatcaagcacgaaatggattcaacaaaaacgaacaccgtttatcctttatcggtgtcaaag

SEQ ID NO: 787 - DNA, 398 bp, Arabidopsis thaliana
  unsure at all n locations
  Clone ID: ARABL1-041-Q1-E1-F6
ttttttttttttttagaacaacaatccagtccatgtaatatttaacagtttcggacttaaagttatacacgcacatgagtatatatgatacaagagttcaaacatcatgatgatgttactaagacaagtttttacttattcatacaatatggttcacagacatttggaaaccataccaaacagactgatcaaatctcttttaagcaaaaagaatctgagaattcgatggagttatatctgcataacgctccggcgactcaacaacctcccacctcacagcaaacttattctccgactgccaaatattcccaaccgcgagatgaagattcctaccaaccacatatactctgttcccataacagttaaccgcaaacggtctacaaaatctgctcangcaa

SEQ ID NO: 788 - DNA, 396 bp, Arabidopsis thaliana
  unsure at all n locations
  Clone ID: ARABL1-041-Q1-E1-F8
nnnnnnnnnnnnnnnnnnnnnnnnnnnnnnnnnnnnnnnnnnnnnnagannnnnnnnnnnnnnnnnnnnnnnnnnnnnnnnnnnnnnnnnnnnnnnnnnnnnnnnnnnnnnnnnnnnnnnnnnnnnnnnnncaccacaccaattattcgcataaatagtatagatatatcaaacgatccaattcgggttcagtttagaaaccgtggatcttgatctgatccttcttagcaatcccagtttggaccaagaactgagacactttcttcctttgatcaccttgaagctggatgatcttgcctagttctttgtcctgcacaacgttaccgttgcagcagaaatctttcttcaaatccttgagaatcctctcgtanctgtactcnttcctaagcccttgga

SEQ ID NO: 789 - DNA, 360 bp, Arabidopsis thaliana
  unsure at all n locations
  Clone ID: ARABL1-039-Q1-E1-H3
nnnnnnnnnnnnnnnnnnnnnnnnnnnnnnnnnnnnnnnnnnnnnnnnnnaacaaataaccttcaagctttanaattccatcttcaaatttcagataaagatgatgataataaaacccataaacatatanagtacagacgaaaaagttgatattttanacatttttantaaagttaaaacaagaagaagaaagaaacagacatgaaaacataaacaggtgctgaagcatacgaatctttgtttagcccatggcatacttctgagtccagtttcntgcagtagcctcgtanttggcnctgtcggttttgnacagngtgtgcaatctctgggancaaaggggtcatccgggatttggatctg

SEQ ID NO: 790 - DNA, 419 bp, Arabidopsis thaliana
  unsure at all n locations
  Clone ID: ARABL1-04-Q1-B1-A1
tcgagggggcctgctactactcagcagcgagaatctcaatctgtctctccttcgagtattttacaaaaggctagtactgcattagaaattttgaaggaagtgcttgacgcagtcgattctcaaaatcctgagggggcaaaagatgagtttactcttgatcttgtcgagcaatgttcgtttcagaaagagcgcgtaatgcacctcgtcatgacatcgagggatgaaaaagcagtttctaaagcaatcgaattgaatgagcaacttcagagaattctcaatagacacgaagatttgctgtctgggtaaaatcactgttcctaacangtctaacacatcaaatggatatcattccaatctcgaacctgtccgtcctatctcaaatggtgancaaaaacgcgagctaaanggttctaatgcaa

SEQ ID NO: 791 - DNA, 445 bp, Arabidopsis thaliana
  unsure at all n locations
  Clone ID: ARABL1-04-Q1-B1-A3
acncgtacgtaagatcggaattcggctcgagaatatatctcttcttttataagcaatggctccaagacaggcgaacggtagaagcattgccgtgagtgaaggcggcggagggaagacgatgacgatgacgacgatgcggaaggaagtgcactttagaggtgtgaggaagcgtccatggggtagatacgcggcggagatccgtgacccgggaaagaaaacccgggtttggctcgggacattcgacacggcggaggaagctgcaagagcttacgacaccgccgctagagagtttcgtggctccaaagcaaagactaatttccctcttcccggagagtctactacggttaacgacggtggcgagaacgattcctacgtcaaccgtacgacngtgacgacggcgcntgagatgacgcctcaganatttccgtttgcatgtcaccgggga

SEQ ID NO: 792 - DNA, 465 bp, Arabidopsis thaliana
  unsure at all n locations
  Clone ID: ARABL1-04-Q1-B1-B4
gccgaagagcaccagaaagtcgcngcccncccgtacgtaagaacggaattcggctcgagacagaatcaactagttttgtttttcctctttcaaaaatgcatttctcttcgtcttcaacatcgtccacttggacaatcttaatcacattgggatgtcttatgcttcatgcatctttgtccgctgctcaactcacccctaccttctacgataggtcatgtcctaatgtcactaacatcgtacgagaaaccattgtaaatgagttaaggtcggaccctcgtatcgctgcgagcatccttcgtcttcacttccacgactgctttgttaatggttgtgacgcatccatcttgttagacaacacgacatcatttcgaacaagagaaagatgcgtttggnaacgcaaattcggctcggggatttccagtgattgatagaatgaaagctgcggtgganaaggcatgcccaaga

SEQ ID NO: 793 - DNA, 409 bp, Arabidopsis thaliana
  Clone ID: ARABL1-04-Q1-B1-B6
ctcgagctccgttgaacgatcaagttcctggaatctctgaagaagtagtcgatttcgctgttaaaatctcgacgaaacctggttgttggacagattttccattgtcactcgatactgaatttgaactgtctgaggctcaaagggcacatgcatcagccattgaagatttggttcctggccttgtagctgtgaagaatcaagttagtagttacatggatgatgaacacttctggctgatttattttattttgctgatgccgagactgaatgggcatgattttgaactcttagcaacatgcaaggtatttgaaacaagggatcaacttttactaaagctgcaaaagaaagagacagggtcaagcaagagcactactggtcacgaaactcctgaagaaggtagcagtaggga

SEQ ID NO: 794 - DNA, 412 bp, Arabidopsis thaliana
  Clone ID: ARABL1-04-Q1-B1-C1
ctcgagacagatttgagatggtaattagttttaggtgctagttacttaagattaatttctgtcttgtgtctttagaaacttcgatttgcagaaatctatcaagcgattatgtcttcgggttgaaagattgaagaatattccgatgcttattatgattcctttttgctgtgtcttttaaatggagcaccgttcagttttatttcggtggttacaaggattcattgtgcgatgtttcggcgatgcattcctcaccggattcggtgttcatcggcggcgaaggttgatgtcggtacacttccgatgactcttcatcttgtgttgcagttgtaatatcacgtggacacgtgtattggataaagtccaaatgtcaaaacatctttatgccgtaaatgttaatcctaagggctaagtt

SEQ ID NO: 795 - DNA, 394 bp, Arabidopsis thaliana
  unsure at all n locations
  Clone ID: ARABL1-039-Q1-E1-G4
tttttttttttttttttttttaggtccagaacataacttttatttgaccatatattcgaatgcacgagatgtgcattctgaatagtgatttaaaaatcatacaaaagaaagaaatagaaagcttgttaactctaaatgaccaaatggatgaaagagcaacaacatggtgatatgatatacacatgtattatgaaacttggtctcaacaaggtaacttgaaacccatgtaacgaccagagacataatcattccaaacatcaagagctccatagcttgtcatcaacacaatactcaatgccatgacgataccaaccgagaacacaatgatcgaagcccttccatactcgggttattaccttttgaancacctttantcccacgaatggtgccncaa

SEQ ID NO: 796 - DNA, 422 bp, Arabidopsis thaliana
  unsure at all n locations
  Clone ID: ARABL1-04-Q1-B1-C3
gnaattcggctcgagcgtgaatctgcgttaatgtcggagctaagcttcgttgttcctcctgatcacgagactttggacttcaagtttttgttgaagccaaagaacagaaatacgccctgcatagtggaggagggtgaaaataggcttcttactggtggttcgttgcaaggagatgctagattagctctgtttaggctggaaggtgatgtgattgttgaattccgagtcttcatcaacgctgacagagtttctccaattgatcttgctactagttggagagcttatagggagaacctccagccttctactgtacgtggaattcctgatgtcagcattaatcctgattcaaaatctgctgagtgtcctttagaaagtttggagctccatcttgcacattatgaagttcctgctcctgcgccttc

SEQ ID NO: 797 - DNA, 465 bp, Arabidopsis thaliana
  unsure at all n locations
  Clone ID: ARABL1-04-Q1-B1-C4
gcccgaagagcacagaaatcgcgnccangccgtacgtaagancggaattcggctcgaggcggggccaaatggagatttctgaggccatggacatcagaacaagacaagggttgcttaatgccctagcgggaaaagttggcaaaagaatggacagcctcctggtgcctttagaattgctatgttgcgtgtctcgtaccgagttctctgacaagaaagcatacttacgctggcagaaaaggcagttaaacatgttagcagaggggctcattaacaatccagttgttggatttggagaatcaggtccgtaaggcaactgacctgaagagtcctctgctaaggattgaagaatcagagtctcttccatcctcaactggagaagtgcaaagagcagaatgtttaaaatctcttagagaagttgctatctcacttgctgagagaccggctcgtggtgatttgacgggtgaa

SEQ ID NO: 798 - DNA, 461 bp, Arabidopsis thaliana
  unsure at all n locations
  Clone ID: ARABL1-04-Q1-B1-C5
gagcanactcagacgtcccgnccacgcgtacgnaanancggaattcggctcgagctcgagccgattcggctcgagcggctcgagcccaattgcatcagcagtctctgattcgaccccctcatgggctgccaatgcccaactctcttcagcaacccctgcaatatcctaactttaatacccctcctccacctactgggtcatcatctttgcaggggtcaagcttgccagaagcacnctcttcattgtttccttttantaccagttcncaaatgttagctcctagttcattgcctttccctgntctaccacctgtgacgctctcgtctagcctgcaagtctacantggcaatcaagcancatctccttcaagnagcnttcaganatgggaactccgttgctgtnaaacaaaagcccctattactgntcctcctaacctaactcaaggtaataatttgcntttc

SEQ ID NO: 799 - DNA, 87 bp, Arabidopsis thaliana
  unsure at all n locations
  Clone ID: ARABL1-04-Q1-B1-C7
natcggaattcggctcgagactagttctagatcgcgagcggccgctcgcgatctnnnnnnnnnnnnnnnnnnnnnnnnnnnnnnnnn

SEQ ID NO: 800 - DNA, 465 bp, Arabidopsis thaliana
  unsure at all n locations
  Clone ID: ARABL1-04-Q1-B1-D2
gaagagcacagaaatcgcggnccnngccgtacgtaagancgnaattcggctcgagggaaactgttttgcttctagatccgatccaatccaatcaaacaaaggatccgattgatcagaaaaaatccaccaaatttctcaagatcgaaacatataattgaagatgagcgacgtatttgaagggtacgagcgtcaatactgcgagctctcaaccaatctctctagaaaatgtcactctgcatcggttctctccaacggagaggagaagaaggggaagattgctgagatcaagtctggaatanacgaagctgatgtcttgatccggaaaatggtcttgaggnaaagaaagtttgcancccgagtgctaanaccgtgtgtccttctaaactaagagagtataaatctgatctgaaccaattgaagaaggaattcaaacgaagtctcttccgcagatgctaanccgtcttc

SEQ ID NO: 801 - DNA, 415 bp, Arabidopsis thaliana
  unsure at all n locations
  Clone ID: ARABL1-04-Q1-B1-D5
tcgaggctaccaaaaaaaaagaaaaaaaaaagagctacttgtgttccttcttttaatggaacttataagcacaatcaatctcttaacaatcgttcttctactcttcgttgtttccaagatatggaaagcttgttggatcctccttttgcgtccattgatgctatcaaaaagattcaagaaacaaggaatctcaggaccaaagtacaaaatcttgtacggaaacctcagcgagataaagaagatgaagaaagaagctgacctttgtgttctgggatccaattcnaatgatatnttccctccgtgtgtttccccaagtatcaacaatgggatgtctcaataagggaacgttttccaaccaaccntgntttttttttcctcctttcananatgaaggttacttaacacacacataagt

SEQ ID NO: 802 - DNA, 455 bp, Arabidopsis thaliana
  unsure at all n locations
  Clone ID: ARABL1-04-Q1-B1-E3
aagagcacagaaantcgcgtccacccgtacgtaagatcgnaattcggctcgagggggcctgctactactcagcagcgagaatctcaatctgtctctccttcgagtattttacaaaaggctagtactgcattagaaattttgaaggaagtgcttgacgcagtcgattctcaaaatcctgagggggcaaaagatgagtttactcttgatcttgtcgagcaatgttcgtttcagaaagagcgcgtaatgcacctcgtcatgacatcgagggatgaaaaagcagtttctaaagcaatcgaattgaatgagcaacttcagagaattctcaatagacacgaagatttgctgtctggtanaatcactgttcctaacaggtctaacacatcaaatggatatcattccaatctcgaacctgtccgtcctatctcaaatggggaccaagaaacgcgaagctaaan

SEQ ID NO: 803 - DNA, 417 bp, Arabidopsis thaliana
  unsure at all n locations
  Clone ID: ARABL1-04-Q1-B1-E5
ctcgagggaacgtacaagccgagatagtccactgccgatgggctatgctaggagccgccgggatattcatcccagagttcctaacgaagatcggaatcctcaacactccgtcatggtacacggcgggagagcaagagtatttcacggacaaaaccacactctttgtcgttgagctcattttgatcggatgggcagaaggacgtagatgggccgatatcatcaagcccggtagcgtcaacactgacccagtcttcccaaacaacaaactgacgggcacaagacgttggttaaccaaggtgggttatggttcgaccgttggggttggggattcgggagnccggcgaagctgaangatttgnggaacnagggngatnaaagaacgggaaggntggctaagttggcaattgatgggtgctt

SEQ ID NO: 804 - DNA, 402 bp, Arabidopsis thaliana
  unsure at all n locations
  Clone ID: ARABL1-04-Q1-B1-E6
ctcgagcatcattcctgaagctttaaacaaatatggcgctaactgtggccctgaagctgtctggtttaagactggtgctttgcttcttgatggaaacacattgaactactttggcaagaacatccctatcaaccttgttctcgccgtagttgctgaggttgttctcctcggtggagccgagtactacagaatcaccaacggattggatttcgaggacaagctacacccangaggtccatttgatcctctaggccttgctaaggaccctgagcaaggagctcttcncaaagtcaaangagatnaaagaacggggagaatanccaagtttgccaanctcggtttccttaaccaaagcgtntgttaccgggagaangtcctgttgaaaaccttgcaaancatctc

SEQ ID NO: 805 - DNA, 388 bp, Arabidopsis thaliana
  unsure at all n locations
  Clone ID: ARABL1-039-Q1-E1-B11
tttttttttttttttttcacagaaatgtattttcgttggtaatatgctcacaatatatatatatcttgtgtttgagtttgagtttgatgtatcacacaagattagcataaattatttgtctccttctctggctctctgcacccattgtctcgtcggttttcttggatcttgcgaattcggcttcctttcattgacagtaggtccccggcctctgcttctgcctctgcctctccatctccctcgacctctcctgttggtggagctgctagagtttgtctctgattcagcttctttgggttcctcntctccttgntcntggctttcaccagcttcntcttccntcgtttcgtgacgttgatgcatgagctggggggaggaagatacattc

SEQ ID NO: 806 - DNA, 377 bp, Arabidopsis thaliana
  unsure at all n locations
  Clone ID: ARABL1-039-Q1-E1-B5
ttttttttttttttgagaagaagcaaaatcagtttaatatcttcctctcgtgtttgtttttataatttctattaccttcactccatcagaaacttagacaagaaaagacggagatgttcattagcacagcgcggtggaactatctttccgcgctctcagaaattcaacactgaaagaataactctcgcttcnttttctctttgctattacatgattgatacatccagcangacaatgactaaagagatagtcntttcacctctctcattccctcattcgttctctgtctaagttacangtanactctctcctngaatctttnttctcantcttgcanatcttctggctantccggaatatcaccgccttttgtcaan

SEQ ID NO: 807 - DNA, 389 bp, Arabidopsis thaliana
  unsure at all n locations
  Clone ID: ARABL1-039-Q1-E1-B10
nnnnnnnnnnnnnnnnnnnnnnnnnnnnnnnnnnnnnnnnnnnnnnnngacngtggataccanatcttatttcagttgtgatgtgaaattaatagaaattacaacagactcatcttattgtaagtactattaaacatgaagagagaggatatggatcaatatatctacgagtttaagtgcttgaaattaactgattaggtaagaccctactttgtggcatccttagcctctccngctttaccctccgcgaactctgccgccttgtttgcggcttcttttcctttctcctccacatacgccgcagctttctcaagcttctttacccaatgtanctgcggtttcactgtttttttcaacaacgtagtcnttcgctttcgcaccaaccggct

SEQ ID NO: 808 - DNA, 395 bp, Arabidopsis thaliana
  unsure at all n locations
  Clone ID: ARABL1-039-Q1-E1-C11
acggatgttgcggtagtagatatccgaaatccgacccggatcctgatcctggtctcgacgcgggtcttgaaccggcgcttgaaccggatccgagatcccagcttccttgaggactcgttgtcggcgtagacgccgttgtgcttgtaccgccggtaacatcaataacaaaactcccgccatttttcaaactgatcgacgacgatgcagaaactgcggtggctataccgtcttggaaaagctcgaaacgataacctagagtgtcagaggtaaccagcctcacgccatgcttctagtcttccccatggcttccatgtgcaaccgtcaggtcgangaataagccacgctccggggacttgaccgagtcacccgggttcgaaccaaggagatggtacgaa

SEQ ID NO: 809 - DNA, 137 bp, Arabidopsis thaliana
  Clone ID: ARABL1-039-Q1-E1-C4
ttttttttttttgcttttaactcaaatacactaaaaatgatgaaacaacattcacatacaccacaatgctcacaaacaatatagatacaataagaggctttgtgagttggggaacataaagatgttgttgctcgagc

SEQ ID NO: 810 - DNA, 406 bp, Arabidopsis thaliana
  unsure at all n locations
  Clone ID: ARABL1-039-Q1-E1-C7
ttttttttttttatgaaaaatacatttcttttgcaatctctgttgtctgattaaaatacataagaatatactttcctgagaaacgtatagagagaaacaggtccctagaaattgtatacangaacacaccacattttgatattnnnnnnnnnnnnnnnnnnnnnnnnnnnnnnnnnnnnnnnnnnnnnnnnnnnnnnnnnnncttgttcccactctccatcaacagactctttccacactgtaacgttattgttcccatcggaaacagccaacaaattaccggtcaacgaccacgangacccgccacactgggtgttttgaaatcnttcaaaacagtaccttcccattgctcaacttccttcccctaaggtccaataatgatnactttccatccttctgaanccaa

SEQ ID NO: 811 - DNA, 396 bp, Arabidopsis thaliana
  unsure at all n locations
  Clone ID: ARABL1-039-Q1-E1-D11
nnnnnnnnnnnnnnnnnnnnnnnnnnnnnnnnnnnnnacaaatataaaaacaaatccaatgcataacaataaaacaacgcaaaagaagattctgcttgatcttctttcctgtcctataaagagttgttgctagatgaagaactagagagaaaaagattcagttttaattttccacctataaattgttcaaaacataaacaacaataaacccaaatgacaacgcagatccagaagacccccatgtagaaagcangtgagttccaagaatatggcgaggaaagaaacttacaattaangggaaagaacagagnccttanctttagccacncttngacccgttccgagttcntcttcagctggtttttaacngnaaagcgcaatggggtggtactttcc

SEQ ID NO: 812 - DNA, 412 bp, Arabidopsis thaliana
  unsure at all n locations
  Clone ID: ARABL1-039-Q1-E1-D3
tttttttttttttttttttttgaaaacaaagttctttttattgagatatctgaattaatcagactgaatacaaatatggcaatccggagtaatgaaaccacgcacttggcttgttttattcaaaccataattattcactctaagttaccactgagtantatgcagcaattactanaaaagtaaaaacanaacaaacgatacttagcctataaacagaaccaaaccggtttagttgtttttggcggcgttttcaaacgaccaagctccaaatatcgtgacgctcaacggcacgtcccatggaaccagcaaaaccggngtacatgttttgaagaagaacttcattgagcactcngggagcttcgatnaaangcccgcttaaggttccttaacggttttcaaggccgaagtggaa

SEQ ID NO: 813 - DNA, 377 bp, Arabidopsis thaliana
  unsure at all n locations
  Clone ID: ARABL1-039-Q1-E1-D4
tttttttttttttttttttttaagatgaaagtgagtatttatttagctagcatgataaatgaaaatccccacaaataacactaaacaaatctcttttttttttagggttccttctttttttgttctcatcccttttccacacaaaagaaaaaatttacaacatagtaataatgtagacataacttgcgaaaagagataatgggaggagaggcctcgtttccttctggtgatactccttagcattcacaccctgtagacctctgttgantgctcgtccctacatcgattgtgtctggcaagtatagttcttcttcttctccgctcttcaatgngtccttggnaatgcattggaaagcntcctccacattaggtaccgn

SEQ ID NO: 814 - DNA, 211 bp, Arabidopsis thaliana
  Clone ID: ARABL1-039-Q1-E1-D8
gacagggagtaaaggactcctgaccacacccagtaatgattatgtatccaaaataataaatgtatacgatgtatgtataagatggacatgtttcagtatcttaccaaaaatataggagacttttaatgaaaagtcttcttgtttaattttatgaactttatgattaataaaaggagtgtgtttaataaaaaaaaaaaaaaaaaactcgagc

SEQ ID NO: 815 - DNA, 368 bp, Arabidopsis thaliana
  unsure at all n locations
  Clone ID: ARABL1-039-Q1-E1-D9
tttttttttttttttttttttaagctaagagaaagcctttcaatgaaaagatgtacaaatacaaatcaaattaacaaacgcagcccaatcaatataagatgttgaccttataactttctatgttgccatattaaacccacattaagcaaactaaagaacgtcattacatcaaataccatatttcatttgtttccccatcgagatgantagagatcacatgcatccgaaaagctttttgggagcggttccagtggcacggtacttggctgcnaattcctctgctttgagaatttcttctccacgcttagcttcaancatcgctctcttctcttcngcttcngttgngaagttgagctattttgttcgnc

SEQ ID NO: 816 - DNA, 386 bp, Arabidopsis thaliana
  unsure at all n locations
  Clone ID: ARABL1-039-Q1-E1-E12
ttttttttttttttcattgaaaaaataacttcaatctaagcaagtagctacacaaagaagaacagaatcactatcagcatcacaaagagaagatgacacttctacactctttgagtttcttttttacaagtgatcaaaanggataaatagagaaaaacaaanacaaaacaaaaantccaaacatgaatcattcatcatattcagacagacatgtgcaagatcaaggagaatcaagantctcagttctgcttctcacaatccgatggaaaacttctcttactttcctctcaaagcggatccaagccatttctcaaagcttcacgaacttgaacaagctcatcagnnctctgtttnactcaangtccggtggcnacagtcaacgggga

SEQ ID NO: 817 - DNA, 385 bp, Arabidopsis thaliana
  unsure at all n locations
  Clone ID: ARABL1-039-Q1-E1-E4
ttttttttttttttttcatacaattatactccattaatctttcacttttacacacaatcacccaatatgtaaacaagacacanacgaccnnnnnnnnnnnnnnnnnnnnnnnnnnnnnnnnnnnnnnnnnnnnnnnnnnnnnnnnnnnnnnnnnngagatgaattgttacaaagatacanattcaataaaggcttangaaacatccacacgttgcctttggtactacaccagtggctctatacttagcaaccatttcttcagctttganaaagctcttccccttttttaagcttcaaccaagtgcgctccttctcttctgcnaacttgtgggantgcaagctacnttgttcntcaatttcctcaccgtactgcgcctttttcntt

SEQ ID NO: 818 - DNA, 385 bp, Arabidopsis thaliana
  unsure at all n locations
  Clone ID: ARABL1-039-Q1-E1-E5
ttttttttttttgtgtttatgaatgaatattcaagttagaataagattacatactgtagtacaaagcaaaataaaatcacttagataagtcagaaaaatcgaaacgttaatctaaaaactcagttcctacaagaaatttagcaaatattactatagccttagatcgagatctttcgaactttggccttcttcaatcntcataatatcatctttatcacccgtctgatttgatatgggccatggtttgaccaatggcgttatccggcggtctttgtgacgacngtcctgcctccangtggttgaccggttacaatctccggcttgggaggataacgatgatgacctgcgttttggttnacttggtacgggagccctagcccanagg

SEQ ID NO: 819 - DNA, 413 bp, Arabidopsis thaliana
  unsure at all n locations
  Clone ID: ARABL1-039-Q1-E1-E6
ttttttttttttaagattagatatatagtttttgcctaagatactctcaagaacgtacacacactcacataagctgaaacaaaaacagaggatacaacagaaagaaagtactgagaaactgggcaatgaggcagacgcttatttacttgtagcattattactgtgactgaagcaaaaccacttttgtccttttagaaatttctcacagaaccttctctgaagctggcctcttggtgatctcagccacccactcgttgacacgtggacgctccgtgaaagagcttcttggtgggagttccgancaagtantgaatcacgggaatgtggtgaaagatcggtcaaagtgaaagtttcaccagccaaatacttgaactccttcagcccaacctccgtnggaaatcaaggggccttgg

SEQ ID NO: 820 - DNA, 396 bp, Arabidopsis thaliana
  unsure at all n locations
  Clone ID: ARABL1-039-Q1-E1-E7
ttttttttttttttttcataattttgcaaacagtgaaacaagaatatacaaatgaaggtaatttgncatttgtttatgtttcagccacaattctatttgtacaagaaagtagataaagaactgagaataaaccataaaattctcacagtgaccttttgagtttttttgtctcatgcttcctggagaagaggcgcagcggttgattctctggttactgcatcaggctcggaatcttcgttatatcgatccanactattcaggaaaatcccnatggaccaaattgcancaagctggaaagagaacgactgtaanaacaaggagaagtcactcnccaattgttcacgtantccngannaactccanngagtggtgangaaggttcatctccaaagntcc

SEQ ID NO: 821 - DNA, 395 bp, Arabidopsis thaliana
  unsure at all n locations
  Clone ID: ARABL1-039-Q1-E1-F1
ttttttttttttttattgaggacaatctaactgactcagaatcctgtagctcttacacatttcanaacaaatcatccgagaaacatgagtagccgcagtattattattccatccgtacagttttattattcgttctcgctagtagctacccaaaaaattcaacaaattggaaaataggaaataataaattcaataanaaaatagngtaagtaaatctctgagaggccgctttagttgtgcttgccatcgttaaactgtgcgtttttggacgacttgaaagtttcaagaaactctttagccttttgnaactcttgcttctgcctcgacttgtcccatttgtgttcacttgctagaatctccancacacgctgnaacgcccgaggcgntggaacagt

SEQ ID NO: 822 - DNA, 406 bp, Arabidopsis thaliana
  unsure at all n locations
  Clone ID: ARABL1-039-Q1-E1-G2
ttttttttttttgaagttaagtatctacaagtttttattttcattgcagcaaaaatttnnnnnnnnnnnnnnnnnnnnnnnnnnnnnnnnnnnnnnnnnnnnnnnnnnnnnnnnnnnnnnnnnnntcatacacgcatacataagagaacactgaacacctctttggcctacaaaagcaaaaaaaccaccacttcatgcagtctaaacgacatcgtttaagggtgggtactctgttttcttcttctcttctctttttcaanacttgtgttgtgtgttaagagatnacatgccgtaagtaggaggagagctccctggncaantctctgatcctcctgctggcttctcgaaagcatcccggacgtcgaccgtctccctaaaaccgaaaaggggtcccttccccccnggc

SEQ ID NO: 823 - DNA, 467 bp, Arabidopsis thaliana
  unsure at all n locations
  Clone ID: ARABL1-038-Q1-E1-C6
cgccgnccggcacaggtccaaanacnnnttcncgggtcnacnaccncacnatncggcggncgnccnnnnnnnnnnnnnnnnnnnnnnnnnnnnnnnnnnnnnnnnnnnnnnnagagagacgattgccatttaagaaagaaaccaaacattgaaacagaatacactggaggaacatatactatataatcagagaaggtagatttatttgatatatattagctaatacttgttcactttctcnggaacaagcttgagatgctgcgacttgtgcatagcaagaccagtcangacatccatattgatatcatctggtttcatcccattaggaagtttaaagttgaagctgaggagaaggttcgcataaggaacctcaagcatcgcggccccaagacgcattcccgggcacattctccggcctgacccgaanggtataaactcgtagtccgtgcctttgaaagtcaanttcc

SEQ ID NO: 824 - DNA, 385 bp, Arabidopsis thaliana
  unsure at all n locations
  Clone ID: ARABL1-038-Q1-E1-D12
ttttttttttttttttttaccatgagaaactcaacttccaaaaccaaattgaaaatgttgtatcgagtagtattccggttagaagaatccggtccgtatcatgaaccagattctctttctgtagctctcggtaaataacctaatcacactaatgaaactcagataactaaacttccccatcagattagagatactctcatactcctgaggattgacatctaggctagtttactatccggtttgtaacaaaaccgaaccggttgattactgaacgccggacaatttagcccaatctacaaattgcataccgccatacacattgttagcaaaccggactcccaccgtgaatgccatagcgaccacaggggatacgtttgggcgnctg

SEQ ID NO: 825 - DNA, 407 bp, Arabidopsis thaliana
  Clone ID: ARABL1-038-Q1-E1-D3
ttttttttttttttaatttggtattgattcttgacattattgagtcaaagtacatgatacaggaaagaaggaaattacattttatgcatacgtgtcatataatcaaaagaacaaggagtagcaatgaaatccatggttgtctttattcttgattttccagagatttctttagctcttttttgttcacctttcccatggcgttgcgaggcaagctctcccatatcagcaatcttgttggtagcttgtaaggagcaagcttgtctttagcccaaccgcacagttcttctaaggttattacaggttttgactcatcctctcttctcttctttgctgcactctctgctataattatcgcagtcacggcttctccatagtccgttgtctgttaaccccaacacgcaacattc

SEQ ID NO: 826 - DNA, 410 bp, Arabidopsis thaliana
  unsure at all n locations
  Clone ID: ARABL1-038-Q1-E1-D4
nnnnnnnnnnnnnnnnnnnnnnnnnnnnnnnnnnnnnnnnnnnnnnnnnnnnnnnnnnnnnnnnnngagggaaaatcncgaatctggttaaaaggaaacgttataaatttagtaaacaacacgcgaattaacatttcgttccanacaaagaagacttaaacgaaactgtttcatcaaaaaagtaaaccaaacgaacgataaccaaaccagaagtggngacacaaaaccaaatctaaaccaaaaacagagcagcagcacgcaaacaactcnatctttgattaccanccgnnnnnnnnnnnnnnnnnnnnnnnnnnnnnnnnnnnnnnnnnnnnnnnnnnnnnnnnnnnnnnnnnnnnnnnnnnnnnnnnnnnnnnnnnnnnnnnnnnnnnnttcgtaacctccgctaagtn

SEQ ID NO: 827 - DNA, 399 bp, Arabidopsis thaliana
  unsure at all n locations
  Clone ID: ARABL1-038-Q1-E1-D7
nnnnnnnnnnnnnnnnnnnnnnnnnnnnnnnnnnnnnnnnnnnnnnnnnnnnnnnnnnaaaaaaaaaaaaattggaananccgccgaaattgggccccattttataagagtcngaattataggataaaagcaacaaaaaaaaaaacttgtaaattattagagcgaagaacaaagagtangaaatgataagagtttganacgaaagaacaanagatagaaggaagaagacaagacnccccncgatnaaaaaccaaaccacacgttgttcnccnaagccttgtttgcaatgttgttanagagccagtcaagtcccccaaaaagcccttctccggangtagcacatgtgcccggtatgtaccaagtgtccntgacngaaaagagtgaaatccaagcttancg

SEQ ID NO: 828 - DNA, 407 bp, Arabidopsis thaliana
  Clone ID: ARABL1-038-Q1-E1-C3
tttttttttttttgtaacaacgattattttttttttgaatataatttaacattagattcaaaaaaacaaaataaacagaaaaagcgttctggtttatacaataagcataccatatgtttttctccaagctcatctacaaactgatgcgaataactggcagaagctcaagaggaactttcttatcaacagtgagatcaccagcttcttccatgtccatatctttcttcttctcaggcatattccaatcaaagaagtagagcaaattcaagagccccaattcaatggttgcgatcgccatagctattcctggacaaattctccgaccagaaccaaatggtaacaactcaaagctatgtcccttgtaatccacaggacaatcaataaacctctccgggttaaactcctca

SEQ ID NO: 829 - DNA, 92 bp, Arabidopsis thaliana
  unsure at all n locations
  Clone ID: ARABL1-038-Q1-E1-E1
nnnnnnnnnnnnnnnnnnnnnnnnnnnnnnnnnnnnnnnnnnnnnnnnnnnnnnncaaacagcatccaaggtcttttagttgaggtttcttc

SEQ ID NO: 830 - DNA, 407 bp, Arabidopsis thaliana
  unsure at all n locations
  Clone ID: ARABL1-038-Q1-E1-E3
nnnnnnnnnnnnnnnnnnnnnnnnnnnnnnnnnnnnnnnnnnnnncgccaagatgactcatcgcatcatgcatactcaaaaacattttgctaacaagaattccacaaaattttgggtctcacattccctaagcaagcttgttttattattgggcctataggcccatgctattttttttccttatttatgcttgcagctcatttataaccttaaaaataacaacatactacacgctgaaagcgcattaattattccttattactacaacaagttcccaatttttaaatacgcttacataaaaagcccacaagtctctaaggattagttgaaattaacttcatacttagactgtcgatctggatgaaacaagtccccaaaacttctcaaacgttgggttccttcttant

SEQ ID NO: 831 - DNA, 404 bp, Arabidopsis thaliana
  Clone ID: ARABL1-038-Q1-E1-E7
ttttttttttttttttttggatgcttgaaatcatcgcctgaagctagaactaatgaggtcaaacgatgtctgggtttataaccctattacattgaagtaactaacaacaagcactacaatttttgaacttattgttggagaattaagatctctctactattcctcggtaacaacaacaccaatctcgcctctctcaagcaaatcatagaagactcttgttttcctctgctcgttccagtgatgcatcttccatagcccaccagccgctagtcccaagtgtgagaccaataactaactccttcacaacacttgggccttttaaagttgcgtgtgctatcttgtgcccagccatctctttgccactctcactgaaatccaagaaaatgggtatacccaattgtata

SEQ ID NO: 832 - DNA, 408 bp, Arabidopsis thaliana
  unsure at all n locations
  Clone ID: ARABL1-038-Q1-E1-F1
ttttttttttttaagaaaaagacaagtccattaattaaaataaacacatgatccagatctctcaaatattttcaagctcaattacaaaccaagatgcaacaatgaagttttataaagaaagaaatcaaatcaggatctggacttgaatggaatggctctgatgacaagttggtggtaaagagccgcaagagctgctccaatgaatggtccgacccagaatatccagtggtcgtcccaagcgtggtccttgttgtagatgattgcagctccaagactcctagctgggttaattcctgttccggtgattggaatcgtcgccaagtgaaccaagaacacagcgaatccgattgggagtggtgccaaaatcggnacgtgggagtcacgagcgcttctcttggggtcagtggc

SEQ ID NO: 833 - DNA, 414 bp, Arabidopsis thaliana
  unsure at all n locations
  Clone ID: ARABL1-038-Q1-E1-F2
ttttttttttttttggataacatgtagtaccgtcacgagattttaaacctcgtaattcgtaagtaatgaccaaatttttacatcatcgtgctactagacgnnnnnnnnnnnnnnnnnnnnnnnnnnnnnnnnnnnnnnnnnnnnnnnnnnnnnnnnntctccaagaaacttgattgatactgaagcaatacaagcaacaaaactatcaacgccgccantccccacggngagcttccancgtcacctccggctccgggactcacgtaagttgtccgacgactgcttgaaaacatccccgagaagcgcatcaaggttctccatggaagataaccaacggaccaaagactattnagaaacagaggaatcaagagaagcgcaaaatttatctggctcctccgctgaatccggntggct

SEQ ID NO: 834 - DNA, 406 bp, Arabidopsis thaliana
  Clone ID: ARABL1-038-Q1-E1-F5
ttttttttttttctttgaaagtatctacgattaataacacgtgtttgaaaaatccacagaaactttcaagatttgctacaatgaatctaagctcagagcagaaatgtgaacatgccttctcagatattcagtaatcagagggtaactagtttcttacaaagaggaattctgatttaagagactgagaagatgtagagaagagttcatcatccaacagatgcttgagtagctttttgtgttgagtttaaggatgcagctgcggcttcacgctcctgccggattcgctctctccttctctcccagtaaggcaagaagcaagacaaagtcatagactggagtaatggtctgcaccaacacaaagtttattccagtgaaaagcaagagtcccttcaacgggccttgttct

SEQ ID NO: 835 - DNA, 405 bp, Arabidopsis thaliana
  unsure at all n locations
  Clone ID: ARABL1-038-Q1-E1-G10
ttttttttnttttttttttgatgaagccaagaataagtngcatanntaaacaggatctccaagagatgagtgaagttacaatgattggtgcatcaaaatctgtgtaacntgtaatctaaanaaaatcaaggaagactactagtgtgtatatatgtgtgtgtgtgtatgcctatacctcatgtacaacagaagagaagaaagaagagttcaaaatcaattcaaagatgtcttctgcacaagggacaagaagcatgcctgcgaagccatttgtcgatgcatggtaggtggaacatatgatggcagtgcggcaaacttctaactgtctctcccacctgaaagtcctgaaggcagacangagcaagagacaatctccgggagangtgtccgtgaatccggaaccttagg

SEQ ID NO: 836 - DNA, 413 bp, Arabidopsis thaliana
  unsure at all n locations
  Clone ID: ARABL1-038-Q1-E1-G2
nnnnnnnnnnnnnnnnnnnnnnnnnngaggtctcggatattatgattagtcatatatcgttacgacaggcattgatcgtctgataggattagatatggaacgactctatacacgaaaatatttagtctttctgtanaatctatccctcttactaaggaaccctttgctttgggtcttgacaacaatatacattagtgattctggttctgtgttggtgtangatgttcaggtaatcaggtacgaaantgcgactggagcagacagagataagtagttgacgtaaccttcanagaccgagatcacaaaccgatggcaagcaagcgcagtggtgggtgagagacatgacaaaggaagtccagcagaatctgngcatcaaaaactccggtcactcccttgcaagaactccagtanct

SEQ ID NO: 837 - DNA, 414 bp, Arabidopsis thaliana
  unsure at all n locations
  Clone ID: ARABL1-038-Q1-E1-H5
ttttttttttttgtcacaagagtgtccattttgttatatcaacataagccaaagtttgagacaaacaacagagccaaattcaactaaacataagtgtaagacttttcaagcccaactatgaagcccaagtaggaaaccgcatcaggaagaaagaagaatcattgaaacagancctaaaacacgtgtcatgaaaaggttaggtgctgaagacacgtgagaagaagaagatcggagaatcactggtcgccgccgaagaagattgtcgactccattgaaacccagaacgccgcgatatgcatgttgaatccggtgatagcanttgtcaattccaaagctctaaaagacanntcttcagcttcatggaaattcaacttcaaaaatcntcccaanntaaagcgtcaacgggttcaacga

SEQ ID NO: 838 - DNA, 355 bp, Arabidopsis thaliana
  unsure at all n locations
  Clone ID: ARABL1-039-Q1-E1-A10
nnnnnnnnnnnnnnnnnnnnnnnnnnnnnnnnnnggtaactttgactaaaagagtgtgataccacaaattccatcacaagaacagagaaatttaacagattcttaaaacatgtgtaaaacggtgtacaatgaaagcaaattaagtagaggttattctgacctcacagattatgtaacctcccgaccaaatcagttgagcttcantgangcaaatgatgaagccanatccaaagccgcctgcacttgngaagcatccgttcccngccctgaggcaagaccacctttcccnttcccgnaccntccttttagaggacccantgcagttgtcanncattcagtgangtcgaacggggta

SEQ ID NO: 839 - DNA, 397 bp, Arabidopsis thaliana
  unsure at all n locations
  Clone ID: ARABL1-039-Q1-E1-A4
ttttttttttttanttgaaacttttgtttttgaaactatgaatgctagtaggaaaaaagaattgtatcgataaatcgaactttgaagaagagattgcgaaatgctgaaataacaaaatctttgcaaagagttttactcccaaacagaatcaaaagctctctatccgacaaaaaagaatgaaacaaacattcatctcttcaagcttctatgactgggtactcgaaaactacatctttccctgtnagtttcctgtncacacccaccattgtctccagcttgtactcantgtcgttctttaacttannatccaaaantaccttcatgatctttggtgccatcaagncnggtatctgggtctctttccnacaagcctcagccaggggtnaaccgacatcct

SEQ ID NO: 840 - DNA, 418 bp, Arabidopsis thaliana
  unsure at all n locations
  Clone ID: ARABL1-034-Q1-E1-F2
nnnnnnnnnnnnnnnnnnnnnnnnnnnnnnnnnnnnnnnnnngagtgggaagttgactcattacaacaaatgtccgaacaaagaaacacacttgaaagataagttttgaaacaaaagggacaaaaacaaaagcaccaaccaacttcataagaaaagattacatccctaatgtgacatgtctaggcaaggtcaagacaaaggagacggccatcaaagcgacggntagagcaacnactgcgtgaccatcctttgctgaagctgatcctcccttaaccgtggacgtagctggagttgccggagactttcctgcnggtgccancgggtgttgttgtggcattgnttgtngaatacggctgcgtctggcgagctaggtgaaaatcccnanaaagctttggacaagttggggaaatgcgagcgt

SEQ ID NO: 841 - DNA, 402 bp, Arabidopsis thaliana
  unsure at all n locations
  Clone ID: ARABL1-034-Q1-E1-F6
nnnnnnnnnnnnnnnnnnnnnnnnnnnnnnnnnnnnnnnnnnnnnncatacagtaaacggaattaaaacataccagtagtaaacatctgaattcagcacttttctatgtttgcgagttcagtgacatctgaaaattacaaacttggcatctactgatcagcaagtaaaggccggtttcgaggaacaggagtgcacttcagggaatgagccatactcaagtttagtcctccagcctcatccatttggaccttgtctcctttgatacnccagtcaaagcattgcaccatcattccaactgcggtgccaacaagagatataacccaagacttgatccangannagcctctccgtccactaccgaaangaaatggtacttaagttgcttgctcctcatccnttcct

SEQ ID NO: 842 - DNA, 398 bp, Arabidopsis thaliana
  unsure at all n locations
  Clone ID: ARABL1-034-Q1-E1-G2
nnnnnnnnnnnnnnnnnnnnnnnnnagagctcaagctctgagaggaaaatgcatcagccaaaccaaatttttacaaattaagaacaaattggtgacaaaaaaaatgaaaattctaacacctttcctctnnnnnnnnnnnnnnnnnnnnnnnnnnnnnnnnnnnnnnnnnnnnnnnnnnnnnnnnnnnnnnnnnnnnnnnnnnnnnnnnnnnnnnnnnnnnnnnnnngtaatgactttgttgaaacggcgcagacacggccatccacgggcggtccaacatattcggttgcattgangatgtcattgtgaagccactcgactgtggaggtccaactgtgtgttgctgcattgggactgntcacagtaaatgttttcccaaggnaaatctggtttacaca

SEQ ID NO: 843 - DNA, 416 bp, Arabidopsis thaliana
  unsure at all n locations
  Clone ID: ARABL1-034-Q1-E1-E6
ttttttttttttggaaaaaaacatgaaatttcttaatttggaaagattccatggtgttgttctacatggcaaggaaaaagacatattattatgttcacagtactctgaaatccatagacaaagctagaagcgctttttttatgctcacattgtctgcaaataagaagaccaattaaagggttctctccaaaccaagaaaaaaacttttaatgctctttttcgtaatcgtccttgngttccaaagttcttgcaccaagatctgtgaaggaattgggcgtactggcatgtgtgggcctttgctcaagcttagcaagataancttggcgatgggggatgcacacaaggaaaaacgcccgaacatagcaatggcggtgttccgacgccaaatgtttgggggcctacagttaggcccaaca

SEQ ID NO: 844 - DNA, 416 bp, Arabidopsis thaliana
  unsure at all n locations
  Clone ID: ARABL1-035-Q1-E1-A1
tttttttttttttttttaactcaaaaattctttagctttttatcggttggtaatcactacaatacgttggagatgtttcttattttgtttcagagcacatgagaagaaagtaaacaaactaaaatataacctcttcctacctttttactcaaaaaagaatcccaaaacaaaaaattgaagtgaagttacaagtctctgtaattatcttcgtgtagagagattttatacaggttcctctgggggttctcttctgatatctcaaagcatcnatacattcggaaagctcccattcattgcctttgcctaccttgaagaccaaatgtgggcntcangttgcgtgtnangcctgtgaancataccatcangcacttcangaagtcgtgaangagaacctttggattcagcagtganatacg

SEQ ID NO: 845 - DNA, 402 bp, Arabidopsis thaliana
  unsure at all n locations
  Clone ID: ARABL1-035-Q1-E1-A11
ttttttttttttttaaacatgtatgacagacatctttcttcgtataaaccaccttacataacaccaacacacaaatacacacataaagaaagcatataagcagcagctttccctcctcatcttaagctttgagcatccgtagataatcancgatgattgacatcgcangatgatcggtagcccgaagccaaacaggttataatggttcaagtaatgatagagcaaatacagatncctcctcttctcatnncccgcttgttttggcattaccttgaaatacgcattgtagaaagattctcnaaatcctgcgcaccacgacattccaaaatccgcctcgttaggnccataggtaagaagcangatnaagaatggncanggttcggtggttcttggncgtaaggc

SEQ ID NO: 846 - DNA, 412 bp, Arabidopsis thaliana
  unsure at all n locations
  Clone ID: ARABL1-035-Q1-E1-A4
ttttttttttttgtatagagaacctaaaagttcaaatcttccttttgaagttttgtatagagaacataaatatttggtaaagtgacactgaataaatacaatatttctttattttgttgttcatgaaaagatttgtagattgacacacganactacccattggtttgttgcggtttaggttcaaactccaaagatgaataggttttccattaagacctccaagaagcagccagcttgaacatgaccaccgtgtgtttccaattttacccatcgngagctacttaaatcacatatanaccctacggtggnttcaccgtatccagccaacgccttccccgttgccgatcacaatcangcatcccgggcctcaccgctanntaagttacattggtacacatcagcagggatcngg

SEQ ID NO: 847 - DNA, 412 bp, Arabidopsis thaliana
  unsure at all n locations
  Clone ID: ARABL1-035-Q1-E1-B11
nnnnnnnnnnnnnnnnnnnnnnnnnaagggattcatgtaaactacttgataaggaaagtgtttacaccaaaagaaaaacaaatacaagatggttcagcaacaaataacagagattaacaacatctcgaggaaacaacaaggaagagaccanaaatcaatagcgggttttttcaagcagatttagcagcttcagctgcttcttctgcagcttcttcgtcttgaagtttcttcanagacggaggtggtcttggnactatgcttttcttcnattgncggtcaagtttccncgacaacccttttcnttatcccntcnttgatctnccnctctctttnaaaccgtcaacatccgangcancttgtttcttcaatacgacnaaaagtcgcaaananttgaacctcagtccttggcggn

SEQ ID NO: 848 - DNA, 417 bp, Arabidopsis thaliana
  unsure at all n locations
  Clone ID: ARABL1-035-Q1-E1-B4
nnnnnnnnnnnnnnnnnnnnnnnnnnnnnnnnagaccaaaattaataatataaaaaaaaacaaataaagtcttcaaaagaagattttgttcatttctacatttttaatttgctcttcaatctagtcagagctaggaaatggtcttaagagcttcatcttgaaacagaagtccaaacctatggacgcaaacgcaaatatcaagacgctctgagacaccaaaacggcgccgtctatcccatgtgaaaacaagctttcccagctcagctccaatggcggtcctctgctcaacataccaaagtcctttaacanacccaaaagctgcaacggggtccgggntttgagatgattatcatccaaagtctcttctgactgcatacctgaatgtgactccaaacantgcacagcttgcaaacgcna

SEQ ID NO: 849 - DNA, 417 bp, Arabidopsis thaliana
  unsure at all n locations
  Clone ID: ARABL1-035-Q1-E1-C10
ttttttttttttttttccaaataatacgaagcaaattatataatccaataccatagattaaaagatctctgattccaaaatccaacaaagctgagttcaataacatgaaataaattaaaaagagactgaattgaaaaaaaaaactaagcagtgagaacaacagcaccaccagcttccttaatcttcntctcagcagtcttagagataagcttagccttcacaacgaaaggtttgttctcaggcaaatgacctttccccaaaaccttgaagaaaccatgctgcgtcacatcgatcaacggaacattanccttgctcgatttcgccttcacgtcntcaggaacangttgaccatnancntgnccaaggttcacganntgggcaaaagaacnttgttnangaaagccctgggggaaaaan

SEQ ID NO: 850 - DNA, 397 bp, Arabidopsis thaliana
  unsure at all n locations
  Clone ID: ARABL1-035-Q1-E1-C8
ttttttttttttgattaaagaactctttttttagtanaacatatctaaaaaacttatcttcaaaatacagaaattcagaagcgaaaattacagttttgttcagctatactttgctacagaaatgtcaaaggctttttgatcagtagacttcaacgttccattgcnctgccttcttcaactgcttcttgtaatcaaaccantcaataccgtcatttgcagccaatgagaccataatgtcatcaattcctttctccantcccttgagtccacacatgtaaacaaaagtgttggtcnttcttcagacaacgcncataactcangctgcgtattgccncnaagccggacgtctggatatanattttcncnccnttaagcgttcggcttgttcgncctgcat

SEQ ID NO: 851 - DNA, 391 bp, Arabidopsis thaliana
  unsure at all n locations
  Clone ID: ARABL1-035-Q1-E1-C9
tttttttttttttggtcagatattgaacccaaaactgaaagtgatttttattagattaagaattatagaaaagtatctgagttctgtctgaactaatacatcatagtctagataaataatcttcacctctaccatcgaagacaagtgggataaaactctcgcctaaaaacaagcaatgccataaggcccataacccttattttgattaatctgtgaggtgaaacaatagcagcaactacatatgtatcatttaagctctgtgagagctcgcggcttcgtttagctgcaggcaacaactgcattcanaagtgttgcccgngaaagagcctttctcnagtcatgaaactccgggtattngtcggtggccgnccaagtggagggtaacatccan

SEQ ID NO: 852 - DNA, 208 bp, Arabidopsis thaliana
  Clone ID: ARABL1-035-Q1-E1-E12
ttttttttttttcacgtcacctgagaaccacttccgtcaccggagttacgagccatagcttcagcaaccgtcgcgagtttctgcaaattaagcttcacaaccgtatcagcaaacatacgagtatcatcctccgagttaccttccggcatatcaacgacgtaagattccaaaaccaccgtccagatccgattctctttctcgctcgagc

SEQ ID NO: 853 - DNA, 221 bp, Arabidopsis thaliana
  Clone ID: ARABL1-035-Q1-E1-E6
tttttttttttttttctaaggaaagaaggagccgatgggtttgcttgaaaacttgtgtcatacaacatatggttcagaaaacaactaattatagttcttcagccagaccaaaacaagtaatagctcgatacgaaaaaaaaatagtctcaaatcgaagaagaaaaaacaagtaaaatgcacttaatcgaacaagccaaaacccaaatctccatcactctctt

SEQ ID NO: 854 - DNA, 381 bp, Arabidopsis thaliana
  unsure at all n locations
  Clone ID: ARABL1-035-Q1-E1-E9
ttttttttttttttacgtatactcaaaactagagaagattgatatattccaatgacaacataataagataaaccaaactaaaccgagtcaaaagcaagattacatcccattcctgcattgcccataccgaaaccaaatgatggttatatagttccaaaagattattacctctccatgttttcttttcttcctttacttctataatatggctaccaaaaataaagtttcttcttaaaagtgtaaaaagaggagggtggttcaggttcttaacctgaccttctgtaaatgctgtaagccacggcaacggttgcgacagcngaaactactgctgctcccaagaggaacctcntcctttccccatcgattttcaancaagtttag

SEQ ID NO: 855 - DNA, 414 bp, Arabidopsis thaliana
  unsure at all n locations
  Clone ID: ARABL1-035-Q1-E1-G1
tttttttttttttttttgctaagaacattaatttactttccaaaacatgagttcattggcaaagaatatcaatttggtacaacaatacttccaatcacacttttcatttctttgcttagttttatttctaatcgctaaaacaaagtttaccctagcaaataacctgtacacagcgtatccaaaaacactaaagacgatgatgccctgagaacatccacccaaaatagaaactaaacttgtggttgtgcagaaaccttcctcaagatctaccattaggaccaagaagtagccatagctaatttctcggacctgaggctggaacttgcttctgaaagtgttctcatcagaggttgccncntcctcctccttgtggtcnccattttccntcgtggcnagtgagaaancgggccacca

SEQ ID NO: 856 - DNA, 386 bp, Arabidopsis thaliana
  unsure at all n locations
  Clone ID: ARABL1-035-Q1-E1-G11
ttttttttttttcgctatataattattttcaaaatattttaaacgtatatgaaatgtatgaagaaatatgggaatctcaaacatttattaacctaactacttgaaaaaaattaatcaaaatttaacgtcttttaacagaccacgaacttgttccaaggtaaggaacaagatcatcgtgaacggtccttgcctcgtcgccgtcggaacaagccctttgtacaaagccattggtccttcctctgccaccatcttcaccgcacaatccaacggtccaccgtaaatctccttatccgcattcatcatcctcgtcttcacaacgtcgatgggattcnacgccaccgccgcgacgaatcccngccgcaaaactcgccgctanatgcgttccg

SEQ ID NO: 857 - DNA, 476 bp, Arabidopsis thaliana
  unsure at all n locations
  Clone ID: ARABL1-033-Q1-E1-E2
ttacttcgnccggcccaggncnngnncncnttcnagggtccaanaccccaaaatgcgncggncgacctttttttttttttttgaagaagaggttattaaattcagacatgaatgtacaacagaaataagagtttttgggaaccaaaagccaaatgcagataaaaagaaaagcaagtagaaatggacttccccaagaannnnnnnnnnnnnnnnnnnnnnnnnnnnnnnnnnnnnnnnnnnnnnnnnnnnnnnnnnnnnnnnnnnnncagacccggtttcggcttttgccaaagctcttctccgtcttatttacttgacatggcaatcataaggagaagaagcaaacacttgatctggaaccactangaggtaagcttctctatatacacaaacaacctcttcttattctcccgctcaattgtatacatattaaccgtatcggatttctccattaacatccatnagtcccctgaagt

SEQ ID NO: 858 - DNA, 416 bp, Arabidopsis thaliana
  unsure at all n locations
  Clone ID: ARABL1-033-Q1-E1-F7
nnnnnnnnnnnnnnnnnnnnnnnnnnnnnnnnnnnnnnnnnnnnnnnnngagagaaaaacgagttatttgattaatgaaaaaaatacaaagtcttgcaaattttacatctaaacaagctctctttctcctctcacactcacgaagcaaagactgaagcaaaatacagataaaacttggcncactttccgggaacaaagttggtggcgaaggcccatgcgttgttgtnaactgggatcgggccaaatggtcagcaagggttctctaaccggtcccttaccaagtgaccnatggcttgaacgaaagaaaccaanacatangagaacatagccaatccttcccgttccttgaagccccttcaccttcaaactcaagcgaatggcctctggggtcggtanccaaaacccaatggggtcca

SEQ ID NO: 859 - DNA, 419 bp, Arabidopsis thaliana
  unsure at all n locations
  Clone ID: ARABL1-033-Q1-E1-F9
nacctttttttttttttttttgaaggaaaaattaacattgatcatgtaacaaagataaaaagacaaactaaacttgtcgtgattctatatttcgacttctttgacttcaccacataacatacacacaagtannggaaatttgtagttatcttttaaagacaaagtaaaaaataggagatagtttcaatatcttccagccatagaggagatatgcttcaaacatgatatagcttaatgacctgatcaatgttggcgcgacaaacaggacatcccattttcttgttttcaatctctttcaagcaagaaatgcatccggcgacatgtccacacgggnacacacactgcttcanaatggtgcatccacacaaatcacanacagtccatncttctttattcgcagtttttggagaaaggantta

SEQ ID NO: 860 - DNA, 412 bp, Arabidopsis thaliana
  unsure at all n locations
  Clone ID: ARABL1-033-Q1-E1-G1
ttttttttttttattttgcaaccgaataatcatatattgaaactcaatactaatcacannnnnnnnnnnnnnnnnnnnnnnnnnnnnnnnnnnnnnnnnnnnnnnnnnnnnnnnnnnnnnnnnnnnnnnnnnnnnnnnnnnnnnnnnnnnnnnnnnnnnnnnnnnnnnnnnnnnnnnnnnnnnnnnnnnncaacaacagcagaaacaaaagcgaccagaaaagtagcaccacctaatgaggaagcggcatttccagctggaagtagtggttccgctagagcctgaangtgttgtggtcccacccgcagtgggaggagtggttccctccaagtacttggggttgatccaagttgctgggggtagcaccggcaccanggaggtancacctcccaagttgcaccaagnagcaact

SEQ ID NO: 861 - DNA, 395 bp, Arabidopsis thaliana
  unsure at all n locations
  Clone ID: ARABL1-033-Q1-E1-D9
ncctttttttttttttttttttagttcgcggtaacaaaactcttatctttataaaggatgctccaaacaagagtttttccatcacagctcaagagaaacaactctaatagactagctttataacgccatagatgaaggtttctttgaacttgtgaagaaaatgtcgaatatgaagcggtagtttatgtttatatggtcttttagcaaataccacagagaatcaaaacttaactctttcaagattttttgacttgggacttgttgttgttctcacattatggtacatgagcaaaagcttctctgtggggnttcttccttttcgatttttttctctggtcttgcttttgttggagacagttgcacgacaacatgnattgtaatgacgggatttangg

SEQ ID NO: 862 - DNA, 463 bp, Arabidopsis thaliana
  unsure at all n locations
  Clone ID: ARABL1-033-Q1-E1-G2
ngttacttgcccgccggtaccnatccaaaantaccggtccannaccncaaaatnngncggacgaccnnnnnnnnnnnnnnnnnnnnnnnnnnnnnnnncgtcaaatatgactataaatagtgttacaaattttcttatgttacaaaattacaaaagatacataaaagtttagtaaatactatttggtacaagctctgttttttacgagagtaagaatatttaaatgtatttgttctttacatatcctaccaatatatgttaactattggtgtaagattctggagccatgggcttatactcaacaactggtcccattctactcctggttttggtaattgtagctctggtaaacttccaaacggtagcttcagtgatgaagaaggttctttggtctctgcttctctttgtttctcttcggttttcgcgttttcttgatgcatttggatcntgtttgcttcttccc

SEQ ID NO: 863 - DNA, 423 bp, Arabidopsis thaliana
  unsure at all n locations
  Clone ID: ARABL1-033-Q1-E1-G3
tcggcggccgnccttttttttttttttttgttatgtgtaattcgtgaaactcttaagcattgccagagaataacatatcangtatccatatagatatggttatttcttatccaactagtaatgtacaagaanttattttcanaggacaaatttcccactgtacgaaatcaaatatagcatacaagaatcatcatttcttaaaagaaaaatctcttaagcttttgctaggccttataggaggaagttccacagatgcaanaacaggttctganctttcangcgcaagagaatnatgtgtggaagtttcangcttcttggngttgagactcangatcccaangttggtgttcatgatgaccacggaccnggagtatcnagggagaaggagaacntgggtattttgcaaangctccgggtaatgga

SEQ ID NO: 864 - DNA, 214 bp, Arabidopsis thaliana
  unsure at all n locations
  Clone ID: ARABL1-033-Q1-E1-G7
gccgnccnnnnnnnnnnnnnnnnnnnnnngataaacaaccactcaaaggnnnnnnnnnnnnnnnnnnnnnnnnnnnnnnnnnnnnnnnnnnnnnnnnnnnnnnnnnnnnnnnnnnnnnnnnnnnnnnnnnnnnnnnnnnncaagtaaaaacaaatagaaccattaanaatacagtactcacactcacaacgacaacgtacgttcncgctcgagc

SEQ ID NO: 865 - DNA, 409 bp, Arabidopsis thaliana
  unsure at all n locations
  Clone ID: ARABL1-033-Q1-E1-H9
ttttttttttttttaagacttttaatcaatctccacaaagatgagaccaaactcaagaatcctgaatactgatgtataatactaatacaaccctcccagcaatttgttaaagtttaacacagaagtggatatatatttataagcttagcttggttcaatccatttctgtgttaaaccaagctaagcttataaatatatatccactggcttgtgatcttgtagctttttcttggactttcttatgaagaagaacccactatgggcaagtttggtgcagttgcccattcagtccaagacccatcatagattgccacattagtttttcccagacgataaagtcccaatgccaaaatacaagctgttacaccggttccacatgangccgcaatcgggnctgtccagaagataa

SEQ ID NO: 866 - DNA, 391 bp, Arabidopsis thaliana
  unsure at all n locations
  Clone ID: ARABL1-034-Q1-E1-A10
ttttttttttttggaagggtagaaagaattgcatttaagaagaatgaatgaatatagtaaaacatttttttacaatcagctaatctagaagctttganaacaatccaatgttgattttttccantttgaccctctgaagcttaagtaactacnagttgagagtgtccaagagatggncaaggagataacagaggcaggggnaanattcccatgtctttactgtctgctccgtcccaaaancccttccaacttgatggcgttaatgganaaggcatcagcctgaacctgagnttcttccctcttaanagctttacggggtgatcaagctggngtttcnanccgccgtcacctgtctcttcctcggttgccgtttaaaggaaaataagcctcn

SEQ ID NO: 867 - DNA, 406 bp, Arabidopsis thaliana
  unsure at all n locations
  Clone ID: ARABL1-034-Q1-E1-A5
nnnnnnnnnnnnnnnnnnnnnnnnnnnnnnnnnnnnnnnnnnnnnnnngatctgatgatccttaattacaagaagtgcacgaaaatcactagagaaaaagcataattacaaattcacccnaaatcattattcccggcccaganttaacccttccttaattgccctttcacccttcaattttaactttattcccattttgccctcctctgttttttccacagagaaganaagagcatctaatcnaatccaaaatctcttccggtggtgttttcangcttcaattccaatgatcaacgggggagtaccagtgtaggagacngcgngttggttcatcgggaaanggaattcanangcttcttctccgagtcagaaaagtcctcatgatngtcggtctgccgccangtgc

SEQ ID NO: 868 - DNA, 411 bp, Arabidopsis thaliana
  unsure at all n locations
  Clone ID: ARABL1-034-Q1-E1-B5
ttttttttttttataaacattgtctctactcaccatattcaacagatatatagtatatatcatgtacatgtattaattttacactgaataaatctataaaaaaatatatattgcaacccccaataatatgaaacgaaaaaagatagaaaacgcaaacccactacggctttagtacatacattcatatatatgaatagatcatagatgtgcatttcaaagttatgacctgatcaatggccaggtatattttcacactgtttcnaagatgatagtgcaaagtgtacgtcgagcgtggcgcgcctacggnccctacacaacgttgggtggtaacgcatcttatacagagggaaggaagagacgcctcctngnaagtggactgaagctgatcatcatgggcaattagtggnccgc

SEQ ID NO: 869 - DNA, 418 bp, Arabidopsis thaliana
  unsure at all n locations
  Clone ID: ARABL1-034-Q1-E1-B6
nnnnnnnnnnnnnnnnnnnnnnnnacctgaagttatgcctcaaaatcaacattttaaaggcagaagcattattagatagatatcatccataaccataagacccacattcactgttaacttatcgatattagacagaaaactttcaacagcgaaatacaaaacaagagagagaaaactaaaagacactcatctacaactcaaaatgcgcaaaagaagcagttaaaaaaggcgttgtcacgccgcaagggttaagatttggtatttcatcctaggcctcgaacccttacatctccgactaacgccgggtataagacggtttgctactactcccgagcccgtttanaaccagcttttctgggttctggangttaggaggcaacactttggngtgggacatataaagggaataaggcaaaat

SEQ ID NO: 870 - DNA, 421 bp, Arabidopsis thaliana
  unsure at all n locations
  Clone ID: ARABL1-034-Q1-E1-B8
nnnnnnnnnnnnnnnnnnnnnnnnnnnnnnnnnnnnnnnnnnngagagaaaaacgagttatttgattaatgaaaaaaatacaaagtcttgcaaattttacatctaaacaagctctctttctcctctcacactcacgaagcaaagactgaagcaaaatacacgataaaacttggctcactttccgggaacaaagttggtggcgaaggcccatgcgttgttgttaactggatcgngccaaaatgggcagcaaggntctcnatcggtcccntancattgacgatggnttgaaacgaanaatcnaagacatanagaaacanagccaatcttcngttcctgagcctcnttcaccttcaagtcanncgaatgcctctggggtcgggangccaaaacccaatggggtccgaagctgccaaccgggggt

SEQ ID NO: 871 - DNA, 390 bp, Arabidopsis thaliana
  unsure at all n locations
  Clone ID: ARABL1-034-Q1-E1-D2
ttttttttttttgaaaccgatgtatgattctcattactaacttatatgatgattaaaaacttcagaaaagaaaaaactannnnnnnnnnnnnnnnnnnnnnnnnnnnnnnnnnnnnnnnnnnnnnnnnnnnnnnnnnnnnnnnnttaaggaaaagtaacgagtatagcgtttataaataaagattcgaattgggcaacctcggaacgggcaaggcaacaagaggggacttgagcttcaagacaatcccaaacttctctttcaaatccaaaatgtggcccttccggtatcttccaatcaaacgaatgcaatagcgtcccgagagtgtacaaaatcatcctctcggngaagtgctatacctgcgcaaattctcctgccagattcaaaacggg

SEQ ID NO: 872 - DNA, 415 bp, Arabidopsis thaliana
  unsure at all n locations
  Clone ID: ARABL1-034-Q1-E1-D5
tttttttttttttgatctcaaagtattttttatgttgtgttgataaaaagagattgcaggaaacaaaataattgattgtaacagaaacacaaagtttgagtaaagtgataaccaaaaacaaacaaacaacatcaaaagatctctcacattctgcgtcggtttggcaccaattctggatttcccttcttcatcatcgctacaaattcttcgtagttgatttttccgtcacgatcggtgtctacttcagcaatgatctctttgatgngatttatcatcacccatgttgtatttcttcatggctagctctagctcttccattggttangtaccgctgttggcattgtcannagaactggaantggcggtgtacaaagtgatcctcaagtttcgattccggttcanaaggcaattgggg

SEQ ID NO: 873 - DNA, 426 bp, Arabidopsis thaliana
  unsure at all n locations
  Clone ID: ARABL1-031-Q1-E1-G4
tttttttttttttatgttgaacgaagcaattcatgctttttcatttctttattttctcaatacattattaaggctacatattcggtatttaatatttaatcctatatacaattaaaatcttatgtgatcctcatgggcttcacaagtcaatgaagattgggctgggccgaagtagactctgacttaacaaaacgaacaagagacaactttgcgatatcggaaacggcagcatttcnaacggcggcggaatcactgatgagaaactcatacgccgcttcgaaagcttctcgccagaaccgaggaaccttaacgccaccggagcgtccgtacacatcccacatctgtctcancactttctctctctcttcaatttccagaacgtcnagattatcgcccnaaaagagaatgcgtttaacgccnttagga

SEQ ID NO: 874 - DNA, 424 bp, Arabidopsis thaliana
  unsure at all n locations
  Clone ID: ARABL1-031-Q1-E1-G6
ttttttttttttttttttaanataanaccaacatttgttttttcntccttttttacataattcagaangcacgatcccacaccttcattacnattactacagctagcactancctcaaagcccttggtcctgaaaatcacactanagtctttgaacanaaaagagttactttcatcaaaatgataaatactagccaagcaagcgagagctttttccttcntttgacagatcccgttttacttcgttactgcacaaatcctacttagattccatctccaatgcctttttacttacctttcatgagtcacaaaagtctagtangtgggaaacagagcanaatgtcaatcatcaagctggggaccgttggatgaacaagaatctacggtggaaggantcatcncctggtttgacgaatgaaanaaag

SEQ ID NO: 875 - DNA, 420 bp, Arabidopsis thaliana
  unsure at all n locations
  Clone ID: ARABL1-031-Q1-E1-G8
ttttttttttttgtcgtctctgaaacattctacatttatatcaagtcttatggattttacaatgcttaagaaccctaatttccaaatccagtttttggagttatgtggtacacaaatgtcatcaantccccctcctaaacaaaatacattttgccatccatacaagtttccaaatctccctcatcaattcacattttgccaccaccatctacaacacctttttgcaactctaatgctccggctccatcatctgaggagatttagaaagcccctatcaaatattaccgctttctccatctgatatttcttcaagctttgcgatggcatccataagagctaanttcatgatctctcaagcactctctttgccttctctaactcngctgggttggggttaactgacccaaaaacttttccacc

SEQ ID NO: 876 - DNA, 414 bp, Arabidopsis thaliana
  unsure at all n locations
  Clone ID: ARABL1-031-Q1-E1-H1
nnnnnnnnnnnnnnnnnnnnnnnnnnnnnnnnnnnnnnnnnnnnnnnnnnnnnnnnnnnnnnnnnnnnnnnnnacacattaatagatacatccatttgaatatctccatctcctctgtatcaatctcaaatctctggccactttattggctaaactctgtatatatacaatatgatgctgataagacccgatttggcttttctgctttctcattccttagagggatcaatggttgtagtaagaactcgaagaggtctcaatgacagattccgagattctagcttctgatttctcgttcgagtaagtcgaaagtatagtgacccaaataangctccacgcaatctanccagagaagtcgttgttctactgggaacaaanccgtatntgatnaaatgagccaatgggcaaagcttt

SEQ ID NO: 877 - DNA, 384 bp, Arabidopsis thaliana
  unsure at all n locations
  Clone ID: ARABL1-031-Q1-E1-H2
tttttttttttttaaaccgaaatatagtagtgaattaacatcatagggatgaatttggtagacagatgaattaatggaaagggtttaaattgttgctcggatgctattctgaagaagaagaggatggttttgcttcaacaacaggtttgcctttctctctaagtttagcaatggaagccttcatttcttctttacgcttcttactcgccaataccttggcctgaactccggtcacggtcgggtctttcttctccttaggtggtggtggaggcggccgtcttgctgccgccattgcctcctccttagcggccagagcgttccaactccatancgcaccgcctanccccaccaaaattgtcctgcgattaattggggggaactgca

SEQ ID NO: 878 - DNA, 414 bp, Arabidopsis thaliana
  unsure at all n locations
  Clone ID: ARABL1-031-Q1-E1-G3
tttttttttttttttttagagagcaaaatatgagttcatacttcacataacactaaaaggcttaancaaacnaacaagggaaataagcaaaatgatgtcctaaagaacgcaaccagaatcaagtcataatgtaacttcactgtataaatcataaatcttgtttctttttgtgggcttaagataaaattctctcacttagccatcatgactttgacnaattcttcatagttaatctgancatcgccatcaacatccgcttctcggatcatctcatcaacttcctcatcggatancttctcaccgangatttgtcatganatgtcgaagctctgctgcacatatgaaaccattctggtcctttatnaaagacctaaaaagcttccttgagcccttcctctgaatcagtgtccgtca

SEQ ID NO: 879 - DNA, 414 bp, Arabidopsis thaliana
  unsure at all n locations
  Clone ID: ARABL1-031-Q1-E1-H3
ttttttttttttttttttttatcaatccaacattctcttccaaattagatttataaatcatgaatatgtaagctcctacacgaacaagagaatatctagacaatttacttgacggtgagtttcccaaccataccagcaccctggtgcggcgcacaatagaaaccgtaagagcctggctctgtcaaagtaacctcgtaagtctcccctgcaccatttagaagcgctgtctcatccatcgagatcttgcttgcgtccacaccactagggatctcgtcttcgtcgaacaccacgttatgtgggaaccctgcgttgttcttgaanacgatcttctctcctttagncaccgtgaattcaganggtacnaaagcaagggaaccgtcgtccgatnctaaaagaacctccatggncatcgca

SEQ ID NO: 880 - DNA, 406 bp, Arabidopsis thaliana
  unsure at all n locations
  Clone ID: ARABL1-031-Q1-E1-H6
tttttttttttttaagcgaatgttttcatattataatttgattggcctttcttagacatcccaataaaacacttacactagagaggaaataataaggccaaaacatacacacgcaagcaagaaattaactttgaaaccatgtattattacggacttgattgcctcttcatcaagattgaaggcttggttcaaagaggacctggaaaagttccactctccctctgctcgttccacttgtcaacccattctccaggacagagggcacggtaatacttggcaaacctttcacagtcattagactcctctccctttgcagttgtacanctgtgaaactcgatgtaccgagtgaagcagtgcctcgtcttccanggctgatctgattcaatgaaattggagaaattacnga

SEQ ID NO: 881 - DNA, 416 bp, Arabidopsis thaliana
  unsure at all n locations
  Clone ID: ARABL1-032-Q1-E1-B3
nnnnnnnnnnnnnnnnnnnnnncggantaagaatcacacgcgataaaaaaaatatttgttgagtgggaagagatacatatacttttgttctatgaacaaatcgaaactttaaaccaataataaaagtactctcttatcaaaaaaaacataaagacaattcttctctctctcatttaaacccaaagtaaacgccacaacaacaatggcacatcagtcaccgaccagattgtcccatgaatgaagtgcaagaacaacanacccattaaaaaaacttacatttccangtatggaatgtanaatcaaacttgatattgccttttcatctcaanaccaagatcacaagacaatttcactgcttaaagccaccagnattgggnnctttgggttaccgangggtgggagaaagaantccgtct

SEQ ID NO: 882 - DNA, 391 bp, Arabidopsis thaliana
  unsure at all n locations
  Clone ID: ARABL1-032-Q1-E1-B4
tttttttttttttttttttttaacggncataattttttcgaaattgacgtaatttgtttacaaaaatatctttaaaaatctgtggaaaaaaacagagaaataaattttattaaataaaaaattcaaactaaactagaagcatcaggtaaaccttgacgccaatcgtcatctcctactaagtgggccgaaacgcgacggtttccgccgctgcgaattcacgtttccgttaacgttaaagggaaagttgggaagcttcggtttggttgtttaaacggagaacgtcagttccgacaaaatgggaacaattaaggatgatccttaaagccacngtcncaaatacataacacgtggaaangcgtgtttanactcgccttaatttgccnggagttca

SEQ ID NO: 883 - DNA, 368 bp, Arabidopsis thaliana
  unsure at all n locations
  Clone ID: ARABL1-032-Q1-E1-E9
tttttttttttttaacaaaagatcaagactttatcaatgccatcataacttacataactgagtcatacatatcaattcgcttattcagtctacaactagcaaagatttctaattcctgtaaatcacatactgtagattccacattcgaggtcctcaaatatcaacttgcagcaagaagcttttgcaactgaccactctccaaagcagctccaagatcatctgatccaccaatatgcttgccgttaacaaaaacttgcgggacagtacgacgaccaacgaattctaaaagctcatactggatttgatctccgtcctctctctgatcaagctccacaacaaatggctcttccttaagttggctgaanaga

SEQ ID NO: 884 - DNA, 261 bp, Arabidopsis thaliana
  unsure at all n locations
  Clone ID: ARABL1-032-Q1-E1-F9
nnnnnnnnnnnnnnnnnnnnnnnnnnnnnnnnnnnnnnnnacatgaaaacaaagttctttttattgagatatctgaattaatcagactgaatacaaatatggcaatccggagtaatgaaaccacgcacttggcttgttttattcaaaccataattattcactctagttaccactgagtantangcnnnnnnnnnnnnnnnnnnnnnnnnnnnnnnnnnnnnnnnnnnnnnnnnnnnnnnnnnnnnncggtttagttgtttt

SEQ ID NO: 885 - DNA, 355 bp, Arabidopsis thaliana
  unsure at all n locations
  Clone ID: ARABL1-032-Q1-E1-G12
ttttttttttttttgaaaaataaaaaatctctatattatttacattatcgcctaaattcaaacctcacttttcacatacagaatatgtacatatctaacaaaagggtaaaaatagtaacaaaagtgaaaaggtagaaaatagtanaaaagagttaaagaactttttcatcatcatcatcttcttccaccgtcgttattgccaccgccggctccagggaaatttacagaaacccgacccggattcaattcgggtttggacccgtttgaaatctgagtaaggacaagggatagtgantccaccttcttgagaaaacccagattcgtcntcagncctctctaaagaagctcaccaggc

SEQ ID NO: 886 - DNA, 420 bp, Arabidopsis thaliana
  unsure at all n locations
  Clone ID: ARABL1-033-Q1-E1-A8
tttttttttttttttataaattagtgatggatgtttaatacatacagtacattgataaaccatacacatagtcataccataaaccattagtgaaatgcagtacaaaaacaaggtttagataacagagcccgtttgaggcccaataagcccaagaacctcatcccaangaccatgactttggncagctgaaacnaagctcaacangnagtggagctacaaggcagcancagtccaataccctcccaagatctcctggcttttaactgctctttttccccaaccacanttacccaatcannagaaanctangcctcacttcgtccaaaccaanattcctctncaccatcctctgcagccaagtcctacactccnctnctccgtcccatangtagaaatcctttcagncacttgtcctgaata

SEQ ID NO: 887 - DNA, 400 bp, Arabidopsis thaliana
  unsure at all n locations
  Clone ID: ARABL1-033-Q1-E1-B8
ncctttttttttttttttattttgcaaccgaataatcatatattgaaactcaatactaatcacannnnnnnnnnnnnnnnnnnnnnnnnnnnnnnnnnnnnnnnnnnnnnnnnnnnnnnnnnnnnnnnnnnnnnnnnnnnnnnnnnnnnnnnnnnnnnnnnnnnnnnnnnnnnnnnnnnnnnnnnnnnnnnnnnnnnnnnnnnnnnnnnnnnnnnnnnnnnnnnnnnngtagcaccacctaatgaggaagcggcatttccagctggagtagtggttccgctagagcctgaangtgttgtggtcccacccgcaagtgggaggagtggttccctccagtacttggggttgatccagggtgctggggtangcancggcagcaggagtagcacctnccagttgc

SEQ ID NO: 888 - DNA, 395 bp, Arabidopsis thaliana
  unsure at all n locations
  Clone ID: ARABL1-033-Q1-E1-C2
ttttttttttttttttgaagaaagtgaattttttatatataataagaaacataggactggatcagactgggaaccangatgaatattcataatggtgaatccttacaaaagactacacagacacaacacatgagttttgagaccgtgactaggttgattagagatctcaantgctagagtcatcatcaacccagaaacaagaatcctacttttactgacactcttgattgttacacgcagaaataatanagacacaggaaaagagaattaactgaactctgcaagacttttanngtggactcacatgntggtgcatcggccctttnccntcggtttggttgcgctggcantttgcngggaaccggtgtgactctgagggatttgtatgttnaact

SEQ ID NO: 889 - DNA, 410 bp, Arabidopsis thaliana
  unsure at all n locations
  Clone ID: ARABL1-033-Q1-E1-D2
nccnnnnnnnnnnnnnnnnnnnnnnnnnnnnnnnnnnnnnnnnnnnnnnnnnnnnnnnnnnnnnnnnnnnnaaggccacaatgccgaanacttcttttanaaancattttgaacanactcaaaagccactaacatttgttttancgctagttttttgagccggtgtananagatagatacacatgcatgaaaaatgacctaaagtgtgttaatgttattgttanaaggactgcctatatccatcccatcctccttccggttctttcctcttcagaacaccacctgacatttgagacattcntgcntgatcccccttcgacggtacggaangcagaggaagataactgccttganacnangtgtttgantcggcgcctcccncngtttcangacctccaagganccagaat

SEQ ID NO: 890 - DNA, 393 bp, Arabidopsis thaliana
  unsure at all n locations
  Clone ID: ARABL1-03-Q1-B1-C5
ctcgaggtcaagattgatgcaaacatctgagtatgctgaaataatcgcttcagaatactcagatgttatggtcaagattgatgcaaacaggccaaaagaagtggttttcgaggagacccagactctactgtctcagatacagttaaagagaatgataaagactgataaagcatctcctgttcaggataaatggagaggaataccgacgagattgaataacattccacattcgagggatatcagggcttatttttatgaagatgtgctgcaagccacaattagatctatcaaggatggtaacacccgtcttcgggtggacattaatatccctgagctaaatccggaaatggatgtttaccggataggaaccttgatggaacttgttcaagcntt

SEQ ID NO: 891 - DNA, 456 bp, Arabidopsis thaliana
  unsure at all n locations
  Clone ID: ARABL1-03-Q1-B1-D1
ccgaagagctcagaantcgcgnccacncgtacgtaagatcggaattcggctcgagaaacgatacctaagctcaattatcttctctgcaacaaactccaaaggatccgagagagagagctctggaacgatattaacatatatcatgaagaaaaagattgaagtattgatatgggaataactaaaacttctcctaatactacaattctcttgaagactttnnnnnnnnnnnnnnnnnnnnnnnnnnnnnnnnnnnnnnnnnnnnnnnnnnnnnnnnnnnnnnnnnnnnnnnnnnnnnnnnnnggattcgaccgatcagattctcccaatttaacaactcagcagaagcaagagcatcaaagggtagaagatggacgaggaatcttcagtcgccggaggtaaggattccgggtctacgaatcaagccggtatgttatcccgaaatgttaaatttccccc

SEQ ID NO: 892 - DNA, 398 bp, Arabidopsis thaliana
  Clone ID: ARABL1-03-Q1-B1-D10
tcgagcaactacaaacagtactggtctttcttccgccgtccaaaagaaatcgaaaccgccgagaaagttccagacttcgtcgacacattctacaatctcgtcaccgacatatacgagtggggatggggacaatccttccacttctcaccatcaatccccggaaaatctcacaaagacgccacgcgcctccacgaagagatggccgtagatctgatccaagtcaaacctggtcaaaagatcctagacgtcggatgcggtgtcggcggtccgatgcgagcgattgcatctcactcgcgagctaacgtagtcgggattacaataaacgagtatcaggtgaacagagctcgtctccacaataagaaagctgggtctcgacgcgctttgcgaagtcctgtgtg

SEQ ID NO: 893 - DNA, 395 bp, Arabidopsis thaliana
  Clone ID: ARABL1-03-Q1-B1-D11
agggacaaggcttcgcaagcttcacttgtcgttcgttggttcagatgaagatcatcgtttggtgaaatcaggagctcttactgatctcgacatgttttatctggcttctttgtacttttcctttaggtgtgataccaataagtacggtcctgctggaacctatgtgtctgggaagcctctttgggctgcagatttgcctagctgcttgagttattatagggttaggtctttcttagctaggtcagctggttttcagactgtgttgtctgtaccagtgaattctggagttgtggagcttggttctttaagacatattccagaagataagagtgtgattgagatggtgaaatcagtgtttggtgggtctgactttgttcaaggctaaagaaactccc

SEQ ID NO: 894 - DNA, 458 bp, Arabidopsis thaliana
  unsure at all n locations
  Clone ID: ARABL1-03-Q1-B1-D4
tggntcgccagaagagcagagaagtcgcggccacncgtacgtaagancggaattcggctcgagatgcaaagaacgagacagttgttgctgtcgagtttggtatctccaggacaggaaacagtgcaagaattttagttggtagacctgaatctgctgaaattagaaacctttcgtttgtgggtgacttgatgatggacaatggaaggactctgagctgtatgattgagtatgaggcaagttctaagagaatgatggttcgattcagaaaatctggttcggtaaagctgtttgatccgttcttctctttctcggtagacttggccaagttatggaaaggtggtgaagtcactgtgggtttaagctctgccaatgggaactcttcttccaaggcacattttctccattcatggagatttgaaataagacatcctcctccgatgtggatgcattcagtgccg

SEQ ID NO: 895 - DNA, 451 bp, Arabidopsis thaliana
  unsure at all n locations
  Clone ID: ARABL1-03-Q1-B1-C3
acgaagagcaaagaaatcgcntccacncgtacgtaagatcggaattcggctcgaggaagttgctcatgatgaattcaatggagcttcttttagtggcgcggtttttaacctcgccacgactataattggtgctggtatcatggctttgcctgctacaatgaagattcttggacttggacttggaatcacgatgattgttgttatggctttcttgactgatgcgtcgattgagttcttgcttaggtttagtaaagctgggaagaatcgatcttacggtggtttaatgggtggttcttttggtaatcctggaaggattttgcttcaagtcgcggttttagttaataacatcggtgttttgattgtatacatgatcattatangtgatgtgttggctggaaagacngnaagatggtaaccancaattccggtgttcctcgaaaggatgggttgg

SEQ ID NO: 896 - DNA, 416 bp, Arabidopsis thaliana
  unsure at all n locations
  Clone ID: ARABL1-03-Q1-B1-D5
natcggaattcggctcgaggggaatagctgataaatatctgcctcagtctatagcagaggaatttgagaaacagaacccccaaaatgttaagcttcgactcatcganggtgctgggcatttgcctcaagaagactggccagagaaagtagttgctgccctccgagcatttttctgacttccaaatacaacaaaaaaggacagaggtactgttttggtggggtgtttagagtcttacctctttgatggatgtgtgcaaagcttcacattgctctttggagaggctagaagcagtctgcaacgggtggattctggcctgcganaaaantaaactagaanttaatcgtacagcatgtaaacccgtttcttctggtcgtcaaatgtncaagaagnacaaaggtggatactttgtgaatca

SEQ ID NO: 897 - DNA, 401 bp, Arabidopsis thaliana
  Clone ID: ARABL1-03-Q1-B1-D6
ctcgagattccccttcttttcccggtactctctgtctttgcatttttactctcttgacgctaatgttcattcgggtttccgctcgacccgcgacattcgtcgaggatttcaaagccgcctggtcggaatctcacatccgtcaaatggaagacggaaaagctatccagctcgtccttgatcagagcactggatgtggatttgcttccaaaagaaaatatctattcggacgagtgagcatgaagatcaaactcattcccggagactctgccggtacggtcaccgctttctacatgaactccgatacggccacggtgagagacgaagctaaattttgagttcctgggaaacagaagtggtcaaccttactcagtgcaaacaaacatatttgctcaagggaaaag

SEQ ID NO: 898 - DNA, 399 bp, Arabidopsis thaliana
  unsure at all n locations
  Clone ID: ARABL1-03-Q1-B1-D9
ctcgagctcccacatacatttttgtgatcaaacaactaatcaatcaaaagatggaaggcaagactttgattgtaagtgtgctcataatgagtctgttcatggcacaaaatcaagttgacgcaaatatttgctgtccgtccatccaggctagaactttctataatgcttgcctcttcgcggtaggtagcccgtcaagctgtatacgcaactcgagttgtcttgacattagtgagtcgacatgtcctagaggatatacgaatgacattctcgaaaacacaggtgatgctgtcactgaatactgcaagttggggtgtgtatcctctgtttgcggtgctttaaccattctccagaactccgatgcaagtgaaatcgtgaatggagaagttgaaaaatgtncca

SEQ ID NO: 899 - DNA, 434 bp, Arabidopsis thaliana
  unsure at all n locations
  Clone ID: ARABL1-03-Q1-B1-E1
tcgcggccncccgtacgtaagancagaattcggctcgagggaaaggaagattaaacatgatatcttagcatttgcagaaagattttactctgctgatgaagtcaagtttttgtcaactttaccggaccctgaagttcagagaaaggaatttattaagttatggaccctaaaggaggcatatgtgaaagcattaggaaaaggcttttctgctgcaccttttaataccttcacaatccagtccaaggttggaacaaaaggagaatacaatctttgcaagatgactgaaatgactgcaagttcgctggaggagacaaacaaatgcgatggagaatggaagttttcccttttggagttggatgattctcattatgctgcaatctgtattgaagatgatgaagctagtggaggagctcctatgaaggtgattgtcccaa

SEQ ID NO: 900 - DNA, 394 bp, Arabidopsis thaliana
  unsure at all n locations
  Clone ID: ARABL1-03-Q1-B1-E12
ctcgaggggagagagaaatggaggaaggtctaaagattcaatctttggtcatttatccgatcaaatcttgccgtggaatctctgttcctcaggctaccgttactcatactggttttcagtgggaccggtattggttagttgttaactataaaggaagagcatacactcaaagagttgagccaacccttgctcttgttgaatcggagttgcctaaggaagccttcttggaagattgggagccaacaaatgactcattgttggtgataagagctcctggtatgagtccgttaaagataccgttgactaggccaagctcggtagcagaaggtgtgtcgatgtgggaatggtctggctctgcttttgatgaaggagaagaanctgcgaaatggttttc

SEQ ID NO: 901 - DNA, 458 bp, Arabidopsis thaliana
  unsure at all n locations
  Clone ID: ARABL1-03-Q1-B1-E4
gccggaagagcacagaaagtcgcggccacccgtacgtaagancagaattcggctcgagctcctctctccgccgctgtgacagaggaaatcagcctcgctactcagcttaaccgtgcttcatccgatcaaaccaccgcatctgagcaaaaggaagtcactgatatcccgcaggaagttagcggcggcgatgatggcgctaagttggaggatctggtgaatttcctctactttggttcactcttcgacgtcaagtcacagaacgagttcacttcgataatgttgaccaggactcatgagagaagttgctgcttgtcttacgattacgttaccgatgatgccactgatntcctcggngattgggaattggnttccaattcccaactttgggacccgatggnttcccgtccggtgggattcaagcttatctcaacaaagaacgctttgggagccgttgttgt

SEQ ID NO: 902 - DNA, 397 bp, Arabidopsis thaliana
  unsure at all n locations
  Clone ID: ARABL1-03-Q1-B1-E5
ctcgagctcgatcaaaagaatcatcatgggaggaggaagagctatggcgacggcggcgaaggttgctggaatcggagttggtaaaggaggattcaagggatttggatttcctccggcgactgagcagtttcgtgttaaaaccgcggcggctgcggcgtcgtctaaaccggtttcggcttcgattacatcggcggttcatccttctgttgaagaagatgggatgattatgcagagaccggtttgggatgattgggaatttgctgaagaagaaccgattcctagggttgtttttagcaaacctcctagtcttgaagaagctaaagaacctactgaagatcttaaagaagcaattaatttggtgtanatgtcatcctccaaatctctgctgctatggnaa

SEQ ID NO: 903 - DNA, 400 bp, Arabidopsis thaliana
  unsure at all n locations
  Clone ID: ARABL1-03-Q1-B1-E6
ctcgagcatttttccccttcctcttctcatctctcgataacacctctctctctatctctcacactcgtttcaacaatggcgattcaaactcagcttccttgcgacggagacggtgtatgtatgcggtgccaggtgacacctccgtcagaagagactctcacgtgtggcacctgtgtcactccatggcacgtgtcgtgtctccttcctgaatcactcgcttcttccactggagattgggagtgtcccgattgctccggcgttgtcgttccctccgccgctccggggtaccggaatctccggacctgaatcttccggttcagttctcgttgctgcgattcgtgcgattcangctgatgtgactttgaccgaagctgagaaagccaataagagggaagagact

SEQ ID NO: 904 - DNA, 413 bp, Arabidopsis thaliana
  Clone ID: ARABL1-03-Q1-B1-E7
atttctagttacacactacattgctgagcgggattcttccactgtcaccgtcaaggtttcaaaaactgaaggagactggcagaggccaaaccgccgtgttcatgtccaattattactaggaggcggtgcaatgcttgatgcttggggaatggatggagagtttatccacattaaggtgccttcagaaagtggaatttcagagttaatatccacaagcaatgagcgctttaaacttcatatggaaaatacaaaactgatacctgagaaggaagtgggtacctggacaaaagggaatggaactttcaaagggaccaagtttgagttaagcagtggtgattgggaaacctaataataattccctgggggttggtgggaaggataatggcctatgacacatgtttccctcaaggaat

SEQ ID NO: 905 - DNA, 480 bp, Arabidopsis thaliana
  unsure at all n locations
  Clone ID: ARABL1-03-Q1-B1-F3
gggaatgaatcntttgacacgccagaagagcacagaaagtcgcatncacccgtacgtaagntcggaattcggctcgaggtggtggagatggaaatgatggtggattttgggggaaattgttttctccttcaccagcggttgctgatgaagaacaatcaccggattgggattctcatggtttaccggcgaatatcgttgtgcaattgaacaagcttagtggtttcaagaagtataaggtatctgatattatgttctttgatcgacggagacaaaccactattggtactgaagattccttcttcgagatggtctcgattcgtcctggtggagtttacactaaagctcaattgcaaaaggagctttaaaccctaagctacttgtggaatgttttganaaaagttatttggaagggaaaacgaaacctgatggaaacccaagtgttacaaaccccttttgccgaaaagtacatngcaaatctgc

SEQ ID NO: 906 - DNA, 329 bp, Arabidopsis thaliana
  unsure at all n locations
  Clone ID: ARABL1-029-Q1-B1-F7
gctaccgttcgccttcttccactgagctcctggagtctggtaaccattctcctacatccgactctgttgacggaggtaagatgacggcgaagcgtgggattggacggcacgaatctcttgctgacaagatccaacgccatcgtgggattatacttgtgatttcggttcccattgtgttgatcggtctcgttcttctgctaatgcctgggagatcgatttctgattccgtcgttgaagatattctgtgcataatcgcaaaggaggtcctaattcganangtccgaagaattacgctgtgaattttgatgcctggaattctggtancgtgt

SEQ ID NO: 907 - DNA, 418 bp, Arabidopsis thaliana
  unsure at all n locations
  Clone ID: ARABL1-029-Q1-B1-G1
tccgatggatcggcanaattccgatgacatcatgagatttctcgatggaatggctagctccgacgacgttcttttcggttttcttgacgaaggnaaccagtcaccggaagatttctccgtaaacctcaacgccggcgaagatgacggtgacgaagacgacaataataacaattctgaanataacaaagctttttggcaggaacacgaacaacttcttcaggggacactgtataggacaagttccattgagacaaagattagacaagctacaaaagaagcgttgaaacaagttaaatctaaaggtccttaatgtgtttgccggcgaacaattgaccgngggttgccgganttgcctacgttgncgaaatcctccanacacctaagagatttccccggntacgaattgcgtcaaccccaa

SEQ ID NO: 908 - DNA, 375 bp, Arabidopsis thaliana
  unsure at all n locations
  Clone ID: ARABL1-029-Q1-B1-G4
tccttcgctccttaggaaagtggtcgcgcagctcgtggtgtacaacctgtggaggcagaggaatcttgttcttcacagctctcttcgggtctcttgctcggtggtctttcgtttagttgatcgcgagctccgcaatgtcattttgtctaggaggcataagaggcgttggcgggagcttttgttgctttggatccgttagctttccccaaatcttctcaagcttattgtaaccttgtttttaatttctttttgccttgggtgctctacttttggtaaacttttggtattaacttaactcaatttaaaatgatatttaaaaagtttaacaaaananaannnnnnnnnnnnnnnnnnaaaaaaaaaagggcnggcccc

SEQ ID NO: 909 - DNA, 112 bp, Arabidopsis thaliana
  unsure at all n locations
  Clone ID: ARABL1-029-Q1-B1-G7
atgtatcatacatatttcacttcaagatgtgatttcttctatttttgtgtaagaatgttttcnnnnnnnnnnnnnnnnnnnnnnnnnnnnnnnnnnnnnnnnnnnnnnnnnn

SEQ ID NO: 910 - DNA, 399 bp, Arabidopsis thaliana
  unsure at all n locations
  Clone ID: ARABL1-029-Q1-B1-H1
gagaaaacgtattcttaaaagcaaccattggtgtgattgactctataagagaattcgtcagcgtgaagcaatctccaatcnaatcgcagcatatcttctccgattcctattcgtctctgcaattgaatcttccggtaggcgaagatggcgacgtctgcgaggatttgttgcggaggaggaagtgcatgcgccgttcgttgtgatcgtcgcacgttaaatttgaattctcgatcgtcatgtgttgttccagtgacgaatcgacggaatatgtgtgcgatcgggaagatttcgatgtcgatggangattttgtcagcaacgtctgccgcggtgaagantgaaaggatcggtggaaggaaacccngtggatctgttgtgtccaaggaaaaactanatgtgtg

SEQ ID NO: 911 - DNA, 407 bp, Arabidopsis thaliana
  unsure at all n locations
  Clone ID: ARABL1-029-Q1-B1-F4
agaaaacatcaaatcatgagtgggcaagagaatcatgatcatggccggatctcttctacgcccgccgccgcgtcggagccttccaaggctgctgctcannnnnnnnnnnnnnnnnnnnnnnnnnnnnnnnnnnnnnnnnnnnnnnnnnnnnnnnnnnnnnnnnnnnnnnncaccggtgccgccgcaaccaccatgccagcggaatccaatccttacgtttctccttcccctgccccaaggaatacgatggattcggtgaaggatacgttagggaaatgggggaaaatggctgccgacgccaccaagaaggcggaggatntcgccggaaatttttggcagcactttgaaaacaaggccaagttgtagcaaatgctgctgtttcacgaattgctcangggacaaaatac

SEQ ID NO: 912 - DNA, 395 bp, Arabidopsis thaliana
  Clone ID: ARABL1-029-Q1-B1-H2
tctctctgaagcatctttcaaggtgactgttcttgaatcacgcgataggattggtggtcgtatccatacggattattcctttggttgtcctgttgatatgggagcttcatggttacatggagtctctgatgagaatcccttagctcccattatacgccgtttaggactgactttataccgaactagcggggatgactccatcttgtatgatcatgatctggagagttatggactttttgacatgcatgggaataaaattccgccgcagttggttactaaagttggagatgcattcaagagaattctcgaagagacggagaaaataagggatgaaactgccaatgacatgtctgttcctcaaggaatatctatcgtcctggatagaaatccaaaac

SEQ ID NO: 913 - DNA, 505 bp, Arabidopsis thaliana
  unsure at all n locations
  Clone ID: ARABL1-029-Q1-B1-H3
gaatttagancaaaactataggccaccnatgacgtcnaatanacgcgtacgtaagctcggaattcggctcgaagcatgaatccccatgccaaaagagggtcaaaacctgggactaaaattcttcgcccctttcaagcttgttagctatttttatagatcccctcttcttcttcctcataaaagtccaagagcaaaacaaatgtattatgattgattggccgatgactaaagcatttgtagctgtaagaagtgtaacagatgttatattcactatgaacattctacttcagttccgattggcctatgtagctcgtgagtctacggtagttggagctgggccagttagttagtcatcccaaaaaaattgcccttcattacctcaaaggaaagtttttccttgacttgttcataagtgatgccacttccacaagatattgatactaagggataataccaacacanttgggtgcatcccggggcaaactatgcgaaaaaaccttctacg

SEQ ID NO: 914 - DNA, 421 bp, Arabidopsis thaliana
  unsure at all n locations
  Clone ID: ARABL1-029-Q1-B1-H7
gaggggaannnnnnnnnnnnnnnnnnnnnnnnnnnnnnnnnnnnnnnnnnnnnnnnnnnnatcggcgacgagctccatccggtttgtctcctaatcagaatctctgatttcccgatccggctaattcctcatcgtcggatcaattagattatcttatcccaagnnnnnnnnnnnnnnnnnnnnnnnnnnnnnnnnnnnnnnnnnnnnnnnnnnnnnnnnnnnnnnnnnnnnnnnngtcgtcgcagcttcggcagacccatctctgcctttggaatggagattctctcaggtcttcggtgaacgaagcgctggtgaagaagttcaagaagttgatataatctcagcgattgaatttgataattctggaaaccatcttgctactggggaccgtggaggacgtgttgttcctttccaaaagaac

SEQ ID NO: 915 - DNA, 402 bp, Arabidopsis thaliana
  unsure at all n locations
  Clone ID: ARABL1-03-Q1-B1-A11
tcgagcgccgccgttcatcaatctctccgtcgtgtttctgccactagctctccaccaaactttctctctcgcattagttgtttagggataaacatggcaggagaaggtgaagaagatgtacctagagatgctaagattgtgaaatctctgcttaagtcgatgggtgtagaagactacgagcctcgtgtgatacatcagtttctggagttatggtaccggtatgtggtcgaagtgttgacagatgctcaggtttactcagagcatgctagcaaacccaacattgactgtgatgatgtgaagctcgctattcaatccaaagttaatttcagcttctcacaagcctcctccaagagangttctgcttgagcttgctgcaagtaggaacaagatacctctggcaaa

SEQ ID NO: 916 - DNA, 397 bp, Arabidopsis thaliana
  unsure at all n locations
  Clone ID: ARABL1-03-Q1-B1-A12
ctcgagcgagagctggtgttgaaggagagaggcattgatgagcccgagcatcacaaattggatcaaccgacagataggatggtcctcaaaccgattgaaagagttccagagcatgcaagtcaaaggccagtgagttctccacgtgacatgagaacgaggaaattcgaccaaaaggatgggcgaaatgtaagcgacattgccagatccgaaactcagaggagaaactggcgtgaaaatgaaaacaagagcgcaagacagcaacagcagactcaggagaagacaagacatccatcaccagagacatggcgaaagccggttccccagaaactggattcaccaaatggaacagggattcgtcacggaaaagcagcttctgctcctgagcctaactcaaanc

SEQ ID NO: 917 - DNA, 462 bp, Arabidopsis thaliana
  unsure at all n locations
  Clone ID: ARABL1-03-Q1-B1-A4
ggntcgccagaagagctcagaagtcgcggncacncgtacgtaagancggaattcggctcgagtgcaagaagagaatctgcttacaaaagaaagaaggcagtgttaagtctctgatttcttcttgataacattactactatgtacagattcagcaacacagttattggggtcttaaaccttctcaccttactagcctcgattccaatcatcggaaccgctttatacaaggcaagaagcagcacgacatgtgaaaacttcctccagacgccgctacttgttataggattcatcatactcatagtttcccttgcgggattcataggagcctgcttcaacgtggcatgggctctttgggtgtacttaagtggtcatgatctcctcatcgctaccctaatgggtctaacgctatttggtctggtgggtgacgagccaanggaggtggagtggaagtgncaagggaag

SEQ ID NO: 918 - DNA, 405 bp, Arabidopsis thaliana
  unsure at all n locations
  Clone ID: ARABL1-03-Q1-B1-A9
ctcgaggtcttattaataaatagtggtagtggttcttatggaagatattttaccgcaacatcatcagctcgtgaattcctgggattctttcaacatggtgcaagattacttggctggtggtctatcgatgaaggaagtcgggaagaacaagcaaggctctactctggagaagctactggatacaacaccttctcaccagaggttgtgaagaaaatgccaaagtctgatcttgttgaagagatatggagacttcaagctgcattgagtgagcaaacagatatcaccagttatagccagcaagagtacgaaaggcttcaaaacgagaagattctttgtagagtttgctttgaagatccgatnaacgtggttctactcccaatgtagacattacgtcctccggaagta

SEQ ID NO: 919 - DNA, 397 bp, Arabidopsis thaliana
  unsure at all n locations
  Clone ID: ARABL1-03-Q1-B1-B12
ctcgagcaacgatatctctgtaccttctgagttagatgatagagttcaagttggcaattcaggtagagaaactcaaactggcaagccatctcctgctgctgttcatgagtatctagtggaggcctacgagactagggttgcagaacaggagaagaagaaactattggatcctgtgccactcgatgaagaagctaaggccaaaagtacgcgtctaaagcgccaatggggaacgtgctggtgggagcaatattgcatactattctgcagaggactcaaagaacggcgacacgaatacttcagttggttgcgtgttacgcaagttctttccacagctgtcattttaggtcttctctggtggcagtcggacattangactccaatgggactacaagatnag

SEQ ID NO: 920 - DNA, 407 bp, Arabidopsis thaliana
  Clone ID: ARABL1-03-Q1-B1-B2
ctcgaggcagatttagagcgtgtgagggagataggaagagagaaagtgagcgagagacgatcacggccgcgctgaaatccacgaccacggccgcgctgaaatccacgaccacggccgctctgaagaagaagactctctccgtctcctcccttctcctcctccgtctaagagacaaggcatccccagacgccatgatctctctcactccctcgttgtttctgaacaagacggttgttcctggatgttccacacgcctctctctgcgccagcctaagaactataattactcctcctgcttccttgagagtcttttcctctctcggatttaaccaggattccaacgggcagcgttttgattgagaacactggcaattcatcctcctctctcgaaaacttccggcggccga

SEQ ID NO: 921 - DNA, 466 bp, Arabidopsis thaliana
  unsure at all n locations
  Clone ID: ARABL1-03-Q1-B1-B4
tagntcgccagaagagcacagaagtcgcntncacccgtacgtaagancggaattcggctcgagctagctaggactcatggtttccgtagaaggatgaggaccactagcggtagagcaaccataaagcgtcgacgtgccaagggacgttggaacctctgtcccaagtccaaccctagcagcggcaaacgggcttgaagtttgtttctctcttcactctatctgtaatcttgtttcatgtgctttttttccaccagaagatacaatgagaaacatggttcgttgagctcttttctgcgttttaactctcttgcatccttgattcgtttataaatcaatgttcttggaattcatcacatgtactactatactacttgcttcattgaatttgttactactccgaaaaaaaaaaaaaaaaaaaggggcgggcgcccgactanttgagccccgtccaaccccgggaantaaa

SEQ ID NO: 922 - DNA, 454 bp, Arabidopsis thaliana
  unsure at all n locations
  Clone ID: ARABL1-03-Q1-B1-C2
gccagaagagcagagaagtcgcnnncacncgtacgtaagancggaattcggctcgagctgatcggttctgaaatttgtagctatgcaggcaacggctttatcatctgggttcaatcctctaacgaaacgtaaagatcacagatttcccaggtcatgctctcagagaaattctctgtctttgattcaatgcgatataaaagagagatctttcggagagtctatgacgatcacgaatcgtggattgagttttaagacgaatgtgtttgagcaagctcgttctgtgactggagactgttcttatgatgaaacttcagctaaagcacgttctcatgttgttgcagaagataagattggtgtcttgcttttgaatttaggtggtcctgaaactcttaacgatgttcaacctttccntgtataatcctccttgctgattcggatattataanggcttccc

SEQ ID NO: 923 - DNA, 453 bp, Arabidopsis thaliana
  unsure at all n locations
  Clone ID: ARABL1-029-Q1-B1-B1
gagggagaatgggaacaaaacaagcaacatcgtctccgcctttgtctccagctgataaagccgatgcattttcacggctgagggngccgtcgcaccgccgtactaaacgaactgattagttctttagattccttaagtctcacggaagcacttgcagcttcttcatcgtctcccgttaccatgcccatttccanggggacgatgatcgcttcatcgaatctaaagcagcaaccaccaccaccaacggtcttccgccgttggcttngatgttcggagaacaggagatttccaaattacnncaagagttngntcctccaacnaatttgctctttnaactttccttcaanntccaagtttnaccttccaatgggccaancttnaaggccaancaaccgttcgaanctttcctttgggngatgnaattnaaaacaangttggttggccgggggtaaa

SEQ ID NO: 924 - DNA, 434 bp, Arabidopsis thaliana
  unsure at all n locations
  Clone ID: ARABL1-029-Q1-B1-B6
gaggcagttgcaacacaagacagcaccacgtttcaagctgcttaaagatgctcactcccggagaaaggagacccgcaccggctgccaggccatgattcgccttcgactcatccactttgatcgatggaaagttgatcaagtcaaactcgaccacaaccactcctttgatcctcaacgtgcccacaattccaagtctcacaagaaatcctcctcctcagcttctcctgcaactaagacaaatcccgaaccacctccccatgtccaagtccggactatcaaattgtatcgaacccttgcccttgacacaccacccgctcttggaacttcactctcctancgggggaaaccanccgatttcaagccttgatnaacttcaatccttcaanggcgccttgggagctcaaaaggggggtttaaggggcccttgcaaggat

SEQ ID NO: 925 - DNA, 420 bp, Arabidopsis thaliana
  Clone ID: ARABL1-029-Q1-B1-B8
gagaaatggcgaacaggagttgacattatacacgttccatgtagaagtgcggataatttcaatatgtcgatggtcgtgcttgatcgagcattctatcaagctaagaaacgaggtgtaagaatccgcggcattataatctcgaatccttcaaatcccatgggaagcctactgagcagagagaatctctatgcgcttttggactttgcccgtgagaggaacattcatattatatcaaacgaaatctttgctgggtcagtccacggagaagaaggagagtttgttagcatggctgaaatagttgacacggaagagaatatcgacagggaaagagttcatatcgtgtatgacctttcgaaagacttgtctttccggggggcttagattcgctgctatctactcgttcaacgagagtgttttatc

SEQ ID NO: 926 - DNA, 438 bp, Arabidopsis thaliana
  unsure at all n locations
  Clone ID: ARABL1-029-Q1-B1-C1
gggaaaagcctgctccgtcacaggtcaaaatggtagtgggaaagacttcagtatttagagtccttagagatatctggcccactgtatgtggaagacttaccaaaccatcattggatatcaaagaacttgggtcagggaatggcatgttttttgtcccgcagcgaccttatacatgtttagggacactgagagatcaaattatataccctctatctaaagaagaagcagagaaaagggcagcaaagttgtacaccagtggagagagctcaacagaaagctgggaagcattccnggattcctcatttgaaaaccaatcctgggagaatgttccggttaagtttaaccccntggggaaagaanaccgtnagggtgggnttggggatgccaactaaccaaatttggggaaagaccataattaaccncccttgggggaaacca

SEQ ID NO: 927 - DNA, 425 bp, Arabidopsis thaliana
  unsure at all n locations
  Clone ID: ARABL1-029-Q1-B1-A8
gcgactgttttagtctcatccacatgaatcaatatccagatttgggcgaattctgggttgcttgactccttccaaccgttatagttgaaacggtccggcgtttttgacggcttcaatcacctcatttgaggtccgtcttgccattccaggaagtcaagatatcaatttccgaagtctattcttattagcaagtgatgacaagagatcagaagcttcacctcgtggttgattgtttgctgacaacttctttcatgcttttgttctcggaaaagatccagtgatgagaagagaaagaatttgaagataaaattgaatcctttnacctttttcgggttaaataagttggtttggttttaataatcccgggagaatgtttccnggttgtttaactccgccgggaaaattgtgccgggcttccngtcctg

SEQ ID NO: 928 - DNA, 438 bp, Arabidopsis thaliana
  unsure at all n locations
  Clone ID: ARABL1-029-Q1-B1-C3
ggagtatttcatcagacacaaagacggttgcactcttgacacanaaggagagaaagagagagttgtcagatgtctggaagctgcaatccatanacgagtcagcgagggttggagtttggagctctgcgcaaaggacagagttggattactgtcggaagtgacaaggattctgagagagcacgggctatcagtgtcgagagctggtgtgacaacagtangagaacaagccgtcaacgttttctatgtgaaagatgcttcaagggaatccaattggatgttgaaanacgatttgaggcgtttacgccggagaagattgggacacanttatgatngatttgacttnaaagaataaagtttccgagcagnaaaattgggaangaaagaaggtccaagcccgggaacaaggaggaaggattgggccaaaacccaagttttcnt

SEQ ID NO: 929 - DNA, 424 bp, Arabidopsis thaliana
  unsure at all n locations
  Clone ID: ARABL1-029-Q1-B1-C5
gaggttttatcttcggttagagaaagatttaaacgttaaagagtctaagggtgtagaaggtactacactagttgatgggaaaggtagccgccagagtagacgtaggattgaaaacattatgggtgatttggccaaatcaattgagaaagagaagaagatttctgtcaagatgcttaaggatgttggggagctattaagcctcactctcagccaggctcaaaaccgtcaacagctgtcgggtttgacaaaatttcgtcgcattgatgtgacaccatcactagatcccctagacggactttatattggcgcacatgggctatatacatcagaagttatccatttaaaacgcaaatttggccaattggaaagggtggaaaaggatctaagaaancaacaagatatccgaantttaagaataagtttg

SEQ ID NO: 930 - DNA, 375 bp, Arabidopsis thaliana
  Clone ID: ARABL1-029-Q1-B1-C6
gtcatcatccaaacatactcaagatccatgaagttatggcaaccaaatctaagatctatctcgtaatggaactcgcttccggtggtgaacttttctcaaaagtcctccgtcgtggacgtcttcctgaatcaacggcgcgtcgttactttcaacaactcgcctccgctcttcgtttctctcaccaagacggtgtcgctcaccgtgatgtgaaacctcagaatctactcttagatgagcaaggtaacctcaaggtctctgactttggtttatcagctttaccggagcatctacaaaacggattgcttcacacggcgtgtggtactccggcttatacagctccggaggttattcacggaggggatacgacggagcaaa

SEQ ID NO: 931 - DNA, 488 bp, Arabidopsis thaliana
  unsure at all n locations
  Clone ID: ARABL1-029-Q1-B1-D1
ccgaatttaattaaaactataggcccnctntnannttcaaananacccttacttaancncggaattcggctcgagctccatacaaggatagaaggtnccccngtancaattggnaccgaatccgaattgttgtcttanccggtcgtcgcttcaatgaaaaggaaggcttgccagcattccctatgggaaatattgaccagacaagaatgtggaaggtgggtgaacgcgtcaggaagtccagacctgctggtgacttgggtccattgtatcccttcaccgctggagtttatgtagcacttatgatggctcagattgagatcttgaggaagaaagggtcactcttactcagaaatcatcaacgagagtgtgattgaatccgtgggactctctaaacccanttatgcacgccaangggaattgtccctcaatgggttgacaactgctcaancaacagcaaaganttggggttccaaggaaattgggcncca

SEQ ID NO: 932 - DNA, 417 bp, Arabidopsis thaliana
  unsure at all n locations
  Clone ID: ARABL1-029-Q1-B1-D2
agaaatcgaatcttatcgccgcgttaatatgccaccggccggagaactccgacatcaatctccatcaaaggagaaactatcttccgttacccaatccgatgaagcagaagcagcgtcagcagcgatatctgcggcagctgcagatgcggaagctgccggattatggacacagatcaaggcggaagctcgccgtgatgctgaggcggagccagctttagctagctatctatattcgacgattctttctcattcgtctcttgaacgatctatctcgtttcatctaaggaaacaaagctttgttcctcaacgcntttatccaacacttttatacgatntgttccttaaacactttttcctcccgatncttctcctcgtaacgccaaccgttgcaaatttaggcgctgctcgtgttcgtga

SEQ ID NO: 933 - DNA, 197 bp, Arabidopsis thaliana
  unsure at all n locations
  Clone ID: ARABL1-029-Q1-B1-D5
cccaaccctgagtctagtttcacaatcttcatgttttggggacgatgtgtatggtttgatgagcggatggaataattcttgtgtagtgagttgaattttgtttcatcagtagagcttgagattttttgtattttaagatcatctgttaatgtaatggttttatgttnnnnnnnnnnnnnnnnnnnnnnnnnnnnnnn

SEQ ID NO: 934 - DNA, 351 bp, Arabidopsis thaliana
  unsure at all n locations
  Clone ID: ARABL1-029-Q1-B1-D6
ttccatttatcacgatcgtggatccagaaactctgaaagatggcgtctgagctgacaaaccggcgacacgagatagagcaaccagaagcggaatcttattatccaaagccgataaagccatggttcgtagcgattcgtccgatccgttacatgctcagagaacagagactcgtcttcgtcctcgtcggcattgccatcgccacattaggattcacaatcttctccaaatcatccaaccaccaaccaattccttacgacgtggatccgctttccggatacggatgcgatcggagtcatcgtatctgcaacgacgatcataagaagccancatcgagtacatgagccggntcg

SEQ ID NO: 935 - DNA, 479 bp, Arabidopsis thaliana
  unsure at all n locations
  Clone ID: ARABL1-029-Q1-B1-E1
caaaaaanacccttacttaagctcggaattcggctcgaagggcaacttctctcaaagccgccgcaaantttnctncaacgggcgaaagaattgccgcttctccttctcgtaatgtcatcnccgattaaaaccaaaccgtgggcaagtcctttgggttagactcttcacaagctaggctcacgtgctctctccactctgacctcaaagacttcgctggaaaatgctccgacgccgccaagatcgccggttttgctctagccacctctgctctcgttgtctcgggggccggtgcggagggagcaccaaaagaggctaacgtacgacgaagatacagagcaaagacttacattggaggtnaanggttaccgggtacgggaaaacaagtgttcaaactatcgatggggggtcctgaaganaatccccgntcaaaagctnggtaagtncacaaggcaaaaaanttctgctccaagccaactttc

SEQ ID NO: 936 - DNA, 437 bp, Arabidopsis thaliana
  unsure at all n locations
  Clone ID: ARABL1-029-Q1-B1-E3
cgttattctcaaggagtctccgctaaaacttccccttcagacnttattattcnaccacaaggaatgggtctatacgagngtgcttaagaacaaatggactgatcctgagtcagggaagttgaatctgagtaggaagatcggtgcagggctagtcgctggtggaatcggagccgccgttggaaatccagctgacgtggcgatggttaggatgcaagctgacgggaggttacctttagcgcaacgtcgtaactacgccggagtaggagacgcaatcaggagcatggttaaggggagaaggcgtaacgagccttgttggcgaaggctccggcgttgacgattaaccgaaccaatgattgttgacggcgggctcaacctaaccgtcctaacattaanttcaaaggaanggatanttgganaatggggttaatgaattgatt

SEQ ID NO: 937 - DNA, 402 bp, Arabidopsis thaliana
  unsure at all n locations
  Clone ID: ARABL1-029-Q1-B1-F2
ctccattgatctttctttactcagatctttcctcttcctctgagatgtggagctacgtttggttaccgttggtagctctatctctctttaaggatagcatcataatggccaaggctgcgacgattctcctccctagtcaaaccggatttgatatttctcggagtccggtatgctctgctccggatccgaacctaaattacagaccggttattggtattctgagccatcctggcgacggtgcgtcaggtcgtttgagcaatgctacagacgcgtcctccattgcggcttcgtatgtgaaattagctgaatctggtgggagcacgtgtgattccactcatctttaaagaancctgaagaaattctccttcaaaaagctaaaantgggccaacggtgttatacta

SEQ ID NO: 938 - DNA, 531 bp, Arabidopsis thaliana
  unsure at all n locations
  Clone ID: ARABL1-029-Q1-B1-F3
caggntccctgaatttagaccaaaactannggnccaactaanaanttcaaannnnacccttanttaancncggaattcggnncgnnnnnnnnnnnnnnnnnnnnnnnnnnnnnnnnnnnnnnnnnnnnnnnnnnnnnnnntncngcggaggagcttcttcttcgtagggngttcatcgttattaacgttatcgcccctacgtcagctccatctccagaaacatgggtgcaggtggaagaatgccggttcctacttcttccaagaaatcggaaaccgacaccacaaagcgtgtgccgtgcgagaaaccgcctttctcggtgggagatctgaagaaagcaatccccgccgcattgtttcaaacgctcaatccctcgctctttcccctaacttatcaagttgacatcaatataagcctcaaggctttcnactaaggtcgccaaccaaatttacttctcctctcctcccctcaagcctctctccttaacttgggcttgggcaatccaantngggccctggtcaaagggctgtntt

SEQ ID NO: 939 - DNA, 381 bp, Arabidopsis thaliana
  unsure at all n locations
  Clone ID: ARABL1-027-Q1-B1-A6
tcagattcgagatgagctgcgacggaggcaaaccggcgccggcgaaactaggcgacgaacaactagcggagctccgggagatattccgatcatttgaccagaacaaggatggaagtttgacggagctcgagttaggctcacttctaagatctctcggtctaaagccgagtcaagaccaactcgacacattgatccagaaagcagatcggaataacaacggactggtcnagttctccgagttcgtcgccctcgtcgagccanatntgggtcaagtgtccttacacggatgatnagcttaaagncatccttanaatgtttgaccgcnatgggaaccggtacataacggnggngganttagcccattcaatggnaagctagtca

SEQ ID NO: 940 - DNA, 363 bp, Arabidopsis thaliana
  unsure at all n locations
  Clone ID: ARABL1-027-Q1-B1-A9
tgtttggttgatccatccgtagtcgtagtagatctacaagctctgaaattccacgcccacatctcctccgtcctcttgagatccttctcttcattcattttcttgctcaacttgagttgcttccaacatcttgcaagattgtctttgagttcattcaggtcttgaagaagagcactcttttaagctgtgtgaaacttgcgccgttcctgtgaagaactacttttggcattgcagatttcagagagctgtgatttgtgctatcttaaaaacggacaagttctatgttgtggcggatgagatgagggatgctatctgggttgatgaattttctgaatgcctgtctctggccacggtcagatnagc

SEQ ID NO: 941 - DNA, 394 bp, Arabidopsis thaliana
  unsure at all n locations
  Clone ID: ARABL1-027-Q1-B1-B1
caaaaatcatctcaagatcagagcccagatcccaaaccgacgacaccaaccgggacgtcgtcgacaanncctgccggagatagtagtacgacgtggtcaccggtagatacatcaatgatatacgaaggagctttggatcaaaacaaaggatcaccgtccacgtgtcatctttcgttatgtggaatcacagtcacacttgcgctggccttttgtcggatgtggcggctcttttgacacctaactttgtctcccgcgtaaaacactgaagaatgtgggccctcactgacgaaagccttatctcgttccgggccatgtgaaccggttattcccgaacgacgtcggattgggtcagagttgagaaaaaaagttaacaacacctacagttacgaanata

SEQ ID NO: 942 - DNA, 366 bp, Arabidopsis thaliana
  Clone ID: ARABL1-027-Q1-B1-B12
ctaacaccaaaaacaagtctttgaagaagaataaaaagattggattttgataagtttagtgaaaatgggggagcttttgtgttcttcactgtggaacccgtcacgattcattgttgcttctctcaaaaggtattttctgggtttagcttcttagaggttcttcgttcttaaaggtctgtttttttttaggttgtgatactttgaatgtaaaaaagggaagatttttagtttcgatatgtatatctctcggatgggtttgagtcggagtttcccgccgctttttgggggattttcgggaaattccaagggttaaggttggataatgtcttcctccaacaatcctctgccacttttaaaatctcctca

SEQ ID NO: 943 - DNA, 403 bp, Arabidopsis thaliana
  unsure at all n locations
  Clone ID: ARABL1-027-Q1-B1-B6
agttagatcggttgaggaaacacatagatctataattagacgtcgtagatctaatcgccggncgtcctttaatccggtaatcgtcttacacnnnnnnnnnnnnnnnnnnnnnnnnnnnnnnnnnnnnnnnnnnnnnnnnnnnnnnnnnnnnnnnnnnnnnnnnncttatgagttttattacgatgatggatctggttcaggtctaagacctcttcctgattctgtatctgagatcttgatgggatctggattcgaacggttacttgaacaattgagtcagatcgaagcgtcaggtaacggaatcggtagatctgggaatccaaccggcgtcgaaatcagcgattgaatccttacctaaaatcgaaatccaagattgtcatacgaaagcagaagctaaattgcg

SEQ ID NO: 944 - DNA, 394 bp, Arabidopsis thaliana
  unsure at all n locations
  Clone ID: ARABL1-027-Q1-B1-A4
ggtcgatattgaaaccaaatccgttgagccgatgactgtttctgtacagccatcctctgtccaagtcgttgcagaggtagtancaccagaagaagctgcgaaaccaaagggaccaagccgatgtactacttgcaataagcgggttggcctgactggattcaaatgtcgctgtgggagcctcttctgcggaacacaccgctatgcagacgtacatgactgctccttcaattaccatgctgctgcgcaagaggcgatagctaaggnaaacccggttgtgaaaacaaganaaancttgacaaaaatccgaaaatcctaanttaaactttctcctgggtttcatcaaggtgggctggtgtttcccttctcctgtccngtgtcctgggttcaagtnatt

SEQ ID NO: 945 - DNA, 379 bp, Arabidopsis thaliana
  Clone ID: ARABL1-027-Q1-B1-C10
gagcttttgttcttcgattcgatttctaatcaattagattgtttttgttttgtttaacatcagttgcgaatcgagctggattcttgggctcgctttttctttcaatcaaaagtttcgatattagtgaaggataaaattcgctaaaaaaagagaattttttttgttaaaaaaattataaaagctggctttctcaaaatttctccatgtggtcgacgaagaagacgaagaagacgaagaagaaagagaaagtctcttaacaaacatgaccgccaccgaagctaagaatcgcaaaatcaatgtcggagatggagatgacgttgttgatatcgaaatccctgacactgctcatcaaattagcagcgattcatgggttcaggtg

SEQ ID NO: 946 - DNA, 383 bp, Arabidopsis thaliana
  Clone ID: ARABL1-027-Q1-B1-C12
gaggttgggattaccggggaaggaacatatgtcgaagccgccggtggtgaaaattttggcggaggtggtggtggttctagtggatcgtcctccactagagactactatgcaatgttttcaccaagggcaacattattagagtcaaattcaatgaccaaattatcatcagcccaaccttttcaaggaggcttccttttagagaaagtaatgggcccattatcaacgggtcatttagagctcaagacccgaaacccaaaagataacccgattgtgactttcaactatttccaacatcctgacgacctaaaacgttgtgttcgaggaatccaaaaccatagagagagtccgtgcaatctaaaagcttttcgaaggtataaagtacg

SEQ ID NO: 947 - DNA, 401 bp, Arabidopsis thaliana
  unsure at all n locations
  Clone ID: ARABL1-027-Q1-B1-C2
ttgaatttctctctgaggcaattcgtcgaacaacatggggtccaaacaaccatacctaaacggcgcgtactacggaccatcaattccaccaccgcctaaggctcaccgcagctataactcacctggattcggatgctgttgcttcagctgcctcggaagctgtctacgttgctgcggttgctgcatcttaagcctgatctgcaacatcctcatagctgtagccgtaatcctcggagtcgccgctcttatcctctggntcatcttccgtccaaacgccgtcaaattctaagtcgccgacgctaatctgaaaccgattcagcttcgattcaaacaanaacctccaattacagtctcgatttcaatttcacaatccgtaaccctaatcaacgaatcngagtcta

SEQ ID NO: 948 - DNA, 395 bp, Arabidopsis thaliana
  unsure at all n locations
  Clone ID: ARABL1-027-Q1-B1-C3
gaggctaaaagtgcctctgcatcaatggcgatttccaagctccatctagtactctttcttctctcagtctttctcgctcttcatcgtcctgttctttccaacaccggtaaactctctcattccgaccaagatcttctagatttttcaatttaggtttcttgatctagttctagtctgaaaatcgtcaaatcttgtttcattcaagcctagatcttgatcaatggcgattacgttgttaactaaactatactttcggtgttctgtttttgatatccacagatggagaaaaccttctatttacaagtattcaaccaatacagagaatcagtaaacctcacaaacctaanaaaggaacaaaaacgcagaatgtctagcagacgaagtcgtanaccaat

SEQ ID NO: 949 - DNA, 393 bp, Arabidopsis thaliana
  unsure at all n locations
  Clone ID: ARABL1-027-Q1-B1-C5
attcgtcgttacgaaaaccagtgtggacacaaagcagagcaaagaagacttttgtaagaaaataggnacacaactaaagagatgtcgtcaaccttgagcaacgaagagtcaggactcggtgattcaaatcgttcgacggaagtagatggcggcgacggaggaaacttcacggcttacgagtctcgattccagtcgcagcggtttgactcttccttctctaattttgactcccaaccggagaaagagtcagacttaccatgcggcgattcatctcctcgacccgaaactcaatctccgccgtcgataaatagtttcgatgatacaaacgattcgatnctgccgccacatcgggcatggngaaagaggaaggttcgctcctangagatggcgaag

SEQ ID NO: 950 - DNA, 404 bp, Arabidopsis thaliana
  unsure at all n locations
  Clone ID: ARABL1-027-Q1-B1-C8
acaaaaactttcagaagaaacctgaaaaaacctttcggagaaatctccggcgaaaaagaaccctagcgtcgagcggcgaagatgggcgtaattgatttgatcactagggttgattccatctgtaaaaagtacgaaaagtatgatatcaatagacagagagacgctaatgtctccggcgacgatgctttctcccgcctttactccgccgtcgaatatgctctcgaaactgttcttcagaaaacagaggatttgtcgtctgagacaaacaaagcgaaagctgtggcgatgaacgcagagattcgaagaactaaagctcgattgcttgaaaggaattcaaaaacttcagaggctttctctcaaaaaagncaaaggactttcaaaggaggagcttgatgctaggaatg

SEQ ID NO: 951 - DNA, 338 bp, Arabidopsis thaliana
  unsure at all n locations
  Clone ID: ARABL1-027-Q1-B1-D11
tccgccgacagccgccgcgtgtatgtccttcccatacggaatctgccacgttgcgtttgtataatctgcctgactagggctttagcagtgtataagagacgagacgagacgcgattcaccggagagtcaaagaggcaaggaggagaaagccaatggcacatgccacgtttacgtcggaagggcagaatatggagtcgtttcgactcttgagtggccacaaaatcccagccgttggactcggcacgtggcgatctgggtctcaagccgcccacgccgttgtcactgcaatcgtcgaaggtggctatangcacatagatacagcttgggaatatggtgat

SEQ ID NO: 952 - DNA, 399 bp, Arabidopsis thaliana
  unsure at all n locations
  Clone ID: ARABL1-027-Q1-B1-D6
gagctaaagtcttcgaattgagagattttagcagcgcaaagatactctatccgggtaataagatcgaagaaacnatcaatttcttaccaaagtcgtgattcttggatctcgtctttgtttgatggacacaattagggtttccaaggaggttcctggatcttcgaaatcgaccgcacagtcgctcacggagtcgacctctcgcacggaaaccatcaatggctcccacgaattcaagatcagcggctactctttggtcaaaggcatggggattggcaaatacgttgcctcggatactttcatggtcggtggatactcctgggcatctacttctacccagatggaaagatccanaggataattccgtcaagtgtcnccctcatagcccttgcaantgaaagg

SEQ ID NO: 953 - DNA, 387 bp, Arabidopsis thaliana
  unsure at all n locations
  Clone ID: ARABL1-027-Q1-B1-D7
ngatganaaanccatgaaggatgcnantgagggantgaacggacaagatctcgatggccgtagcatcactgttaacgaggctcagtcacgaggaagcggtggcggcggaggccaccgtggaggtggtggcggtggataccgcancggcggtggtggaggttactccggtggaggtggtagctactgcgtggcggcggtagacgcnaagggtggaggaggatacanccggcgnnngcngcggttactcctcaagaagttgtggtggcnngaagctaccggtggtgggaagacnttaagggaaggangaaggataccggtggttggntaaaggaggaggtttaccggnnggnaaccggttggttgttgggaaaggatggttaaattccn

SEQ ID NO: 954 - DNA, 410 bp, Arabidopsis thaliana
  unsure at all n locations
  Clone ID: ARABL1-027-Q1-B1-D8
gagaaagatggagtctcaaaggtatgactgctcttgtgaccggtggagccagtggaatcggttatgccatagtagaagagttggctggttttggagctagaatccatgtatgtgacatctctgaagctaagctcaatcaaagtttaagcgaatgggaaaagaaaggttttcaagtaagtggctcagtttgtgatgtagcctctcgtcccgagagagaagaactgatgcaaaccgtctcctcgcagttcgatggcaaactcaacattcttgtaagcaatgtgggcgtaatccgctcaaagccaacaacagaatataccgaagacgatttcgctttcatatatcatcaaacgtggaanctgcttancaatttaancagctttcaatcctctcctaaaggctcaggctatggg

SEQ ID NO: 955 - DNA, 388 bp, Arabidopsis thaliana
  unsure at all n locations
  Clone ID: ARABL1-027-Q1-B1-E1
tnaaanccttatcctgctatggcttccactttcgtctgctctctaccaaatcctttctttgcttttccggtcaaagcaactactccttcgacggntaaccatacgcttctcggaagtcgaagaggttgtcttagaatcaaagcgatttccactaaatgggaaccgacaaaggttgttcctcaggcagacagagttcttgttcgtcttgaagatcttcctattaaatcctcaggtggagtattgttgcctaaagcagctgtgaagtttgagagatacctaacaggagagattatatctgttggttctgangttggcaacaattggacctggaaaganggtttgttctctgatgtgacgcttatgangtcaatttggaaccgatgctagc

SEQ ID NO: 956 - DNA, 380 bp, Arabidopsis thaliana
  unsure at all n locations
  Clone ID: ARABL1-026-Q1-B1-F1
gtaacaggtgcgcagcttcatgtagagagccacggattcaagaacgtgctcttcttgcgcctttgtttctctagagttgtgggagcaacactggtaaagaattctgaatgggatgaagcggtaggctttgctccaaaatcaggactcatctcaacgctaataagccatcacttcactgcagcacaaaaaccaccaccacgacctgcagacgtgaatataaattcggctatatatcctggtggaccaccagtacccacgcaagctccaaaacttttgaaatttgtggatacaagtgagatgacaagagggccgcaagaatcacccgggtattggggttgtatcgggtgcaagattatttggtgggagaaaagnaaaatccc

SEQ ID NO: 957 - DNA, 400 bp, Arabidopsis thaliana
  unsure at all n locations
  Clone ID: ARABL1-026-Q1-B1-F4
tcttcttcttcttctctacctttgtttgctctgttcaattttttcctcataagtttttgcagatgggtttcttctacacgtatctttttatcaagattcgtccctcttcttcaacatcancaangcgttttcgacaaaaagaacaacanagaccaacaagagactttgaccaaacnnnnnnnnnnnnnnnnnnnnnnnnnnnnnnnnnnnnnnnnnnnnnnnnnnnnnnnnnnnnnnnnnnnnnnnnnnnnnnngatggttatgacaagcttagggcttttttacaacgatgatcagcttcaacaacaatacagtgcaaaanaagtctcgagtttgttcgaagagaaagaagcgaagtttggaagaaatcaaacaagcttttgatgtgtttgacgaaaac

SEQ ID NO: 958 - DNA, 413 bp, Arabidopsis thaliana
  unsure at all n locations
  Clone ID: ARABL1-026-Q1-B1-F8
ttctgaggcatgtaaaggagttccacagccaatgaatcctccaaggtttatgaaaacatctcaagcaacaacaacaacaaccaatgttcctgcactaagtgatgatgctttgactcgtgtcgccatgtcacttccttctccaaaaactgcgaataaagaagatggactgtgtgtgatttgtgtggatgcaccatctgaagcagtgtgtgtgccgtgtggacatgtcgccggatgcatttcttgcttgaaagagattgaaaacaagaaaatgggatgtcctgtttgtcgcnccaacattgatcaggtcattaagctatatcatgtttgaagcatatctcctctatgggtggaagatattgaaactatcncctattttttactttgtctttaanaagataactacaaantttttt

SEQ ID NO: 959 - DNA, 429 bp, Arabidopsis thaliana
  unsure at all n locations
  Clone ID: ARABL1-026-Q1-B1-G1
gggacttgcgtttactgataaagaaagagatgctcattacttaactggtcttcttccccctgtgattttgagtcaggatgttcaggagaggaaggtgatgcacaatctccgtcagtacactgttcctctgcagcgttacatggccctgatggatcttcaggaaaggaacgagaggttgttctacaagcttttgattgataacgttgaggagttgcttccagttgtgtacacaccaacagttggtgaggcttgccagaagtatgggagcattttcaggaagccacagggtctctacatcagtttgaacgagaagggcaagattcttgaagttttgaagaactggccccagagaggaatccaagttattgttgttactgatggtgaaccggattcctcggtctgggaaatcttggntgccaaggaatggga

SEQ ID NO: 960 - DNA, 535 bp, Arabidopsis thaliana
  unsure at all n locations
  Clone ID: ARABL1-026-Q1-B1-G12
gtgaatttttanggcgcctagaagagaaaaacgtcgcatgcacgcgtacgtaagctcggaattcggctcgagaacaaattcacactctctccgccgcgcacagactcaccgacaccaccaataatgtcttcttctccggcgattcttcccgtcaccaaccagcaagcagccactcaatctcaacctccaatcaattctcacgccttccgtactttcctctcacgcctctcgtcctctctccgcgaaagcctctctcaacgccgtccatggctagaactcgtagatcggagctccttcgctagacctgactctctcaccgattccttctcccggatccgtaagaatctcgcttacttcaaagtcaattactccgcaattgtctcgttagtccttgctttctccctcctctcgcatccattctcgcttctcgtcctcctctctctcttaggctcctggatgtttctctacctcttccgatnttcagatnagcctttggntctctttggncgtantttctcaaattgtgagaaattgg

SEQ ID NO: 961 - DNA, 402 bp, Arabidopsis thaliana
  unsure at all n locations
  Clone ID: ARABL1-026-Q1-B1-E2
gtacggaagagggcgagacacagatggtggaaggttcatcagtctactttttggttcaaacttaaccgatgttgttatcaccggtgagaatgggacaattgatggacaaggagaaccatggtgggggaaattcaagagaggagaactaaaatacacaagaccttatttgattgagattatgcattctgatggtatccaaatctccaatctcactttcttgaattctccttcttggcatattcacccggtctacagcagcaatatatatatccaaggtttgacgatattagcaccggtcacggtaccaaacactgacggtatcaacccagattcttgtaccaacacgangattgaggactgctacattgtctccggcgacgattgtttccnccgttaaaaatg

SEQ ID NO: 962 - DNA, 420 bp, Arabidopsis thaliana
  unsure at all n locations
  Clone ID: ARABL1-026-Q1-B1-G5
caanagatcaatanattacaanaatgcagggagctctgtttatcanaccaactattcttcttcctcttccttcntcagtttcntcgcnaaaactcangttttcntcttcctcacgcaaccaannnnnnnnnnnnnnnnnnnnnnnnnnnnnnnnnnnnnnnnnnnnnnnnnnnnnnnnnnnnnnnnnnnnnnnnnnnnnnnnnnnnnnnnnnnnnnnnnttctgtttttccagctgaagcatgcgaagtaatcaagtggatacgcttgttctgctgatatttaccctgaagtcaagctcgatacaaagcccgtttcangtcccgtggcttcagaagccgttgacangagaatacgaagagtatancaagccccaaagacggttttccgtnaaagaaggcctgcgaatgatcttgggangg

SEQ ID NO: 963 - DNA, 425 bp, Arabidopsis thaliana
  unsure at all n locations
  Clone ID: ARABL1-026-Q1-B1-G6
gcaggaggtttgcctanaagcagccacccttgaaagagtgcgtaatagctcactgatcgagcgctcttgcgccgaanatgaacggggctaagcgatctgccgaagctgtgggatgtcaaaatgcatcggtaggggagcgttccgccttagggggaagcaaccgcgcgagcggcggtggacgaagcggaagcgagaatgtcggcttgagtaacgcaaacattggtgagaatccaatgccccgaaaacccaagggttcctccgcaaggttcgtccacggagggtgattcanggcctaagatcaggccnaaaggngtattcnatggacancaggtgantattcctgtactaaccctttgttggtccccganggaacggangaagctangtttaacccaaangattggttatcgggttcaaaggacnca

SEQ ID NO: 964 - DNA, 311 bp, Arabidopsis thaliana
  unsure at all n locations
  Clone ID: ARABL1-026-Q1-B1-G8
gattgaaccggacccgtttattcaatggatccagaggataggtccgagattgccttcttcgacgttgagacgactgtaccaaaangaggtcaacgtttcgcgattctagaattcgggtcaatcctcgtttgcccgaagaagctaacggagctccgaagctacacgactctcgtccaacctgcagatttgagtctcanatcttccttgtccgtgaggtgcaatggtatcaaacgtgacgacgtcgttttggcacctctgtttgccgacatcgctgatactgtctacgacattctccatgggaggattngggc

SEQ ID NO: 965 - DNA, 419 bp, Arabidopsis thaliana
  unsure at all n locations
  Clone ID: ARABL1-026-Q1-B1-H10
ccgtccaaacgcgatgtgactggccctagacatgacccaattcctcgaaattcatgacggaagacgagttcaacaagcagtttaacgcagatgaagacgacttcgtgctccgacagtcaaagaagaaggccgacatacgagtccgagatggacgtgcgaagccaatcgactacctggcgttcacccttcgatatatcgatgcagagcgcgacgtgttcgatgacgaagagggcgatctcgatatcgaggtaccctcgccggcaaagattgtacagggactcggagtggaggaattgaacgaacttgaaggcgacattgcttcgtaccatgtcttggagtcaaacgctcgtaatcgatcctantggaaggctttgcaatcantttgcgcgaancagangacgaanctagattccgcgaaa

SEQ ID NO: 966 - DNA, 416 bp, Arabidopsis thaliana
  unsure at all n locations
  Clone ID: ARABL1-026-Q1-B1-H5
aaatttgctttgtttttgccaaattcaatcgatatatcaaagatgaagatgggaggttcaaagagaagagtatcgagcaaaggacttggagctgttcttaaagaacaaagagctaagctatacatcattcgaagatgtgtcgtcatgcttctttgttggcacgattgatcctcaatctgtcttcagatttcatcctcatcaatctttatgtataaaaggctttcgtgtgttggagggagaagagtccgtgatgtttgggagcttaaccggcctggcggatcgggtttgattctacgcgagattgtggatgaatcggttaagaatttgacttgtttttgattaaacctctccaataaccgttaacaagattccntggttcctttgggagcaaatatttgtaaattcaaatgattttn

SEQ ID NO: 967 - DNA, 454 bp, Arabidopsis thaliana
  unsure at all n locations
  Clone ID: ARABL1-026-Q1-B1-H6
cgtacgtaagcncggaattcggctcgagcttcgtctctctctcgcgctcccaatttctccgccggcgggaaaaccatgtcgcacttcggaaggtcaggtccaccggatatcagcgacacctactcacttctcgtccttaacatcaccttccgtacgactgctgatgatctctatcctctattcgcaaagtatggaaaggtcgttgatgtgtttattcccagagatcgaaggactggtgattcgcgtggttttgcgtttgttcggtataagtataaagacgangctcacaaagcagtggaaaggcttgatggaagagttgttgatggcagagaaataactgttcagtttgcgaaatatgggccaaatgctgaaaaaatttccaaaggaagagttgtggaaccaccgccgaantcacgaagatctagaagccgtagtccnaaggcggagtcgtaat

SEQ ID NO: 968 - DNA, 421 bp, Arabidopsis thaliana
  unsure at all n locations
  Clone ID: ARABL1-026-Q1-B1-H8
attttttttttcgccaaatagaacatagccctatgagttaatacgatcactatgtagagaaagatatagggtgtgactttctttaataggtctataaatctggctatataaataaatgagatacgcgatccagtatacccgtttgtgaagtaaaaaagaacctttaacttcatgtccgaatagactaaaagtggtaaaaagaaattggaactaagtcatctcgaatcaacggattcatgataaaatccctttatttattaaaaatttttagtgggtaagaggattaaatggtgtatattcttttgttaatagcttggagggattaaaaacatgactattgctttccaattggcagtttttgcattaattattacttcattaatcttactgattagtgtacccgttggtatttgctccncct

SEQ ID NO: 969 - DNA, 437 bp, Arabidopsis thaliana
  unsure at all n locations
  Clone ID: ARABL1-026-Q1-B1-H9
aaattaatacaatggactaatgtcatagagcaatttttttttgctaaacttcaggatttaactcattcttcttcttgttcaagtggttgctgattctgaaatctcttcttcaataacttagctcctaagcaccgtgccacagcctccgccgtagttacacatcctccgaatggttccttccttagcacaagctctgaatcgtagatggttcctccactcactgatgcgtctatttccgtatccaaacacactctaaccgctcctgcttctcttaacaccacctcgctagctttgaccatctccttcgcgtgtttccacgtcgcgtcgaatacgattagtctcagcggcgggggatttgagatccacgatggtttaagaagtttaagganttgaattcngatatantgacggcgggaaaagaangagaagaaaggaaa

SEQ ID NO: 970 - DNA, 404 bp, Arabidopsis thaliana
  unsure at all n locations
  Clone ID: ARABL1-027-Q1-B1-A1
gagagaggagcagctaatggaattgccatgacagcgatgtctcttttcaaagccataggtccagcagcagcaggaatcatgtatgcaacttcttctacctccttctttacattaaatatgcttcaacattttgttataaaacaaacaacaagaacaacatgaacttgttggtttatcgaattctcagttttgttttgcgcttaacaacggtttgttgacagtttttcgtggagcgagaaacgtcagggtgctgcttttctccctggcacccaaatggtattctttatactgaatgtggttttggcacttggagttgtattgacattcaaaccatttctagctgaaacacaacagtagaaaatgatgaagattttgatggnantcaaattacataatcagaatgt

SEQ ID NO: 971 - DNA, 366 bp, Arabidopsis thaliana
  unsure at all n locations
  Clone ID: ARABL1-027-Q1-B1-A12
aaaacctaaagcattgcttttgccttcatggtatcagagctcatggaacatagatccatggaactctactctgttccttctctcaatatttcaaattgtgtcaccgtcactcttactgccaagaactatattctctggaaatctcagttcgaatcttttcttgatggtcaagggcttctgggttttgtcacaggctcgattcctgcaccaagccaaaccagcgttgtttcagacattgatgggtcaacatcggcttcacccaatcctgagtactacacctgggttcaagacagattgagttgtcaaatcctggctccttgggtcttccntaaaagatantcccagtgttgtggtcaactgcaacac

SEQ ID NO: 972 - DNA, 397 bp, Arabidopsis thaliana
  Clone ID: ARABL1-026-Q1-B1-A2
caacaacaactacaacagcttattgagcagagatggatcatcaatttggatatggtgttgaagttactgggttatctccatctgttactcataatgatcttatcgatttcttctctttctctggtactatccaagatattgatattgtcaggtcgggtgagcaagcttgtactgcttatgtgatgtttaaggattcttattctcaagaaactgctgttttactcactggcgcaacgatattggatcagcgtgtttgtataactcgttggggacaacatcacgaagagttcgatttctggaatgcgacttcgcgaggttttgaagatgaatcggactcacaacattatgctcaacgaagcgagttcaacgctggagaagcagtgacaaaagctcaaga

SEQ ID NO: 973 - DNA, 387 bp, Arabidopsis thaliana
  unsure at all n locations
  Clone ID: ARABL1-026-Q1-B1-A5
agaaactttaggtacatcgaggagatcaaggaagctctcgagagggagtgtcctggtgttgtctcatgttctgacattctcgtcttgtccgcaagagaaggcatcgaagcagtatgaggaccttatattcctttgaagacaggaaggagagatggacttaaaancangacggatatgctcgagtcanatcttcccgaccacaacgagagtatctccgtcgttcttgaaaagttcaaatccatcggtatcgacactcccggnctccgtcgccctcctanggtcacacancgtgggaagaantcactgtgtcaaactggtccatcnnttgttcccctgaggtggacccctcnntaaanccctgacaagttcctcacatgctaggcaaag

SEQ ID NO: 974 - DNA, 411 bp, Arabidopsis thaliana
  unsure at all n locations
  Clone ID: ARABL1-026-Q1-B1-A7
ttctgaacttaatctactatatggtggtagaagtacttccatcggcactagtcctcttcattctccgaaagctacctccaaagagagtatcagctcaataccatccgatccagtagaaacctttgtcactgaaccatctcacacggtgagtatgatgctgtttaagagaagagtaaagattaaaaaaaaaattggggcaaaaaatgaaaggtgaagaagaaatcggtgtggaatctgcgtgagtttttggaatgcacgttcatataaatgattttacagcttttagttgttgtagcccgccgtgacttttggtttggtaatttatgtccgttaaaattataaattgctcttctgctactttgaaaaaatctgggcagtantacaagagggttaacatttggtgcgtcaatg

SEQ ID NO: 975 - DNA, 429 bp, Arabidopsis thaliana
  unsure at all n locations
  Clone ID: ARABL1-026-Q1-B1-B5
gagcaggtgcgtcataagctccacaaaaaactcatccatggcgattcttagttacatctcagcaacatcaaccacaccaccaattcctcaagatcaatctcccaattctcgtctaccaaccaaaatcattctacccaataagaaacctgagaaatggtccaccggagttgctcccggagagtacggtggtcctccgactaccaccaagctccgaaagtactggggaggtgaaaaagaagatcccattacttccacagacttaatctggaacagagattttatggatcaaatgaagaaattgtttgatgatcctaatgattcttctctcgacccatctccttcaaaggaaaagtcttctgggtttccgagctttaacaagagttatgagtcttgacagtangatgttgatttaaagttaaagagcttgca

SEQ ID NO: 976 - DNA, 425 bp, Arabidopsis thaliana
  unsure at all n locations
  Clone ID: ARABL1-026-Q1-B1-B6
gcaatttttagggttcatcaaaatttgaacaaaagggacctgttttgctcaatttttgatagcagaagacgaatctggatctggggtcacttcaagattgaattaagaggtttttaagtaagttgagatgtcagttaaagcaaggagaatttctggtagattagagactgtagtaactnnnnnnnnnnnnnnnnnnnnnnnnnnnnnnnnnnnnnnnnnnnnnnnnnnnnnnnnnnnnnnnnnnnnnnnnnnnnnnnnnnnnnnnnnnnnnnnnnnnnnnnnnnnnnnnnnnnnnnnnnnnnnnnnnnnnnnnnnnnnnnnnnnnnnnnnnnnnnnnnnnnnnnnnnnnnnnnnnngccaaagcctttttacaaggaactgtcaacnttcnaaaatccccctccgaaaaancaaaccggttgtgg

SEQ ID NO: 977 - DNA, 462 bp, Arabidopsis thaliana
  unsure at all n locations
  Clone ID: ARABL1-026-Q1-B1-A12
ggtaacattgatattttccaggccaagaccattggtgagcgaatgcgtgttattgatggaaatggaaagctggttccccacttgtactgcatcggtgatgccaatggtaaactgatgcttgctcatgcagctagtgctcaaggaatttctgtggtggagcaagtcacaggtagagatcatgtgcttaatcatcttagcatcccagctgcttgttttactcatcctgaaataagtatggtgggattgacagagcctcaagcgagagagaaagctgagaaagagggattcaaagtaagtatcgccaagacaagtttcaaggcaaacacaaaggccctaaccgaaaatgaangagaaggactccctaanatgatatacagacctgacaatggtgaaatccctgggagttcaaanaattggattgcatgcngctgatnttaaccatgaancatcaaaccgaattgg

SEQ ID NO: 978 - DNA, 395 bp, Arabidopsis thaliana
  unsure at all n locations
  Clone ID: ARABL1-026-Q1-B1-B7
ttggtgaaaacaaggttcagtcttcgatgttgccattgtatcaagtagatcaaactcttggaagaaacactgtttagcaggagttgaagaaatgttgttatactatacgagaaagatggaaaagatagatagatgctctcatctattcttgaagatactttctactgttttgatctcaaatcttaggcatgattcatggtcagatgcttcattctttcccttcccccatcccagtgttgtttctgcattgctttctccagattgcgagggtgacagaaccgagagaatctgtgagcggaagttagacggtaacaacgatgtcaggattggtttggaaaagatgttgaatgaatggctcanatttggttgaantgaataaatgtttaataatgtct

SEQ ID NO: 979 - DNA, 431 bp, Arabidopsis thaliana
  unsure at all n locations
  Clone ID: ARABL1-026-Q1-B1-C3
agcttacggatatgcaatacattgtgtttcacgccacgatttcatcaagcggctctcatgcttctcaggagtatttcatcagacacaaagacggttgcactcttgacacagaaggagagaaagagagagttgtcaaatgtctggaagctgcaatccatagacgagtcagcgagggttggagtttggagctctgcgcaaaggacagagttggattactgtcggaagtgacaaggattctgagagagcacgggctatcagtgtcgagagctggtgtgacaacagtaggagaacaagccgtcaacgttttctatgtgaaagatgcttcagggaatccagtggatgtgaagacgattgaggcgttacgcggagagattggacacagtatgatgattgacttcangaataaagttccgaagcagaaaatgggaaag

SEQ ID NO: 980 - DNA, 505 bp, Arabidopsis thaliana
  unsure at all n locations
  Clone ID: ARABL1-026-Q1-B1-C9
gaatgattttgtgcngccctagaagaganaanacgtcgcatgcacccgtacgtaagctcggaattcggctcgagaacccttgaccgtacaacaatggcgagaggctcttcccaatcccaacaatcaacctccaccggttcttcaaccgcccggcccggtctggccgctcctcgnggttccgccgccgctactgccggcatgcgtcgccgcaggctcggtggcggtggtggcgtatcctcaggcggcggatctggagttggatcaggatcgagcaacatgctgagattctacacagatgatgctccggggttgaagatctcaccgacggttgttctgatcatgagtctctgtttcatcggcttcgtcactgctcttcacgtctttggaaaactctacctccacaaatccggatcccaancttagatccggatnaggacctggatcgtttaatcggtgatcgctgttttttttttttttttttaaataagtttcctgnggttttgtt

SEQ ID NO: 981 - DNA, 408 bp, Arabidopsis thaliana
  unsure at all n locations
  Clone ID: ARABL1-026-Q1-B1-D10
gatgtatctggttcaatcgttcagaggcaaaggatcgtgaaattgtagcaaaaaagttaagggaccatgtccaaggagctgacagtaatcctcttctcatatttcccgaagggacatgtgtaaataataattacacagtgatgtttaagaagggtgcttttgaattggactgcactgtttgtccaattgcaattaaatacaacaagatttttgttgacgccttctggaatagcagaaaacaatcatttactatgcacttgctgcaactcatgacatcatgggctgttgtatgtgaagtgtggtacttggaaccacaaaccataaggcccggtgaaacaggaattgaatttgcaaanaaggtcaaagacatgatatctcttcgggcgggtctcaaaaaagncccctggg

SEQ ID NO: 982 - DNA, 449 bp, Arabidopsis thaliana
  unsure at all n locations
  Clone ID: ARABL1-026-Q1-B1-D11
gaaaacaagaatcttactggaacagctcgatatgcaagtgttaacactcatcttggaattgagcaaagtaggagggacgatctggaatctcttggctacgtgcttatgtattttcttcgaggaagtcttccttggcaaggccttcgtgcgggtaccaaaaaacagaagtatgacaagatcagcgaaaagaaaaggcttacacctgtagaggttctctgtaaatcctttccacctgagttcacatcatacttcctctatgtacgatcattgcggtttgaagacaaaccagattatccatacctaaagaggcttttcagggatctctttattcgagaaggttatcagtttgactatgtatttgattgggacaatcttgaagtatccacaatttaattcgggctccanctctaactccaagccaagattaancctgagaacagctatnaatc

SEQ ID NO: 983 - DNA, 427 bp, Arabidopsis thaliana
  unsure at all n locations
  Clone ID: ARABL1-026-Q1-B1-D8
gaggccaactctcagctactgattatgttcgaataaccagcactgagtgtgctagaattttcaacatatatccacggaaaggagctatccttgctggctcggatgcagatattatcatattgaatccaaactcaagctacgagattagctcaaagtctcatcattcaagatcagacacaaacgtctacgagggcagaagaggaaagggaaaagttgaagtgacaatagcaggaggacgaattgtgtgggaaaacgaggaacttaaagttgttccaagaagtggcaagtatatagagatgcctcctttcagttaccttttcgatggtattgagaaatcagatgctaattatctatcttctcttcgagctccagttaagcgtgtcagaactgaagctacgtaaagtgcangtatctatctgcatatcgt

SEQ ID NO: 984 - DNA, 448 bp, Arabidopsis thaliana
  unsure at all n locations
  Clone ID: ARABL1-026-Q1-B1-E10
taaacacaatattctttcttccaaattttctcatttctcatgggcatatctcaagtacactattgcaatggtgaccagaacttagaagcaaaccttctagatcatgaggaaactgaatcattttcagtacctcaaacgaagaactgtaagaggtggctccgtgtctccatatacgcaatctttgtcatcttctgccaaccacttgctacagttctgggtagactgtactatgaaaatggagggaaaagcacatatgtggtaacacttcttcaactcattggcttccctgtactgattctcttccgcttcttttctcgaatcaggcaacccaaatcaacagatacaaatttcagtcagtccccttccttcaacaaccttgcatcggtttacttgtgcactggactgctaatgtctgcttaagcctaattgtccgcaatttgggtgcntt

SEQ ID NO: 985 - DNA, 437 bp, Arabidopsis thaliana
  unsure at all n locations
  Clone ID: ARABL1-026-Q1-B1-E11
caggttttcatagaaattacatcctctgtgcttcacgcgccgccacttccacgacgcgcctccactctttgtcctccctcagaaactttccctcttcctctctcaggattcgtcactgtccttctcccatctcttccaatttcatcgttagtgaagtttcccgaaaccgacgatgcgacgccgtttcttccagcaccaccgatgtgactgaattagccgaaattgattgggacaagattgattttgggcttaaaccaacggattacatgtacgccatgaaatgtagccgtgatggtgaattctctcaaggtcaattgcaaccttttggtaacattgacattaacccagcanctggtgttctcaactatggacaaggnttgtttgaaagngnaaaaacttaaagaaaacaagatgggaaaatccaaacnttcgttctg

SEQ ID NO: 986 - DNA, 430 bp, Arabidopsis thaliana
  unsure at all n locations
  Clone ID: ARABL1-026-Q1-B1-E12
cctcgattttggacaggatgcagcacaagaaaagttatcggaatcactatacaactcagctgcaaactctacaggggaaggaatagttcctgacccttgtattcctaaagggtatatccttgaaacaaatttacaaaaggacttacctggattcttggctgataaaggcaaatttacagccacccttcaagctgctggtaatttctcagagtgtcgatctgctgcatttgccatgttgcaggaagaaaaagggaaatgtacttataagcgttgttctattggatcaatattcacacctaatcttcaaggaagttttttggctacagagaatttcttccacacatccaagttctttgggttgggagaaaaagagtggctgtctgaaatgattttggccggaaagagatctgtggagaanaatggtcaaaat

SEQ ID NO: 987 - DNA, 440 bp, Arabidopsis thaliana
  unsure at all n locations
  Clone ID: ARABL1-025-Q1-B1-F5
acacttatcgtttcgtctcttctctgatccattgttgaagatgtcnaagagaaaaactaaggagccaaaggttgagactgtgactcttgggncttctgttcgtgaaggagagcaagtttttggtgttgttcacatctttgcatctttcaatgacactttcattcatgtgactgatctctccggtagagaaactctcgtccgcatcaccggtggcatgaaggtgaaggntgaccgtgatgaagtcctctccttaagctgctatgcttgcaactcaagatgttgctcaaagatgcaanggagcttgggatcaatggcatggcacgttaaagctccgtgcctactgggaggaaacaanaaccaangactcccaaggttcctggtggctcaantccngctcctaagaaccccttgctccgttcctggcatgaaagaattgggnc

SEQ ID NO: 988 - DNA, 370 bp, Arabidopsis thaliana
  unsure at all n locations
  Clone ID: ARABL1-025-Q1-B1-G1
catacatagagacatcaaaaccacaaacatacttctcgatgagaacttcgtcgctaaagtatctgactttggtttatcaagagttggtcctactagtgcttctcaaacgcatgtctccaccgtcgttaaaggaacgtttggttacttggatcccgagtactatcgccgtcaaatcttgaccgaaaaatccgacgtgtactcttttggagttgttctgttggaggttttgtgctgtanacccgatcagaatgcaaaagtgttccaccggaacaagcagatttgattcgatgggtgaagtcaaatttcaataaaagaaccgttgatcagatnattgactcaagatttaaccgctgaatatcacttcgacctc

SEQ ID NO: 989 - DNA, 419 bp, Arabidopsis thaliana
  unsure at all n locations
  Clone ID: ARABL1-025-Q1-B1-G10
ctccgtcgatggnnnnnnnnnnnnnnnnnnnnnnnnnnnnnnnnnnnnnnnnnnnnnnnnnnnnnnnnnnnnnnnnnnnnnnnnnnnnnnnnnnnnnnnnnnnngaccacgaagctaaaccctcaatcttccccactcattttcactggtacacttcctctcttgcctcactcacctcttctcctccctccantatccacacatacgacaccgttttccatggcttctccgctagactcacttcacaagacgctagtcaactcttagaccatcctcatgtcatctctgttatcccggaacaagtccgtcacttgcacaccactcgttcccctgagtttcttggtcttaggtccaccgacaaagcgggtctactcgaagagtctgatttcgggtcggatctaattatcngaagttatcga

SEQ ID NO: 990 - DNA, 439 bp, Arabidopsis thaliana
  unsure at all n locations
  Clone ID: ARABL1-025-Q1-B1-F4
atgttgatcgatatgcttgacacnttctccgatactgagttctggtacactgatcgcggcatagttcttggtgattgtgacaaggaggtcttacnggtctccagcttccgttaggcaggaggacaagtggnggctgccttgccctaaggttccgcctaacggtttgtcatgaagaggccaggaagaaactgcagcagtgtcgggactttgctaaccagattctcaaggctgcattggcaattaacagtggcgtgcttgccgaaatggngattcccgacccttacttggagactttgcccaagnagcgggaagggaatgtcttggganaaatnatcnaccantacttaactgcaaaacaagttctcctcccgaaatncgccttgnacngtcctgatcncgcanncggaaaaatcangactccttaaaatcgccaaacggg

SEQ ID NO: 991 - DNA, 473 bp, Arabidopsis thaliana
  unsure at all n locations
  Clone ID: ARABL1-025-Q1-B1-G11
nacgtcgcatgcacgcgtacgtaagctcggcttcaattcgatatcgattcactagaccagaatctggctaagaacttggccggagacgtgatcggaacccgtacggaagctgccgacgccaaatcgacgccgtttcagccgtacagtgaggtgttcggaatccagagattcagggaatgcgaactcatccacggacggtgggcgatgctcgctactctcggcgctctctccgtcgaatggcttaccggcgttacatggcaagacgctggcaaggtggagcttgtagatggatcgtcctacttggggcagccattacctttctcgatctcgacattgatatggatcgaggtgttagtgatcggctacatcgagttccagcgcaacgccgagcttgattcggagaagcgtttataccccggaggcaagttctttgacccgctaggtttagcggctgacccggagaagactgctca

SEQ ID NO: 992 - DNA, 420 bp, Arabidopsis thaliana
  unsure at all n locations
  Clone ID: ARABL1-025-Q1-B1-G12
agggcttatacaatatcataacccccacaaatgattcactctttctctactcatacaacaaacaaagggttactaaatcctcagattaaagctcatccatggcatangattttccacaagagaatgcctccagaagctgttgatttggtctcaaggcttcttcaatactctcccaatctccgttgtgctgctcttgattcattggtccacccattctttgacgagctaagagatccgaatgcgcgattacccaacggacgtttccttccaccgctctttaactttaagcctcatgaacttaaaggtgtgcctgtggagatggtggcgaagttagttccagaacatgcgaggaagcaatgtccgtggctcagtttgtgatttgttctcacctgcaaacacgaaaactaagagcanagcagt

SEQ ID NO: 993 - DNA, 439 bp, Arabidopsis thaliana
  unsure at all n locations
  Clone ID: ARABL1-025-Q1-B1-G2
agtgatgaaaccaaatggacccatatgattgggagatttggataacagagaatccacaaaagtgtatccttcacaaaaccaaaacacactctccattttcttcagacangtctttctcctttcttctctcttctctgtctcatcacaaaccagaaatgggaggagtgtccttcctctccactgttccttccttcaccaacacaaccaatcatcaacatctcactacactctcttcttcttctcatcgctctgctgttatacgatgttccaagattgaacctcaagtttccggtgaaagtttagctttccaccgccgtgatgttctcaaactcgccggcactgcagtcggaatgggaattaatangnaacgggttcattaacaatgtgggtgatgcaaaangctgcgacttgaacaacgttgacaacgattcgagnttca

SEQ ID NO: 994 - DNA, 447 bp, Arabidopsis thaliana
  unsure at all n locations
  Clone ID: ARABL1-025-Q1-B1-G3
gttgatgctgttatggccattgggaatgacgacaggctaaatctgattgggatcaagaaggttcctggtggcaatatgcgagactctttcctcgttgatggtgtagctttcaaaaaaacattctcgtatgctggttttgagcaacagccaaagaaatttcttaaccccaaaattctcttgcttaacatcgaattggagttgaaatctgagaaggaaaacgctgaaattaggctgtcagatccatcacagtaccagtcaatagttgatgcagaatggaatatcatttatgacaaactaagacaaatgtgttgagagtggagcaaaagttgttctttctcgattggctattgggtgatctaactactcantantttgcccgatcgtgatattttcctgtgcctggtccgtgttgctgaggaagattcttaancgttgttggctggctgc

SEQ ID NO: 995 - DNA, 420 bp, Arabidopsis thaliana
  unsure at all n locations
  Clone ID: ARABL1-025-Q1-B1-G6
ggatcagcaatggctttcaatgcgtgcctcatacatggagtttaacacggtgatgaaatcaacaaggagacagctggagagagagctgatgctggaagacataatgcatcttgaggacttaccctcctacgctcttctcaatcaatagcccttatgatgatattaaatagtaagaagagtttctaacctcaggataacacaaggttgctctactctctctctctcttcacttttcatcttcaacgctttcggttctacctcttcgttgaccttttcttgtgtttggtggttctaagaaacaacttcaacaccgagttgttacttgttatattaaaacaagaaaaagagtgtgagananacgggggagaaggttgggataaatcccaattttggttgcaaggatttgnaacctaaatggaa

SEQ ID NO: 996 - DNA, 386 bp, Arabidopsis thaliana
  unsure at all n locations
  Clone ID: ARABL1-025-Q1-B1-G7
atgaggtatatagcagagaagtatagatcacaaggacctgatcttttggggaagactattgaagagagaggacaagtagagcaatggttagacgttgaggctacaagttaccatccaccactattggctttaacgctcaacattgtctttgcaccacttatgggtttccctgctgatgagaaagttattaaggagagtgaagagaagcttgcagaagtgcttgatgtctatgaagctcagctttctaagaacgaatacttggctggtgattttgtgagtctagctgatttggctcancttcctttcaccgagtatccttgttggtcctattgggaaaggccatttgattaaaagatangaagcatgttagcgcttggtgggaataa

SEQ ID NO: 997 - DNA, 422 bp, Arabidopsis thaliana
  unsure at all n locations
  Clone ID: ARABL1-025-Q1-B1-H10
acttgcgccacactctcaccgcaatggccgcctcgacaatggctctctcctctcctgctttgaccggaaaggccgttaagctatccccggcggcctccgaagtatttggaaccggccgaatcaccatgcgcaaagcctccaagcccaccggtcatccggnaagcccatgggtacgggttccgaaccgaancaaagttacttnggtccaattctccgggtgnagcctccgaanctacctcacnggaaatttccccggggatnangggnggaaaantgccggtctatccgcngatcccaanaccttcgcaaggaaccgtgaagcnaaaatttatccaaancanatgggcaangcccggaccccnanggttgcntttnccntaaccaatgggcaagnaacgggtttgaattcggaaaaccggttt

SEQ ID NO: 998 - DNA, 444 bp, Arabidopsis thaliana
  unsure at all n locations
  Clone ID: ARABL1-025-Q1-B1-H2
gaaagaataatgatgttttcggtgacggttgcgatccttgtttgtcttattggctacatttaccgatcatttaagcctccaccaccgcgaatctgcggccatcctaanggtcctccggttacttctccgagaatcaagctcagtgatggaagatatcttgcttatagagaatctggggttgatagatacaatgcnaactacaagatcattgtcgttcatggcttcaacagctccaaagacactgaatttcccatccctaaggatgtaattgaggagcttgggatatactttgtgttctacgatagagcaggatatggagaaagtgatccacacccatcacgcactgttaagagtgaagcatacgacattcaagaactcgccngataaactcaagatnggncaaaagttcaagttcctnggaaancactaagtgcctactccgtt

SEQ ID NO: 999 - DNA, 446 bp, Arabidopsis thaliana
  unsure at all n locations
  Clone ID: ARABL1-025-Q1-B1-H4
gtttgctttacccttatttggccattcctgtcttccactttgtcatcttttccctttctgatgggatccgccgccgaactcacggagcccaccaccgggaccgagaagcttcaccaagccaatagaagttgaagaagatgacgaacaaattgttgatttggagaggaaaacattccgtcatggaaagggacacgatactagtgtggacagtagtacaatcaccaacaccaagctcgtcgtcgtcttctaacttttccggtgatggtggaacggaagagacccccgatttccacagcaacggcgatggagaacataccggatttagtaaaatttggangtcccnganctagaaaactgaaaatcgtatttcaccaagnagcatgacnacggggaanaaattgcatcgtcctccntcgacgggagaacaaggttctgantcaactggt

SEQ ID NO: 1000 - DNA, 424 bp, Arabidopsis thaliana
  unsure at all n locations
  Clone ID: ARABL1-026-Q1-B1-A10
ctgacgatgaaaaagacgaagaagatgaggctgatgatgaagatgaggatgttgactcgatctttaatcgaagacgagtcaacggaggtttccgcgttannnnnnnnnnnnnnnnnnnnnnnnnnnnnnnnnnnnnnnnnnnnnnnnnnnnnnnnnnnnnnnnnnnnnnnnatagtggtagttttggagatttgttctcatggcctgatcttggtgggattggttcgagtggagtcgtgaagctttgggatcatttagatatcgatggcgatgatcatgagaatgttgtggcaacgtttctcaagaactataactcaacctcgtcaccgtttttttgggcggcgganaaaaaaggtgttgacgcccttaaagtgaaggcgtgtgattcacgcncccgttttcggatgccggntttgctccccga

SEQ ID NO: 1001 - DNA, 522 bp, Arabidopsis thaliana
  unsure at all n locations
  Clone ID: ARABL1-026-Q1-B1-A11
aagaatgattgttgtgccgcctagaagagaaaaacgtcgcatgcacgcgtacgtaagctcggaattcggctcgagagcaaatagaggattcggatttttgtgtatcttgcattccaagattggatcatcattaccattctcaaccgcaggtgaaactctttggtatggtagttgaagcttatgtgctctgtatccaagctcaagttgatatgncattaggaagatttgagaatgcggttgtcaaggcagagagagctgcgatgcttgatcaaaccaatcctgaggttgtatcagttttaaacaatgtgaagatggttgtgcgggcacgtactcgtggtaatgagctatttagttcggggagattctcggaagcgtgtgtagcttatggagacggtctcaagcaagatgactccaattcggttttgtactgcaacagagcancgtgttggtataagctcggtttgtgggaaaaatctgttgaagattgtaaccatgcgctcaaaaaccaacctanttacatca

SEQ ID NO: 1002 - DNA, 434 bp, Arabidopsis thaliana
  unsure at all n locations
  Clone ID: ARABL1-025-Q1-B1-A5
gagaaaaattctttgctttgcaacaaaggcagacagacaaaaggctaattcggagctctcctccacatcttcttccaaaacacaaacaaacccccaaatttccagaaaaatcagatcattctttcatcaatctcgtcttctttaatcttaggtgagaattcatcagctcaaaaacgcagcacccgatcgttttacgactcaaatcagagaagctgattcttttccaatcattccaatttccatttcttccttgggaggttttacaccaaattagccgtcgaaaggggtgcttctttgatctaatttcgatggcgggattagagaaaaacgctgatttctcagggaagacgacgaaatcgggtacaacgacgtcgttcttcaacaaggtcccntacaantcacgggaagaacagttggtgggattccngggcccc

SEQ ID NO: 1003 - DNA, 423 bp, Arabidopsis thaliana
  unsure at all n locations
  Clone ID: ARABL1-025-Q1-B1-B1
aaggctgatcccaacatgacgattaagtatcctacggggactcctacttatgttgctcctgtggatgtttattcaaccgcgaggtctatgggtccaanagctcagatcaatctcaactacaatcttacttggattttcagcattgactctggtttcacttaccttgttagacttcatttctgtgaggtttcttcgaatatcactaagatcaaccaacgggtgtttacaatctacctcaacaatcaaactgctgagcctgaanctgatgtgattgcttggactanttcaaacggggttccgtttcacaaggattacgtggtgaatcctccanagggaaatggacancaagatttgtggcttgctcctcatcctaaaccaagttaacaagcccggagtantaatgattccccctctaaaggngtg

SEQ ID NO: 1004 - DNA, 419 bp, Arabidopsis thaliana
  unsure at all n locations
  Clone ID: ARABL1-025-Q1-B1-B10
caacaaaatcaaaatcaagaaaacaaaaaagaaaaactctcaagaaacaatggatgcttcattgtctccattcgatcaccaaaaaggcaaaacanagagccaaagaaaagcttcattacctcactaatcactctccgttcaaacaacatcaaagaagacacatacttcgtctcagaactcaaacccacggagcaaaaatcacttcangaactcaaagaaaagctctcagcntcatcctccaaagcttcttcaatgtggggagtctcactcctcggtggagacgacaaagctgacgtaatcctcctcaagttcctcagagcaagagatttcaaagtagcagactctttgagaatgcttgagaagtgtttggagtggagagaagagttcaaagcagagaaattgacagaagaagatntggg

SEQ ID NO: 1005 - DNA, 414 bp, Arabidopsis thaliana
  unsure at all n locations
  Clone ID: ARABL1-024-Q1-B1-H4
gaaanccattcaaaaaaaaancnttcctccttgagaacccccaacttcctcctcctcctccgcaaaatttacgaanggnttcctcctaatcctggctcctgcttgcttgggctgggggacaagtgctgcatatcaagagggacctctctctaatggagatgatgttgtcattgtcgcggcacataggactccactatgcaagtccaaacgtggcaatttcaaggatacatatcccgatgatttgctcgcacctgttttgagggcattgatagaagaagacgaatctaaacccaagtgaagtaagtgacattgttgtgggtactgttttggnacctggatttcaaanagccaattaatgcaaggatgggtgcnttccaaggcnggtttccctnaaaccntgggtggtcaaaactg

SEQ ID NO: 1006 - DNA, 356 bp, Arabidopsis thaliana
  unsure at all n locations
  Clone ID: ARABL1-025-Q1-B1-B11
aaaaaaaaaaaaaaaacacattgtcatatctctggtcccatatgtgatatgtcaccgtccttctccatcgccaccaccgtctcaccggcttctctagcngggactctggcctcgaactcaaagaatgttttgtgtagtttacattcaaagaacaatgatattaccaagacaaataggaatctgaagtttagagcttgttctgtttctggagggtataacaacaatacatctgtggacaatgtaccttttcctccgtgattacgtcgagctcattaatcangccaaagaancagtggaaatggctttgaaggatganaaacagttaatgggaaattgagttcccaacatctgggccn

SEQ ID NO: 1007 - DNA, 420 bp, Arabidopsis thaliana
  unsure at all n locations
  Clone ID: ARABL1-025-Q1-B1-B7
aaatggttgagagattcgggttcagcaaaaagattggacaagttgcagttggtggagcaggaggaaaccctttcttgggtcaaagtatgtcatngcagaaggattactcgatggcaacagcggatgtggttgatgcggaagtgagagagctcgttgagaangcgtacgtgagagcgaaaganatcataacaacacaaattgatatcctacacaagcttgcacagctccttattgagaaagaaactgtggatggagaagagttcatgagtcttttcattgacggacaagccgagttatatgtttcttaaaatcaactaatttggcttgnataataccaattagcntcgatntaaacatactggtangttantatacattgacatgttcaagagacntttcctttttcctaaaaaanaaaaa

SEQ ID NO: 1008 - DNA, 509 bp, Arabidopsis thaliana
  unsure at all n locations
  Clone ID: ARABL1-025-Q1-B1-C10
gggntggagcacgctttttcagccgccggagagacaaacatgcatgcctgcaggtcgactctagaggatcccctcggggaattccaattccacattttcaagaaataaggaggcaaaaatgttcatatatgaattggaattatttgttttcttattaggcctatcctgaagccaaaggaaatgagatcggaattcctcggggaattccaattccacattttcaagaaataaggaggcaaaaatgttcatatatgaattggaattatttgttttcttattaggcctatcctgaagccaaaggaaatgagatcggaattcctcggggaattccaattccacattttcaagaaataaggaggcaaaaatgttcatatatgaattggaattatttgttttcttattaggcctatcctgaagccaaaggaaatgagatnggaattcctccgggggtaccganctcgaattccctaaaanngagtcgtantaaattcgtaaacatgtcanaacct

SEQ ID NO: 1009 - DNA, 155 bp, Arabidopsis thaliana
  unsure at all n locations
  Clone ID: ARABL1-025-Q1-B1-C12
agagaaggtatcgataatggtggtgtgaagtgggtcactaaggtgagtcgcccagttgttgagcggtcctttaccggtgtcatgtaatgatgtaacgtcgttattttaaagaaaatttggcaccttttgtnnnnnnnnnnnnnnnnnnnnnnnnn

SEQ ID NO: 1010 - DNA, 401 bp, Arabidopsis thaliana
  unsure at all n locations
  Clone ID: ARABL1-025-Q1-B1-C8
tcttatctctctcaaatcttctagagagagaagggcttagtttttcttccgccatccggtgaatccggcaaagccatctggntgttaaancagcttcagtccaacagcctccggctattatagaggaggttggttggcttttcactggcggtgttggctccctcagcaacgtcggccagttttctctccggcaacgatggctccgtagcaccgtttggctggctcctcttgtatgcggcatgttttcggctttctatgcgatggngtccgcttttgtctctggncattccaccgtcancgttccgggtggttttgggcnanttatgtaccgggtgttanatccngttaatntgtttccggtttaacttttaataanttccaatggaaangtgttgggtgaa

SEQ ID NO: 1011 - DNA, 434 bp, Arabidopsis thaliana
  unsure at all n locations
  Clone ID: ARABL1-025-Q1-B1-D1
aggagatgttactcaaatttccaagacagaatcaggctgttctcccaacaatctctgttcctattcgtttaagtacggtgatggaagtggcacttctggttactacatctcagatttcatgtcctttgatactgttattaccagtaccttggctataaattcctctgctccctttgtttttgggtgtagcaatttacaatctggagatttacagaggcctagaagagcagtagatggcatctttgggttaggacaagggagtttatcaagtaatttctcagcttgctgtgcaaggactcgcgccacgaagtattctcgcattgtctgaagggagataaaagcggtggaggtataatggttctaggtcaaatcaagaaggcagataccgtctatactcctcntgttccatcacagcacattataatgtgaacctg

SEQ ID NO: 1012 - DNA, 430 bp, Arabidopsis thaliana
  unsure at all n locations
  Clone ID: ARABL1-025-Q1-B1-D12
agcgaagagccaatatcatcccaaccttgtaaatgaagatgaaactgtgacaagatcagatcgtgagattttcaattccttgctctgtaaagtctcttcttcgaaccttcaagatcaaaaatcagctgccaaggagctaagacttctgaccaggaaaggcactgagttccgagctctttttggcgaatctccggatgagatcaccaggttggtgaatcccttgttacacgggtcaaacccagatgagaagcttcaagaagatgtggttacaacattgttgaacatatcaatacatgatgacagcaacaagaagctcgtctgcgaaaatcctaatgtgattcctctccttatcgatgcattgaggcgtggaacagtcgccacgagaagcaatgcanctgcagcgatnttcatccgtcagctctcgaatcaa

SEQ ID NO: 1013 - DNA, 415 bp, Arabidopsis thaliana
  unsure at all n locations
  Clone ID: ARABL1-025-Q1-B1-D3
agttctataacctcaggtgtcgccagagaacggggtatgccgacgaaatgtgtgtgtggcttagaggtcacgatgttcgtctcaaaaacgcangagaacccatgacgaccgttcttccggtgtattagcaaaaggaatgctaattcgtggtcaaccaaaagggatgatcatgtgttcaaatgggtcgaagatgctgtgtttgaagaagtagaagatgctttgccaagattagccatcattgcaaatgagataagcaaagctaaatctgaggcaaatgagttaaaggctatgattcaagaaatgaagagaagaagcaatgggtcaacgacatgaagaccccgaaagaaactgggtgtggctttgaaaatgtgtattgtgttggatgtttggtatcaccattgtgaatttcctcntg

SEQ ID NO: 1014 - DNA, 416 bp, Arabidopsis thaliana
  unsure at all n locations
  Clone ID: ARABL1-025-Q1-B1-E10
tttcagcttctggttcatttcgtaatgacagtactccaaaagcagcacagagaaattctgaagattctggtgttacggttgatggatcnccatcngcaaaggaaatgacgatcgttgttcctgattcctcgaatatctattcggcttttggagaggctgagtcaaagtctgtggagacactctcaccgtttcagcagaaagatggtcaaaagggactctttgttgatcgtggtgttggctcccctaggctagtgaagtctcttagtgcaaggctcttttttgattgataccaagcaaatcaagaattcaatgccagccgctgcaggagctgttgccgcagcaacggtagctgatcaaatgcttggaccgaaagaagatagacatctagcaantgtcctggttggcttgcctgctcn

SEQ ID NO: 1015 - DNA, 437 bp, Arabidopsis thaliana
  unsure at all n locations
  Clone ID: ARABL1-025-Q1-B1-E11
gagaaaaaagattcttcaaaagagcaaaaaaatcaatggagagagcaaagtcgaggaagcctcatatcatgatgataccatacccacttcaaggtcacgttatcccttttgtccacttagccatcaaacttgcttctcatggctnnnnnnnnnnnnnnnnnnnnnnnnnnnnnnnnnnnnnnnnnnnnnnnnnnnnnnnnnnnnnnnnngccggtgacatcttctccgccgctcgcagctccggccagcacgacatacgttacaccaccgtgagcgacggcttccctttagactttgaccggtcactgaaccatgaccagtttttcgaaggcattctccacgtcttctctgcccacgtggatgatctcatcgccaaactctcccgccgtgatgatcctccccgtgacttgcttgatcgccgacacgttttaagtttg

SEQ ID NO: 1016 - DNA, 443 bp, Arabidopsis thaliana
  unsure at all n locations
  Clone ID: ARABL1-025-Q1-B1-F2
aagaacaaagaaaccatggnnnnnnnnnnnnnnnnnnnnnnnnnnnnnnnnnnnnnnnnnnnnnnnnnnnnnnnnnnnnnnnnnnnnnnnnatggatccatgaacganggaggaggacatcaccacatgaagatgatgatgcacatgaccttcttttggggcaagaacacggaggttctcttctccggttggcccggaacaagctccggcatgtatgctctttgtcttatctttgtcttctttctcgccgtcctcaccgaatggcttgctcattcctctctcctccgtggctccaccggagattcggctaatcgtgccgccgggttaatccaaaccgccgttgtataccctccgtatccggctcgcctatctagtcatgctcgccgtcatgtcgtttaacgccggggtgtttctcgtcgntctggccgggtcatgcccgttng

SEQ ID NO: 1017 - DNA, 405 bp, Arabidopsis thaliana
  unsure at all n locations
  Clone ID: ARABL1-025-Q1-B1-F3
ctgaaggttataattctcggagacagtggggttgggaagacgtccttgatgaatcagtttgtgantcgaaaggtcagtaatcagtataaagctaccattggagctgatttcttgaccaaagaggtccaaattgatgacagaatcttcactttgcagatttgggatactgcagggcaagagaggttccaaagtttgggtgttgctttctaccgaggagcggactgttgtgttcttgtgaatgatgtcaatgttatgaaatcctttgaaaatcttaacaactggaggggaagagttcctgatccaggctaagtccttcaaattcctgaaaacttccccttcngntgtcttgggggaacaagacagatnttgacggtggaaaaaatcaattggttactgagaagaaaa

SEQ ID NO: 1018 - DNA, 400 bp, Arabidopsis thaliana
  unsure at all n locations
  Clone ID: ARABL1-024-Q1-B1-D8
tgcttgagatattttgtttttacctccgagaaacggatttagattcgtaatcgtgagttttttggtgtaatggagatcgctactgtcgtaaaggctaatggcggttgtgaagcggatcgacgacggcttcgccgattgagatgctctgttaaggattacgattggggcaaaattggatcggattcactcgtttacagggtttatgcggcgaattcagattacgagatcgatcctacacgaccttacgccgagctatggatggggactcacgagtctggtccgagttacttggaggatgctgatggatccaatggcgtgacccttaaatcctggatnaccgaaaaccctaaatctctggaaataaggttttgggaanaaatggggttgccattcccccctt

SEQ ID NO: 1019 - DNA, 413 bp, Arabidopsis thaliana
  unsure at all n locations
  Clone ID: ARABL1-024-Q1-B1-D9
tttcgnnnnnnnnnnnnnnnnnnnnnnnnnnnnnnnnnnnnnnnnnnnnnnnnnnnnnnnnnnnnnnnttggtgatgtcagcttcccgatggacgttgatggatctaccatcgtacctgtcgtcatcgtgggcattccggtggccggaggtgaatctttcatccctgagctctggttggaacatgagattgttgtccttgtcgggtgatctctccatagttgatgatcttttgtggagttttgtctcaatcattgaatctttagctatcactgctacggtctgttgcttcttcttgttttgtggttgtaccctctaattcccttttttcattatttaattttccgaattttaatgccaactgaaatgtgtgtaaaagaaaaataatcaattaaattcaagacttttttancaa

SEQ ID NO: 1020 - DNA, 525 bp, Arabidopsis thaliana
  unsure at all n locations
  Clone ID: ARABL1-024-Q1-B1-E1
atganttttttgagcccccagaagagctaaaaaatcgcatggcccccttacntaagctacggaattcggctcgaggttcggatcgcggcgacgtgggtggttcgccgcccgcgacgtcgcgagaagtccactaaaccttatcatttagagaatggagaagacaaaatgcaattcaacttgaggagaaggagaagagagaaaaggaattgttgaagcaaattattgaggaagctgatcaatacaaagaagagtttcataagaagattgaagtaacttgtgaaaacaacaaagcagctaacagagagaaggaaaagctgtatctggagaaccaagagaagttctacgcggaatccagcaaagaattactggaaggcaatagcagagctagttcctaaagaagttccaacaatagagaaaaggagaagaaaaaaagagcaacaagattctaaagaagccaacaatctcctgtgaatcaaggnccaaaagccccggtaagccaaaccgattctaacaangaattgagac

SEQ ID NO: 1021 - DNA, 416 bp, Arabidopsis thaliana
  unsure at all n locations
  Clone ID: ARABL1-024-Q1-B1-E11
tcttctctttatcgctccaccagatccaagttcgcgagatttcaagctctctaacaaagttcttcacttttactctcaaagctttcatctttcattcaactacttaagctccaagtatggcaggatccgcaccggaaggaacacaatttgatacgcgtcagtttgaccagaggctgaatgaagttctcgatggacaggatgagttcttcacctcatatgatgaggtccatgagagctttgatgccatgggtttgcaagagaatcttcttaggggtatctatgcttacggtttcgaaaagccttctgctattcaagcaaagaggaattgtacccttttgcaanggtcctgatgtgattcaacaagcacagtctgggtactggaaaaaccgccactttctgctcctggtgtcntgcaa

SEQ ID NO: 1022 - DNA, 429 bp, Arabidopsis thaliana
  unsure at all n locations
  Clone ID: ARABL1-024-Q1-B1-D7
tcgaggaacggttacttgaacaattgagtcagatcgaagcgtcaggtaacggaatcggtagatctgggaatccaccggcgtcgaaatcagcgattgaatctttacctagagtcgaaatctcagattgtcatacgaaagcagaagctaattgcgccgtgtgtacggaggttttcgaagccggaatcgaaggtcgtgagatgccgtgtaaacacatatttcacggtgattgtattgttccatggctttcgattcggaattcgtgtcctgtgtgtagatttgagttaccttcagatncaatccaacggagtaatgaagaanaacatgccgttgggatgaccaatttggagaatacctggtgggtggtttcccctgttgggaagtttaaacgccggaagttaagaagaaaggtganaaggatattgccggtgg

SEQ ID NO: 1023 - DNA, 441 bp, Arabidopsis thaliana
  unsure at all n locations
  Clone ID: ARABL1-024-Q1-B1-E6
gagcagaaagttgaaaacttggagatggttttctcttcggttgctgttcaaattgcgagatacattgtgacgatgacaagtactggagctattcttttgattgggtttcaattatcaggtggagatagttcgatgaactcattggtttggtatagttggcttggtggaattatcattggaaccatgactggtgctaacatggttttggaagatcattatcgagccggtccacggaatgttgttataaccggaagcactaggggactagggaaagctcttgctagagagtttcttctctctggagacagagtcattgtcacatctcgcagttccgaatctgttgatatgactggccaangagctagaagcaaaatctcaaagagattatgaattaacgctagccaantcagcctanaaaggaaacctgantgatgctaaggt

SEQ ID NO: 1024 - DNA, 531 bp, Arabidopsis thaliana
  unsure at all n locations
  Clone ID: ARABL1-024-Q1-B1-F1
aatgaatttttgagccccagaagagctaaaaaatcgcatgcccgcnttcnttanccccgnattncggtccaaggntatatnaanaaggtttgtgaaaacaanggatccaaaacctcccccaaggacctccgccctaatcaagagaagggaggttcaaaaagaaaaagaggaaaaaatggactatatgtatgggaccaagggagacaccatctgtttgtaccaaggaccagtgaacataccggaaccggtaatccgggcgatgaaccggaacaacgaggattaccggtcaccaagccattccggcgcttacgaaaacattgttggaggatgttaagaagatattcaagaccacatcagggacaccttttctgtttcccacgaccgggactggtgcttgggaaaatgcctttgaccaaacacgttatctcctggagacangattgtttccctttcctgattggacaantttaccntgcccctgggattgaccaagcaanaagaaggcttaaattcaatgtttgatgttgggtt

SEQ ID NO: 1025 - DNA, 385 bp, Arabidopsis thaliana
  unsure at all n locations
  Clone ID: ARABL1-024-Q1-B1-F10
nnnnnnnnnnnnnnnnnnnnnnnnnnnnnnnnnnnnnnnnnnnnnnnnggtaggtgtaagaaatattaaaactcaactttggtttatggactaaattttttttgttcgatagttggtatataatgaactcagcatacagcattcctagttctttgtacattttttatcttataaaccatagtctttttggtggtaacacatgtatagagtaaggaaattgtctagggcgacggagaaattgagcaagacaatgttgaatggtgtgggagtggtgaagtggctcggtgatgggtccagttgtaaagtcgaagccagggaaagcttttttctcaatggttccaggggaagttcnantggcttcacttgaagctcttaataaantact

SEQ ID NO: 1026 - DNA, 456 bp, Arabidopsis thaliana
  unsure at all n locations
  Clone ID: ARABL1-024-Q1-B1-F3
agtttttttttttcatgaaaatccactcaaatttctaaaatatgaaatgagtccaaacgtatagtatataatgatacaacatgcaaaatcacttgaaaggaaaatgggaaaacaaaaacacgaaaagcacatcaaagtaggaaaagtttcggatttaggtggtaagctccatgatggcagagactatatctccattagcgagcttgagcgccttaactgcccttggcttagacactcctgcttgggtcatcacaagctcgatgtcctttggctctactccctcctcgtctacctcttcatcatcatcatcttgaacagcaagctgcagttgcaagcactcgatgtttctccctgtgaaatcacgttgcctgaaggttgggaacccttgaactggccctgcgggnttgactcctgcaactggcaaactcnaaatcctccaaaccttgggcctcaacn

SEQ ID NO: 1027 - DNA, 428 bp, Arabidopsis thaliana
  unsure at all n locations
  Clone ID: ARABL1-024-Q1-B1-F6
ttgtgcgcttgggagtccctgattattaaataaaccaaggattttaccatgactgcaattttagagagacgcgaaagcgaaagcctatggggtcgcttctgtaactggataactagcactgaaaaccgtctttacattggatggtttggtgttttgatgatccctaccttattgaccgcaacttctgtttttattatcgcattcattgctgctcctccagtagatattgatggtantcgtgaacctgtttctggatctcttctttacggaaacantattatttccggtgccattactcctacttctgcagctattggattgcatttttacccaaatcctgggaaacctgcatccgttgatgaatggntatacaacggcggtccttaagaactaantggtctacacttttactggggtaacctgttaca

SEQ ID NO: 1028 - DNA, 396 bp, Arabidopsis thaliana
  unsure at all n locations
  Clone ID: ARABL1-024-Q1-B1-F8
gcatgggaatgactccactgtgcagtattatgtgccttacttatccggtattcagttgtatgttgatccgttgaagaagcctagaaatccagttggagataatgaaggaagtagtgaaggaagcagcaacagtaggactttgccggtggacttgagtgtcggtgaactgaatagaattagtctgaaagatcaatctattactggctcgttgtctagtggagaagctgagatcaacaatccgcagggacgattactattcgagtacttggagtatgaacctccatttggcaaggaacctccggctaacaaaatctcggatntcgcgtcaagaattcctganctaatgacatacccggagctgtgatcntcntccctcaagttgggtccccngtgtca

SEQ ID NO: 1029 - DNA, 366 bp, Arabidopsis thaliana
  unsure at all n locations
  Clone ID: ARABL1-024-Q1-B1-F9
tgggtttgatttggaggacaacgcattgctggatacttgcaacgatctgacttttggtggctcatctacttctgatggccagaagccagcttctagtggcaagggctgtgaagaattacgggtatcgggtgacagtcagtcttctcggaaaaataaaaatgtagatcaaagctgctcaacctctaaacagcaatccaaagattttcctgccgcaggcagcaatatcagtgagagccagctagatgagcaaagaagaaagaataacgaagaggtttcacacaataacagatnagctgaggaatcaacttctggtcatggagatatcaaagaaggtgcaaaatcctggtggtggtgcatcctcngtgt

SEQ ID NO: 1030 - DNA, 427 bp, Arabidopsis thaliana
  unsure at all n locations
  Clone ID: ARABL1-024-Q1-B1-G10
agctaaacactaaattatcaatccgctctcttctcaaaaaaaaaaatcgangctaaaatnnnantctctcaangntccccaaaaaaaccctagttctgaatggaatcggcggattccggacgatccgatccggtaaaaggagacgacccgggtccatctttcgtctcttcaccaccagctacacctagcaggtatgagtcacagaagcgacgcgactggaacacgttcttgcagtacctcaagaaccacaagccgcctctcgcgttgtcacggtgtancggagcgcatgtgatcgagtttctcaagtacctcgaccagttcggtaagaccaaagtccacgtggcggcttgtccttacttcggccatcaacaacctccgtctccttgctcatgccctctcaagcaancttgggggatttctcatgctt

SEQ ID NO: 1031 - DNA, 439 bp, Arabidopsis thaliana
  unsure at all n locations
  Clone ID: ARABL1-024-Q1-B1-G3
aagacataattttctctgttttcctagctctctcctctcaaattcttccattgctctctgttttggcaaatcgtgaactgccacgtctttaaggcatcagtgaagcaaagatggactttgacgaggagctaaatctttgtattacgaaaggtaaaaatgttgatcattcttttggaggagaagcttcttccacgtccccaagatctatgaagaaaatgaagagtcctagtcgtcctaaaccctatttccaatcctcttcttctccttattcgttagaggctttccctttttctctcgatccaacacttcagaatcagcaacaacaactcggatnatacgttccggtacttgagcaacgacaaagacccgacaatgcaanggcaagaancaaatggatttccctttagtccccaaaaaacaacaacagcaagcaagcaan

SEQ ID NO: 1032 - DNA, 109 bp, Arabidopsis thaliana
  unsure at all n locations
  Clone ID: ARABL1-024-Q1-B1-H12
ntgaattttgtctagcctgntcgtannntaacnanaattcncgggnccnaccatgcgctccggaattcggctcganctcgagccgaatcggctcgagctagttctagat

SEQ ID NO: 1033 - DNA, 447 bp, Arabidopsis thaliana
  unsure at all n locations
  Clone ID: ARABL1-024-Q1-B1-H3
ggaatggagtgagagtttaaggaaagagtatcttcttgtcatcgaaggcttcttctctcttcctctccctctcttctccaccacttaccgcaaagccatccaagcgcnnnnnnnnnnnnnnnnnnnnnnnnnnnnnnnnnnnnnnnnnnnnnnnnnnnnnnnnnnnnnnnnnnnnnnnnnnnnnnaagatatgcttgcggcgttgcttgcggcggatgatggattttccgatgaagagattgttgacttcttggtggctttacttgtcgccggttatgaaacaacctccacgatcatgactctcgccgtcaaatttctcaaccgagactcctttagctcttgctcaactcaaggaagagcattaaaaagattaaggcaatgaaagagtggatcctaanatccttgaatnggagtgaattacaanttcaatggccantcaaacaaatg

SEQ ID NO: 1034 - DNA, 423 bp, Arabidopsis thaliana
  unsure at all n locations
  Clone ID: ARABL1-07-Q1-B1-F1
gagatgatttcaaggttggtgactgggtcagagtgaaggcgtcagtgtcttccccgaaatatggatgggaagacattactcgaaatagtattggcgttatgcacagcttagatgaagatggtgatgtgggtatagctttctgtttcaggagtaaacctttttcatgttctgtgacagatgttgaaaaggttacgccctttcatgtgggacaagagattcatatgacaccatcaatcacccaaccacgacttggatggtcaaatgagactccagcaactattgggtaaagtaattgagaatcgacatggacgggactctgaatgcacaagtgactggtaaacaaacgttgtggagggtctcaactgggagatgcagaactgcnttcaaggtttgaagttggtgaattgggttcgctcaaaaanc

SEQ ID NO: 1035 - DNA, 433 bp, Arabidopsis thaliana
  unsure at all n locations
  Clone ID: ARABL1-07-Q1-B1-F3
ctcgagaatggcatcaattctcaggtcagtggcaacgacttcagccgtcgtagccgccgcctctgcgattcccatcgcgannnnnnnnnnnnnnnnnnnnnnnnnnnnnnnnnnnnnnnnnnnnnnnnnnnnnnnnnnnnnnnnnnnnnnnnnncgatcgtctccacgtctcttgggactttcacgaagcttcgttagctctccgatggcgactgctctcacttctgatcgtaatctccatcaggaggatcgagccatgcctcaagcttcctactgaagtttaaggggggatatgacaagtnangggttgtgttaaatgctgtgaagaacaaattagaaaccantggaaggtatgagaaattggagggtggatttgtccaaatcaaagttgtganggataacttgggatnntcccccngttaaaggcaatgac

SEQ ID NO: 1036 - DNA, 510 bp, Arabidopsis thaliana
  unsure at all n locations
  Clone ID: ARABL1-07-Q1-B1-E9
gncctatagcagagcaatgacgacgcatncacgcgntacgttaaaccccggaattccggctccgaaggaaatttccccgaagaaaaatgtcctgcctgttgganggaaaactggcggtgttgggattctgggctgcaagttgcggcaaacggtttgtgggagggttgccaaaatgtnnccctggacttggggattctccggcgagacaaccacaaactganacttttgtccntggggcgttgcaccggcgatgaaataatcagtacgaggcttcaggggagagtaacaacgctgagaacgatgcttgcaagtgtggatctgactgcaagtgtgatccttgcacctgcaagtgaagaagcctttttaaataancagagataatcgagtctccttaattaattaagttattcaataaagtaaaccatatataaggatggtgtttttaggtttggtttaagtgtaataatggcttcagcttaacctttaagcccgatnaattgtcctttgtgg

SEQ ID NO: 1037 - DNA, 407 bp, Arabidopsis thaliana
  unsure at all n locations
  Clone ID: ARABL1-07-Q1-B1-G10
ctcgagcagagtcgccgggagatgggtccattgggagaagcacaggacttgctttacccangtgggagcttcgacccattgggcctcgctactgaccccgaggctttcncgggagttgaaggtgaaggagctcaagaacggaaggttggctatgttctctatgtttggattcttcgttcaggccattgtcaccggaaagggaccgttggagaacctcgcggaccacttggctgatccantcaacaacaatgcatgggccttcgctaccaacttcgtccccggaaagtgagtttaatttgtgatcgagttgtgtgtatccggtttgttgcatcctggaaatgtgatgcaaatttcatatcttgttaattaccttgtanggttggtgaaaaaatttatnaaacctttat

SEQ ID NO: 1038 - DNA, 464 bp, Arabidopsis thaliana
  unsure at all n locations
  Clone ID: ARABL1-07-Q1-B1-G12
aacgacncacgcctacgtaaactcggaattcggctccgagcgaagcaagaggaggcagaccgagtagaactactgggttcaggatactggaaagcaactggatcacctggtccagtcttttccaaagacaacaaagtgattggagcaaagaaaactatggttttctacactggaaaagcacccacaggaagaaaaactaaatggaaaatgaatgagtaccacgccgttgacgaaacagtcaacgcttccacaatccctaagctgagacgtgagttcagtttatgtcgagtctacataacaacaggaagctccagagcttttgatagacgtcctganggagttttgcagacagagaagaatgctaacaagtgatgttgcagtaactgagacatccttccgttttggaaaagctcactgggaaacttcnattcaggaggagaacatattgangtcccaatgaacac

SEQ ID NO: 1039 - DNA, 429 bp, Arabidopsis thaliana
  unsure at all n locations
  Clone ID: ARABL1-07-Q1-B1-G2
ctcgagctaaacanaaaaaaacccttcaaaacatttccttantctttcttcttcatctacaacaatggctggagttgcctttggttcctttgatgattcattcagcttggnttctctaagagcttacctcgctgagttcatctccactttactctttgttttcgctggtgttggctcngccattgcctacgcaaagctgacgtcggacgctgctcttgntanaccgggactagtggccatcgcggtttgtcatgggtttgctctcntcgtggccgttgcantccggagccaacatctccngtgggcaatgtgaaacccaaccgtcacttttggtcctgccgtcngtggtcaaaatcaaagtcatcaccggaagttttctactggatcctcaacntctcgggtccaanggcggcatggtttccctcccna

SEQ ID NO: 1040 - DNA, 435 bp, Arabidopsis thaliana
  unsure at all n locations
  Clone ID: ARABL1-07-Q1-B1-G4
ctcgagctacacaagtcttgaaattttctcatattttctatttactatataaacttttaatcaaatcaagattaactatggctgaggagtacaagaacaacgttcccgagcacgagacaccaacggtcgcaacagangaatcaccagcgacgacaacagaggttacggatcgtggattgtttgatttcttggggaagaaggaagaggaagtgaaacctcaagagacaacgacgctcgagtctgagttcgatcataaggctcagatntctgaancgggagttaactgccggagcacgaaggaaattgaaggagaacaagattactccgctaaaaggagcttcaaagaaaagaccgaggaagatgaggagaacaagcctaatgtcatccaaaagcttcacccgattcaacaagctcctccttcctccttcgagcgat

SEQ ID NO: 1041 - DNA, 417 bp, Arabidopsis thaliana
  unsure at all n locations
  Clone ID: ARABL1-07-Q1-B1-G7
tcgagggaagtttagatcgatggatattcgaaaacgatgagaagattactacccttagttgcgaagagagaattcgtattttgaaaggtgtagcttcaggaatattgtatttgcatgaaggatgggagtctaaggttttacatagagatattaaagctagtaatgttttacttgaccgagatatgataccgaggcttagtgattttgggttagctcgggttcatggacacgagcaaccggttaggaccacgagggtggttggtacanctggctatttggctcctgaagtggttaagacggggcgtgcatcgacacagaccgatgtttttgcttacgggatattggttcttgaagtaatgtgtgggaaaagacctantgaagaanggaaanaaaccgttgatggattgggttttgggg

SEQ ID NO: 1042 - DNA, 426 bp, Arabidopsis thaliana
  unsure at all n locations
  Clone ID: ARABL1-07-Q1-B1-G8
tcgagctcgaactcactactcttcagccgtcgacgccgcatccgttccatttccgagaagccggagtacttcctccgccttctcttcctctgcctcttctcggagaagatcttcggatttcactttcgacgatgattatagcgagctgcttagagctgcttccgttaggagtttaggtcataagaatgagattgacatgatcatannnnnnnnnnnnnnnnnnnnnnnnnnnnnnnnnnnnnnnngcgttgcgatgggaacggttacggttaaagggcggtttgcctaaagagctcnaattgttgggatgacaatgggtaaggtttgatgaaagaaagatgaagaanaagggtntgttaagaatcaaaagaanggatntgatttcctaaaacctcgtaacaaattacatgctgttactattaaaag

SEQ ID NO: 1043 - DNA, 528 bp, Arabidopsis thaliana
  unsure at all n locations
  Clone ID: ARABL1-07-Q1-B1-G9
gacgancgcatccacgcgttacgtaaactcggaattcnggctccgaaggtgattccaaccaagcaaggggaacatacactttactggggcaagacaatttacacaactccttttgttcctccgaagaatgggctcctgatggggattccgcttgaagcaaccgggagggtttacanggactgggtacaaaccccaaggatctatggggaaaaacaagtactttctttgggggttaagaagaaagggtttggccggttcaaggtaacccggcttaccccggtgggacctttcttcaaccctccttgggtttgggaaagatgagaagtcactgaaggagttgaaactcaaggaggtcaagaacggtagactggctatgctcgccatcctcggttactttatccaaagggactanttgaccggtgttgggaaccttatcagaacctggcctttgattaactttggcttgattcccgttcaacaacaaacgttcttgaccaancctcaaagtttccactgaagggtgattaa

SEQ ID NO: 1044 - DNA, 428 bp, Arabidopsis thaliana
  unsure at all n locations
  Clone ID: ARABL1-07-Q1-B1-H3
ctcgaggtgatcaacaaaacaccccaaaaagtaaagaaaatggccgcaattacatcagctaccgtcaccatcccttctttcaccggcctaaagctcgccgtcagctcaaaacctaagacattatccaccatcagtagatccacttccgccaccagggcgccacctaagctcgctttgaagtcctctttgaaggatttcggtgtcatcgcagtggcaacagcagcttcgatcgttttagctggaaatgcgatggccatggaggttcttttaggattcgacgacggttcccttgctttcgtaccatctgaattcacggtggctaaanggagagaagatctgttcaaagaacaacgcaaggttcccaacataacgtgggtgttcgacnaanacaagattcccaaatgggggttggacgcaagcaaagatnt

SEQ ID NO: 1045 - DNA, 468 bp, Arabidopsis thaliana
  unsure at all n locations
  Clone ID: ARABL1-07-Q1-B1-H4
agaatgacntcgcatgcacncntacntnaactcggnactngnctctagtgacaccgcactttgatctgggtatnggtncgaagaagaccgttcgtgtgcaaaaacatgaggtgtagagcacttaacattcgtagaagaaagagagtaatggttaatgtgagctcaaggaagctcatgacccgtctacggcgaatggttgctccggagacgagtttttccggcgaggttgacggtgctacactttatcgactcacggctgatcacattttcttacttcaagcaagaatccaacttcttcgtccgtattcctccggtttggtgggcccccaaattcgaagatacacgttggctaaaaaaaangaccaagaaatggnataattaaggntaaaacgtcngttttccccaaataaaatcncctaagcaatcaacttataagttcgtcctaatgccgaagctataatttgaacg

SEQ ID NO: 1046 - DNA, 416 bp, Arabidopsis thaliana
  unsure at all n locations
  Clone ID: ARABL1-07-Q1-B1-H7
cgagcaaatccgccaatggaagcggctctgagcatcttcaagctctcgttccttctcacccttctctccggcggttcagaccttatcgactcgttgccgccgaattgtaaccgagccgagtgtccgagttatgaggttgtccacgccgggaatggctacgagattcatcgctacaacaccaccgtttggatttctaccgaaccaattcaagatatctctctcaacgaagcttctggcaacgattgtctgattacatgaacgggaacaacgattatcaccagaggatagagatagcacttccttatatcacccangtctctcanaacttgagcaccttcatagtctctttcttcgttcccaaggcattcaaactgatncaactccgggaaacaacctccacgtncagagatgggaat

SEQ ID NO: 1047 - DNA, 420 bp, Arabidopsis thaliana
  unsure at all n locations
  Clone ID: ARABL1-07-Q1-B1-H8
ctcgagtgacaccgcagtttgatctggatattggtgcttataacaactacgggaaactttacctcagccctcttttcgcactctctatcggatccgggtttgcgagattcactgcaacactaactcatgtggcattgttcancggcagggacatatggaagcagacttggtctgcagtgaacaccacgaagctggacatccatggaaaattgatgcaaagctacaaaaaagtgcctgagtggtggttttatatantgctggcaggaagtgtaaccatgtctctcctaatgtctttgtgtgnaaaggagtcagtgcagcttccaaggtggggaatgctctttgcttttgcattggccttcattgtcacactccctatcggtgtcattcaagcaactacaaatcagcaancaagatatgata

SEQ ID NO: 1048 - DNA, 415 bp, Arabidopsis thaliana
  unsure at all n locations
  Clone ID: ARABL1-08-Q1-B1-A4
cgagatcaaaaacgattttacaagaaaaaaatatctgaaaaatgtcagagaccaacaagaatgccttccaagccggtcaggccgctggcaaagctgaggagaagagcaatgttctgctggacaaggccaaggatgctgctgctgcagctggagcttccgcgcaacaggcgggaaagagtatatcggatgcggcagtgggaggtgttaacttcgtgaaggacaagaccggcctgaacaagtagcgatccgagtcaactttgggaagttataatttcccttttctaattaatttgttgggaatttcaaataaaatttgggaatcataattgatcccgtactcancgtacttgttgttgtttttaatgttgtaatgttttaatgtttcctccccctttanatgtactacgtttggaac

SEQ ID NO: 1049 - DNA, 421 bp, Arabidopsis thaliana
  unsure at all n locations
  Clone ID: ARABL1-07-Q1-B1-C3
aggtgtctactgagaaagcaccagctgctttgggaccttactctcaggccattaaagccaataatctggtttttctttcaggtgttcttggacttatacctgagactggaaagtttgtttcggagagcgtcgaagatcagactgagcaggtactcaaaaacatgggggagatattgaaagctagtggtgctgattattcctcggtggtgaagacaacaatcatgttggctgatttggctgacttcaagacagtgaacgaagatatatgccaaatacttcccagctccttctccaacacgatcgacgtatcaagttgcaactttgcctctaaacgccaaagatngaagattgaatgtattgcaacactccagaacactcaaaatcaatctcctacnaagggtantttgggcccggaaaaatt

SEQ ID NO: 1050 - DNA, 426 bp, Arabidopsis thaliana
  unsure at all n locations
  Clone ID: ARABL1-07-Q1-B1-C4
gaggtcgcgtcagtggttaaggagtcgttcggttcctgntggtggatgtgtagtggcggcgtgtgcggcggttggatatgtgtatgtgctaaccagtcacgcggtggagctttcgttttggcgatttgatgcgcgtcgtcgtggtggaaacagcgggtttggagaatggcagaggctgaaaagtccgccgttaccggcacaggtgcggttagatggaacggtgaggtttaactgcgtcggagtggaagataaagtggcggtggttcangtggtgggatgcattgacnatttgcttcggcggaattggaagggtgagaaaaggattanagaaaanccttgtgttgccgtatgataccaanggaaggaaaatttganganaaccgcgggatttacctgaaaatgaattaaacccnccgcctgttgctt

SEQ ID NO: 1051 - DNA, 402 bp, Arabidopsis thaliana
  unsure at all n locations
  Clone ID: ARABL1-07-Q1-B1-C5
tcgagtctctctccatttggcgatagaagaagtcatgtaccaatcatcatcctccacgtcatcatcatcgcagagatcatcgcttcccggcggcggaggactgatccgttacggntcagctccgggatcgtttctaaactctgtggttgacgaagtcatcggaggaggctcatcaaacgctcgtgacttcaccggctatcanccgtcgtcggataacttcatcggtaacnttttcaccggagctgctgactcatcctcgctgagatccgattcgacgacttgtggagtnaacaactcatccgacggacaagaaacagtaggcaatancaataataataatagtantaaanatatccntcctcgaaagattctaanggtgggattcaacnagatttcgcaaca

SEQ ID NO: 1052 - DNA, 416 bp, Arabidopsis thaliana
  unsure at all n locations
  Clone ID: ARABL1-07-Q1-B1-C2
gagctcctttctctctgtcacttatttcccctctttgcttccgtcgattcatcccaatctgatcatctctttctccggttaaggtctcaggacttctcagattcgaattataaatgggaaattgttgtgcgagcccgggttcggagactgggagtaagaaggggaaaccaaagatcaaaagtaacccgttttatagtgaagcatacactacgaatggatctggaactgggttcaanctctctgttttgaaagatccaacaggacatgatatatctcttaagtatgatctggggcgtgaggttggtcccgganaatttggtattacttacntgtgcactggatatcaaaacgggcgaaaaatatgcgtgcaagtccaatacaaagaagnagcntaanaacaacctgttggataanaa

SEQ ID NO: 1053 - DNA, 75 bp, Arabidopsis thaliana
  unsure at all n locations
  Clone ID: ARABL1-07-Q1-B1-D1
ctcgaggttctagatcgcgggcggccgccctttttgtatttnnnnnnnnnnnnnnnnnnnnnnnnnnnnnnnnnn

SEQ ID NO: 1054 - DNA, 432 bp, Arabidopsis thaliana
  unsure at all n locations
  Clone ID: ARABL1-07-Q1-B1-D10
ctcgagtcgttaccatnagaangagagctcagagatttagttagcttaatttttcttttcgttttgaaattaaggaagtgattgttatcaccggaggagagagagaaaatgttgggaattttcagtggagctatagtatcgccgccggaagagttagtggctgccggaagcagaactccgtcgccgaaaacaaccggatcaactttagtaaaccggttcgtcgagaaaaatccatccgctgtttctgtacaagtcggcgactatgttcancttgcttacaagccatcacaacganagtcctctccggcctaaatnatttggagctaagggatgaantattctgcttgttccaanggtcacntgacaacctaagaagccttgaaacaagcantacggggcttgcaaaaaacgcaaacaaggttctccttggtc

SEQ ID NO: 1055 - DNA, 343 bp, Arabidopsis thaliana
  unsure at all n locations
  Clone ID: ARABL1-07-Q1-B1-D12
cgaggaacataatgggtgctgatttgatgatgganccaacaagagatcnancggtcgttggtgggacaggtgacttcttcatggctcgtgggatcgctaccttcgtgactgatttatttcaagggggctaagtatttccgagttaagatggatattaagctctatgaatgttactaagtagctaagaatgtgtgttttgtttgaaaattttatgttgacacagagaaatgtgtttacaataattaagnnnnnnnnnnnnnnnnnnnnnnnnnnnnnnnnnnnnnnnnnnnnnnnnnnnnnnnnnnnnnnnnnnncaaggggaaaananntaaaaaaaaaaggg

SEQ ID NO: 1056 - DNA, 430 bp, Arabidopsis thaliana
  unsure at all n locations
  Clone ID: ARABL1-07-Q1-B1-D2
ctcgaggagagttttgtgaactcaagaaaataaaaaaagttatagttaatgggattcggcttagagagtatcaaatcaatctccggcggatggggcgcggcggcgcgttcctgtgacgcttgtaaatcanttaccgccgccgtgttctgtcgagttgactcagctttcttatgcatagcatgtgacacaagaatccattccttcactcgccacgagcgcgtgtgggtttgtgaaagtttgtgaacaanctcncnccgccgtcacttgcaaagccgacgccgncgctcctttgctcanttttgatgcccgatattcactctgctaatcctctcgccaacccgtcatcnaaagtgtccccgtccaaacnttcctcnagtcaaccgaaaacgaccgtcgccaaaatctcancttcctcgacttttgggaaccc

SEQ ID NO: 1057 - DNA, 436 bp, Arabidopsis thaliana
  unsure at all n locations
  Clone ID: ARABL1-07-Q1-B1-D4
ctcgagattgagctgtcagctgaaatccttgcgaatgtgaagtttatccaaganaagcgtctgattgggaagtactttgaggagataagccaggacacggggaagtatgtgtttggtgtggaagatacgttgaacgctttggagtctggtgctattgagacactgattgtatgggaaaatctcgatatcaacagatatgtgatgaacaacagtgcgactggtgaaactgtgatcaaacacctgaacaanggaacaagaaagccaacactgaagaaactcaaaagtaacccgacagttgaccttggctttggaccctngaaggaaaaagctgtcnttaccggaattggcttgccaatgagtacaagcgttttgggtgtgcnttaaaagtttgtgaccaacaagtcacaagaaaggtcncaattttgcaaaagggttg

SEQ ID NO: 1058 - DNA, 415 bp, Arabidopsis thaliana
  unsure at all n locations
  Clone ID: ARABL1-07-Q1-B1-D5
gagacaaaacccctctcaagcaaataatacacnnnnnnnnnnnnnnnnnnnnnnnnnnnnnnnnnnnnnnnnnnnnnnnnaatggcggaaccgattccctcatcgtctctgtcaccgaaatctctacaatctcctaatcctatggaaccttctccgtgcatcttctactcctttaccttcatcatcatctcaacgaacaacaactcatgacagctccgatttccaattctgttaattccgctgcgtctccggcgatgactgtaactaccaccgaaggtattgtattcaagaacaattcgcaaacctaaaatctcctctcccaaannctanttcttctaanccaacaatcnggngctcagattccgttcgcnttctcntctctctcaaccttcctcaaccggtaagatnaagcaaa

SEQ ID NO: 1059 - DNA, 407 bp, Arabidopsis thaliana
  unsure at all n locations
  Clone ID: ARABL1-07-Q1-B1-D6
tcgagaaccttctcttcttcttcttcttgcgagttgcaccgaaacactcaacaaaaccaaatcatccaaattgggtaaaacaaaagaaactaacaagaagaagatcgaattcaagaagaanagatggagaatggagcaacgacgacgagcacaattaccatcaaagggattctgagtttgctaatggaaagcatcacaacagangaagatgaaggaggaaagagagtaatatctctgggaatgggagacccancactctactcgtgttttcgtacaacacaagtctctcttcaagctgtttcngattcncttctctccaacaagttccanggttacnctccnaccgntnggtcttcccnaagctcaaagggcaatancagggttnctaacgcctgattttcaancaa

SEQ ID NO: 1060 - DNA, 502 bp, Arabidopsis thaliana
  unsure at all n locations
  Clone ID: ARABL1-07-Q1-B1-D9
ctccgaaggttctaagattcgccggggcgggccgcccgaactaanttgagcctccgtccgaacccgnggaaattaatttccgggaccgggttacctggccagggcggttaccaagcctttcccctaataaggtggagttcgtattaagnaagcttgggcggtaatcatgggtcaatagctggtttcctgtgtgaaattgttatccgctcacaaattccacacaaacatacgagccgggaagcataaagtgtaaagcctgggggtgcctaaatgaagttgaggctaaactcacattaaattgcgttgccgctcactgcccgcctttccaagtcggggaaaacctgtcgtgccaagctgcattaatgaaatccggccaaacgccgccgggggaaaaggcggtttgccgtaattgggggcgccaagggtgggtttttccntttcaaccaagtgaagacngggcaaacaagctgaattgcccttcaaccgcctggcccctggaana

SEQ ID NO: 1061 - DNA, 420 bp, Arabidopsis thaliana
  unsure at all n locations
  Clone ID: ARABL1-07-Q1-B1-E12
ctcgagcttctctattcgtcgtcgacctattttcctcagccatggccgtcgggaaaaacaagagaatctctaagggtaggaagggaggaaagaagaaggctgttgatcctttctccaagaaagattggtatgatgttaaggctccttcaatcttcactcacaggaatgttggaaagacacttgtttccagaactcagggtaccaaaattgcctcagaaggcttgaaacacagagtttttgaggtttctcttgctgatcttcaaggtgatgaggataacgcttacaggaagatccgtctcagagctgaagatgtccagggcaaggaacgttctgtgccaattccggggcatggacttcaacaaccgataaaccttaagtcaaatgggtaaaaaattgggaaactttgatnaaggcccatgt

SEQ ID NO: 1062 - DNA, 109 bp, Arabidopsis thaliana
  unsure at all n locations
  Clone ID: ARABL1-07-Q1-B1-E2
ctcgaggtaaaatttgcaagactttgtatttttttcattaatcaaataactcgtttttctctcaaaaaannnagaaacagaanaaaaaagatncnaaatgnaaaaaaaa

SEQ ID NO: 1063 - DNA, 412 bp, Arabidopsis thaliana
  unsure at all n locations
  Clone ID: ARABL1-07-Q1-B1-E3
ctcgagcaaaaaaaaatctctgaaacaatggcgtgttgcttagcttcgtgctgtgcgtcggcgacttgtggattatgctcgtcggtagcatcggggatatcgaggaaatcagcgaggatcgcttattgtggtcncttcggtgcctctcttgtcgtctcctggattcttcgtgagacnggtgctccgctcctcgagaaactcccttggatcaatacttctgattcanataccanagaatggtatcancannannctgttcntcgtgtgagcnttgggaattncctcntctttgcaatntangctttgatcatgattggtgtcaangaccaaaaatgacaagcgtgactccntggnaccatggtgggtggggtttgaaaaatgattgtccgggttttgccntgttgtcctcaag

SEQ ID NO: 1064 - DNA, 394 bp, Arabidopsis thaliana
  unsure at all n locations
  Clone ID: ARABL1-07-Q1-B1-E5
tcgagaaaaaaanaaaaatagtgaagacgacgaacctttgaggacactcttcggtttctccaatccttcatatgatgtcggacggaggagcaccgtcgagatacgtgaagttgacnaaggaanaagcnccggtcgatgagattcatcccggtgaactcaatcagcccattgaagtttctcatctanctgttcacaaatgcaatgagtgtggccaacctttgcctgagaattttgaagctcctgctgatgagccctggactaccggaatattcggctgcactgaggacatgaatagtttttggctgggacttttctgcccaagtgttctatttggacgtgtctatgaaactctgagtgatgaggaaacctcgtggaaaaaagcatgtanttgcca

SEQ ID NO: 1065 - DNA, 416 bp, Arabidopsis thaliana
  unsure at all n locations
  Clone ID: ARABL1-07-Q1-B1-E7
tcgaggcagatttanagcgtgtgagggagataggaagagagaaagtgagcgagagacgatcacggccgcgctgaaatccacgaccacggccgcgctgaaatccacgaccacggccgctctgaagaagaagactctctccgtctcctcccttctcctcctccgtctaagagacaaggcatccccagacgccatgatctctctcactccctcgttgtttctgaacaagacggttgttcctggatgttccacacgcctctctctgcgccagcctagaactataattactcctcctgcttccttgagagtcttttcctctctcggatctaaccaggattccaccggcagcgttttgattgagaccactgccacttcatcctcctctctcgaaactccgccgccgacaattgttcccaaat

SEQ ID NO: 1066 - DNA, 436 bp, Arabidopsis thaliana
  unsure at all n locations
  Clone ID: ARABL1-06-Q1-B1-G1
gnattcggctcgagaacagacagcaaatgaagaacagttgacttcaaaaacacacttctcatcatgacatcaaacgtcggaagcagcgtgattgagaaaggaggangacgtatcggattcgacttagactacgacgagaaagacagcagttacaacagaatcaagagccttgtaacagaggagctgaaacaatacttcagacccgagttcctaaacaggctagacgagatgattgtgttcagacagctaacanagctggaagtgaaagaaattgctgacatactgttganggaagtgttcganaggttgaagaagaaagagattgagcttcaggtgaccgaaagattcaaagagaagagtagtagaccgaagggtataacccgagctatggagcaagaccgttgagaagaagccatccatgaaggcttttagaggg

SEQ ID NO: 1067 - DNA, 419 bp, Arabidopsis thaliana
  unsure at all n locations
  Clone ID: ARABL1-06-Q1-B1-G2
ctcgagcaccgaactaacaaaatttgaaattcccaaagcaaaaacaaattacatcattcaattcaattctcaatgcctcttcttctccctacctcttcnttcaaaacgacggccaccgtcgtaatcgccggcgtttcatctattgccacggcgatgattctcacggtcccttccgtttcccatttcgtagtctcttgctttccgattatttacgataacaccgtcttcctcttaaaaccaccgtatctttacttagtcatcaactctatcatcgtctgcatcatcgctacttctaaactcactcataaatcgtcctccgtcgatgactctgagatctcggaagtagtgactccaataccgataccggtaccggttcatttancttctgatatccaattccggttaatttaaacgtgggt

SEQ ID NO: 1068 - DNA, 452 bp, Arabidopsis thaliana
  unsure at all n locations
  Clone ID: ARABL1-06-Q1-B1-G4
tataganataagacgtcggncggncgcgttacttaaacanggaattcggctcgagcggctcgagcggctcgagcggctcgagatttttttaaagaatggcttcaatttctgcaactttgccttcgccattgttactcacacagagaaaatccaatctcacatcgattcaaaaactcccattttctctaactcgaggtacgaatgatctttctccattatctcttactcgaaaccctagcagcatcagtctgatggtgaaagctagtggagaaagctcagattcatcgactgatctcgacgttgttagtacgattcagaatgtttgggataagtctgaagataggttaggtcttattggtttgggttttgctggtattgtagctctttgggcatcattgaatctcatcacggnaatcgacaaattgcccgttatctcgaacgggattcnaact

SEQ ID NO: 1069 - DNA, 114 bp, Arabidopsis thaliana
  unsure at all n locations
  Clone ID: ARABL1-06-Q1-B1-G6
gcacgcgtacanaaactcggaattcggctcgagactagttctagatcgcgagcggccgcccnnnnnnnnnnnnnnnnnnnnnnnnnnnnnnnaatggagaaataaaaaaaaaaa

SEQ ID NO: 1070 - DNA, 205 bp, Arabidopsis thaliana
  Clone ID: ARABL1-06-Q1-B1-G7
atattggatcatgagtgagtgaaaagagctgatattaccgatttttaaatacctctcttatcttcttttcgtttggtcggtatatgtttattgagtttcatgtattgtttgtgatggtctgtgtgtaatagtgaggtcggatctaaacttttatgcgtggtttttatatgaaattgtccattgtggttaaaaaaaaaaaaaaaaa

SEQ ID NO: 1071 - DNA, 466 bp, Arabidopsis thaliana
  unsure at all n locations
  Clone ID: ARABL1-06-Q1-B1-F6
ggngaatgatccccaaggagactatagacacnagatgacgtccnacncacgcgtacnnaaactcggaattcggctcgagctcctccctcacgtcttccaccaccgtagcttccgccaccaccacctcnnnnnnnnnnnnnnnnnnnnnnnnnnnnnnnnnnnnnnnnnnnnnnnnnnnnnnnnnnnnnnnnnaattcctttaattaggtttgggattaccaatgaatgttctctctctcgcttgttatgcttctacttggttttgtgtgttctctattttgttctggttcngctttaagatttgatgtaatagttcgtgattaggtattttggtatcnggnaacntaatgttaattcanttgttntttancgtatganncgtgnacttaacattctnaaaatgacaaaatttcttccggnnaatataacccctgttgattggaaaaatgggattaataacgggcgg

SEQ ID NO: 1072 - DNA, 460 bp, Arabidopsis thaliana
  unsure at all n locations
  Clone ID: ARABL1-06-Q1-B1-H4
caaatgacgtccnacccacgcgttaaacaaggaattcggcncaagaagaaaaanntttncttcaaaatttattcatttgcncattgtngtttttgctnctttgtacttttctttcncgtaccgaatctgctcttccttatcaccatgaactgttcttggggaggaagcggatgaattattataagcccaacagtgccataggaacaccatcatcaactagtgaccacgctccaaggcagtaatgggaggaagttgatgagtatatatagacccaatggagacatatttacaggaccatcaggcagtgggcatggtgggggtcgcactccaagccccctaagtatatatatattaatgtgtaatcaaggactcacaagcgaagctttaattctcgattacgtataacgtatgcgttggtgtagtatatgttaatttcngttttcacaagccaagtttttca

SEQ ID NO: 1073 - DNA, 420 bp, Arabidopsis thaliana
  unsure at all n locations
  Clone ID: ARABL1-07-Q1-B1-A1
aggtgaatcttccggtccataaccaaggaaagcattagtatacttataattatggagttgacaagtatgacattggggctggttttggtcactttggtattgcggtcgatgatgtggcgaaaactgtagagcttgtgaaagccaaagggggaaaagtaagccgggagcctggtcctgtcaaaggtggcaaaactgtaatagcattcattgaagatcctgatggttacaaatttgaactcttggaaagaggtcctacaccaagaacctctttgccaagttatgctccgtgttggtgatccgatagggccataaagttctatgagaaggcttttggnatggaacttctgcgaacaaagagacaanccaagagtacaagtncacaataacccatgatnggatatggtccaaaaagataaantt

SEQ ID NO: 1074 - DNA, 483 bp, Arabidopsis thaliana
  unsure at all n locations
  Clone ID: ARABL1-07-Q1-B1-A12
atngccagagaatgacgacgcatncacgcgtacttaaacccggaatncgggtccaagaaaancctttnacttnnccaaaatcctaacggaatngnccnccncaaaatnggtnctcnccnctcctgcttngaccggaaaggcgnttaanctatcccnggnggcctccgangtatttggaaccggccgaatcacatgcgcaaagcctccaagcccaccggtccatccggcagcccatggtacggatccgaccgagtcaagtacttgggtccattctccggtgagcctccgagctacctcactgggagagttccccggtgattacgggtgggacactgccggtctatccgccgatcccgagaccttcgctangaaccgtgagctagaaatttatccacaagcaagatgggccatgctccggagccctaagctgcgttttccctgagctattgggctaagaaacggattgaaatttccggagaaacc

SEQ ID NO: 1075 - DNA, 484 bp, Arabidopsis thaliana
  unsure at all n locations
  Clone ID: ARABL1-07-Q1-B1-A3
atgaattangtggcctatagccgagaatgangaaangncctcgcatgaagtaanctcggaattcggctcgagtcttcatcaaatcatcagatctaaccagngtttatcagaagaacactgtcagtacttcttgtaccagctacttcgaggactgaagtatatccactcagctaacattattcatagggatttaaagccgagcaatcttctgttgaacgcgaattgcgatttaaagatttgtgatttcggtcttgctagacctacttcagagaatgattttatgactgagtatgttgttacgagatggtatagagcacctgagcttctgttgaactcttcagattacacagctgctattgatgtttggccgttggttgtatccttaaggagcttatgaatagaaagncnttgttccctggtaaaagancatgttcatcaaatgcgcctaatgacaaanttgcctggnacaccgacaggaatctga

SEQ ID NO: 1076 - DNA, 429 bp, Arabidopsis thaliana
  unsure at all n locations
  Clone ID: ARABL1-07-Q1-B1-A4
tcgagctctgtctcaaaagacaagtagattccttttttttacagtatccaataatttgtaatcatataaataatcggtgaaaaagaaggattctttgtttgtttcccgagaaaatatcctcgatttccatctcctatctgtcatcggagctttctacttccgaaggagtaaaggatcaatcaagagtttgatcttgttagaatagccgataatggaaggagatgtgttgtcaggatttggagacagacacaatatggatgggaaattgttgcagagtttccagaagagctttgtggatgttcaagacattttggaccaaaaccgattaattgnttcaacgaagatnaatcagaancatgaatcgaaacaaccaagataacttgggtcnaaacgtgggggttatnaaaagagctcaacaacaattatcag

SEQ ID NO: 1077 - DNA, 412 bp, Arabidopsis thaliana
  unsure at all n locations
  Clone ID: ARABL1-07-Q1-B1-A6
gcacgccgtcgaggaattcttctccaccaacgaatccggcgacgtcttatcaccaccttgtcgaatctttagttgatgttgtttaaaggttttagctaataagggcatgaaacggatctgctcggtttcaagtgttcaactttaagtttcagagctttagcatcgccacgttccttgaactatcccctgcagtgtatcaagcgttcatcagttcggatggagagtagcaacttttcttctggtgtcagaaccgagagtagtgtgaagccaagaggagcattgatagttctagaaggtcttgatcgcagcgggaaatcaacacagtgtgctaagctactctcnttcttgaatggtttaggacatccgaccgagctctggagaatccccgatanagagacnaatgtcgtcaaat

SEQ ID NO: 1078 - DNA, 385 bp, Arabidopsis thaliana
  unsure at all n locations
  Clone ID: ARABL1-07-Q1-B1-A7
tcgagatcgccaccgctccttctcgcggaagttctcanctccgatcgactcaagccgtcggcaaatcttttgggctcgaaacttcctcggntcgcctcacttgctccttcnagtctgantttaaggacttcaccggtaaatgctccgacgctgtcaaaatcgccggattcgctcttgccacctctgctctcgtcgtctcgggagcaagtgcggagggagctccaaagagattgacctatgatgagattcagagcaagacatacatggaagtgaaaggaactggaacggctaaccagtgccctactaattgacggtggctcctgagacttctcgttcaaaaccgggaaagtatgcaagaaaagaagttctgcttcgaacctanttc

SEQ ID NO: 1079 - DNA, 433 bp, Arabidopsis thaliana
  unsure at all n locations
  Clone ID: ARABL1-07-Q1-B1-B3
ctcgagcancgatggagggctcgattacttgggaaaccctagcttggttcacgctcagagcattttggccatttgggccacacaagttattttgatgggagccgttgaaggctacagagtcgcangaaatgggccattgggagaggccgaggacttgctttaccccggtggcagcttcgacccattgggtttggctaccgacccagaggcattcgctgagttgaangtgaangagctcaanaacggaanattggctatgttctctatgtttggattcttccgntcaaagccatcgtcactgggtaaanggaaccgataganaaaccttgctgaccaattgggccgatncagttaacaacaacgnattgggccttcgcancaaaantttgtttcccggaaaagtgaacccaagttttaacctgtaattttggcn

SEQ ID NO: 1080 - DNA, 415 bp, Arabidopsis thaliana
  unsure at all n locations
  Clone ID: ARABL1-07-Q1-B1-B7
cgagcaacaaatctcaggcggctcaacactatcctcttctacattttccaacgatggcctcaaacgcactctcgtctttcaccgccgctaatcccgctctgtctcctaagccactactccctcacggctctgcttctccgtcggtttctctcggcttctccaggaaagttggcggcggcagagcagtggtcgttgcancggctacggtggacacaaacaanatgccnatgaccgnagtcgtgttccagcctttcgaanaggtgaagaaagccgatctgggccattccantcacatctcatgnctctctcgctcgcaagaagtttgccgaagctancnangnantcaatantgaacaantcaatgtnggatacaacgtctccnaagttgtncagncaatgttaggcataccttggc

SEQ ID NO: 1081 - DNA, 424 bp, Arabidopsis thaliana
  Clone ID: ARABL1-07-Q1-B1-C1
aggacaaaaaccaaacctctttcactattacacttttcctcaaaaaaaagaaaaatgtatttgttagtgtttaaactctttctatttttgtctcttcttcaaatctctgtctctgctagaaacctagcttcacaagaaccaaaccagtttcaactactcaagtaccacaaaggagctcttctctccggcaaaatctccgttaacctaatctggtacggcaaattcaaaccatctcaaagagcaatcatctccgacttcattacctcactcacacacacttctcctacgtccaaaactctccaacaaccatctgttgccacgtggtggaaaaacacaagaaaaatactacaaactccgcaacaaccaagcaaaaactcatcaactccggtctcctaactcctcgggaaacaaatcatccgacgag

SEQ ID NO: 1082 - DNA, 445 bp, Arabidopsis thaliana
  unsure at all n locations
  Clone ID: ARABL1-022-Q1-B1-F5
aggtgaagacatcatccctgagtacctcggatttgtgaaaggtattgtcgactctgaagatcttcctctcaacatctcgagagagacattgcagcagaacaagatcctcanggtcatccgcaagaaccttgtgaagaagtgccttgagctcttctttgagattgctganaacaaggaagactacaacaagttctacgaggctttctctaagaacctgaagctcggtatccatgaggactcccagaacagaaccaanattgctgagttgctccgttaccactcaaccaagagcggtgatgaattgactagtctcaaggactacgtgacaaggatgaaggaaggtcagaacgatatcttctacatcactggtgaagaacaagaaggctgtttgaagaactctccattcctttgaagaaagctcaagaaagaaaaggtattgattttc

SEQ ID NO: 1083 - DNA, 419 bp, Arabidopsis thaliana
  Clone ID: ARABL1-022-Q1-B1-G11
tctatgttgattatactcaaagaggtcttctcttccccaaacccgacccggaaacccatttcatctctcgattaagaacctctctttcttctgctctagatatttacttccccttcgctggtcgtcttaacaaagttgaaaatcatgaagacgaaacggtgtcgttttacatcaattgtgacggctctggtgctaaattcatccatgccgtatccgattctgtttcggtaagcgatcttcttcgacctgatggctctgttcctgactttttcaggattttctatcccatgaacggtgtcaaaagcatcgacggcctctcggagcccttgcttgctttacaagttaccgagatgagagatggagttttcatcggttttggttacaatcacatggtcgcagacggtgcttccatctggaat

SEQ ID NO: 1084 - DNA, 413 bp, Arabidopsis thaliana
  Clone ID: ARABL1-022-Q1-B1-G12
acattcaagttcatgggtcacattcaggagctgtgaagatggctgttatggaccagcaagctgcagttgcagaaggtcgcttgcttaaactcccattctcaaccatatatgaatatctccagatgttgcggttgattgctacgatattgaaagatgtcggtccatgttcgatgttttatcttgctgctgctgtatctgacttctatgtgccatggttaagcatgacagagcacaaaatagaatcaggatctggtcctttggacataagactagctcaagtccctaaaatgctttcaatcttgagatcaaattgggctccaaaggctttctgcatatcattcaagcttgagacagactcaaagattttgctagagaaagctacaaaggctttacaaaaatacaaagtgcacgca

SEQ ID NO: 1085 - DNA, 430 bp, Arabidopsis thaliana
  unsure at all n locations
  Clone ID: ARABL1-022-Q1-B1-G6
aacgtggctacggtgacaatggaggaaattacaataacnnnnnnnnnnnnnnnnnnnnnnnnnnnnnnnnnnnnnnnnnnnnnnnnnnnnnnnnnnnnnnnnnnnnnnnnnnnnnnnnnnnnnnnnnnnnnnnnnnnnnnnnnnnnnnnnnnnnnnnnnnnnnnnnnnnnnnnnnnnnnnnnnnnnnnnnnnnnnnnnnnnnnnnnnnnnnnnnnnnnnnttactgccgccacggctgctgctacagaggttacaacggctgctcaagatgctgctcgtatgccggagaaagctgttcagactcagcccggtcactaaaccatnatattancaatccacaacaatccagtnattccattatgtnagtttgaattttnaattaancatggtgccttttgtaattaactgcctcaaatttttgangcactat

SEQ ID NO: 1086 - DNA, 452 bp, Arabidopsis thaliana
  unsure at all n locations
  Clone ID: ARABL1-022-Q1-B1-G8
ataagaaagagctcaacattgttctctgactctataaataactgttcttggaaattttccaagagaacaagaaacaaaaacaaaacgttgtttaagtgtggttctatagatttcttgtgaatgtcttctgaacaaggaaatggatcgaatccttccacgtcaccggaggtagaagggactaaaacaatcccctttcgccggagattgcaaagaggacaaagagttttcgctccaaagctgatggaggctctacgtcgatcaagggtaagctctgaagaagctccggtaaggcatcttagtcgtagatggagagccacaacgggcgcaagaaggtataatccctaaaagctcctaacgacgctccttcaaacgatttgccggcgggaaccgcaacanntccgggggacaacgggcgacaaaagtcctttgccaacgaaccgctcnttggtgca

SEQ ID NO: 1087 - DNA, 429 bp, Arabidopsis thaliana
  unsure at all n locations
  Clone ID: ARABL1-022-Q1-B1-G9
aacggagataaaggagaaaactttagagcgtgttcaagttaataacagttctgtcgataatggaaaagctcttcgtaccatcatttcccaaaactttnttgaannancagactccagctaaagtagagaattcgcctgaacttcatccaaaatccagaaagaaaaacctatcattcaccaagaagaaagaacccaatatcattcccgacgagcaattcgattacttgtgtagaaacggnagtttgctcgaagctgagaaagctctggactcgttgtttcaacaaggttccaaggtaaaacgaagcacttacctcaaattgntggaatcgtgtattgantctggttctatccatttgggtcgtatccttcatgctcggtttggtttgtttactgaacntgacgtcgttgtggaaacgaagcctgttganc

SEQ ID NO: 1088 - DNA, 461 bp, Arabidopsis thaliana
  unsure at all n locations
  Clone ID: ARABL1-022-Q1-B1-F4
gcaaaaacaaacactatgggacacctcaaaagtctcttcacaattcttttcctaatagctatgtcttcaaccgtaacatttgccggtaaaatacccgcgatcatcgtgtttggcgactcttccgttgatgccgggaacaacaactatatcccaactgttgctagaagcaactttgagccatatggacgggactttgttggtggaaagccgaccggacggttttgtaacggaaagattgcgacggattttatgtccgaagccttagggcttaaaccaatcattccggcgtacttgggatccttcttataacatttcggattttggcaacaaggtgttacctttgcctccgcctggcaactggctaagacaacgccaactttctgatgttccgtccggtactaacctcctaatgggaaacaaactccgaaatactacaanagaaataccaaaccaaaaacttt

SEQ ID NO: 1089 - DNA, 424 bp, Arabidopsis thaliana
  unsure at all n locations
  Clone ID: ARABL1-022-Q1-B1-H2
tctcaagcctttgaatacatcaaatccaacggtggcctcgacacagagaaagcttatccttataccggtaaagatgaaacctgcaaattttcagctgaaaacgttggtgtacaagtcctcaactcagtcaacattactctgggtgctgaagatgaactgaagcatgcggttggattggtacggccagtaagcatagcatttgaggttatacactcgttccggctttacaagagtggagtttacactgatagtcactgtggaagtactccaatggatgtgaaccacgcggttttgggccgttggttatgggagttgaagacggtgtaacatattggctaataagaactccatggggaacggattggggcgacaaaaggtacntcaagatggagatggggaagaacnttgtggtaatgctacatgt

SEQ ID NO: 1090 - DNA, 469 bp, Arabidopsis thaliana
  unsure at all n locations
  Clone ID: ARABL1-022-Q1-B1-H8
tctgacgccctaanagtctnanacgtcccatgcacccgtacnnaagctcagaattcggctcgaggttgcaatggtggccttccttctcaagcctttgaatacatcaaatccaacggtggcctcgacacagagaaagcttatccttataccggtaaagatgaaacgggcaaattttcagctgaaaacgttggtgtacaagtcctcaactcagtcaacattactctgggtgctgaagatgaactgaagcatgcggttggattggtacggccagtaagcatagcatttgaggttatacactcgttccggctttacaagagtggagtttacactgantagtcactgtggaagtactccaatggatgttgaccacgcggttttggccgttggttatggaatttgaagangggggtaccnaattnggcttattaagaaccccntgggggaaccggtttgggggccaacaaagggt

SEQ ID NO: 1091 - DNA, 424 bp, Arabidopsis thaliana
  unsure at all n locations
  Clone ID: ARABL1-023-Q1-B1-A1
gatcaaaaaaaaccaaaaccctaatctgcaaaaatctcaatttcctccaaaagtttcagtttttaaaaatgggttttcttcttttgtaacgaaaaaatgtgtcaaactttgaattgaccatttttttttataaggattcgatgaagaaattgagaagctattactcaaatgtgagannnnnnnnnnnnnnnnnnnnnnnnnnnnnnnnnnnnnnnnnnnnnnnnnnnnnngagaggaaatggatatttttccctctattgattgggtcaatcctcgcttgttcctaactcctcctcacaacaaacctaactttaaccaaaccggagggagtcccgaattcccccttttaaccgaacccgttttggttaaacgggtntgggtcaacaactttcgttggaatccaaaatcaaacctcaacaaatct

SEQ ID NO: 1092 - DNA, 503 bp, Arabidopsis thaliana
  Clone ID: ARABL1-023-Q1-B1-A11
aatgaattcgttagccggccatagaagaactaagacgtcgcatgcacgcgtacgtaagctcggaattcggctcgagggaacatcgcctgactctgtgccgcctcgtttggcccgtagaaactttcctatgcctcctggaaactacatgggatctggttatcctgctatgcgaggtcatccttttccatttgcttatcccagaggaattgttagtcctcgccctctaagtagctctcctggatctatatcacctggcatgtcaacacctttaggcattggtttgagttctgtggttcaaaccgaaggtccagaaggtgcaaatctgtttatctataacatacctcgggagttcggggatcaagaactcgcggctgcatttcaatctttcggtattgttctgagtgccaaggtttttgtagacaaagccactggtgtaagcaaatgtttcggttttgttagctatgactcacaagccgcggggcagaacgctattgacatgatga

SEQ ID NO: 1093 - DNA, 416 bp, Arabidopsis thaliana
  unsure at all n locations
  Clone ID: ARABL1-023-Q1-B1-A2
tttctctctacgacagaatttttgaagcttctctctgcttatcgacacgatggttctcgaggcgactatgatatgtatcgacaactccgagtggatgcgaaacggagattactctccgtctaggttacaggcgcaaacggaagctgttaatcttctttgcggagccaaaacccagtcgaatccggagaatacggtggggattttgacaatggctggcaaaggagttagagtatttgactaactccctaacctcctgattctggnaaaattcctgggcctggtaatgcaagggcttgatgtnggaaggagaaattaacttaaccgcaactatccanattgcccaactaactcctaagcatcgccaaaacaagaatcaacgccaaagggataatgnttttgccggaagtccaatcaag

SEQ ID NO: 1094 - DNA, 508 bp, Arabidopsis thaliana
  unsure at all n locations
  Clone ID: ARABL1-023-Q1-B1-A4
aatatttggagcncataaangcnanaaattcacaggcccgcttacttaaccanggaattcggcncaaaattggtttncagctattgatcttgancaaggtgcaaaaanggagaanccggntgcatataaggccncctggaagttactcaagggtgctgatggcgttcttgtgccgggaggttttggcagtagaggtgtagaaggaaagatgctggcagcgaaatacgccagagaaaacagaattccataccttggtatctgtctaggtatgcaactcgctgtgatcgagtatgcaagaaccatactcggtttggcagatgcaaattagcactgaactttgatccaaacaccaaaaaaccccctgttgttaattttcaatncctgaaggggtccnaaaacccatatgggaangcactattgaggtttaggctcaaagaaagaacttaatttcaatcnaaaggactccaaaatcaagcaaagactatatgggaaacaaaagtttttgtta

SEQ ID NO: 1095 - DNA, 413 bp, Arabidopsis thaliana
  unsure at all n locations
  Clone ID: ARABL1-023-Q1-B1-A5
agttcttatgctgatgctcttcgtgaggtttccgctgcccgagaagaggttcccggaagacgtggatatccaggttatatgtacactgatcntgcaactatttatgaacgtgctgggcgtatagaangaaganaaggttccatcacccaaattccaatcctcactatgcccaatgacganatcactcatccaactccggatcttactggttacattacttgaaggtcagatatatatcgataggcaacttcacacaagacaagatatatcaaccatcaacgtgcttcatcccttccgcctttaaaggaaaatngtaaccgccaaggcaatgactccgttaangccaatccggaagtgtccnancaaacttgnaggcaaaataaggcaancnggaaaaattntcaaaccaataa

SEQ ID NO: 1096 - DNA, 431 bp, Arabidopsis thaliana
  unsure at all n locations
  Clone ID: ARABL1-023-Q1-B1-B1
gagtgagattcttcacatccagggtggtcaatgcggtaaccagatcggcgccaagttctgggaagtggtttgcgccgagcacggcatcgatccaaccggaaggtacaccggagactcagatctgcaacttgagcgcatcaacgtttactacaatgaagcgagttgcggtagattcgttcctcgtgcagtgctcatggatttggagcctgggactatggatagtctcagatctggaccgtacggtcagacctttcgacctgataacttcgtctttggccaatccggtgctggtaacaactgggccaagggacactacacgggnaggagctgaactaatcgattccgttctcgatgttgttcctaaggaaactgagaactgtgactgtctccaaaggggtccangtttgtcactcnttgggaagaagaactgg

SEQ ID NO: 1097 - DNA, 426 bp, Arabidopsis thaliana
  unsure at all n locations
  Clone ID: ARABL1-022-Q1-B1-B12
cactctgcttttacatccacaaagctcacttttattaaaccaaatcacaatctcaatatcacattcgttgcagagacaaagatgtctgagtatttggtaactggaggaacaggtttcattgcttcttacatcatcaaatcacttctcgaactcggacacaccgttcgaacaactgtccgaaacccacgtgatgaagaaaaggttggatttttatgggaatttcaaggagcaaaacagaggctaaagattctccaagctgatctaacggtagaaggaagttttgatgaagcagtgaatggtgttgatggagtattccacactgcttctcctgttcttgttccacaggatnataacattcaggagactttggttgatcctattataaagggtacaacaaatgtgatgagctcctgtgccaagtctaaa

SEQ ID NO: 1098 - DNA, 87 bp, Arabidopsis thaliana
  unsure at all n locations
  Clone ID: ARABL1-022-Q1-B1-B4
gagggacaaattacctcttttctttggttatcagttttaatgtgatggaacagttgnnnnnnnnnnnnnnnnnnnnnnnnnnnnnnn

SEQ ID NO: 1099 - DNA, 528 bp, Arabidopsis thaliana
  unsure at all n locations
  Clone ID: ARABL1-022-Q1-B1-B9
atgaatttttgtgacngcctanaagagctataaacgtcgcatgcacncgttacgttaagctccagaattcggctcgaagcgactcagcgcaaagcttctccaaagattcccccagaaacatccaacttcctccaatttcaacctcatcctcccgctgaagctgtactcttaagctgaagcatcgtcgtcctttcttccttgtctttgtaataattgtactctttctaataaacaatccacacggcacaatgcancgcgcaatgagctcccgcgtgcgagcttcggtctgaacgcggctaccaagtaccgcaccggtgccggtcttggacagangtccgctttgctcacaaggagctcaagttcggtgtttaggggcgcgctgctctcctcgcctggngtcnaaactctgggcaaagggcgtttgctaacaaaccttnggccccaaggggtccaaaggtcttgattgaattccaacctttngggtccnccaaanntttcccaaggggcnggtgttaaccgtttcccnag

SEQ ID NO: 1100 - DNA, 519 bp, Arabidopsis thaliana
  unsure at all n locations
  Clone ID: ARABL1-022-Q1-B1-C1
ggggaatgaatttgtgacnctctagaagccctataaacgtcgcaangcacncgtacgtnagctcganaattcggctcgagatcaaagttttcggtcacccagcttccacagccactagaagagttctcatcgctcttcacgagaagaatctcgactttgaattcgttcatatcgagctcaaagatggggaacacaagaaagagcctttcatcttccgcaacccttttggtaaagttccagcctttgaagatggagacttcaagcttttcgaatcaagagcaatcactcaatacatagctcatttttactcagacaaaggaaaccaacttgtctcccttggctccaaggacattgcgggcatagccatgggcattgaaattgaatcgcatgagtttgacccagttggttcaaaagcttgtttgggagcaagtcttaaagcctttgtatggtatgaccacagacaaaaccgttgttgaagaagaaaangctaagctagccaaggtcctcgatggttacgaa

SEQ ID NO: 1101 - DNA, 431 bp, Arabidopsis thaliana
  unsure at all n locations
  Clone ID: ARABL1-022-Q1-B1-C10
ggtttttggtttgatttgggaactcgtgcgcggctgtggcagaggccaaacccacccgtgtactccatccgtcggatccaccaaaccaannnnnnnnnnnnnnnnnnnnnnnnnnnnnnnnnnnnnnnnnnnnnnnnnnnnnnnnnnnnnnnnnnnnnnnnnnnnnnnnnnnnnnnnnntgggcattttagggtttctcaaatttttgacgctttctcttaaaagggttgacgaaataaccctttaagggaaaaaacaaaggttgaggaagaccaccaaggtgaaaaaagaaagaagaattcgaacaacagcagcaacaagataaagttacgaatttttcctcttttgtaacctttgtttctcttcttcctcttcctccatttttttccattaaagattctgcctttgggttccaatttcgtcnttccttt

SEQ ID NO: 1102 - DNA, 438 bp, Arabidopsis thaliana
  unsure at all n locations
  Clone ID: ARABL1-022-Q1-B1-B1
gagaagatcgtttctttatatacctggaatatgttcacccgggttcaataaacaaatatatccgtgatcattgcggcaccatgacagaatctgttgttcgcaattttactcgtcacattttgtctgggctggcttatttgcacaataaaaagactgtacatagggatatcaaaggtgctaatctccttgttgatgcttctggggttgtcaagcttgctgatttcggcatggctaaacaccttactggacaaagagctgatctctcgttaaagggaagcccgtactggatggcaccagagctcatgcaagctgtgatgcaaaaagatagcaacccagatctggcttttgctgttgatatatgggagtttaggatgtacaatcattgagatgttcactgggaagcctcccttggagtgaatttgaaagggctgcanctat

SEQ ID NO: 1103 - DNA, 438 bp, Arabidopsis thaliana
  unsure at all n locations
  Clone ID: ARABL1-022-Q1-B1-C7
agacttaatcatcgactttttgaccatttctccatctgggttttattatcttcagttctttgtgtcacaactccagtttctttttgtattttgttgtttttttcacaaattgagattgttgtttcctataaggttttgttttattctatttatggaagtctcttgatttcgcttttataacctcaaaaagcatctttcttgatagcaccaagtatgatttgatcatcaaaagggtttggatttgacaggtctctattttaggtttgtttttgggttagaagttaaaaccaanataaaatcttaacttttgggaaatgggatctgttaactggggttttactcaaatgaagtgttggaattaanatcctaaatgggttgttgatcccaacaatccctttgttggtcccaaagaattggtgaanggtgctcaagccaaaa

SEQ ID NO: 1104 - DNA, 395 bp, Arabidopsis thaliana
  Clone ID: ARABL1-022-Q1-B1-D10
ctccagaagttatcgctgaggcccatgatatgctagttggttttcaaaccgaatataactgggacgcagctgtggagttggtggtcaatgctggtgatccaaaagcttcttctttacctcgtaatgattggtacagactacgccgtagcctcgagatactcaagtcaactggatcgcctccgtcttcctttcgcattccttatgattcctttcgagtaaatttagttgctcctgatgctgatgacttccttgaggacggttcatctgccgatatctctatccaaaacatagagacagatttggactatgactttctttgttttttcttgtcaagcccacgggttgctctctacagatctattgatttcagatgtgaagacatgctttcaagaccc

SEQ ID NO: 1105 - DNA, 417 bp, Arabidopsis thaliana
  unsure at all n locations
  Clone ID: ARABL1-022-Q1-B1-D12
catcaatggcaagtctttgtttccaatctccttccaaacccatttcctatttccaacccaaatccaatccatcgccaccgttattcgccaaagtctccgtctttcgatgcagagcttccgtacaaaccctcgtcgccgttgagccggagccagttttcgtctccgtcaagacttttgcgccagccaccgtcgctaatttgggaccagggtttgatttcttaggatgtgccgtcgatggtctcggagaccatgtgactctccgtgtagatccctctgtacgagccggtgaggtctcaatctcggagatnaccggaaccacaacaaaactcaagcacgaaccctctccggaactgcgccggaatcgctgctattgctacgatgaagatgttagggatcagattggttggttancaataa

SEQ ID NO: 1106 - DNA, 445 bp, Arabidopsis thaliana
  unsure at all n locations
  Clone ID: ARABL1-022-Q1-B1-D2
ggtgggtcctaagaaggagagactggacattaaagcagccttgtcaaattcattcgggtttggtggtcataactccagcatcatttttgctccttacaagtgaaagcgaaagcagttgcttgtactccaaacctgattgtataacttgctgtaagtgttttacaagaagtttcccatgttatgctagtgttacgtcgagggaatcaacagagtttgttcaactaccaagagctaagctaagtttcttaggatcaagatctgatgagccaaagacttggacaggagctaaaacgtgctagagatatcagagttgggattccccaattaaaattccggtttcctgtgataccttccntaatgggaatccttgtantccttacaattccaatggttaacatgaaatcctcaaaaaaatgccaaatcaaattcctcaanttttaaattt

SEQ ID NO: 1107 - DNA, 426 bp, Arabidopsis thaliana
  unsure at all n locations
  Clone ID: ARABL1-022-Q1-B1-D8
ttcaaacttgtacggactaagaccagactctctctgacgttgtcagatctgcgacctgctagcgagaggatgcgagaggaaactgtggtttacgagcaggaggagtctgtttctcacggcgggggcaagcacaggatccttgcagagcttgcccgcgttgaacaggaagtcgctttcttggagaaagagttgaaggaggtcgagaacacagatattgtatcaaccgtgtgtgaggagctgctatctgtcatcgagaaaggacccgatcctctgttgccactaaccaatgggacctttgaacttaggatgggaccggtggtttgaaggaccaaatggaggagaanggtgcagatgcttaatactttgattcgctaagacagaagtaatgtgttacatatactantttcctgccaaggatatcanttt

SEQ ID NO: 1108 - DNA, 86 bp, Arabidopsis thaliana
  unsure at all n locations
  Clone ID: ARABL1-022-Q1-B1-E10
cgcgatctataactagttgaattttggtcgttacttnnnnnnnnnnnnnnnnnnnnnnnnnnnnnnnnnnnnnnnnnnnnnnnnnn

SEQ ID NO: 1109 - DNA, 451 bp, Arabidopsis thaliana
  unsure at all n locations
  Clone ID: ARABL1-022-Q1-B1-E6
ggtggcacttttgatgtctctcttcttaccattgaagagggtatctttgaggtgaaggcaactgctggtgacacccatcttggtggggaagattttgacaanagaatggttaaccactttgtccaagagttcaagaggaagagtaagaaggatatcaccggtaacccaagagctcttaggaggttgagaacttcctgtgagagagcgaagaggactctttcttccactgctcagaccaccatcgagattgactctctatacgagggtatcgacttctactccaccatcacccgtgctagatttgaggagctcaacatggatccttcaaggaantgttatgganccantttgagaaattgtcctccgtgatgcctaagatgggacaaagancaactgttcaatgatgtttgtcccttgntgggtgggttcaacccgtatccctaaagggtca

SEQ ID NO: 1110 - DNA, 400 bp, Arabidopsis thaliana
  unsure at all n locations
  Clone ID: ARABL1-022-Q1-B1-E7
tcttctcaataatctccacatctttcttcaccgttgaatcgattcgactattccctgattcattcgnggatgcntcttcagatttaatggaagctccagcatatcaaaacggtcttgattgctctgttttagccaaaaacagactcttgttagcttgtgatccatcagctgttcatatagctatgactctagatccagcttacttgcgtggcacggtatctgcagtacattccatcctcaaacacacttcttgcccngaaaacatcttcttccacttcattgcttcgggtanaagtcagggttcctcgccaagacccctatcctctgttttccttctttgagttcaaagtctatacctttgaaagaanccacggtcaagaatcctaatcctcttcttccn

SEQ ID NO: 1111 - DNA, 425 bp, Arabidopsis thaliana
  unsure at all n locations
  Clone ID: ARABL1-022-Q1-B1-F1
tctagttccttgataccaacgcgtaatcctaacccttaatctacttcctccttaattaatcagaggtttctacttattatttccacttctcatctctttcaatcgcaatctgagttctggctaaagattttgtcttgaaggtgagattcattgttccgaatagagtgagaaaaagacttataagattgaaaaagcaagatgcggattttgtgcgatgcttgcgagaacgcagccgcaatcatcttttgcgccgccgatgaagctgccctttgtcgcccctgcgatgaaaaagttcatatgtgcaacaagctagctagtccggcaagtangtgttggtttanctgaaccaagcaatgccccaagctgtgatatatgcgaaaatgcaacctgccttcntttactgtgagatagacggtaattctctt

SEQ ID NO: 1112 - DNA, 446 bp, Arabidopsis thaliana
  unsure at all n locations
  Clone ID: ARABL1-022-Q1-B1-F2
gaggtaacgaaaggtttaatcagaaacttggccttgttccaagttcgtcttcctcctctcgtagcagcagtaatggctccttcaagcgtcgttagggtttactctaccgctacctctccttctccttctgaaatttccgtcaagaaagttggtactcataatggaagctttcactgcgacgaagctctcggctgtttcatgattcgcctcgtcgataaattctccggcgctgatatcgtccgttctcgtgaccctaagatattggcagaacttgatgcagtgcttgatgttggaggtgtttatgatccggagcatgaccgttatgatcatcaccaagaaaggttttgaagaagtttttgggacatggcttcaacactaagctcaagtagtgctggtcctgtttacaagcattttggnaaggagatatagctaaaggaacttaatgt

SEQ ID NO: 1113 - DNA, 406 bp, Arabidopsis thaliana
  unsure at all n locations
  Clone ID: ARABL1-021-Q1-B1-G6
ccacattttcaagaaataaggaggcaaaaatgttcatatatgaattggaattatttgttttcttattaggcctatcctgaagccaaaggaaatgagatcggaattcctcggggaattccaattccacattttcaagaaataaggaggcanaaatgttcatatatgaattggnattatttgttttcttattaggcctatcctgaagccaanggaaatgagatcggaattcctcggggaattccaattccacattttcaagaaataaggaggcaanaatgttcatatatgaattggaattatttgttttcttattangcctatcctgaagccaaaggaaatgagatcggaattcctcgggggtaccgagctcgaattccctatantgagtcgtataaattccgtaatc

SEQ ID NO: 1114 - DNA, 445 bp, Arabidopsis thaliana
  unsure at all n locations
  Clone ID: ARABL1-021-Q1-B1-G9
caacacanatatggatcacgacaagtctacttcttgttgctgcgttcttgatgcttccacttatgttggtttctggattctcaagaaattgcttagcagaggatactctgttcacgcagcgattcgtagaaacggggagagtgaaattgaggagatgatcagagagatggaaacaacagaagagagattagtggtgtacgatgtanatgtgttggnttatcaaagcatacttgtctctctcaagacatgtaacgttgtcttctgttgcntanacagccctgaagggtacnatgagaaaggaggtggattttggaantganaaggagcngattaaatggtgggtgggaaccgtttggnaagaaacaagagagtatanaanaaagaattgnnttttccatccttcaattancaagcnttcaantttggagaagacaacattgggaac

SEQ ID NO: 1115 - DNA, 335 bp, Arabidopsis thaliana
  unsure at all n locations
  Clone ID: ARABL1-021-Q1-B1-H1
ttaaatcattattgtccaaatacgacaacttactcaagattcagcacttactccaccaatctcagaacccttttgtcctcttttgcttcccgcaacgcctcttactccaccggattccagaacgtcacggtgggacaaacccccgacctggtcaccggacttttcctctgccgcggagacctctcgccggaagtttgcagtaactgcgttgccttctccgttgacgaagcgttaactaggtgtccaagtcaagagagaagctgtgttctaattacgaggagtgtatactcaagatactcctgacaaagataatctancggacggggcattaaaaa

SEQ ID NO: 1116 - DNA, 485 bp, Arabidopsis thaliana
  Clone ID: ARABL1-021-Q1-B1-G5
aattatttagtcagccatagaagactaagacgtcgcatgcacgcgtacgtaagctcggaattcggctcgaggtttccataatgatagtctgattggttctggtgggtttggagatgtttacaaagcgattttgaaagatggaagcgcggtggctatcaagaaactgattcatgttagcggtcaaggtgatagagagttcatggcggagatggaaaccattgggaagatcaaacatcgaaatcttgtgcctcttcttggttattgcaaagttggagacgagcggcttcttgtgtatgagtttatgaagtatggaagtttagaagatgttttgcacgaccccaagaaagctggggtgaaactaaactggtccacacggcggaagattgcgataggatcagctagagggcttgctttccttcaccacaactgcagtccgcatatcatccacagagacatgaaatccaataatgtgttgcctgatgaaa

SEQ ID NO: 1117 - DNA, 460 bp, Arabidopsis thaliana
  unsure at all n locations
  Clone ID: ARABL1-021-Q1-B1-H10
agagctaanacatcgcatgcacgcgtacgtaagctcggaattcggctcgagcgaagatatctgggaaaggaaagagacctggtaaaggtggaaaccgtttctggaagaacattggtttgggtttcaagactcctcgtgaagccattgatggagcttacattgacagtaaatgtccattcactggaaccgtttctatcagaggacgtatcttagctggtacttgccacagtgccaagatgcagagaaccatcattgttcgtaggaattaccttcactttgtgaagaagtatcaacgatatgagaagagacattccaacatccctgcccatgtctcaccgtgtttccgtgtcaaggaaggtgaccaagtcatcattgggccaatgcangccgttgtcnaagacggttangttcaatgtgctgaaaggtgattccaaccgggtgcatctgncctttggtaaaa

SEQ ID NO: 1118 - DNA, 518 bp, Arabidopsis thaliana
  unsure at all n locations
  Clone ID: ARABL1-021-Q1-B1-H12
gtgaattaagttacgncagccaagagctaanacatcncatgcacgcgtacgtaagctcggaattcggctcgagcattgacgcaggtgaagaatctacagaagataaacgcnanggaatcagatttaggaatatctgatgaagcttcatggcacgctaagtacaaaaactctgcatatgtctacgtcggaggcataccgttcgatctcaccgaagatatggtgaaattgttgatgtcaatcttattcgagacaagggaacgggtaaatctaaaggttttgcttttcttgcttatgaagatcatgagaagtaccattcttgctgttgataatctgaatggacctcttgtgttgggacggaccattaatgtgggancantgtgggggcatacaacaagcacnaaganggaggatgaagaaaacccgaccccagaatagaaaaggcccttggtttancaaaanctttcaaanaaggaaaatttnacccttggtgaatccttcaaattttccacaatgaaaaa

SEQ ID NO: 1119 - DNA, 488 bp, Arabidopsis thaliana
  unsure at all n locations
  Clone ID: ARABL1-021-Q1-B1-H3
tgaatttcgtgagccagccaagagctaaagacatcgcatgcacgcgtacgtaagctcggaattcggctcgagacctcccagacctcggtgacgatcttcaccgaggattcatctgggagtttaatttccgtgacttcgacgtggcgcgtgacgcacacgcgcctgattcgatcgagttgcttcgtcggcaaggtatcgattttgagcggaattgtcgcgacggtgttgagtcggagaggtttgcggagctgatgatgtcgtcggggcttgtttgtaatgaggaagtgagctgggtgacgtttcatagcgcgtatgatttcggttacttgatgaagattctcacgcgccgagaattgcccggcgcgttgggggagtttaagcgcgtgatgagagtgttgtttggggagcgtgtgtatgatgtgaagcatatgatgaagttttgtgaaangagattgtttggtggtttgggaccgggttgcaaaggaccc

SEQ ID NO: 1120 - DNA, 421 bp, Arabidopsis thaliana
  Clone ID: ARABL1-021-Q1-B1-H4
gagaaaaattctgctttagaaaaaaaaaagaagcaaacctcactgttctttcatcgtttccgagagaggagagacggacatggaaggaggaactgcgcactacagccctcgaactgtcgaagaagtctttcgagattttaagggccgtcgagctggcatcatccaagctctcaccactgatgtggaagattttttccagcaatgcgaccctgagaagcagaatctctgcttgtatggattcccaaatgaagtgtgggaagttaacttaccagctgaagaagtgcctcctgagcttcccgaacctgcactcggcattaactttgccaagagatgggatgcaggaaagaaactggctttctctcgttgctgtccacagtgatgcgtggttactttctgtgtcttttactttggttcaagattt

SEQ ID NO: 1121 - DNA, 344 bp, Arabidopsis thaliana
  unsure at all n locations
  Clone ID: ARABL1-021-Q1-B1-H5
caagaagctgatcttcactagctgtcatagccaggttatgctgatggcggccggaatcctcgccggtggtgtgaaatgcacggcgtttgaaagcataaagcctttgatcgaactctccggcggtgagtggtggcaacagcctgggattcagagcatgttcgagatcaccgattgcgttaaagacgggaatttcatgagtacggttggttggccaacgcttggtcacggcattaagcttttgcttgaatctcttggtggcaaagtctgtagcttggagaagaagcaagcttctgtgcttttcctcattggggactatgtanaagattatgggatnaatgtaccgt

SEQ ID NO: 1122 - DNA, 441 bp, Arabidopsis thaliana
  unsure at all n locations
  Clone ID: ARABL1-021-Q1-B1-H9
gcaannnnnnnnnnnnnnnnnnnnnnnnnnnnnnnnnnnnnnnnnnnnnnnnnnnnnnnnnnnnnnnnnnnnnnnnnnnnnnnnnnnnnnnnnnnnnnnnnnnnnnnnnnnnnnnnnnnnnnnnnnnnnnnnnnnnnnntgttcagaagaacaaacatggttcctccttcttcgaacaagaagattccgtcagttctcgtttcaaccgtttgtttgatcgccagaagccaattcatcatgtcttaggcggtggcaaatctgctgatgtgttgttatggaggaacaaagaaagattccctgcaagtggttttgatggggaagcctaaccgcaattttggggtggctttttgaatnggttaaattttcaatttcctgtccccccggtttgccaaagcccctccttggcnttgggaatgaattgcacaaatttcgttttggtcc

SEQ ID NO: 1123 - DNA, 437 bp, Arabidopsis thaliana
  unsure at all n locations
  Clone ID: ARABL1-022-Q1-B1-A10
gagcattnnnnnnnnnnnnnnnnnnnnnnnnnnnnnnnnnnnnnnnnnnnnnnnnnnnnnnnnnnntgttgtgtttcagatctcaaagagtgtttatacttgtgtctctgtgtttactctcttcgtttcttgtggtcgtcactggaacaacatcgattactggggttggtaacgaagaagaaagaggtgtagaagaagaatggagaacaagtgtaatagaaagagtaattgcagaggaaagtggagagaactcatctctgattttagctgcaaagagaacaagaagaaaagatcctgctgataatttcaaactctacactggtggatggaatataagcaattcccattatttgacttctgttggttatacagcggcgcctttcattataatagcactagtctggtttgtgttctttgggctatcattgtctctgatt

SEQ ID NO: 1124 - DNA, 434 bp, Arabidopsis thaliana
  unsure at all n locations
  Clone ID: ARABL1-022-Q1-B1-A11
gcttgaaatttcctctcttcttcttttgcttgagctttaggttttgagagcaaagaaaaacgaagacgcgtcaaaggtactgaaatgtgtctattgcttcttgcttctggtttatgggtccctgcgacattttgagagtgttgtttggtttaggtgtctggtgtattgcttatataactgttgcaatctttgcgtcttttagaatctttcactgtatttgttaatttcaagagcttttgtggagaggttctgcttgcttgctacaatgggttacgcccagctagttattggtccagcaggcagtggaaagtcaacttattgctcgtctttgtatgaacattgtgaaactatcggtcgaacaatgcatgttgttaancttgatcctgctgcggagatcttcaactatcctgtggctaaggatatcanagaactta

SEQ ID NO: 1125 - DNA, 415 bp, Arabidopsis thaliana
  unsure at all n locations
  Clone ID: ARABL1-022-Q1-B1-A12
gtggtgatggtgagagttcaagtgttccaacgatggcgaaatccccggtagaggtgaaactgatcccgatcgaagctactcctgagaatttcgcagactatggtcaagtcatcgaagcctctcgtgacggtgcaggtttcggtcccaacgacgctcaactggatctctccagaggaatcccacggttctatataatgcggatcagagatacaccctttgacttttccgtactcactcaccacgcgagcgtgacacagtgtctaggatcaataggaggtcatgtttggtaccttggagtggctaaaccgacacttattgaagatggtgatgatggaaagatggtagataaattgaaatcaaggtctggtcacttgtacgctcctcctgcggttgaagaaaatcgcgtcntcaaggt

SEQ ID NO: 1126 - DNA, 378 bp, Arabidopsis thaliana
  unsure at all n locations
  Clone ID: ARABL1-022-Q1-B1-A7
tatctcaagggtttggggataatcaccgatgaattggagagtattgagctaccttccaccattgaagtcatgtgtgagcgtgttgagttcttacagaagctagggttaacgattgacnatatnaatgagtatcctttgatgttangttgtaatgtgcgtaagaatttgattcctgtcntggcttacttagngaaaattggaatctcgagatcgaaattaggatantttgttaagaactatcctcaggttctacacgccagtgttggntgttgaaccttgctcctgtggttaagtttcctnagangacncgatntggagaancaagatttggggtaaagtnttgatganttatcctgaacctgccaagggtttaaancc

SEQ ID NO: 1127 - DNA, 437 bp, Arabidopsis thaliana
  Clone ID: ARABL1-022-Q1-B1-A8
agtgaaacatcatcgccttcagatagtgccgttgttccctctgaagaaacgcaactttcttcccagtctcctccttcagtagaaactccacagaacttcattgatactgatgatctattgggtctgcatgatgatacacctgatccgttagcaatcctggaccaaaatgcactagctttggccttagtttccaatgatgttgattcttcgccgtttagttttgggcaagcaagagatttggatccgtcaggatgggagcttgcgttggtcacaacacctagcaatgatatatctgcagccacagagagacagctggcgggtgggattagacacgctcaacctgaacagtctatatgacgatggagccttgagagcagcccaacagcctgcctaagggcgtccaacttcaatcccgtttgaggtccaaagacctgttt

SEQ ID NO: 1128 - DNA, 402 bp, Arabidopsis thaliana
  unsure at all n locations
  Clone ID: ARABL1-02-Q1-E1-H11
ttttttttttttttttttggccgaccaaaatatgtgtcatttattcaaactcattatgttacacttgttttaaagataggatcacaagaaacgcttaanactcgcccttcttgagattgacaaaatgttttttaacagtttgtcaccggtaaaaagaaaggagagcctccgattttcttactccccaatacattcttcaccaagaagtttccatctcgactcatctttcttgctctgtttctccaacttctccttaagggttcctgcataanaggggacccgaacaattgattaagaaacctgcgcaaaacacgttgaaatgcagttcaagganttgccacattctcttgcaatgcacgcaacctcctggnaactcttagcttaaagcctgcnaaaatgccg

SEQ ID NO: 1129 - DNA, 380 bp, Arabidopsis thaliana
  unsure at all n locations
  Clone ID: ARABL1-02-Q1-E1-H5
nnnnnnnnnnnnnnnnnnnnnnnnnnnnnnnnnnnnnnnnncaaaggnnnnnnnnnnnnnnnnnnnnnnnnnnnnnnnnnnnnnnnnnnnnnnnnnnnnnnnnnnnnnnnnnnnnnnnnnnnnnnnnnnnnnnnnnnnncaagtaaaaacaaatagaaccattaataatacagtactcacactcacaacgacaacgtacgttctcgtttattantcnatccanatatatacgccaaagtaaatactaacaaaacgacatcgtcccattanccgcaagcaattaagaactttgtttcctcnnaaggggcacttgcggctccaccgtggggttggtgagggctagccgtaaccacngggcantttgtccgtaattttccgna

SEQ ID NO: 1130 - DNA, 451 bp, Arabidopsis thaliana
  unsure at all n locations
  Clone ID: ARABL1-020-Q1-B1-A11
ggcctacgtacnctcggaattcggctcgagctcgcggacgtcaagaccaaggacgacaaggccgtcacctgcctcacggccaccgtgcagttcagccgcgacggctccgtcaatgttgtggacaacttcaaggccgactacaagcagagcctcaagaccaagtacaaaatcgacatctagattggctggagtagtagcagcagcacgagcggctgaacagttgccgcggatatcgcgaatggagatgttgtcgacggcgtccttttttcacttctctccaaagcatgacctgagcgttatcgtttgagcattttactttcgctgtcgcttacgcagatagaggtggatgtgcagaatgagaggtccgatggcttgtagtttacggcgtaatgtctcatgtttccttgtccaaatatttaagtcattcggcgtctctggggtatcccgtcca

SEQ ID NO: 1131 - DNA, 162 bp, Arabidopsis thaliana
  unsure at all n locations
  Clone ID: ARABL1-02-Q1-E1-G5
ttttttttttttttttagcccaaaacagaatttcatttttatttctttttcgaaaatggaagaaattctcactggtgaaattcggtgaangnaaatgnnacaacagttacagagaaacaaagaacgtacgagagaaaaaaacatatcagagagctgaagctt

SEQ ID NO: 1132 - DNA, 377 bp, Arabidopsis thaliana
  Clone ID: ARABL1-020-Q1-B1-A12
ttttctagtgatcttctttttgattgagaacatgagtgatcaagaaggagactgggatttttacctcagaatcctaagcaacagcgcgcgggattctacggatcctgcttctgatccatctatactacaatcagtgaagaagctgcatgggttctgtaaaatggagaaatcagatgatcttgtggctagaatttatccacaattcaataaagtcttccatcgttcggttgcttcactatctcagtccgagtcaggggcgtccaaaggccttctcttgctagccattcttcagttttttcttgattttggggatatggttctgcacgattctgacccaagtttgaggacattcttccgctcatgtcttaaccgtgagt

SEQ ID NO: 1133 - DNA, 522 bp, Arabidopsis thaliana
  unsure at all n locations
  Clone ID: ARABL1-020-Q1-B1-A3
atgaattttgtgatnccctaggccactannaacgtcaanatgcacgcgtacgtaagctcggaattcggctcgagccataacagacaccacacatgtgaaatctgagactggctctccaagacattcatcctctgctaaaatggatgaaactaatggccgggaggaaaaatcagagaaggaactgaatgatgatggtgaatatttgattagaccttatcttgagcatcttgaaaagattcggttcagatacaactgtgagagagttgttgatctcgacaagcatgatggaatcttcttaataggggaattctgtctgtatgtgatagaaaacttttacattgacgaagatgggtgtatttgtgagaaggaatgcnaanattaagttacccgttaattgatnaaacnttgggtgtgaaaaaanatgtctctgggnaactccggnttccattccaagtttaacacannatgggcctacaacaattgaaaacaaggaccanttgggggaaaaancatgggcatatg

SEQ ID NO: 1134 - DNA, 448 bp, Arabidopsis thaliana
  unsure at all n locations
  Clone ID: ARABL1-020-Q1-B1-A4
aggtttgattgaacaagcttatgacaatcctcatgaagctctatcacgaataaaacgtcatcttctcacccaacgaggctttaaagaggttggcatagaatttatggatctttatagctacttgattccagtttatgaaatagagcctctagagaaaattaccgatgcatatcttgatcaatacttgtggtacgaaggtgacaagcgtcacttgtttccaaactggattaagccagcagactcagagccgcccccacttctggtttataaatggtgtcaaggtatcaacaatttgcaaggcatatgggacacaggtgatgggcaatgttttggtgatgccccaaactaagttccaaaaagttctttgagaaaaatcnaattgacaatgttgaacaagcttcctcnntttggttcctgaccacatatttcaaactaagtgtcccgccaa

SEQ ID NO: 1135 - DNA, 405 bp, Arabidopsis thaliana
  unsure at all n locations
  Clone ID: ARABL1-020-Q1-B1-A7
aatacggtgtatgaatccgaattacacagagttcaagtttcctcaaatcaaagctcacccgtggcacaagattttccacaagcgaatgccacctgaagcagtagacctcgtctcaagactccttcagtactcaccaaaccttcgttgcactgcattggaagcttgtgcacaccccttctttgatgacttacgggatccaaatgtttcactgccaaatggaagagcactgcctccattgtttaacttcactgcccaagaacttgcgggtgcatcaacagagctgcgacagcgtctaattccaagcacattgccagggaacgggaagtaantccttaaggattatttatnncgtgtccaaaatccaagctttcctnctcnccctcgaatttacggcagtgtttaaac

SEQ ID NO: 1136 - DNA, 395 bp, Arabidopsis thaliana
  unsure at all n locations
  Clone ID: ARABL1-020-Q1-B1-A9
tgtcttaagaatcaaaaggttctgcttgtggcagacaacgttactaaggttaaacagttagaagctcttgcaggggatttcagcagttttggtcctgggagtgttgttattatcactacagacaacaaggggttgttgaattcttatggtataacagatgtctacgaagttgagcatttgaagttttgtggaatcttacgatcattgggctttaaaaagagagctgctgcgttccagcgggctttgtgtagagcaaagagttttgccacggaatgtttttgttgtcaaagtagtagtatatccggttatgggaaagtgacagatttagtttaattaagttgaatcccttattaagtcatatgcattaagttaagtaaacttaataanttgtgtgg

SEQ ID NO: 1137 - DNA, 444 bp, Arabidopsis thaliana
  unsure at all n locations
  Clone ID: ARABL1-020-Q1-B1-B2
gtttgtaccctgaggtggacccgtccttaaacccggaccacgtccctcacatgctacacaagtgtcctgactcgatccctgacccaaaggcggtccagtacgtgcgtaacgaccgtggcacccccatggtgctagacaacaattactaccgtaacatcctagacaacaagggtttgctccttgtggaccatcagctcgcacacgacaaacgaaccagaccaatcgttaagaagatggctaaggaccaggcctacttcttcaaggagttcactaaggcaatccaagattctaaccgagaaaaaaccctttgactgggtcctaaagggttaagattaaggnancaatgttatctcccaaacaagaancaattgaagttggnaaaagttanaaanaaangggcncnggngtgtttaanttcccggcntgggacnaaacaaaaattaa

SEQ ID NO: 1138 - DNA, 444 bp, Arabidopsis thaliana
  unsure at all n locations
  Clone ID: ARABL1-020-Q1-B1-B3
gagagataatggatctcatgaacgacaacagcaacaattcacaagacggcgatcatcagaactaccgtgtcggcgataatggattggaatcgaagaaggaagctatcttccctagctatgatttccaacctatgcgccctaatgcctccgccggattgtctcaccacgctttagatctcgccggatctgttaattccacggctgctagggtttgggatgcgtctgatcctaaaccggtttcagcttcttccgcaagaagttatggctctatggactctctcgaaccttcaaagttgtttgctgagaaggatcgaaattcccccgagtcagcgattatatctgcgattgatnggacaatgaaggccatgctgataaattgttacatgttatgggaaggggtcaatgcactctaacgcaactggagaacaanaacccgagatttcg

SEQ ID NO: 1139 - DNA, 425 bp, Arabidopsis thaliana
  unsure at all n locations
  Clone ID: ARABL1-020-Q1-B1-B8
ggagctagaaagtttgcattggtaggaattggagccattggatgtagtccgaatgcgctcgcacagggcagccaagacggaacaacttgtgtggagcgtatcaactcggccaaccgaatcttcaacaacaggctcatatctatggtccaacaactaaacaacgctcattccgatgctagtttcacttacatcaatgcttatggcgcttttcaggatataatcgccaatccctctgcttatgggtttacgaatacgaacactgcgtgtttgcggaattggaaggaacnggaggtcagctaacatgttaaccgggaagaacccccgttgcttgaaccgaaataattactttttttgggatgcaattcaancctttcggntgctgcaaacacgggcaattgcaaaaagattttacaatgcacaaaagn

SEQ ID NO: 1140 - DNA, 433 bp, Arabidopsis thaliana
  unsure at all n locations
  Clone ID: ARABL1-020-Q1-B1-C1
tcgctgagttctggtttctttgattttcttagttacagaacacaacttactttgttttttggtttgggctgtgttgaaaattgagcttanggttttatgtaacagttgtcttagctcatagttacggttaaaaagctctcaactttgtctccctaatgataattgaattcaatcttgtttatgatttttctctattgggtcgatctttanctgaatctatctacataaagatncaaccgttttaagaatcttagggttcctaacatcttgttcaaaactaagattctgttttttggngtggganatnatttaanatatggnanctactcaagaanacatatnantcaaagaaggatctcaaaaggtttaccaacaacaatcttcaagtccaaacaaangggacccttccggncaaacatttgantccctaacg

SEQ ID NO: 1141 - DNA, 403 bp, Arabidopsis thaliana
  unsure at all n locations
  Clone ID: ARABL1-020-Q1-B1-C11
tctctcgctggatttcaacattcttccactcatcgcttctctttaccaaatcaaactcaacacttcactcaactcttatcggaccttccaaactatatccttcaatggatctatggactcttcaattaaaagacgtcacgatccgaaaccctatcttctcatcatcgatccctgagaaatcatcgtcgttttctaggaaactttgtgaattggagtttaggtttctcaatcgtaaggtttctgcttctccgtatcgttccttggttgttcgagctacctcgaagaagagtaacgangattcttcttctcctgggagatgcttctcaggaaaacaaaccttctaacggnaacaagtccggcgattccgcggctccgaaatcgttcggtttaaaaaacggattgg

SEQ ID NO: 1142 - DNA, 451 bp, Arabidopsis thaliana
  unsure at all n locations
  Clone ID: ARABL1-020-Q1-B1-C2
gaggggttttctgcatatagatgaatatcctcctgatgctaatcaaggattcgacattccatcggctttgataagcttccccgatcatcatgctanntnagatttccaagaagagctcancaactcgcccttattatcaagtttaaaggaaaaatccttagnacgctcttacacagaagtattgctcgtacctttgacaacccctgattttagcatgccttacaacgtaatcacgatcacatgcaccatcttcgcattgtattttggatcantgctaaatgttctacgtagacgaattggtgaanangaaaaggtttctcaaaagcaaaggaaanaaaacaaggtgggcttaancanttataaccaaaaacccnagccaagatttaaangganaacaatttgaggccccatnatcatcagaagctgaaatcttcgggccntgtccaataaa

SEQ ID NO: 1143 - DNA, 438 bp, Arabidopsis thaliana
  unsure at all n locations
  Clone ID: ARABL1-020-Q1-B1-C4
aaagactcgagttgatatgtctagtactaaagatatgtcaactgtccaaaacgcaactccttttaacggcgttgcccnatccaccaccgtgcgagttacaatcgtccaatcctccaccgtctataacgatactcctgccactataggacaaagcggagaagtatattgtggaggcggcaagcaagggancanagctagtgttgttcccggaggggtttatcggtggctatcctcnaggttttaggttcggtttancggttggcgttcataaacgaagaaaggcgtgatgaatttcggaagtnccatgccttctgctatcaatgtncctggnccctgnantaacaagatttgccgaacttggcnaggaaaaaaccaagttttccttggaaaattggaagccatntgagaaaggnaagggtaaaccctcnaattgcacaa

SEQ ID NO: 1144 - DNA, 412 bp, Arabidopsis thaliana
  unsure at all n locations
  Clone ID: ARABL1-02-Q1-E1-D3
tttttttttttttttcatgagacaaccatttttatagacatatttgtctgatgttgataacaagaaagttgagaacaaaacaaatattaanactcagggacaagtattctagtcatcatcatatcacagtgacacaacatacacacttcagaacaaagggtaccattaaagatcacaaaatctaataaaaacagaaccaacagtacgtctcaggtatccaaagcgagattttcagcttgcctctcaagccgaagagccacaacaggaaatgtgttgacgatcattactcgtatttctcttgagaatctccaaatattaagttcgtcttccgcccttcctgtatgtactccgtatttataggcaaacgttacatagcctggctcaatggtgaacaaaaattgagttcccaccc

SEQ ID NO: 1145 - DNA, 421 bp, Arabidopsis thaliana
  unsure at all n locations
  Clone ID: ARABL1-02-Q1-E1-D8
nnnnnnnnnnnnnnnnnnnnnnnnnnnnnnnaacatttgataattataaatatacatcaatcaaccttgtcacacacgcttctanttacgcgntcantcccggttaacactttgtaagacgacaattttacaaacgcggaagagaaggcgttgaagaaacggtcttgatcagctctcgagccgaattccgagcttacgtacgcgtgcatgcgacgtcatagctcttctatantgtcacctaaattcaattcactggcccgtcgttttacaacgtcgttgactggggaaaacctggcggtaccaannttaaatccgcnttgcatcacaatcccccttttcgncnagcntggngtaataagcnaaatagggcccgcaaccggatnggcccttcccnaaaaagttgcgcaacctgaaatggggn

SEQ ID NO: 1146 - DNA, 495 bp, Arabidopsis thaliana
  unsure at all n locations
  Clone ID: ARABL1-02-Q1-E1-D11
ttacgcctgccgtaccactttaacgccgccaggtaccgggtccaagaattaattcccnggtcgacgagctcactagtcggcggccgccctttttttttttttttgattaaacagtctattccttctcgaatataacagtttaagggttttttctttgtgattgcancactaagngccctgtggcacannnagaaggacaaaaaagactttaagagccaaaagaaaaaaccaattcaagaagaaaataattcattacaaaaccataataaacatccattttctccatcttttttttccaggatttaatgatgaaaacccccacagaagacaaggttgcaatcanactctgtgacactattacatgacagagaaagaaacatanccttcaagaatcaaagcagctcanangaaagcgtccttcccaagtaatttcaccacatctagctgaattgtttaacctgggccacatcaatgggattttaattgtccatgttt

SEQ ID NO: 1147 - DNA, 400 bp, Arabidopsis thaliana
  unsure at all n locations
  Clone ID: ARABL1-02-Q1-E1-D9
ttttttttttttttttaagaacaagtttcttgattacattaactttttaggtttcgcatatagcaaagtattttacacacatataattaattactctcngagcatttgtaatcattaacttgaacaagtgaaattcaagaagatgattccttgaactcctgcaactgtttgaagttcatccatggcttcacccacactttggcttcaaaattcttagtctgatcaccttcttttgcttctagggttaagtggtacatcgttcctgcaactacctgctcccttgctttgacaatcctcctgaactcaagaantttggtccgttgtttgttaangtccctgaatgggaaatcnanccgagactcncnattctctccaactggtcctganttcctccggaaga

SEQ ID NO: 1148 - DNA, 409 bp, Arabidopsis thaliana
  unsure at all n locations
  Clone ID: ARABL1-02-Q1-E1-E3
nnnnnnnnnnnnnnnnnnnnnnnnnnnnnnnnnnnnnnnnnnnnnnnnnnnnnnnnnnnnnnnnnnnnnnnnnnnnacagccgaagaagnagagtngaagangnatgtttaagattcanccttacacaagtgtagcanaagcaaaaaagaaaggctatcaacgaatgggaactttgatccaaccattggcaaaagcaatggctaagatgacgaatggcgttgacataccgaagatgataatgtaaggaagaggcgtcttcancggattctctccttctctttctccaacgctttgccaatacctataaagttgtaatgcaaatctcatccataaccatttcgtcagtcacaatattgcatgtttangaaaaatgtgcatncaagagtttaaagatcctttgacaactta

SEQ ID NO: 1149 - DNA, 411 bp, Arabidopsis thaliana
  unsure at all n locations
  Clone ID: ARABL1-02-Q1-E1-E5
nnnnnnnnnnnnnnnnnnnnnnnnnnaaagatgattancatatanaaataatatcacaaggatataatgttccaatttattgaattaaaagnactgngaaaataagactgggaatgttttaaacgatccgacacgagaataattttagtttcatattaagacaatcatcacttgaggttccttctagtaaacgataactgatggagtttagagacgagatataagaagaggtacagaggcaggtccttcctcgcccatcacaggctggaacagatccaactcaccataccgctccagaactccgcatcctacaatcttcanctgccatcaatccaagttgaataancgccgtgaacccgaaccccgggaaactcnagctcgtcgcttcaaccgggaaaagaataanttaac

SEQ ID NO: 1150 - DNA, 469 bp, Arabidopsis thaliana
  unsure at all n locations
  Clone ID: ARABL1-02-Q1-E1-E8
cgnncaccgaaagaatatagatcccattgcccttggcatcaggaaangcctaanaagaaaacaaataattccaattcatatatgaacatttttgcctccttatttcttgaaaatgtggaattggaattccccgaggaattccgatctcatttcggttggngtcaggataggcctaataagaaaacaaataattccaattcatatatgaacatttttgcctccttatttcttgaaaatgtggaattggaattccccgaggaattccgatctcatttcctttggnttcaggataggcctaataagaaaacaaataattccaattcatatatgaacatttttgcctccttatttcttgaaaatgtggaattggaattccccgaggggatcctctagagtcgacctgcaggcatgcaagcttgtctctcnctttagtgagggtttagcttggcactgggccgtcgttttacaa

SEQ ID NO: 1151 - DNA, 401 bp, Arabidopsis thaliana
  unsure at all n locations
  Clone ID: ARABL1-02-Q1-E1-E9
ttttttttttttttttaaaatatgcatacaactttattgtaagttttgtaactcttccataaaaattaaaaggcctagatacanaagatataggcaangtttcttttgccttctcatacaagaaaatacaatataagcaaaggcccatctgcctatataaaaccctaactctcgtaaataaaactctgtttttttcaccttctcgtttcaataaaatccaacacacaccanagacagtttaaggaaaatanaagaagaccacacgatgcattttcttgtaatangattgggtgantcatctatggtttacgaacgcttataaagcttgacatcatcgatcacaggcccacacaatgacgagaaatcatcgctcctcatggcatanaaagtgctgtagaaca

SEQ ID NO: 1152 - DNA, 417 bp, Arabidopsis thaliana
  unsure at all n locations
  Clone ID: ARABL1-02-Q1-E1-F1
tttttttttttttttaatttcactccttactccttcattgagagttggacacaaaatcagtatgacaagaaattgaggatgatctcttaagaaaaangcnaanggtaaatacacatttctcttgttgtgacacaaaaaggaaagagaanacctcatcaagganantgagaagatgtactcaagattaaactcataattaanccacacttgaagcaattggaactacgggtgctactcattcttaagcttcctcngacccttccgtctcatcttcatcgtcancttcttcctccaccgcatcaacancgtacctcgcattcaagaactccacaagccgcaggagtcagaacaagcttatcagcgttcaaaatatcanacaagattcaattgtccctaaggcgttaacatcccnaaagg

SEQ ID NO: 1153 - DNA, 410 bp, Arabidopsis thaliana
  unsure at all n locations
  Clone ID: ARABL1-02-Q1-E1-F4
nnnnnnnnnnnnnnnnnnnnnnnnnnnnnnnnnnnnnnnnngagaaagagtagtttggtggtattgatgctctcttttgaatgttttgnntgaanngccttgggaaagaaaaaaagaagcanatatgaagatttcacaatgcatcaaaagctttttatctacattatataattactccctcanaagcttccttagtagacttcaanattccactgttnactcctcttcaattgcttcttgtactccaaccaatcgatcccatctttagcagcaancgagaccataangtcatcgatacccttcnccatacccttaagaccacacatgtaaacaaaggtgttgtctttcttcagcaactcccacagctcttctgcaanactccgccattcctggccgaatgtacattttcc

SEQ ID NO: 1154 - DNA, 403 bp, Arabidopsis thaliana
  unsure at all n locations
  Clone ID: ARABL1-02-Q1-E1-F5
ttttttttttttttcaattaaaactggaacctttaaacattcattgattactcatatatacatgatacatacaaagtcaccagcttcnngttgtcntccccggtttagccatctattaagccagctacatgattcatatcaagaccaatgcgggattaaggatcangtttaccggcgattgcaacatcatcttcatcatcaccatccgaggcatattcatcttcactcatttcatcatcactagacatttcctcagtatccgcccttggctttgcgtanttctcacaatactctttaactctctgttcataggtangacgatcacgcatcatcaatgcagctgcttcaccattcaaggggatctgacggattcggatacagaagaanttgcgggaagaaatgt

SEQ ID NO: 1155 - DNA, 406 bp, Arabidopsis thaliana
  unsure at all n locations
  Clone ID: ARABL1-02-Q1-E1-F7
ttttttttttttttttaaaacttcaatctctagttaaaatattaaggccaaacatcaaatgtcatacaaatcatagtttttatanatatgngttccngngcaaatttatcgatatttccggttcaacatgaaccgttgagtaagcaaaacaaacctagtactcaaacccaagaaagaaaacccctcaacacacccacaaaaagtagtattaagaaagcaaccaatcttctgaaaaaccggttatagattanacggttgtantagatttccggacagtgtaacggtaagcagcaactttcttcttgcgagaganagtattgtcaacagagangaatgaacttcccancttcnacngtanngaaagattgcaaacagcntcaaccgtagcctttnacctcctccggtt

SEQ ID NO: 1156 - DNA, 383 bp, Arabidopsis thaliana
  unsure at all n locations
  Clone ID: ARABL1-02-Q1-E1-F8
ttttttttttttttttttgccaaactttattcagatttcattactaaagaatcttgcagaaattacaataatcaattgcaatcancaggnngntgaanaacaatcccaatagtgtaataattaatcaagaaaactattggaaatttaatctatttttatttatttctaactactagcgttcattcaagaaggcttggacttgacttagctagaggtagcgtttgagagcaacagcttagctcccttgacaagctcttccttgatcatgaacagaaccgcagcanctaaaacgctctgcacaatctttgtgctcatccctttataaaaaccccgtaaagccttcatatcgaatcatttcagaatcgcgtccaangttcctttgt

SEQ ID NO: 1157 - DNA, 399 bp, Arabidopsis thaliana
  unsure at all n locations
  Clone ID: ARABL1-02-Q1-E1-F9
ttttttttttttttttcagtattactcatctcatttcaaaagcattagagattaagaaaatcatatttatataaaanaccacangggcttatacgaagnnccttagaaataaaacaatggccatcttacggcttacgagcactgaggagcttaacatcatcgatcacgggcccacacagtgatgagaaatcatcgcttctcatcgagtaaaatgtgctgtaaaacataactcttgtgcgggtcgaaaccgccacaaaccgtanagaangcgcgtttgnacctcccttttgctcgagaactcatnagggtacntttanaagtgtcttttccgcaaaatgcntcgaccacaancgatcctttggnaagcattgttagcatctccaaacggcaaagnaaaag

SEQ ID NO: 1158 - DNA, 415 bp, Arabidopsis thaliana
  unsure at all n locations
  Clone ID: ARABL1-02-Q1-E1-G1
tttttttttttttttttttttgatcaaacagacaaaagagtgatagaataatcacattaggccattaaaaagcaaagtgccttgtctcttcaaaggngnagggngntgtttcttcaaaggcaaatttgcaaanctcatatcgagtaggagttttaagaacaatgactaacaataacaaaaagaaaaaanagttttggaagagttatggcaatacacaagagttctcntccctctactgtaatgacttttaaagagagatttgtgaagacaaaacanangatgagtcatgatggggttggttttcggtaaatgtttgagttgttgtgcaacnccaactacacaggtgtagtnnatgtcctgntggtancaaagntccangccccnttannnttgngacggattcaactcgaancgg

SEQ ID NO: 1159 - DNA, 409 bp, Arabidopsis thaliana
  unsure at all n locations
  Clone ID: ARABL1-02-Q1-E1-G4
nnnnnnnnnnnnnnnnnnnnnnnnnnnnnnnnnnnnnnnnnnnnnnnnnnnnnnnnnnnnnnagtcataataaagtctgaaaagaattataaccagggtaactgttattataacccgggtgatagtaactagacaaatgtataactgtacaacatttgtcgtttttggtatcatcgatagttttcgtagcttcttgtgacgttagatttacagagtctggttgaagatagcatcttgagcccctcagcggtggatacgcatcatgactggaacaaggttatagtggctatatgaccgttcttcatcacctcaaaagcaacattctgatagccatacacatatgtagatccaaaagggttgctcgttgaaccttgcgtctgaataactgctgggccanaatccccgaagt

SEQ ID NO: 1160 - DNA, 413 bp, Arabidopsis thaliana
  unsure at all n locations
  Clone ID: ARABL1-02-Q1-B1-F3
cgagttttcttcttcttcttcctcaggaacttaagtttctgagtccatgaagatgccagtggcattggtctggctactggcattcactattctactgatcagtggggaaggcaataatgccatctgcaaggagaattttaagttagaccctagacctcatagtgtttcgatcctcgagtttggagcggttggtgatgggaagacgctcaacactattgctttccagaacgctgttttctatctcaagtcttttgcggataaaggcggtgctcagctttatgttccaccagggaaatggctcaccggaagcttcaatctcacaagccatctcactctcctcctgggagaaaggagcaacaattcctgcatcaaccgggatncgtcgcantgggaacttggcaatcctctaacgt

SEQ ID NO: 1161 - DNA, 416 bp, Arabidopsis thaliana
  unsure at all n locations
  Clone ID: ARABL1-02-Q1-B1-F5
ctcgagaaaccatgtcttcgccgagcaagcgtagagaaatggatttgatgaaactgatgatgagtgactacaaggtggagatgatcaatgatggcatgcaagagttctttgtcgaattcagtggacccaaagacagtatatatgagggaggtgtgtggaagataagagttgaacttcctgatgcttatccttataaatctccatctgttggtttcattaccaaaatataccaccctaatgtcgatgaaatgtcaggttctgtttgtctagatgttattaaccaagacctgggagcccgatgttcgacctgggtgaatgtgttcgagacatttcttccgcaacttcttctgtatccgaatcccgtcagattcattgaatgggtgaacaactgcattgatgatgcttgatcgtcccna

SEQ ID NO: 1162 - DNA, 409 bp, Arabidopsis thaliana
  unsure at all n locations
  Clone ID: ARABL1-02-Q1-B1-F6
ctcgagagaaaattgagatccgaataactatggtgagactcaagacgagtctctgggttcttctccttgccctcgtttcaattcagttaaatggttcgtttggatctgaatcaagtaaagtagcttatgtcacacttttgtatggagatgagttcttattaggagttagggtattgggtaaatcgattcgtgacactggatccactaaggatatggtcgctttggtttctgatggtgtctcagactactctaagaagttactcaaggctgatggatggaaagtagagaagattagtttactggcaaatccaaatcaaggttcatccgactaagttccggggtgttatacaaagcttaagatcttaacatgactgattataagaaagttgtgtaccttgatgctgatacn

SEQ ID NO: 1163 - DNA, 414 bp, Arabidopsis thaliana
  unsure at all n locations
  Clone ID: ARABL1-02-Q1-B1-F1
ctcgagcttcgttgtgataggtcaggtcagggaacaacaatggcttcttctgcaacagcaccaaattcgctatctttcttctcatcttctctctttttatcctcctctcaccaaatccctaaaacctacatttccgtttcaaaactcggctccggcagagtctcgaagccgctttctgtctcttcccagctagcgactctaccgattctatcattcgaaggagagaaggtcggagagacgtatctagacctcaaagcggcgccggaggataccgcgcgtgcgttgtgcaccgaaccatcgtgacggacctgaataacaagcggcgaggtactggcttcaaaatgactcncggtgaaatttnttggtggtgggaattaaancntactcacagaagaaaaatgggcaacgcgangg

SEQ ID NO: 1164 - DNA, 422 bp, Arabidopsis thaliana
  unsure at all n locations
  Clone ID: ARABL1-02-Q1-B1-F9
cgagctttctagtctcttctctttactttggtcgtccacaatgaaaggaggcagcctctcgtttctcttcgttctcctaatcgccaccatcacttccgtcatttgcttcagtgacgggatgttaccaaacggcgactttgaactaggaccaaaaccatcggacatgaaaggaacgcaagtaataaacaagaaggcgattcctagctgggagctttcaggcttcgtcgaatacataaagtccggtcaaaaacaaggagacatgcttctcgtagtcccggccggaaagttcgcaatccggctaggcaacgaggnatcgattaaacaaaagacttaacgttacaaaaggaatgttttactcactggacgttcaagtngccgcaagggacatgttgcccaaagacgaaacggntcaaacatatcgg

SEQ ID NO: 1165 - DNA, 415 bp, Arabidopsis thaliana
  unsure at all n locations
  Clone ID: ARABL1-02-Q1-B1-G11
tcgagcaaaaattcaaacttttttctctttggaaaattctgaggcaaaaatgcggcgtaattgctgccatgtttcatttgcttcaaccctcaagatccttaattttgtccaagctttcattggtgtttcgatcattatctactccatatggatgctccatgaatacagccgtcaccttcccgtggacccgcctccgtcagcttcatcaagctccggaaccgagatcgctactaagtgtatctgagcccttgaagaatcctattgattttgtggcgaagtatcattctcgggtctaatggtggtgatnatgggtttaacctacgccccgttggaccttcctgctccaaggntcaactactccttcatgggcggttggtataatggtctgcaattggtaccttcaantgggttcaat

SEQ ID NO: 1166 - DNA, 413 bp, Arabidopsis thaliana
  unsure at all n locations
  Clone ID: ARABL1-02-Q1-B1-G4
gaggcggcactaccgttagagtttccagatggcaccacaccagtaacatgccgggtctctatatatgacaactcaagtgacaaaaaagttggtgtcggaaaattgatggatagagcttctgttcctcctctacctcctggcagtctgtatatggaagaagttcatgtcaagcctggcaaggaactatactttactgttggaggccagcatatgccttttggtgcatcaccacaggatgtatggactgaattaggtcgaccttgtgggatccacccaaagcaggtagatcaaatggttattcattctgcgtcagatnctcgaccaaaaacaactatctgtggtgattacttttacaactaatttactcgtggtttgggacatcctgtttgatggcnagactccacaaagttaaa

SEQ ID NO: 1167 - DNA, 170 bp, Arabidopsis thaliana
  Clone ID: ARABL1-02-Q1-B1-G5
ctcgaggaaagcttcagctctctgatttgtttttttctctcgtacgttctttgtttctctgtaactgttgtttcattttctttcaccgaatttcaccagtgagaatttcttccattttcgaaaaagaaataaaaatgaaattctgttttgggctaaaaaaaaaaaaaaaa

SEQ ID NO: 1168 - DNA, 423 bp, Arabidopsis thaliana
  unsure at all n locations
  Clone ID: ARABL1-02-Q1-B1-G9
ctcgagtggaattgtcaaggggacaatgacaaccacacactcctacaccggagaccaaaggcttctagatgcatcacacagggacctaaggcgtgcaagagccgcagcactgaacatagtgcctaccagcacaggagcagccaaggcggtgtcattagtgttgccgcagctgaagggtaaacttaacggcattgcactccgtgtgccaacaccaaacgtctcagtggttgaccttgttataaacgttgagaagaaaggtttgacagcagaggatgtgaacgaggcctttagaaaagccgctaatgggaccgatgaaaggcattttaaacgtttgcgatgcgcctcctgtctctgttgacttcangtgctccgatgtctcctaacaacaatngactcgtcccctcaactaatgggnttatgggt

SEQ ID NO: 1169 - DNA, 415 bp, Arabidopsis thaliana
  Clone ID: ARABL1-02-Q1-B1-H10
tcgagctcatcatcttgttataataacgatgatgggaggaatattttcgttattttgttttctttgtatatatatattaattaggttggagaactcattggtggaagccaaagggaagaacgatatgatgttatcaaacagaggatcgaggagatgggtctaccaatggagccatatgagtggtacctagacttgcgtcgttatggaacagtgaagcattgtggatttggacttggcttcgaacgtatgattcagttcgctacaggaattgataacatcagagatgttattcctttccctcgctatcctggaaaagctgatctctgattcctcctctagacacacaattctggtctgggtctcgacatgggtttagtttccttttaaattgggtaaaatgaaaaattgtaattgg

SEQ ID NO: 1170 - DNA, 430 bp, Arabidopsis thaliana
  unsure at all n locations
  Clone ID: ARABL1-02-Q1-B1-H4
tcgagtggaggtgaaccggaatgtagtcctgtggtttaccagattcaagataatctcaaacaacctgtcttcagctgcaaattcagctccgatcgtaacggaagatctcggtctctaccatcaggatttacatatagtagtagaggatggattacaagaacattatcaggtgaccagtgggaaaagaaacaagcgagagaacgtaaaggttggatgataacgatccatgatctttcgggatcacctgtagcagcaagcttcaatgatcactcctttcgtggcatctccagggtctgatcgtgtttcnagattaaaccctggtgcgtggctaaaccttaaggcctcaatgggacnttgtgtcaagttagtttgggaaaacgntggggactccttgaaggctttggcnttgagaagaaggagctaattgatt

SEQ ID NO: 1171 - DNA, 496 bp, Arabidopsis thaliana
  unsure at all n locations
  Clone ID: ARABL1-02-Q1-E1-A12
gtgttaccctgccgtncaactttaacgccnncaggtaccggtctagaattaattcccnggtcgacgagctcantagtcggcggccgcccttttttttttttttttttaccccataaagagagtgaatagaaggagccacttttttttccactgtaatttagaaaatgaagtgtntaaatgtccttcaanngtaagtaaataaatccgaaacatataaaatgcggttaatcccgctgttgaacaagctattattgcaaaaattggcgaaaataacaaactatcattaagaatttcatctttcgaccaaaaacaagcaaggggggggataccacaaagagagagtgttcctattaaaaagggcgtttttgtaatcgggacatgttttgtcaaaccacccataagaatcatattcctgacttttatcgggagaaatatccaactataacttccattggaatgaataatgggatccagattcctaaaaaacaacaaagct

SEQ ID NO: 1172 - DNA, 411 bp, Arabidopsis thaliana
  unsure at all n locations
  Clone ID: ARABL1-02-Q1-E1-A2
nnnnnnnnnnnnnnnnnnnnnnnnnnnnnnnnnnnnnnnnnnnnnnnnnnnaacaacagtgcgtgaacaaaaaatatattgaatccccctcttccgggttccntcttgtgttcactanttcanaaatgaatagatcaanataaatagtcgccatnatcatcagcaataaaagaatggnatcaaangtctcgangcancttcctaacttgctccaacgtaacgaaggagaacaacagtgaaaggaccttgcctacaaactgtaggaacaaagcctttataaagagccatggctccttccgctttaaccgtcttcaccgcacaatcccacgcgccgtcgtangctcccaccttcatattcatcactcncgtctttacacatccaccgggattagacgcaaccgaagcaaacaa

SEQ ID NO: 1173 - DNA, 412 bp, Arabidopsis thaliana
  unsure at all n locations
  Clone ID: ARABL1-02-Q1-E1-A3
nnnnnnnnnnnnnnnnnnnnnnnnnnnnnnnnnnnnnnnnnnnnnnnnnnnnnnnnnnnnnnggaaccaaacaatcacaagaaagtgggtcaaacangnaacanaaatgtcgactctgctatcataatagcaaagtgacataaaagccactctgaactcaaagctcacactaacacacaacctagaaaggcaatttatatatttgtggcgaaggaaaggccttccttagatagcacttcaaggntctcaacagaaggttgtgctcgtgcaagtttagcaattgcattgttctcttcaggacttccaccttctaaaaatgctccaaccactttccgttctttaatccaagtagctcccgaatttcggctttggcgaatccgggtcaatgtccccaaacaaaaagcctttncca

SEQ ID NO: 1174 - DNA, 492 bp, Arabidopsis thaliana
  unsure at all n locations
  Clone ID: ARABL1-02-Q1-E1-B10
ttaccctgccgtncaactttaacccgccaggtaccggtccaagaattaattcccgggtcgacgagctcactagtcggcggccgcccnnnnnnnnnnnnnnnnnnnnnnnnnnnnnnnnnnnnnnnnnnnnnnnnnnnnnnnnnnnnnnnnnnnnnnnnnngnnctctncagcattagcttatnngnactattcactantttgaattcactctcctattcagtcagtactcaggcatctattatctatatacaacttgaatctgtgattgagaaaaagaaagaagtagcaagtgaccattaatcataggtggcgatgaacggaatgaccatcaacatgaagacatcgtaagagagcgttgcgtagcctgtgtaaccagggtcgttctccctgaaattcnccggcaaacccctcaaaaatcaatccaaactccaaggaaactgtcnnaaacataaggtcaacaagttttgccaantcccatcatcaaacctgaa

SEQ ID NO: 1175 - DNA, 400 bp, Arabidopsis thaliana
  unsure at all n locations
  Clone ID: ARABL1-02-Q1-E1-C7
ttttttttttttttttttacgaagcnaccataaccaaataaangaggtaaatcaaagttctgacctgatcggtttggtttacgagagtgnggngagngnacttacttacttcctggagacataagcaaagtattgtgccatgggaactacaaaggcaattacaagtaatcctccaacgacaagactgaactgtcctcgcttctcatcggtttcttcnttcgtcttgaaatttgattctctcttgctatcctttacggttggacccccgggatctggttgaccgtctatagctgcaancanncttttcgcactgctatataccgcctcngttgtatttttccgtcngttgctantacggggaagaatttcggaaanggtancatcaanaatgttttcacca

SEQ ID NO: 1176 - DNA, 437 bp, Arabidopsis thaliana
  unsure at all n locations
  Clone ID: ARABL1-01-Q1-E1-D5
nnnnnnnnnnnnnnnnnnnnnnnnangacaaaagaatcaataaacaaattttgaagcacatccctcccaatcgtctcatactaaannatcccagacaccagnaatttgtttcttnnnnnnnnnnnnnnnnnnnnnnnnnnnnnnnnnnnnnnnnnnnnnnnnnnnnttanccttagtgcagcaacccaaaaaaaagacaacctaagtaggaggggtggttcggatatttaagacattacccttcttcaggtaaacaaaaggcctcttcttgttttctttcccaacccaacactttttaccttactaactcctgaaagattactgttgctgcttcttccgttgantcntcncgggtnactggncaangctttggtcctggggcanancaataaanctgttaannaananaccntttccggggnaaaacaaggactttg

SEQ ID NO: 1177 - DNA, 426 bp, Arabidopsis thaliana
  unsure at all n locations
  Clone ID: ARABL1-01-Q1-E1-F1
tcggnggccgcccttttttttttttttttttgaataagataatttcgatttcgactgtataaatgattaacaaagattaattaaattaattaattataaatccctcaaaaangntctaaaccatacaaaactccggcgtgtttctccgccccatcctcaacgaaatacaaatccctcatcctctgaaacgcctgccacgtcagcaaactatccgaaccggcttgatgacatttccaaccgcccggttaaacttcaagagaaccgagcaacccggtcaaaaccaaccaattacaatcctcctggctcaacaaaaacctcataatangtttcaacaatcaataaaaccctaatcaaccgaaanaaaagctcctaagcaaacctnaaaaaactnaacgccaanggcaaccgggaaagcngccgggggcc

SEQ ID NO: 1178 - DNA, 420 bp, Arabidopsis thaliana
  unsure at all n locations
  Clone ID: ARABL1-01-Q1-E1-F2
ttttttttttttttttttaataatttgataatcatatcatattatcatcttaagcattcaatgctacaaagataatacccccaagctattttagattaggagctgannacagagacacaatactaacgataaaagttcgtagtatctttatgcaaccatacatacatatacacaaagatagacaggtagtgtcctaataattctacttgggtgaggtatgaacagcagcaacagtagataccattgtatccataccacacatattatgaggccctctgcaaattttgtaagtaaccatgctctccccacatcgctccccacgaattcttgaaaaatccaataaaggnttccccttaaaaccggttggggcaataaccccgatgaaacaaatccaaacaaagaacaactccaanggccttg

SEQ ID NO: 1179 - DNA, 417 bp, Arabidopsis thaliana
  unsure at all n locations
  Clone ID: ARABL1-01-Q1-E1-F8
ttttttttttttttttttagcgaataatcattcaatactcattaatatttttccttacaaaaacaaaaatcagtaattttcctttnactcnggtcttgtaaatgttatctaccggtatatttcacttcagtacttttcttttacaaaaattataactatgaccccatcttcctataattgaagtatggaaccctattgtcaataacaacccaaatcatcatcatttgactctgttcttaactctcattctgatgctgcttaagcaaataagcctcatcgtgttcttcagctccaaaacacttcacttcgatctcancttcctcttcantggagttgttgcatctctgactcgatnaaggnttgcanttttggcnccgnctcgggccccccgggtatgtgnaaaaataaggaaccagt

SEQ ID NO: 1180 - DNA, 490 bp, Arabidopsis thaliana
  unsure at all n locations
  Clone ID: ARABL1-01-Q1-E1-G12
gtttagcnggccggtacaggtttaaaacngcctggccggtcgaanagctcaatacncggcggccgcccttttttttttttttttttacatggaaccatacaataaaacattacataagaaaaatatctctctccaacgatatgtatggaagataataaagcaaannggtctaaannaagangnaataaacaagtgtaatatgatgaactcgaagaagactataatagcattgactcttgactagcaatcaaaagtcaacgtcacacttggtcggctgaaaaacaaacccgctggttgaattaagaggtaagaggaaccttgagatcgcacttgatcttgggcttgaacctccacgacttgatcaacccaaacttaaacctaatcttaagtctcancttggcatcgattctatagatctgagaattcacatcntcgtttcaaatccttcctctctccgccgtcaagcagcancaaattgctgtcccacgaa

SEQ ID NO: 1181 - DNA, 432 bp, Arabidopsis thaliana
  unsure at all n locations
  Clone ID: ARABL1-01-Q1-E1-D4
nnnnnnnnnnnnnnnnnnnnnnnnnnnnnnnnnnnnnnnnnagagaagctaattgtaatattaccgaacagtaaaaatattacaagacactgaagacgnnncnccaccgttaaaagctaaaaactaacccagatggtggaaatcaacggtcactaacaaacacaaacgacatgaagcaaataaaagattgcacatatagccaaaatagacgaaacagaacataaacacgtggcgtaaagaacataattattttacatcattctcatgtcactctaccctctcggctcaacggtgcttgctcctantgtcgtcgctgtatagccaatcgtanacggtggganagtttgggtgaagaagggttgtccaaaaagtttgtgcccaatcctctantgggcgaagttacttcctggaatgaaacaaacttccccanaa

SEQ ID NO: 1182 - DNA, 344 bp, Arabidopsis thaliana
  unsure at all n locations
  Clone ID: ARABL1-01-Q1-E1-G7
nnnnnnnnnnnnnnnnnnnnnnnnnnnnnnnnnnnnnnnnnnnnnnnnnnnnnnnnnnnnnnnnaatccaccacctaaaccattgttaggangagtaangaagcctcttaattgtctatttcagctacagaacaaatgctatttgtttagttgggttctccatacaaaagttgaaaaccactgttctctactttgcaataatagacttcatcaccgactagctttcacagaaactttcaccatatccagacccccaagatgataatccaaggaagtanntgctgctcaaaacaaacggaaatggnacctctgccttgccatatccttggggtgacaaanaaaga

SEQ ID NO: 1183 - DNA, 436 bp, Arabidopsis thaliana
  unsure at all n locations
  Clone ID: ARABL1-01-Q1-E1-H6
tttttttttttttttttttgacttgaagatagaattaagtctcctgaaacagtacgaactactgacaaaggttctcatatttgtgnnaaatngngagttttcacaaagctatatcacataaaccattcaaaatcactgcttataacagaattcactaccgagcaagcttctcacttcttagactttttcgcaggtacctcancggtttgtgcaggtggtgcagcggnangtangtctcctccaggacccttggcaagacgctcctctcgtcgagcatgtntcctctctcggctagccttgttctnaaccctcttancctcaaactgggtcanacaatgtcntctctccaaccttctcaacccttgggatttggngaatacntttcaatcnggaanaagccttgntcnntgaaaaacgtttcccngtggactttaaa

SEQ ID NO: 1184 - DNA, 410 bp, Arabidopsis thaliana
  unsure at all n locations
  Clone ID: ARABL1-01-Q1-E1-H8
nnnnnnnnnnnnnnnnnnnnnnnnnnnnnnnnnnnnnnnnnnnnnnnnnnnnnnnnnnnnnnnnnnnnnnnnnnnnnnntaaattatgaaaggatccantgacggttccaaatcattccaatcaaacaaaaancagagtttaaacgataacaaagcaaaggaatgaaacagagtttaaacgataacacagagtacgtanttgtttttccgctaaatcggcgaattcaggaacaagagatnttaagcacgttttaaaactaccatgaangataacaaccanagctaatccaaacagagaacgagggtcattgaacaacgtctgcttcttgtcttttccatcttcngtaactggattctaacccaannaagtcnccaaantaggaanataaattttccanccaacggaaaaa

SEQ ID NO: 1185 - DNA, 403 bp, Arabidopsis thaliana
  unsure at all n locations
  Clone ID: ARABL1-019-Q1-B1-A1
tcatatattactactttttcacctacaatatcattggagatgtggagtctatggcctttaatgatggaagcactcgtggattgggctattgactttttcccaaatatattggtcccgttgcacaactatatatccagggggactgggcattatcttacttgcaaggaaccagattaccagcaaaatctttggaatgtgatatctgtgcttatggcgaataaaaatattgatgacagtgacctcgagccagctccgaagctattagggatagtgcttcagacatgcaagggccaangtggatcaatgggtagaaccctacctgagaatcacacttgatcggctacgcggtgctgaaaaatctccttcaagtgccttctggntgaaantggtgcaaatgcctttt

SEQ ID NO: 1186 - DNA, 428 bp, Arabidopsis thaliana
  unsure at all n locations
  Clone ID: ARABL1-019-Q1-B1-A11
tccttccttgttgtcatcgtcttcctcagtctctcaatttcttcccagattccccaacgcgactagattcaatgtaactccacggagcagagccgccaccgtcgtcgcggcatccgtcaccgacctagccggggtcgacagtacaacaatcgccgtactcggtggaggatccgtagcagcactcgcggcgatggtttccttaacggatccggagaggaggcggaaattgcaggcggaggaagttggcggaggcgataaggaggttgtgagggagtatttcaatagcacggggttcgagaggtggaggaagatctacggtgagactgatgaagtgaatccagtacagaaggatattcgactcggtcatgctaagacngtggagaacacgatgcctatgccgactgaagataaattcttgggnggtgtca

SEQ ID NO: 1187 - DNA, 438 bp, Arabidopsis thaliana
  unsure at all n locations
  Clone ID: ARABL1-019-Q1-B1-A9
ctttgccagggaactcgggcatctcgaggtcggcgagtttagtttcttcaaccctgcaaagatgggtcaggcctttttcagctgaaactggagataccgtggaagcagttgtgcctcatatgggggaatcaattactgatggcaccttggccacctttctgaagaaacctggtgagagagtccaggctgatgaggctattgcacaaattgaaactgataaggtgacaatagatattgctagcccagcaagtggtgtaatccaagagtttctagtcaacgaaggagatactgtagaaccaggaaccaaggtcgctattatatcaaagtctgaggatactgcatctcaggttaccccctctcagaagataccagagacaactgataccaaaccttctcctcctgctgaagataaacanaaacccacagtggaaantgctc

SEQ ID NO: 1188 - DNA, 416 bp, Arabidopsis thaliana
  unsure at all n locations
  Clone ID: ARABL1-019-Q1-B1-B1
catcaaatcatgagtgggcaanagaatcatgatcatggccggatctcttctacgcccgccgccgcgtcggagccttccaaggctgctgctcannnnnnnnnnnnnnnnnnnnnnnnnnnnnnnnnnnnnnnnnnnnnnnnnnnnnnnnnnnnnnnnnnnnnnnncaccggtgccgccgcaaccaccatgccagcggaatccaatccttacgtttctccttcccctgccccaaggaatacnatggattcggtgaaggatacgttanggaaatgggggaaaatggctgccgacgccaccaagaaggcggaggatntcgccggaaatttttggcagcacttgaaaacaggcccaagtgtancagatgctgctgtttcacgaattgctcangggacaaaaatacttgcaganggtggata

SEQ ID NO: 1189 - DNA, 444 bp, Arabidopsis thaliana
  unsure at all n locations
  Clone ID: ARABL1-019-Q1-B1-B10
ttacgttattgtagcttacattttcgcgccttctctggccttctgtaacgcttatggagctggacttacagacattaacatggcttataactacggcaaaattggtctttttgtcatcgcggctgtgacgggaagagagaacggagttgtagccggactcgccggttgtggactgatcaaatccgttgtttcggtttcttgtattttgatgcaagatttcaagacggctcattacacgatgacgtcacctaaggctatgtttgctagccaaatgattggaacggtcgttggatgcatcgtgacgccgttaagtttccttttgttctacaaagcgttcgacattggaaaacctaacggagaaatcaangntccctaancttgaattacaanaaatatggcaatccttgggtcaaagnnttcctggccngcctcttaaagtctcca

SEQ ID NO: 1190 - DNA, 439 bp, Arabidopsis thaliana
  unsure at all n locations
  Clone ID: ARABL1-019-Q1-B1-B12
caaaccaaacaaggaanaagaaaagaaanacaaccatcaacaacaatgngcgagtgaanaagaaagtttcatggagatnactaatcgttggatgtttaggagatcnagaagnccctaatggcatcttcaaaganacctaanagaaganatgacgtcatcaagaaacagagctcttttcaaaggactatcgatacttgatgatgagcaatccaagttccaacactttgtcagaagatctatcgatttctttggccggatcagatcttcatgtgtttaccctagcggagcttanagtcattanacagagcttttcatcgaccaanttttcgacgtgaaagtgggtttggtcctgtncataanggtttcattgatgataagctacgtcctgggcctaaagctcaacctgttgcngttaaattgcctgatttgaaagncttca

SEQ ID NO: 1191 - DNA, 423 bp, Arabidopsis thaliana
  unsure at all n locations
  Clone ID: ARABL1-019-Q1-B1-B4
agagaaacgtgaaggggaagatggtatcagtgtcattatctcatcataatctctggccaccggaatctggatctacggcgtttcgtggtttcgcaaccgccgcttccgtacacgcctgccaccatgttagccgtcacctccgccttgatttccatcttcgctcttcccttaagaaactgcagcatttttctgatgatgcaagaatgaagtttgcaagataccaaagagtatttgtattcaatggggctaattttctcaagtctagagttgatatccggttgtcccaatcttcgccatttgtatgtttctttaatggtggagagagtanattaaaccctananggtggtgaggaaggatcatcgaacccggagacttccaagagaaacacanttaacggacggagatggaccaatgtccttcct

SEQ ID NO: 1192 - DNA, 135 bp, Arabidopsis thaliana
  unsure at all n locations
  Clone ID: ARABL1-01-Q1-B2-F5
ctcgaggttcttgcgacgtgtgtttgattggatttttcaatcgtttcgtgttcctttgattgtcaaataaactttgatttggtgnnnnnnnnnnnnnnnnnnnnnnnnnnnnnnnnnnnnnnnnnnnnnnnnnnn

SEQ ID NO: 1193 - DNA, 413 bp, Arabidopsis thaliana
  Clone ID: ARABL1-01-Q1-B2-F8
ctcgagatccccctctgttcgatcccgccgcggtgagaagcgatgaagtcggagactttaacattagttctggtgtatctcgccggaatcatggagagagccgatgagtctctgcttccaggagtttacaaagaagttggagatgctctacacgtggatcccacagctcttggaacattaactctgttccgctctattgttcagtcttcttgttaccctttagccgcttacttgtcttctagacataaccgagctcacgtcatcgctctcggtgctttcctctgggccactgccactttcctcgtcgccgtctccactactttcttccaggtgggcagtatcaagaaggcttgaacgggatagggctaaccattgtgacacccgcgattcagtccctaatcgctggactcaac

SEQ ID NO: 1194 - DNA, 418 bp, Arabidopsis thaliana
  unsure at all n locations
  Clone ID: ARABL1-01-Q1-B2-G3
tcgaggttacgatttccgtcaaagcaataggatcgatctacttatactaggtctgaagaagaagctggaaactgcatataaacgttcaggggggagaaaagtcactatcatctcccattcaatgggaggacttatggtttcatgtttcatgtatctccatccggaggcattttccaagtatgtaaataaatggattacaattgcaacacctttccaaggagcaccagggtgcatcaatgattcaatcttgactggagtgcaatttgtggaagggttagaaagtttcttttttgtgtcacgttggacgatgcaccaactgttggtcgaatgcccatctatatatgagatgatggcaaatccaagactttaagtggaaaaagcaaccanagantccaattttggcgtaagaaatcctgaa

SEQ ID NO: 1195 - DNA, 409 bp, Arabidopsis thaliana
  unsure at all n locations
  Clone ID: ARABL1-01-Q1-B2-H4
gcttgttcacaaaaagattacttttcttattggtcctgaagtctctgctcattttttcaaagcttctgaatctgatcttagtcagcaggaagtgtatcagttcaatgtccctacttttggtcctggagttgttttcgatgttgattattctgttcgtcaggagcagtttcggttcttcactgaggcacttagagttaacaagttgaagggttatgtggatatgatggttactgaagctgaggattacttctctaaatggggagagagtggtgaagttgatattaaggttgagctagagaggctcatcatcttgactgcaagtagatgtttactgggtcnagaagttcgtgatcagctttttgatgatgtctctgctttgttccatgaccttgacaatggaatgcntcca

SEQ ID NO: 1196 - DNA, 416 bp, Arabidopsis thaliana
  unsure at all n locations
  Clone ID: ARABL1-01-Q1-B2-F1
ctcgagcaacgaagaagaagacctaaaagatcgggacttgaaactatgatcaaatcagaagcagatctctccgatgtgatcgtgattcgtgacgtttgggcttataatctcgagtcagagtttgacctaatcagaggaatcgtcgaagattacccattcatctcaatggatacagaatttcccggcgtgatttacaaggcggatctcgacgttctccgccgtggaaaccctaattatctctacaatcttctcaaatccaacgttgacgctttaagtttgatccaagtcggtcttactctctccgacgccgacggaaacctcccagatctcggcggtcaaaaaaaccgtcgatacatctgggaattcaatttccgttactcgaanttgaacgtgattcaaaagctccctgatccatt

SEQ ID NO: 1197 - DNA, 415 bp, Arabidopsis thaliana
  unsure at all n locations
  Clone ID: ARABL1-01-Q1-B2-H8
tcgagcatttctccaaaatctccgagttctacaattgtgtgatcaatcaatcttctccgatttcaagcttctcgatcaaaagaatcatcatgggaggaggaagagctatggcgacggcggcgaaggttgctggaatcggagttggtaaaggaggattcaagggatttggatttcctccggcgactgagcagtttcgtgttaaaaccgcggcggctgcggcgtcgtctaaaccggtttcggcttcgattacatcggcggttcatccttctgttgaagaagatgggatgattatgcagagaccggtttgggatgattgggaatttgctgaagaagaaccgattcctanggttgtttttagcaaacctcctaatcttgaagaanctaaagaagctactgaagatcttaaagaagcaat

SEQ ID NO: 1198 - DNA, 421 bp, Arabidopsis thaliana
  unsure at all n locations
  Clone ID: ARABL1-01-Q1-E1-A11
nnnnnnnnnnnnnnnnnnnnnnnnnnnnnnnnnnnnnnnnnnnaagaatcccaaatgggcttatggaagatgggccaaacgacaaatacacggttacnaaatgaaagaagcccaaaacaaacccagcgaaaacaagatcagaaccgtgcggtacaccggaaacacgaacatcgccttctagaaccgacgctagcaaggacgactcctatgtggctacgacctcgacatcaaacttttggcttgagctagcgaaccccgccgcaaatcaacgccaagaacaagcctaacctggaacaatcctttcggaaaangggagaancgccacaaccgagacccaatccctcctctcccaaacctaacaagacgaaggattcnaaaacttacccccatctccaactgatgcccaacccaaggggcctct

SEQ ID NO: 1199 - DNA, 414 bp, Arabidopsis thaliana
  unsure at all n locations
  Clone ID: ARABL1-01-Q1-E1-B10
nnnnnnnnnnnnnnnnnnnnnnnnnnngggaacaaacaattagaatttaatttggaagtttgaatgtaaagttacaagtacatatcaagatnggttccntagtaaacaatgatgataacaaataactacgctcatttgccagggagccaaatactgcatcagcttcagaattttcttagctcttccaaggtcaagtttctggacttgacgcatcaagaatgggttgtgaaaacgattcctcgtagcttaggtagacacatagtcatggcttcaacgtatcacagctagtttcattaacttctgcagactcatccagtttgttaatgggctgggaaaacgattgcaagagagttttttgtgcaggtaactcggcaatgaaaagcaatgtttgagcccaaccagcatattcaccaa

SEQ ID NO: 1200 - DNA, 450 bp, Arabidopsis thaliana
  unsure at all n locations
  Clone ID: ARABL1-01-Q1-E1-B2
nnnnnnnnnnnnnnnnnnnnnnnnngataaaaaggctcattaaacggcccagactcaatttaactttcatatattgggccataaactgatacngtgttagggtgggctcattgctaatgagcattgtacggttttgctcaatagaacgcattttatttacaagcaagaagcagagataaatagagagagtcagcagcgcaaagagactcgctcatacaaatcaccangagtaattaaaacttatttgacgagatgctaaatngggcggtgggtttaagaacggtgcttcaacaattggagaacaatacctggncancnaccacaaatntttacggncctttncnaaatttgttagaaaaacaattttcaacccnaantctccncccaacaatttcttgaatgatcaattaaggcttcccccttnaacccaacccggagcgttaaacctnc

SEQ ID NO: 1201 - DNA, 433 bp, Arabidopsis thaliana
  unsure at all n locations
  Clone ID: ARABL1-01-Q1-E1-B3
ttttttttttttttttttaaggaaaaatccaaatattagtttcatctctaaacaaagtcaccatcgatttagtattctaaaacgccaacatnnggagttgcaaangcatatatttctctggaagatgatcatttcttcttctttggttcttcttctgcatagttcttgattagtgcttctacntctttccagaataaaccctcaacaagaactccatctttcgtgaaccattgggtgacacttttgggtgagctgaactgacttcccagctgagattgatttggatnaacactgtccatggtgaagaagtgtacctgatnaaaaaatccggggcaacttttgaagataccaccaaaccaagtgctgggtgaaatgattcctcaaggaggataaggtgaanaaaaatccnaatcctcnccctaagggtacaaaa

SEQ ID NO: 1202 - DNA, 492 bp, Arabidopsis thaliana
  unsure at all n locations
  Clone ID: ARABL1-01-Q1-E1-C3
aactgtttanaccgctcgtangcntccnnaattannncgcgggtcgaccagctcantagtcggaggccgcccttttttttttttttttctttatacctcccaaccaataaatgtatataatatagacaaacaatgaaacaaacaccaccaacaacaaaaaagtannactttgngagtncttttagactaaacatagatcacaacactggtacggagattgagattgatatcggaactgagacatccgttgtaaaaccaccgtctctattcccatttgtattccctacaaacccgtaaacgccagaccgcatcgctgcattttcccgcctctgaaaaacccgagcaagcgaagccgctttccgtctaacccgctttgtccccgtaaacaaaagcgtctgtancaacccccgcaatcgcaggtgctctcaaaactttctccgccanagcanctccacaatncctacaaagctcgagcaacggcagcacangatt

SEQ ID NO: 1203 - DNA, 410 bp, Arabidopsis thaliana
  unsure at all n locations
  Clone ID: ARABL1-01-Q1-E1-C6
tttttttttttttttatcataaagcttcttaaatatttcacacacatacaaagtaatttacaagatatgaaatctgcatcacatttccaagaggnaacanaccggatacacacaactcgatcacaaattaaactcactttccggggacgaagttggtancgaaggcccatgcattgttgttgactggatcagccaagtggtccgcgaggttctccaacggtccctttccggtgacaatggcctgaacgaagaatccaaacatagagaacatanccaaccttccgttcttgagctccttcagcttcaactccgccaaagcctcggggtcagtaacnaagcccaatgggtcnaaactcccaccttggtaaaacaaatcctccngcntcccccaaatgggccatctccgggna

SEQ ID NO: 1204 - DNA, 431 bp, Arabidopsis thaliana
  unsure at all n locations
  Clone ID: ARABL1-01-Q1-E1-C7
ttttttttttttttttgtgagaattatgaacattataacatcaaaaatccaaattcagaaacattactatccacaaattagaggccaagatanncaacaggagttatttaacttggtttgacatctatactgaaaccaaaacataacccgaatcatccaaccgttcttccacgggaagccggtttacataaacataccatgataccaacatcctccacttgaaagaacacggttggaacttaacttttgttgttcaccacataaaacctaacataaccaatcaatacaataaacnaccggaatatacttttaagaanttgaatttacctcctcggtcntcaatccaccaaanaataccannagatngagccnataaanccgggtgttccgccggaantaactncnnnggantttaacagggcggggnttca

SEQ ID NO: 1205 - DNA, 480 bp, Arabidopsis thaliana
  unsure at all n locations
  Clone ID: ARABL1-01-Q1-E1-D10
gtaccctgcnggtaccggtttanaatggctcncgggtcnnaagagctcactanccggcggccgcccnnnnnnnnnnnnnnnnnnnnnnnnnnnnnnnnnnnnnnnnnnnnnnnnnnnnnnnnnnacaaaaggngccaaattttctttaaaataacgnggttanngcattacatgacangagtagaagctaaaagccaccacatcattacatgacaccagtagaagctaaaagccaccacatcaggaggaagagaaggtatcgataatggtggtgtgaantgggtcactaaggtgagtcncccagttgttgagcggtcctttaccggttgcanccgcctgaaccgcaaaacccaagaatccaaccatggctaaacgagcatgtttgatctcagctagctgaagctgagccttcttcaccgggtcagacgctaatcctaacgggtcaaagaacttgcctcctggaaacaaacgcctctccga

SEQ ID NO: 1206 - DNA, 414 bp, Arabidopsis thaliana
  unsure at all n locations
  Clone ID: ARABL1-01-Q1-E1-D11
ttttttttttttttttttgagggaaattactttcaattttattgaacctgattcgccaaaagaatattacaacaatggcgatcagatcaagatcaagatcagttgtataaatcnnctctatacattattaataaatgcttgagagactaaatgaaaatgagaatttacagattcctcttttgaaaaatcaaaaagnnnnnnnnnnnnnnnnnnnnnnnnnnnnnnnnnnnnnnnnnnnnnnnnnnnnnnnnnnngtgtattancaatggtaagtgtctttaccagaggatgttgttgctgcttgtcttgtttcanacacagagantcttcnanatttccctgttgatntttccaatacctcatcngtctccnaagctgtgttgtccntangtgaanactcccattgggtgatca

SEQ ID NO: 1207 - DNA, 438 bp, Arabidopsis thaliana
  unsure at all n locations
  Clone ID: ARABL1-01-Q1-E1-D3
tttttttttttttttggagctaaacnaaaaataagatttcaaagatttaagggcaaaaatgaaatgaaatgataactataattatagagaaacngataggnataacattttcactttcaaacaatagttcctcaactgttaagtcggcaaataatttcttaaatttgcattgaccacatanaaatgggttccaaaataatcaacgctgaatattccagaaaggggattaancttcggtgaaacttgggggcttgtaagcaatgaaactgatncattggacttnacgggtgttgtcnaatccgatgattctaattaangcgccaaggtactccttcctgcaatcctcaaacttccttcaaaacttgancggaattcggtgcatccgaaacaattggaacctccacattgtcaagtatccgccaaccaaaataanccggg

SEQ ID NO: 1208 - DNA, 419 bp, Arabidopsis thaliana
  unsure at all n locations
  Clone ID: ARABL1-01-Q1-B2-A5
ctcgaggcaaagcaaaattcgaagagacacaaaaaaaccttcgtttgtgtctcagaatttacaaagttttgagtcagtagagaaatggcgggaatcgtgacagagccgtggtcagtagctgagaacggaaacccaagcataacggcgaaaggatcgagcagagaactaagacttggaagaaccgctcacaacatgtcttcttcttctttgaggaaaaaatcagacctccgagtgattcagaaggttccatacaaaggtcttaaagattttctctctaatctccaagaagtcattctcggaacaaagcttgccattctttttccggccattcctgccgccattatttgcacctattgtggcgtcagtcanccttggntatttggacttagcttgcnangactgacacctttggctgancg

SEQ ID NO: 1209 - DNA, 409 bp, Arabidopsis thaliana
  unsure at all n locations
  Clone ID: ARABL1-01-Q1-B2-A8
cgagcggcgattattttccccgtcgatgcaattgctcctccaccggtcagatctagctcttataagacaattcgccggatccgtaaaaagcgacgaaccaggcgagtttcgtttggtggagatggagatgacgcaggagattttggtcgttttctgttagaaggtgatttcggtggtagcgacggtccatttggatttnnnnnnnnnnnnnnnnnnnnnnnnnnnnnnnnnnnnnnnnnnnnnnnnnnnnnnnnnnnnnnnnngagggataattgggatgggtcttcgttttcgtcttggtcagatccagcgatggaatttgtgtatgaagtgatttgctggatcgcgttgtctaattgtgtgcactttgcgttcaagaggatantgaggatctgaccgacggtgaaag

SEQ ID NO: 1210 - DNA, 412 bp, Arabidopsis thaliana
  unsure at all n locations
  Clone ID: ARABL1-01-Q1-B2-B5
ctcgagcttaatcggcttatcggatccgaatccggacccgaaagcctgaaaacccgacgattaattgcacgatgtccgatgctccgtcgtcttccccggatgccacggcgtcgcactggtgctatcactgcaacaaacgcgtcgtcgttgaaaccttagatgactttgtcgtgtgctgcgaatgtaacaaaggtttcgtcgagtcaattcaaccgactcccgccgcttattcatcgccggcgccaccgcagccactttccccagatctgaatgtagaagactccagtattggctcgcatttcctccaagatgctccgcttgttagcccacgcgccttctcancgttcaccaccacgacaccttgatgttttatcttacgaagatgatttcttcaggttgggagctcaatant

SEQ ID NO: 1211 - DNA, 378 bp, Arabidopsis thaliana
  unsure at all n locations
  Clone ID: ARABL1-01-Q1-B2-A1
cgagctcaaatttggttgttttcactcaatttcaatcttgctttctgattcagattctgggttttcttcagaattcccagagaagttgttggaattgaatttttcacttttttgttcataaaagttctagtctttttagatgaacatgganaaggaaacagagcaaaccctaaattacttacctttgggtcagagcgatccctttggcaatggcaatgaaggaacaattggagatttccttggaagatactgcaacaaccctcaggagatttcaccgttaactctacaatccttctctctgaattctcaagatccccgagaatttcccaatctctggngggaatcagattcccctccatatccanggtcaatttggga

SEQ ID NO: 1212 - DNA, 405 bp, Arabidopsis thaliana
  unsure at all n locations
  Clone ID: ARABL1-01-Q1-B2-B6
tcgagaaaaatttcataattcaaagagtgttccttggagagaaaagtttcatcctttcaacagatctgaagagggtcaattgaaattcgttttcacgattcatccgccatttttccggggaaaaaacaaaaggtgagatcaaagaggaaaaatggcgcatagggtagaacaggattatgattatttgttcaagatcgtgttgattggtgattctggtgtcgggaaaacaaacatcttgtctagattcacaaggaatgagttttgtttggaatctaagtccactattggtgttgaattcgccaccagaactcttcaggttgaaggaaagactgttaangcccagatatgggacactgcaagtcaagagcggtacaagagctatcacaagtgcttattacagaggan

SEQ ID NO: 1213 - DNA, 421 bp, Arabidopsis thaliana
  unsure at all n locations
  Clone ID: ARABL1-01-Q1-B2-B7
ctcgaggaatccacattgtcggtaccttgatggtcttggaccctcaggaaatgattccagtgcacagaacgattggcatggagcgtggtggcacagcagcttcaccactctatcaggttatgtagaggaagacagcccttacacgccagatggcaagaaaggaacttactattttgagttttcaaggcccttgaggacaatggaccgtctccaacaggatgttcagttcacgcttggctcgccggccaaaatgtccgtcgcattctggtacccagtggacaacaaaccatggcatggatcaggacactacacgatnaactgcgattggacaccggctagatatctcctcggggtcntcttcgggtcccacggcttcaactgtcaagggctcctancgaatgggggccaaccattacagcca

SEQ ID NO: 1214 - DNA, 419 bp, Arabidopsis thaliana
  unsure at all n locations
  Clone ID: ARABL1-01-Q1-B2-C1
cgaggtgggagtggacggaaagatgtctgcgacaacaacaccatctctatctctttcaaatttcagaccaagattccaaactccagttaaaggccaccatatatctccactctcttggtctgtttcaagaagaaagatcttgtcttttagggttcttcgtcttcaccaagaaaaaacccaactatggagagtctctgcaactccggaagaaatttcccaagagatcgtttcttctgattcatcttcttcttctggagcagttgtgtctagtggtggacaagatggtgttgctttgattatacaagtgcttctctttgttgcatttcttgctctcaaggttcctcaacattggtgttgtgtacaatggagtgactggagtttccttgggaanaaggaagagagaagaagtttgagaaaga

SEQ ID NO: 1215 - DNA, 416 bp, Arabidopsis thaliana
  unsure at all n locations
  Clone ID: ARABL1-01-Q1-B2-C2
tcgaggaagaaagtttcaagaactcacctaaaacacaaacaaaggaactccactttttttccacaccacatcacaccatgtttagagccatgagcacaaggaaaatccatggtggctacgaaaagctcggcgatgaagaagcgagactgaagagggtctctagcgttccggctagtgtttatggtcattcaagaaacccggttcaagaagtgaagaagacaccgacagcgaaaccaaccggtggttctgttcatcctttgtttagtttctttgacgttcattttcaaagaaagaagaagaatacggcgaagaagaagagtttagcaacggcgaaaccagagtttgctaggtatatggagtatgtgagagaaggangtgtgtgggattcgagttctaacgcaccagtgattcattac

SEQ ID NO: 1216 - DNA, 414 bp, Arabidopsis thaliana
  unsure at all n locations
  Clone ID: ARABL1-01-Q1-B2-C3
cgagctgagagcaagagaaaaccctttccatggcctcagcggcgatattctcatcgttacgacggaggagatcgccgtctttggaagcattcttagcccccgttgacctttccggcgtcgcacttgttcaaaccctagcttcaatctcttcggaggttgtttcttgtttcacctctgttcgattctcgtttcaacgcaagaacgctcgttctttgattcgtaagatcgagatctttgtcgtattattcgaatttctcgtagattcaaattggggctnnnnnnnnnnnnnnnnnnnnnnnnnnnnnnnnnnnnnnnnntctgtttctgaatcaacagctttgctttgtctcaaagagctttatcttcttctctatcgttccaagattcttgttgattactgcgctcaatctaata

SEQ ID NO: 1217 - DNA, 412 bp, Arabidopsis thaliana
  unsure at all n locations
  Clone ID: ARABL1-01-Q1-B2-C7
cgagcgaagacgaagatacaagcgtcgatcgatggggagaaaacgcagagttaaatcggagtcgtctccgttcgattcatttccggaagattgcatctcctacataatctcttttacaaatccacgcgatgcgtgcgtcgctgctacggtttcgaaaacgtttgaatcgacggtgaagtcagatattatatgggagaagtttcttccggcggattatgaatctctgattcctccatcgcgagttttctcatcgaagaaggagctctatttctctctctgtaacgatcctgttctattcgacgatgacaaaaagagcgtatggttagagaaagcgagtgggaagaggtgtctgatgttatctgcgatgaacctctcaatcatatggggagataatcctcantattggcaatgg

SEQ ID NO: 1218 - DNA, 411 bp, Arabidopsis thaliana
  Clone ID: ARABL1-01-Q1-B2-C8
ctcgagcgacgatgtaagcaacgatgactcctctccacatggctctcgttggatactacattttcgggaacggagtcgaagataatattctcatgtcacttaagaaaccggcgtggttaatcgccacggcgaacatcttcgtcgtgatccatgtcattggtagttaccagatatatgcaatgccggtatttgatatgatggagactttattggtcaagaagctaaatttcagaccaaccacaactcttcggttctttgtccgtaatttctacgttgctgcaactatgtttgttggtatgacgtttccgttcttcggtgggcttttggcgttctttggtggattcgcgtttgccccaaccacatacttcctcccttgcgtcatttggttagccatctacaaacccaagaaat

SEQ ID NO: 1219 - DNA, 416 bp, Arabidopsis thaliana
  unsure at all n locations
  Clone ID: ARABL1-01-Q1-B2-D5
ctcgaggaaaaaagttataattccacttttgtccttttagagagagaaaaaggccaaggcgtttttcttctctcgttcctccattttctacagagagatatatcaaaaattccattttctnnnnnnnnnnnnnnnnnnnnnnnnnnnnnnnnnnnnnnnnnnnnttaatcatcgatcaagttgcttcaatcgcgaaaaaatccatgaataaaactatggaatggaatgtgaatcaaaggatttggttatggtgatgacgcgatcttcgattcgattcggtgattaaaagatttggaagctcagatctcaagctcggatttctaatttttgttggattatctaacccaaaagccaaaaaaaaaaaaatgaacggtggtgacgatgccgctactagtggtcctcctccgtctttagag

SEQ ID NO: 1220 - DNA, 414 bp, Arabidopsis thaliana
  unsure at all n locations
  Clone ID: ARABL1-01-Q1-B2-E1
cgagaaaagatgagaaagcgaagaaaccaactantccggcttcaccanggacgantctgaagcaatgctcgtctctttgctcttcgattttgagaaagaatagtgcttcaatgactgcttcgtattcctctgatgcttcgtcttcgtgtgagtcatcncctttgagcgtggngtcttcttcgagctgtaanaaggttgtgatgcnaagtgggtctgtctcttctacaaggaanctgagtgttgggaaagaagaagagaaggtttctggtgattgcttcnctgatggtcgtaaaaggtgtgcttggatnacanctaaagctgacnngtgctatgttgctttccatgacgaaaaatggggaatttctgtacatgacgacnaagaaactttttgagttaataagcctctctggtgct

SEQ ID NO: 1221 - DNA, 405 bp, Arabidopsis thaliana
  unsure at all n locations
  Clone ID: ARABL1-01-Q1-B2-E2
tcgagaaaagctgaccttgtgtagcctctgctcagtttttacattgatgaaggtaaaggtgaggcattgaccaaggaactatcacaattgctggagaaacgtggcgttaagtgtttacttgttatctttttgtgggtcttttgtttcttgaagccaaattgtttgtgatgttggtaatgttcttttatcttttcagttggatgtcaagataatttacagttggggaaagaatgtcgatgttataccgcgtggtgcaggaaaaggagaagcgcttgagtatcttctcaagaagctgcaggctgaaggaatattcccggtcaatactcttgcntgtggtgactctgaacatgatgctgaactatttagcattcctgatgttcacggtgttanggtgagcaattccca

SEQ ID NO: 1222 - DNA, 415 bp, Arabidopsis thaliana
  unsure at all n locations
  Clone ID: ARABL1-01-Q1-B2-E3
tcgagcttggcgacgagtctctaatatgagagtaggtcgtgaatttgcagcagctggtgtaattgatgggaagatttatgtgattggaggatgtgtagttgataattgggctcgatcgattaactgggcagagatgtttgatataaagactcaaacttgggagccagtggctagtccaggtatggaggttcgtgagaaatggatgcacgcaagtgcggttatggaagggaaggtttacgcaatggctgatcgaaacggtgttgtttacgaacccaaggaaaagaaatgggagatgcctgagaagaggcttgatttgggatggagaggaagagcttgtgtgattgagaacatattgtattgttatgattacttggggaagattagagggtatgattcaaaagagangatttggaga

SEQ ID NO: 1223 - DNA, 410 bp, Arabidopsis thaliana
  Clone ID: ARABL1-01-Q1-B2-E8
cgagggactcatttgcgatttttaagatttaggcaaaactcttctctgtttcgacgcaaaaggaagcatttttaatggacgcattgggtggttgcggcggcgctggtggtttctggggatggaatggcttcgatcaacggagaaagaagaagtcttccggtgatagaggtaagaaacgtaattctggatcgtcggattccgtcgatgtgagcagagacgccggcggttatcggtttcctttgaagcaagctgtgacggccggagcactcactttcaccggtgacacgattgctcagctatcagggagatggaaaaagagaaccgctcttaaacaatcatcttctgagcttgacgagggggaattgtggaacattttctcaagaacatgactgggattcgtgcgctgcgga

SEQ ID NO: 1224 - DNA, 409 bp, Arabidopsis thaliana
  unsure at all n locations
  Clone ID: ARABL1-08-Q1-B1-H9
tcgagggcacattctgatgaagcaaacatttctaacaatatgtcagataggattgatggccagattgtcaccgattctgacgaggatgtagacacagaggatgaaggtgaggagaaaatgtttgatactgcagctttggctgcgcttttgaaggcagccactggtggtggaagttcagaaggtggcaattttaccataacatctcaggatggcacgaagcttttctctatggatcgacctgctggtttgagttcatcgttaaggcccttgaagcctgcagcagctccacgtgcaaaccgttccaacatcttttccaattctaatgtcacaatggcagatgagactgagattaacttgancgaaggaaanaaacangaatttanaaaaatttgaaaaaccccccttgtna

SEQ ID NO: 1225 - DNA, 423 bp, Arabidopsis thaliana
  unsure at all n locations
  Clone ID: ARABL1-16-Q1-B1-A10
ctcgaggtcgaagaacgaaaccctagttcccatggatctctcttcacgcttctcatcgatccttatccttctcttgatctccatctccatagcttcggctgagattcgtaaatcagagatccgatccgatgatcgtccaatcatccctttagacgaattcggtttcactcacagcggtcgtcttgagcttgacgcttccaagatctggctttccaacagcaatcccgatctcgatctctccaaagtgggcttctttctctgcactagagacgcttgggttcatgtgatccaacagcttgaagaagaagagatnacgtgcgctctacaatcagatctcgttaagcatgtgttcaacttcaacaatctcaangggaggagataagaagcagantctccaacgtattcaacggagaacgaatgcgg

SEQ ID NO: 1226 - DNA, 485 bp, Arabidopsis thaliana
  unsure at all n locations
  Clone ID: ARABL1-16-Q1-B1-A11
atgatcntgaggttcacagaagactgagacgtcgcntccacgcgtacgtaaantcggaattcggctcgagctcatttctccacatcttgagaganaaaaacagagcaagtatattagagatctcatggcgatggcggtctccggagctgtcctcantgggcttggttcttcgttcctcaccggaggcaatagaggtgccaccgnattggnaagcggcgtaggcactggagctcagagagttggnangaaaactcttantgtcgctgctgcggctgctcagcctaagaaatcttggattcctgccgttaaaggtggtggcaacttccttgaccctgaatgggtcnatggctcgctancaagagatttcgggttcganccattgggtttggggaaagacccggcntttctgaaatggtacaantaaggctgaantgatcaatgggcnaatgggcnatnggaaccggttcttgggattttcgtccggc

SEQ ID NO: 1227 - DNA, 422 bp, Arabidopsis thaliana
  unsure at all n locations
  Clone ID: ARABL1-16-Q1-B1-B10
ctcgaggtctcagacagttccaagaacaaaacttgccgctgttcttgttatccttgtcttttgagcttgaaaacaatgataaacctgctgaatcccgtcgactagccggtattctgctaaagaattctctggacgccaaagattctgccacaaaagatcatctggtgaaacaatggtttgcaattgatgttgctcttaaatcccagatcaaggatcgcttactaagaactcttggttcatctgccctagaggcaaggcatacttcagctcaggttattgctaaggtancctccattgaaattcctcagaagcagtggcctgaacttgttggatcgctgcttaacaatatgactcagcaaggcagtcccgcacacttgaaagcaatcaaccttggnaactccnaggctatgtccggtgaaaaa

SEQ ID NO: 1228 - DNA, 420 bp, Arabidopsis thaliana
  unsure at all n locations
  Clone ID: ARABL1-16-Q1-B1-B11
ctcgagcttcgttaatggacaccttgggcaagttaagattggtgacctgggcttagctgcaattcttcgtggatcacagaatgcgcacagcgtcataggaacgcctgaatttatggcaccagagctatatgaagaagattacaacgagcttgtagacatttattcgtttgggtatgtgtgtcctaagagatgcttancggtgagtatccttatagtgaatgcaccaaccctgcccaaatatacaagaaagttacatcggggaagttgcctgactcattccatctaatccaacacacggagggccaacgttttgccggtaaatgcttgggaactgtgtcaagaagantgcctgcaaggagctcctaacggnnccaatcccttgccgcaantgaagaaaaaaaanttggggccccttttaaa

SEQ ID NO: 1229 - DNA, 422 bp, Arabidopsis thaliana
  unsure at all n locations
  Clone ID: ARABL1-16-Q1-B1-B12
tcgagatcaagtcatggagatttactttttatctagaggctcctctgttggatactggcgtggcgacattcggtacctgatggatgatgttcaagctcttaaacctactgtgttttgcggtgttccacgagtttacgacaaactatatgccggtataatgcaaaaaatatcagctagtggcttgatacgcaagaaactgtttgattttgcttataactacaaattgggaaatatgagaaaaggattctctcaagaagaagcttctcctcgtctagacagacttatgttcgataagataaaagaagcattaggaggaagagctcatatgttgttatcaaggagcagcgcctctacctcgtcatgtanaaggagttcctgagaatcantcctgcctccaatcncctctcaagggtaagggattt

SEQ ID NO: 1230 - DNA, 406 bp, Arabidopsis thaliana
  unsure at all n locations
  Clone ID: ARABL1-16-Q1-B1-B9
tcgaggttttgcctcttcaagatcaggatgaaaagaagactccacaagtgttcaatgagctgagtttcgggaaccatgggggctgttgtgcaatttgcttggatactatacctcttcaagaaacagctatggntaaaggntgtgagcatgcttactgtgtgacgtgcatactccgttgggcaagttacaaggagaaacctacctgcccacaatgtaagcttccanttgattttctcaatgtccancgcgctctcgatggaagcgttgaagatttcatgttcgaggagagtgtatgcctcctcctgaggggcatcatggttccagccactgggaaacantggagcgggtttcanacaatgncaaatttaactatgaattccanattccacctgnattttgagggagg

SEQ ID NO: 1231 - DNA, 421 bp, Arabidopsis thaliana
  unsure at all n locations
  Clone ID: ARABL1-16-Q1-B1-C11
tcgagcacactttctctctctctctctagaaaaagaaagaaagaagaaaaacttattgttattcccatttcgcccctatccgaaaaatggttgaagctcaatcatggacaacgcggcggatgagcaatcctagattcgacgccgccgcaaccgccgcaccaaccatcgtagacatccccggaacaccaccacactcctccgcttcttcaccactcaaacccttcttcctctcttcccccaccgtatcaccaacaatcctcacggcggctataatcgccgcctggtttggctcaaatataggagtcctcctcttaaacaaataccttctcttctactacggtttccgttacccaatccttcctcaacatgacacacatggttatcatgcgccgcctanaagctccgccgtaatccaatatcg

SEQ ID NO: 1232 - DNA, 419 bp, Arabidopsis thaliana
  unsure at all n locations
  Clone ID: ARABL1-16-Q1-B1-E9
ctcgagaaatagagtacccggtgacgatgatgaccacgttaacggcgacagtgccggaatttctacccccgtcgctaaaatccaccagaggatatttcaattctcatagtgaatttggcgtttcaatctctaaatttagtcggagaagatttcacaatccgaccagagtcttcgccgtttcagatatcagtaagctcgtgacggagtttgatccgaagattccattggagagagcatctactccgccgagctcgtggtacactgatcctcaattctacagtttcgagctcgatcgtgtcttctatggaggatggcaagccgtaggctactctgatcagattaaggagaatcgtgactttttcancggggaaggcttggagatgttaaatttggtggngtgtaaagatgagaatggaaag

SEQ ID NO: 1233 - DNA, 418 bp, Arabidopsis thaliana
  unsure at all n locations
  Clone ID: ARABL1-16-Q1-B1-F9
tcgaggaagaggcagatctgttattctctgttgaagtctgattgatctgatcggagctattgcggaggaggggtttactgcaattgcacggtggtaatggctgcggttccgcctnnnnnnnnnnnnnnnnnnnnnnnnnnnnnnnnnnnnnnnnnnnnnnnnnnnnnnnnnnnnnnnnnnnnnnnnnnnnnnnnnnnnnnnnnnnnnnnnnnnnnnnnnccacgtctcaaatatcagaggatgggtggcaacgttcctgcgttgctatctaacgatgctgcttcctgcatcgctgttgctgcgaggatgatcgcgcttggtacgcacgacggtaccgtgcgtatcctcgatttantggggaaatcaggttaaagaanttcgtgccacactgctcccggttaatgacatcaactttgac

SEQ ID NO: 1234 - DNA, 420 bp, Arabidopsis thaliana
  unsure at all n locations
  Clone ID: ARABL1-16-Q1-B1-G11
ctcgaggcggttggcaccatcaagaccaagcgaactattcagtttgttgactggtgtcctactggattcaagtgtggtatcaactaccagccaccaactgttgttcctggaggtgatcttgctaaagtccagagagctgtttgtatgatctcaaactcaaccagtgttgctgaggtattctcccgtattgatcacaagtttgatcttatgtacgccaaacgtgctttcgttcactggtatgttggtgagggtatggaagaaggagaattctcaagaggctcgtgaggatcttgcagcattggagaaggattatgaagaggtcggtgctgaaggtggtgacgatgangatgatgaaggagaagaatactaaagaaagaatgttcctaaaaattggattttgtgttgggttttccccaataa

SEQ ID NO: 1235 - DNA, 413 bp, Arabidopsis thaliana
  unsure at all n locations
  Clone ID: ARABL1-16-Q1-B1-H12
ctcgagagacgtacttctatttatcgacaatatcttccgtttcgtacaagcaggatccgaggtatccgccttattgggtagaatgccttctgctgtgggttatcaacccacccttagtaccgaaatgggtactttacaagaaagaattacttctacgaaaaaggggtccataacctctattcaagcagtttatgtacctgcagatgatttgactgaccccgcacctgccaccacatttgcacatttagatgcgactaccgtactatcaagaggattagctgccaaaggtatctatccagcggtagatcctttagattcaacgtcaactatgctacaacctcgaatcgttggcgaaggaacaattatgaaactgcgcaacaagtnaaacaaacnttacaaacgtttcaanggag

SEQ ID NO: 1236 - DNA, 418 bp, Arabidopsis thaliana
  unsure at all n locations
  Clone ID: ARABL1-17-Q1-B1-A11
ctcgagatctaaggtcatacgtgaactcagtggagtgattctgaaccgaggtcccaagctctgcaattttattgaatggagaggatacaaggttgtctacaaaagatatgcaagcttgtacttctgcatgtgcattgatgaggcggataacgagttagaggtactggagataattcatcactacgtcgagattcttgaccgctactttggcagtgtgtgtgaactcgatttgatttttaacttccacaaggcgtattatatactcgatgagctgttgatcgccggagaacttcaagagtcaagcaagaaaacagttgcaaggataatatcagcccaggatnaattggtgggaatttccaaaagaaggaggcganttccataagtaatanaaattgctcaggctaacaagttgtccttt

SEQ ID NO: 1237 - DNA, 421 bp, Arabidopsis thaliana
  unsure at all n locations
  Clone ID: ARABL1-17-Q1-B1-A12
ctcgagcaaaaacctaacctaaaaatgctgcggcaaacgcagctttttcatcaacaaatttcttcttctcttgggtaatatagatctctcggcaatttgcagcttgttccccacgagcttcctctgttcatcatcgtcctcgagcttcctctgttcatcaagctcctctgttcttgaacatcgacgaaatcagaggctgtggcagatgcgaacaaagcaattgagttggatcattcattaatcaaagcttacctaagaaaagggttacaactcaagtgttttgagaaagaagatggctaaagatctcggagatagatttatctaatgaagttgtggatgaagtgaataacttccctcacttccaaggncctaacaaaaaccttcggtcctcctcccttgggattangttgtcaaaagttga

SEQ ID NO: 1238 - DNA, 396 bp, Arabidopsis thaliana
  unsure at all n locations
  Clone ID: ARABL1-17-Q1-B1-B10
ctcgaggcctcctcgagttcaaataggggcttcgggagacacttcaaggcaacctcttgggaccggtgagatctgatagtaaagcaaaagctaccgtacgtacctggttcaacgatcctgtgcctcctcgagttcaaataggggatgatagcaaattctcgatctttttcaatgtggtattcgggtaaaataatcacaaaggaatctgtagtcactggaatttcaacccttttcaatagaatacgtttgtttgtttgttccactgtaatctcacggtgtgtcatgttaatgatccaaccgaaagttccttaaacggatctcctttgtaccaaaaaactgtctggtagaactaaaattgaaccgataaatggatgagccggttcattgaaaaaaaan

SEQ ID NO: 1239 - DNA, 418 bp, Arabidopsis thaliana
  unsure at all n locations
  Clone ID: ARABL1-17-Q1-B1-B11
ctcnnnnnnnnnnnnnnnnnnnnnnnnnnnnnnnnnnnnnnnnnnnnnnnnnnnnnnnnnnnnnnnctaacaagtttccggagaggcaaccgatcggaacttcggctcaaagtgacaangactacaaagagccaccanctgcgccgttgttccgagcccggcgagctaacttcaaggnccttctggananctgggattgctgantttaaagctacgtttttgttcctgtacatcactgttttgactgttatgggtgtnaanangtcancgaacatgtgtgcttccgtcngaatccaaggtatcgcttgggctttcngtnggaagatcntcgntctcgtccantgcaacgctggnaactccggtggacanattaaaccaaccggttacttcngtttgttcctaacctaggaacctttcn

SEQ ID NO: 1240 - DNA, 418 bp, Arabidopsis thaliana
  unsure at all n locations
  Clone ID: ARABL1-17-Q1-B1-B9
tcgagtgcagaggcatttgcttgcattgagagagagttggatttgtcgctagagaccattttctcgtctgtatctcctgagccaatcgcagcagctagtcttggccaggtttacaaagctcagctgaggtattcaggtcaggttgttgctgtcaaagttcaacgccctgggatcgacgaagccattggccttgatttttaccttattagaggagttgggaaactcattaacaagtatgtagacttcatcactaccgatgtccttacccttatcgatgagttcgcctgcaagagtttatcaggagctaaactatgtccaggaggcccaaaatgccaagaaggtttaaaaaattgtatgcagatnaagcagatgttccttgtgcctgaatataatctgggatacacgagccgcaaaggtg

SEQ ID NO: 1241 - DNA, 423 bp, Arabidopsis thaliana
  unsure at all n locations
  Clone ID: ARABL1-17-Q1-B1-C10
tcgagttttttttttttttaaggagaaagatgtttttaaggcttgagcagagtcnagacannaaatattaagagcacagaggtttantanagtagataaatcatcaagctgtgcacaatcataatcatcanaaacacttcaatcttttttcacagtttttgagcaaaggttatggggattttgagatcgatttggtggcagaaacatcgcgtaacanccctcccccccttcatctagatcctcaggcctcgtccatctgctcntgcatatcggaggtccaaagggttaaattgtccctcagcanactgcattatganagtgctgtcnttgtaggattcctctcccaagagtgtcaaagctcagctatggcctccccaaaaagcccggtttggccatgttacaagccttggnctgaagaaattg

SEQ ID NO: 1242 - DNA, 426 bp, Arabidopsis thaliana
  unsure at all n locations
  Clone ID: ARABL1-17-Q1-B1-D10
gagaaaattaaacgcaatttattgagaaaatacaaacagcgtgcactatgaagaagacgtcgaagatacaatttcttttcaatctctgcatcatatttggggttgtagtaataagaagatgtaacgcaacgacatactttgtaggagacagctccggttgggacataagctccgatctcgagtcttggacttcaggcaagcgattctctcctggtgatgttctaatgttccaatactcatcgacgcatagtgtatacgaagtggctaaagacaactaccaaaattgcaacacaacagatgcgattcggacgttcacaaacgggaacacgaaccgtttgctcctttccaaaaccggggaaacccggttctttgtatgcgggtaataaggctccaattgccttcgcccggtatgaaggttacnaatca

SEQ ID NO: 1243 - DNA, 414 bp, Arabidopsis thaliana
  unsure at all n locations
  Clone ID: ARABL1-17-Q1-B1-D11
cgagtctcaaatgaacctcggaatcataatgagctactttaatgctagattcttcaaatcaagtgtaaatatatggttccagttcattccccaaatgatattcttgaacagcttgtttggctatctctcagtcctcatcatcataaagtggtgcactggttctcaagcagatttgtatcatgtaatgatatatatgttcctgagcccaatggacgagttaggagagaatcaactgttccctcaccagaaaacattacagcttgtgcttctctttctggctcttgtttctgttccgtgtatgttgcttccaaagccgttcatcttgaagaaacaacatgaagctaggcatcaangncaagccgtaagcanctcctgacgaagacagatgagaagtcctcaagtttnaaacaaacg

SEQ ID NO: 1244 - DNA, 417 bp, Arabidopsis thaliana
  unsure at all n locations
  Clone ID: ARABL1-17-Q1-B1-E10
ctcgagcaattcctccagaaaattcttccagatgtatcatgtgttgatgatcaaagtaggatgaaaatgatgtaactaaagagaaacattttcataggggaaggaagagagagcggttcaatggacagagacagaaagagggtgaaaatggagaaggaagatgacgaagaagaaaagatggagaagttgtacacagtgcttaaaaacgcaagggaaatgcggaaatatgtcaacagctccatggagaagaagagacaggaagaagaagaaagagcaagggttcgtagattcccttcgtttcagccagaagatttcantttcatgantaaagcagaggccaacaacattgaaaaagcagctaatgagagcctcaacatccaaccaantatatggctctaaggaaaagcaaagaangga

SEQ ID NO: 1245 - DNA, 406 bp, Arabidopsis thaliana
  unsure at all n locations
  Clone ID: ARABL1-17-Q1-B1-E12
ctcgagtggatgttggtcttagctctcatgtctatgagaccgagacgtttctcaatgtggtcccgagtaaagtagctaagaagtgtttgaaacgaggggatagtatgtggggagcttggtttttctttagcttctacttcagaccggcgttgaatgagaaatccaagtctaaggtcattnnnnnnnnnnnnnnnnnnnnnnnnnnnnnnnnnnnnnnttttactgggtttgataaatctgatctcaagctcgatgtttttcttgttcagcatgatatggagaacatgtatatgtgggcttttaaggataaacctgagaatgcgcttgggaaaatgcagttgagaanctatatgaatgggcattcctcgtcaaggtgagctccgtttcccgtttaattgccgganaa

SEQ ID NO: 1246 - DNA, 417 bp, Arabidopsis thaliana
  unsure at all n locations
  Clone ID: ARABL1-17-Q1-B1-F10
ctcgagctaattttttcactttcttcttcgttgatctctctgaaagcttctcttcttcttctcaccatgtctggttatcctccatcangccaaggttanggttacggcggtaatccaccacctcctcagccaccgtacggatcaaccggcaataaccctcctccgtacggatcatccggcagcaatcctcntcctccgtacggatcatcagnctcctcaccgtacgcagttccctacggagctcannccgctcnttacggtgnaccaccgtcancacngtacgcgtctcttccaggagatcataataagccgcacaaggagaancctcacggcgcctcctacggatctccatctcncggtggctacngtggtcaaccatcgtccggaactttcgactaaggtgggtacggangaacg

SEQ ID NO: 1247 - DNA, 403 bp, Arabidopsis thaliana
  unsure at all n locations
  Clone ID: ARABL1-17-Q1-B1-F12
tcgagccgaggaaaaaaatggcgtctggtttgatcggaagattggttggaacgaaaccgtcgaaattagccacggcggcgaggttaattccggcgagatggacctctacaggagcggaggcggaaacaaaagcttcctctggcggcggaagaggatcgaacttgaagacttttcagatctatcgatggaatccagataatccagggaagccagagcttcaaaattaccagatcgatctcaaagattgtggtccaatggtattagatgctttgattaagatcaaaaacgaaatggatccatctcttactttccgtagatcatgccgtgaagggatctgtggttcatgtgctatgaacattgatggatgttacggacttgcntgtttgcaaaagantcaagatga

SEQ ID NO: 1248 - DNA, 418 bp, Arabidopsis thaliana
  unsure at all n locations
  Clone ID: ARABL1-17-Q1-B1-F9
tcgagggaaggaaggaagagtgagagatgatgggtatggcgaggaagataagcaaagaggaagttgtagagaagcttaaggacgacggagattttgatcgtctccgtctcaaaatcattcgccgcctcaaagaaaacgaggatttacggaataatatgatatcagttgtcaaggagtcaacatctttgaaacgacatggtgctcaaaatatgaaaaccaggcaactctctgatgcgatattcgaagaagtcgggagcaagatgctaagccagctctcagatggtttatgggggataataagatcagaagacgggatgaagaatgaaatcagagaaaccgttcaatccgtctacgccacattatcctaacccgagaaggcaanaaacgcggaacatccgctagagaaatgggacataag

SEQ ID NO: 1249 - DNA, 389 bp, Arabidopsis thaliana
  unsure at all n locations
  Clone ID: ARABL1-17-Q1-B1-G9
cgagaaaaactttctttcaaaatcgttctctgaggcattttaacgaacagatggcggacttaaacggtgcgtattacggaccatcgattccaccgccgaanaaagtctctcacagccacggcagacgcggcggtggatgcggttgtttaggtgactgtcttggctgctgcggctgctgtatcttaancgtcatcttcaanatcctcataaccatagccgtcttattacagcatagctgctctaatcanctggctcattttcagacncanngctgtcaaattcgatgtcaccgaanctaaantcnccgaattcanantcgaaccaaccaagaanctccgatacaatctcgattccaaattcaaaatccgttaaccttaaccgncggattg

SEQ ID NO: 1250 - DNA, 404 bp, Arabidopsis thaliana
  unsure at all n locations
  Clone ID: ARABL1-17-Q1-B1-H12
ctcgagctttgttgttgttatctggggatgctttctactctctgtttggtttccttcattgtgactttctattttctgggtttgtttcaagtcatgatttttccgatacccttttgatttttcttgctatttctcacctctgtataagcaagctctctgctgtttctcctcatccaagttgggtttatcagttcagctgtgtagaaattcaatcgtctgagaagtccgaggtttgatgtctgatggttttaagatcgaaaggatttgacttttatcaagattagtaatgagattagattgtttttgaggttattgtaatcagatcttgatgccaattccgggtgaaagagatttaagacaanttagggaatgggtaatacntggtgttggaccaagcaaaaatn

SEQ ID NO: 1251 - DNA, 418 bp, Arabidopsis thaliana
  unsure at all n locations
  Clone ID: ARABL1-17-Q1-B1-H9
tcgagttcagatgctgagatttgggaggttcttggcaagtgtcaactaaaagaagtggttcaagaaaaagagaacggcttagattcattagttgtggaggatggatcaaattggagcatgggacagagacagttgttctgtttaggcagagcagttttgagaagaagcagagtattagtcctggacgaagccacggcatcgatagataatgcaacagatttgatacttcagaaaacaatcaggcgagaatttgcagattgcactgtcattacagttgctcaccgtatccctaccgttatggattgtacaatggttctctccatcagcgacggacggattgtggatatgatgagccaatgaattgatgaaaggatganaactcctttgttcgggaaancttgtgaaangagtattgggc

SEQ ID NO: 1252 - DNA, 420 bp, Arabidopsis thaliana
  unsure at all n locations
  Clone ID: ARABL1-18-Q1-B1-A1
ctcgagcgaaaggaaaaaatacagaaatgggtggtttgaagtttcatgtacttatgtatccatggttcgcaacaggccatatgaccccgttcctttttcttgccaacaaattggctgagaaaggtcatacggtcacttttttgattcccaagaaagctctgaaacagttggaaaatctcaatctgtttccacacaacattgtctttcgctctgtcaccgtccctcatgtggatggtctccccgttggcacagagacaagtctctgagatcccgtgacatcagctgatctcttgatgtctgctatgggatctcacacgtgatcaagttgaangtgtggtccgagccgttggaaccggacctgatcttctttgacttcgcncattggattccaaaggtaccaaaanactttggccttaaaaa

SEQ ID NO: 1253 - DNA, 408 bp, Arabidopsis thaliana
  unsure at all n locations
  Clone ID: ARABL1-18-Q1-B1-A12
tcgagcttttgatagcttgagaaggcatatgataagctcatgtatgcccagttgatgaataggaaaaagggtgtgacttttggttcgtttaaggtttccaaggacattaaatatgctgataagcagcccattataccatggggtccaaggttttccaggtcctccaagaatgatatgttgatcaacctagcaatatcagttgtgtttagtgcatggattgcgataaaacgtaatgttgaatacaaaccgctgcagttcatgtcttttgtatttgtttacaagaatttttgagaaattaaaatcctttgaagcaccttcatctccaatatataacgaggaatgcgaagaaagtggacggggattgagaatgggaaagaaggctcctcngtccccttccctaanttttgg

SEQ ID NO: 1254 - DNA, 353 bp, Arabidopsis thaliana
  unsure at all n locations
  Clone ID: ARABL1-18-Q1-B1-A3
tcgagagaagaaagaagcaggaggagactttttggaatggagagacagaanagcatggaaaaagggttactcaggaagagcttaagcatacntgagagaaagttccctaacgaanacgctttcttanaatccggtttatcgaggaagtctccgcgagaggtcaagaaacctcanaacgacgatggtgaatgtcgtgttaccgcctctgttttcctcagcacctttgttgccgtatcaggctccttctgtaccggttgtggggttggtttttcancgggtgcanaaacagggattaccananatttanctctctccgttgcanaatactcaatgttcgggtccatcttgacatn

SEQ ID NO: 1255 - DNA, 402 bp, Arabidopsis thaliana
  unsure at all n locations
  Clone ID: ARABL1-18-Q1-B1-B12
gaggttctagatcgcgagcggccgccctttttttttttttttttaaagaaacaaaaaattaatagattccatctaaaaaaaattgggttttgctcactcccttttctttcacatcacaatgaaaaaacaaatattaatgcaaaagtgattcaataaccctacaaaccgttcgtttgggggtgatttttttagcacttggtgaaaaattgaattgtttagtttgtgttttccaaactgataagagctcttttcttgttttaaggtttgagggcgagggcgagaccaagctttggtgaagaggtcacagcctttgagtcatactcagctgagaaagtgatgtgcgacttcggtctccaatctctctggaccaacatccctgctttcccactgttanaaaatccg

SEQ ID NO: 1256 - DNA, 426 bp, Arabidopsis thaliana
  unsure at all n locations
  Clone ID: ARABL1-18-Q1-B1-B6
ctcgaggaaaaaaaatatgtannnnnnnnnnnnnnnnnnnnnnnnnnnnnnnnnnnnnnnnnnnnnnnnnnnnnnnnnnnnnnnnnnnnnnnnnnnnnnnnnnnnnnnnnnnnnnnccgctggacgtcgaaacaacctgcctcgtccaaacctcagaagacgatgtaaggtcaccgcttcacgggctaatattgaacaagaaggtaacacagtgaaagaacccattcagaatattaaagtaaagggatacataacgggccaagaaagagtttctggagggcataacttggtccanaagtcctcgatgacatttgctgatatccgcggnaagattaattggctcctccaagctttattaagcgccaagactggaacaacgggattacggtagaaagactacgcacaacgtngtatgggggccgaagc

SEQ ID NO: 1257 - DNA, 411 bp, Arabidopsis thaliana
  Clone ID: ARABL1-18-Q1-B1-B8
ctcgagcacagaaattgccttcactgagaacgtggaccagcgatttgaagcccttggatggcatgttatctgggtgaagaatggaaacactgggtatgacgagatccgtgctgccattaaggaagctaaaactgttactgacaagcctactttgatcaaggtcactactaccattggttatgggtctcccaacaaggcgaactcatacagtgtccatggagctgcacttggcgagaaggaagttgaggctaccaagaaataaccttggatggccgtatgagccgttccaggtacctgacgatgtaaaaagccactggagtcgtcatacacctgaaggagctactcttgaatctgactggagtgcaaagtttgcagcatatgaaaagaagtacccaagaggaagcttctgag

SEQ ID NO: 1258 - DNA, 413 bp, Arabidopsis thaliana
  unsure at all n locations
  Clone ID: ARABL1-18-Q1-B1-B9
ctcgagggagaaacctctcctctctctatctatagccatggctgctttcacttgtacctctcgtcctccgatttctctccgctccgagaccagaatcgtatcctcatcaccatcggcttcttctctctcttctcggcggatgttcgccgtcttaccggaatcatcaggtttgagaatccgtctttctctctctccggcttcgttgacctcgattcatcaacctagggtttctcgattacgaagagccgtcgtcctgtgaagctcaggaaactactaccgatnttcantggggncaangantcnacatggggancncaagttctnaaangnaantggggcctgtanttgtcnacttttgggccccatggggnggggaccttgcaaatatgatnnattccgcttggtaaacatat

SEQ ID NO: 1259 - DNA, 414 bp, Arabidopsis thaliana
  unsure at all n locations
  Clone ID: ARABL1-18-Q1-B1-C10
ctcgagagattcttcaaaagagcaaaanaatcaatggagagagcaaagtcgaggaagcctcatatcatgatgataccatacccacttcaaggtcacgttatcccttttgtccacttagccatcaaacttgcttctcatggctnnnnnnnnnnnnnnnnnnnnnnnnnnnnnnnnnnnnnnnnnnnnnnnnnnnnnnnnnnnnnnnnngccggtgacatcttctccgccgctcgcagctccggccagcacgacatacgttacaccaccgtgagcgacggcttccctttaaactttgaccggtcactgaancatgaccagtttttcgaangnattctccacgtctctctgcccacgtgggatgatctcatccgncaaactctcccggcgtgatgaatcctcccgtgaanttgcttg

SEQ ID NO: 1260 - DNA, 409 bp, Arabidopsis thaliana
  unsure at all n locations
  Clone ID: ARABL1-18-Q1-B1-C12
ctcgaggatattttctcttatctcttctctttgttcgatcaaaaattcaattttcccgagatttttgtttctctcgatcgattcaacacctaaagattgaagcttttgctcgtgggttatgtaaagtttccacctttcgtcttctttctgatctgtgagcaaaaatgggacaacagcaatcaaaaggggaattgctgtatcagcaagttagttatggtaactctgaaggaattcgagctcttcatcgagatggtggagaccttgagtggatggatagagaaggaaaaactccgttgatcttggcttgtatgaactccgagctatttgatgttgctaagactttgattgaattgggttctaactgtnatgcntaaccgtcctgggtccgtcaaggcngggaactcctcct

SEQ ID NO: 1261 - DNA, 418 bp, Arabidopsis thaliana
  unsure at all n locations
  Clone ID: ARABL1-18-Q1-B1-C5
ctcgagtgatgaaggagaaagtaccaactaaggacttgtatttgaatctaaagtcatcggacacatgggtcgctgaatatagaaagtggatggacaaagttggtcatgggatgccttaccatttcgggcataggaccatatctctccccaaagtccctcctgtcgtggaacatgccccggcagggctcattgcagctctctctgcttcttaccctgcaaaaggcngaattgggactatgcatcntcccaatttgggtaaccgggtacttcatacatantaatcaattgtacaagctgcaacaacgtgatcaaatcctttgaactctggaaaaatancctccnggncaangggaattggatttgaacggnttgggcaatccnggnngnttactaaacattggaaggctgtcccggttaa

SEQ ID NO: 1262 - DNA, 418 bp, Arabidopsis thaliana
  unsure at all n locations
  Clone ID: ARABL1-18-Q1-B1-D1
ctcgaggaagaaagaaagatctctcggtggtggtcattcaacattgtaagatcttcgacttggcaaaattgtttcactttcgctctaaaaacttcatcttcactttctctcctcctccatggcggacggtggggctgaacctccagctccaccatcatcgataaacgccggtgaatttctcttgtctattttgcacggaagtccttcgccgtcgtcacaaggtcctcaagcatcatcaagtcattcgctctcgatncaaccatcgcaaccattgggtcctaacgtcaataatccttttcctccgtcnaattggnaatccaacgggcatcgaaccaatnatcaaaaccctccttcctgggcaatccccttttcaactcctcaaaatcctttccccaaattcctaagggttccccaaatt

SEQ ID NO: 1263 - DNA, 413 bp, Arabidopsis thaliana
  Clone ID: ARABL1-18-Q1-B1-D10
ctcgagccgttctatatatttcccaaacttagtgccacttagacacaataagaaaaccgttaacaagaagaaaaaaaaaagatcgaaaatggaatatcaaactaacttcttaagtggagagttttccccggagaactcttcttcaagctcatggagctcacaagaatcattcttgtgggaagagagtttcttacatcaatcatttgaccaatccttccttttatctagccctactgataactactgtgatgacttctttgcatttgaatcatcaatcataaaagaagaaggaaaagaagccaccgtggcggccgaggaggaggagaagtcatacagaggagtgaggaaacgggcgtgggggaaattcgcggccgagataagagactcaacgaaggaaaagggataagatgttg

SEQ ID NO: 1264 - DNA, 280 bp, Arabidopsis thaliana
  Clone ID: ARABL1-18-Q1-B1-D11
cgagaagaacaacgacgtcgtttctcttaacggaaaatgcaacggcggtatcggtgaaggcgtcgccgttaatgcggctgtggcggttgccgtgtaatgcagcttctcgggttgataacatttttatagtaattaatacatacatttacctttgggttttgtgattgttgtgtaaaacagtaaaaaaaatgatttcgttgtgctatgtaaactttgtaagcaaatactcttcttcctaaagtaaaaaagtttgattgttttaaaaaaaaaaaaaaaaggg

SEQ ID NO: 1265 - DNA, 404 bp, Arabidopsis thaliana
  unsure at all n locations
  Clone ID: ARABL1-18-Q1-B1-D2
gagtttctcctcaaaatatcagatcgataaccaacaagcgaaactagggttctctaatctcgacgaagatggcgatgcagaaagctaaggagatcgttaacagcgaatcagtcgttgttttcagcaagacttattgtccatattgcgtgagagtgaaggagcttttgcaacaattgggaaccnaattncaaggccgttgancccaaaacngaangtgatggtagccaaattcaatcaggtcccgcanaatgggcangncaacgttaccgtgcctaatgtgnttaataagganggaaatcaacatcggtgggctggtgatgcaacatcaaacntgcataaagaatgggaaatttggttcnncggttaactgaaaccgggaccatttcaaggaaagactgnaacaa

SEQ ID NO: 1266 - DNA, 413 bp, Arabidopsis thaliana
  unsure at all n locations
  Clone ID: ARABL1-18-Q1-B1-D4
cgagaaaaaaaaaaaaaacaagtctaagcattaaattgagaaaacanangtacattatccgtacnggntccggtcagatctaattattaancgcatccncctgggagcaaacccgacccgggaactcgctaagtcgtatacaacccggaaaccctgttgctggatattcccaattatggataatccgcccatcgtaccgggaaacncaaaacaaaacttnccgttggganccacagggatnangnaattcgncgccggaagtgatacgtcagctccacggaaatgtaaaancaccgtcggtactttaacctcgttcatattggagagatcgaaacacgtgtcnaagagtgagaaatccggagctcntttcaatgtcntagctcccganccgggaagcgtctctcaaancaata

SEQ ID NO: 1267 - DNA, 417 bp, Arabidopsis thaliana
  unsure at all n locations
  Clone ID: ARABL1-18-Q1-B1-D5
cgagtgagctaatcccgaagtcaactcatgtttgtagaggatggagagctgcttgttgcgatccgattctttggaagacggtggatttgtcaaacatgagatctagtttcatcaagatcccacatagacataaggctctaatgggatcttgaaactctccatgaaccttagcggaggaagcacgaggaccttgatttttcatttcaacttgttcttgagtgatgatcagcttacttacaccgcagaaaggtgtccanggttganacgggtcgtcctaacggcttggaacaaaataaaagaaaactggtatatgcaaagcgataagaaaccggaaaagatntaaaagtccctaaacaattgccaagccatccgcaaacccgccntaaccccntaacagaaanttgccaagaactgcaa

SEQ ID NO: 1268 - DNA, 414 bp, Arabidopsis thaliana
  unsure at all n locations
  Clone ID: ARABL1-18-Q1-B1-D8
tcgagcggctcgagcggctcgagcggctcgagtnnnnnnnnnnnnnnnnnnnnnnnnnnnnnnnnnnnngggacatggacgccattgattccgtcgtggatcctcttagagactttgccaaggacagcattcncctcgttaagcgttgtcataagccagatcgcaaagaattcacgaaagttgcagtccgtacagcaatcgggttcgtagtaatgggattcgtgggattctttgtnaanctcatctttattccaatcaacaanatcatcgtcggtgctacntanattacaaagggaanataaangatggagaagggtanttacaactttgttgttttcatganagacacttcacaatttttttcctttttccntgttcaanatactcataaaagaaggaaacattttgtgaacc

SEQ ID NO: 1269 - DNA, 406 bp, Arabidopsis thaliana
  Clone ID: ARABL1-18-Q1-B1-D9
ctcgagggagaattcggaatattagaagggagatcatttgcgttgatacacccaattgtgatgggaggtttatttgcatacactctttggactggttacttaggttggcaatggagacgtgtccgtacgatacagagtgagattagtgatctcaagaaacagcttaaaccaactcctgtttcccctgatggttccacagccgttgattcttcgtcgcctccttctacgactgagcttcagatccaacggctaactgaagagaggaaagagttggtcaaagggtcttacagagacaaacactttgacgctggctctgttttgttaagtttcggtgttttggaaactgtctttggtggtgttaacacttaacctcggtactggtaaactcctccccggtcctcaacct

SEQ ID NO: 1270 - DNA, 412 bp, Arabidopsis thaliana
  unsure at all n locations
  Clone ID: ARABL1-18-Q1-B1-E1
tcgagttccaagcagagatgacggtgaagataaggctcgcgcgtcttggttgtaaacaccgacccttctatcgtgtagttgtcgccgatgaaaaatcgcgcagggacggtaaacaaatcgaggtgttaggcttttatgatccactccaaggcaaagaagatgcggatagagtgagcctcaaattcgacagaatcaagtactggttatctgttggagctcaaccaacagacacagtggaaagcatgcttttcaaggccggttttgataccaccaaagccctaatggtaatggtccggtccgaaaaatgggcaaaaatccaacgaancaacatgtttcaaccattacanggtgaaatccttgaactaagaatgttgatgcctttaagcaaaaaaaaaccctttgtgtccnggtg

SEQ ID NO: 1271 - DNA, 406 bp, Arabidopsis thaliana
  unsure at all n locations
  Clone ID: ARABL1-18-Q1-B1-E10
ctcgaggtttttgttttcttcttctctacttgagtaatcatcaacgattatggcgtcaagtcagtggacgaggtcggaggataagatgtttgagcaagctttggttctttttcctgaaggatctcctaatcggtgggagagaatcgctgatcagcttcataaatctgctggtgaagttagggagcattacgaggtcttggttcatgatgttttcgagattgattctggtcgagttgatgtccctgattacatggatgactcggcggctgcggcggcgggttgggattccgctggtcagatctcttttgggtctaaacatggcgagagtgaacgcaaaagaggaactccttggacagagaacgaacacaaattgtttcctgatcggattaaagagatatgggaangg

SEQ ID NO: 1272 - DNA, 366 bp, Arabidopsis thaliana
  unsure at all n locations
  Clone ID: ARABLI-09-Q1-B1-D2
gttttgtttcaactattcgatcaaaacgataccctgtgaccgccttccaatggcatccagagaaaaatgcattcgaatggggatcatctganatcccacactctgaggacgcaattcaggtgactcaacatgctgcaaattatctagtcagtgaagccagaaagtcaatgaacagaccatcttctgagaaagtgctgagcaatctcatctacaactacaagcctacgtactccggatacaaagggagcggtgacgacgaggtttatattttcacgtaacaaagatcccttctcctgtgtgttttcgccaaaaacatagcaatttatattanttactaaaaanagnnggtcnaangnaaaaagggcc

SEQ ID NO: 1273 - DNA, 399 bp, Arabidopsis thaliana
  unsure at all n locations
  Clone ID: ARABLI-09-Q1-B1-D6
ctcgagcagatataaaaaccctagatttcttctcttaaaacccacatcgaatctcaactcagaaccaacaatgctccaacctttctcttcctcctctgttttctcgagaatcctctggactttcttggtttaagaagattcgttgttgaatcagagagaaagaaagcatccatttttctatcattgcttgcttgctatggaattgggtaaatctcgattctacttatgttgcaattgcttttctcctgttagattttccgattattctttagctggaagtgattatccagacgccatctccatcactttcaattgtattcctataccttctccgaagaatcctcgtaattcncgaatcgatgttataaacttcaaattcncctccaaatcctgaaacga

SEQ ID NO: 1274 - DNA, 414 bp, Arabidopsis thaliana
  unsure at all n locations
  Clone ID: ARABLI-09-Q1-B1-D7
ctcgagccgagtaggacgtgacaccgagaaagaagggaagggatactttgaggataggaggccagcttcaaacatggacccttacgttgttacttccatgattgcagagactacactcctctggaacccttgaaaggatgatccgtaactcttgaagttgcttctgattgggttttttggaagttccaagcttgtcttttctctacagtgtgtattaagcaattgtaccggttgacactgccggagtttgtgatttggggcctttctttctttttcntctttttataatcctttggggttcctgtgggtaagagcaaattccnggtttgcccngttgtttgacnttaattgaaaacctttggaattggtaacnaataanacaatcctgaaaaaggctcctcaagtttcaaatgg

SEQ ID NO: 1275 - DNA, 398 bp, Arabidopsis thaliana
  unsure at all n locations
  Clone ID: ARABLI-09-Q1-B1-D8
ctcgaggcagcagctcagagactgggagcagttgatctctgcggatggtatcttcactctcggattctttacacctaaagactcatctacttccgaactcgggtcagctggtcttagatatcttggtatttggcctcaaagtattccaataaatctagtttgggtgggtaacccaaccgaatcagtttctgattcatctggttctctatccattgacaccaatggggttctaaagataacacaggcaaacgctattccaatcttggtgaaccaaagaccagccgcgcagctttcattggtcgggaatgtgtctgccattttactcgatacggggaactttgtgggtccgagagattaaggccaaggaaggagttccgggtccgtgttcnattgcaaaa

SEQ ID NO: 1276 - DNA, 379 bp, Arabidopsis thaliana
  unsure at all n locations
  Clone ID: ARABLI-09-Q1-B1-E5
ctcgagcaaaaccttctcatgtcttcttctctcctcgacctttgaggtggaaaattaaatatattcccttagnnnnnnnnnnnnnnnnnnnnnnnnnnnnnnnnnnnnnnnnnnnnnnnnnnnnnnnnnctaatttccttgttgattcatcgactagatctaattcttctcacaaaagactgagtgtgttctttctttcaaatctttcaaaaactagggtttttactgtcttgaaatcatangtattcttctanatttagcanaaagagcacgatttactttccattncantcgtcttgtnactctctctctcttcnttaaagtctnccctttttagcanggattctctctctcacaaaaattattccaaagggnttct

SEQ ID NO: 1277 - DNA, 408 bp, Arabidopsis thaliana
  unsure at all n locations
  Clone ID: ARABLI-09-Q1-B1-E7
cgagattccttctgaaatattcatcgcaattcgtatcggtttaaagtaaaaaagcaatgggaggtggtaaagacaagcatcatgatgagcaagagaaaggatttcatggttttccaggaggtggacattacccacctgctcaaggaggttaccctcctcaaggttacccaccacaacaagggtatcctccagctggaggctacccacctgccggatatcctcctggtgcttaccctgctgcgcccggtggttatcctcctgcacctggaggttaccctcctgctggctatcntgcacctggagctcaacattcaggacattctggtggtggactcngaggcatgatancaagtgcanctggtgcaaccgcaacaacttatggagctcaacaatgttggtcacgcctct

SEQ ID NO: 1278 - DNA, 395 bp, Arabidopsis thaliana
  unsure at all n locations
  Clone ID: ARABLI-09-Q1-B1-E9
ctcgagcaaagataacgacattaacaacatccnnnnnnnnnnnnnnnnnnnnnnnnnnnnnnnnnnnnnnnnnnnnnnnnnnnnnnnnnnnnnnnnnnnnnnnnnnnnnnnnnnnnnnnnnnnnnnnnnnnnnnnnnnnnnnnnnnnnnnnnnnnnnngtcagaccctggatncaaagatnacgacattnacaacatccttatcggtcnttanggatcccaatatagatacaaggaaatgcggnagatnataantcccgtaggcaggaagcaactggaaccgatgttacaaagctaccgcaaggttgtgggcgctgagctttcanagagaatggtgtatgaaatcaactgaaagcttcaacaataccaagctcattgaactttggtaccnattgt

SEQ ID NO: 1279 - DNA, 407 bp, Arabidopsis thaliana
  unsure at all n locations
  Clone ID: ARABLI-09-Q1-B1-F1
gagcacaatattctttcttccaaattttctcatttctcatgggcatatctcaagtacactattgcaatggtgaccagaacttagaagcaaaccttctagatcatgaggaaactgaatcattttcagtacctcaaacgaagaactgtaagaggtggctccgtgtctccatatacgcaatctttgtcatcttctgccaaccacttgctacagttctgggtagactgtactatgaaaatggagggaaaagcacatatgtggtaacacttcttcaactcattggcttccctgtactgattctcttccgcttcttttctcgaatcangcaacccaaatcaacagatacaaatttcaatcaatccccctccttnaacaaccttgcatcggtttaactggggcactggactgct

SEQ ID NO: 1280 - DNA, 435 bp, Arabidopsis thaliana
  unsure at all n locations
  Clone ID: ARABLI-09-Q1-B1-F10
gacgtccnacgcacgcgtacataaactcggaattcggctcgagctttgttgttgttatctggggatgctttctactctctgtttggtttccttcattgtgactttctattttctgggtttgtttcaagtcatgatttttccgatacccttttgatttttcttgctatttctcacctctgtataagcaagctctctgctgtttctcctcatccaagttgggtttatcagttcagctgtgtagaaattcaatcgtctgagaagtccgaggtttgatgtctgatggttttaagatcgaaaggatttgacttttaacanattaagtaatgagattagattgtttttgaaggttaatggaatcaagattntgatgccanttcctggtgaaagagaattaaagacaagttaaggaatgggtaatacntgttgtttggacca

SEQ ID NO: 1281 - DNA, 422 bp, Arabidopsis thaliana
  unsure at all n locations
  Clone ID: ARABLI-09-Q1-B1-F11
ctcgagcacgaacgtgtgaattgggttaaaaaattcatctcattgatccaaacttgaaaccctaatttcgaatctctttgctgatttggtgagatctcaatttcggaaagaagatgacgaaggatttcgcagttccacctgtagttttcccctccggtggatcttcangcggtgctaatgtccancaacgaagattcccagcgacaacgtttnaaancggcgggttcctcttctttcgcaaaccccttcaagtcaatcgacattggntttcgcaaacgcgttttccggtaaaaatggcgggagcaattggggggaaaaangcntccncncnncctttngggggggggtcaacctccttntagaatanggggncattttncaannagatccggatccanccnattaaaaactggggaaaaaan

SEQ ID NO: 1282 - DNA, 471 bp, Arabidopsis thaliana
  unsure at all n locations
  Clone ID: ARABLI-09-Q1-B1-F12
agnagcctatagatagaaatgacgtcnnangcacgcgtacataanctcggaattcggctcgagagaaacctgtctgatttgctccgtcgcctaaaaagtctaaaaccctaagtgtctccgcctcgtagctttacccgattcaacgaagagtgaattcgcgtgagctcaagcagtatcgaaatctaccaatcatggcgagtcaaacaccgaatctcgagtgtcggatgtacgaggcgaaatacccagaggtggatatggcggtgatgatccaggtgaagaacattgccgatatgggagcttatgtttctctcctcgagtacaacaacatcgaaggcatgatccttttctccgagctctctcgtcgtcgggattcgaaatgttagcantttgattaaggtcggaagaattgancctgtcatggttctccgtgttgacaaaagagaaangttacattgatctgagcaaacttaa

SEQ ID NO: 1283 - DNA, 404 bp, Arabidopsis thaliana
  unsure at all n locations
  Clone ID: ARABLI-09-Q1-B1-F5
cgagcttttgcaaaggatatcgcatcatcaagaaccttctgtgtctatgaagaggtggagcgtatgcgtgaagcagggctcattaaaggaggttctctggataacgccatagtttgtagcgctgagcatggatggatgaatcctcctctgcggtttgatgatgaagcatgtcgacataagattcttgacctaatcggtgacctctcccttgtttcacggggcggaaatggaggactccccgtggctcacatagtcgcatataangcgggtcatgcactgcacactgacttagcacgtcaccttacatggactgaagagtatgtgctcgttgtcaaccatatcccgcaaaaagccttgattgttccggttccttttgggatccttaaccaaaagatggtaacaat

SEQ ID NO: 1284 - DNA, 404 bp, Arabidopsis thaliana
  unsure at all n locations
  Clone ID: ARABLI-09-Q1-B1-F7
cgaggctgagatgaaggcaaaggcacaactaccatcagagaatttaccaaaatttgaggtgaatgatttggagagcctaactgggaagtatgataccgttgtatgtctcgacgtgttgatacattacccgcagaacaaagcagacggaatgatcgcacatcttgcttctttagcagagaagagagtgattctgagttttgctccaaagactttttactatgatatcttaaagagaattggagagcttttcccagggccatcaaaagctacaagggcgtatctacactcggaggcggatgtggaaagagcgttgggtaaagtcggctggaaaatcagcaagagaggactcactaccacacagttctacttctctangctcatcgaagctgttccaatgtagacca

SEQ ID NO: 1285 - DNA, 465 bp, Arabidopsis thaliana
  unsure at all n locations
  Clone ID: ARABLI-09-Q1-B1-G10
ctatagaacagacatgacgtcccanncacgcgtacataanctcggaattcggctcgagggttaacgctacagttgcgagaaacattgccggcatttgtggaaatgtcatctccttgttcttgttcttatctcccatacctacgtncataaccatatacaagaagaaaaaggtggaggagtacaaagctgacccatacttagccacggttctaaattgcgcactatgggtcttttatggcttaccaatggttcaaccagatagtctccttgtgatcaccataaatggtaccggtttagccattgagctggtgtatctcgctatcttcttcttcttttctccaactagtcgcaaggtgaaagtggggctatggttaatangagagatggtgtttgtangaatantaaccacatgcacattgctattgttccacacacataaccagagatctcctttgttggaatctt

SEQ ID NO: 1286 - DNA, 471 bp, Arabidopsis thaliana
  unsure at all n locations
  Clone ID: ARABLI-09-Q1-B1-G11
tatagataaganatgacgtcnnatncacgcgtacntaanctcggaattcggctcgagaaaaaaaaaagatgagagaaggatctcatgttattgttttgcctttcccagcacaaggccacataactccaatgtcccaattctgtaaacgcttagcctcaaaaagtcttaagatcactcttgtcctcgtctccgacaagccctctccgccgtacaaaacagagcacgacacaatcactgtcgtccccatctccaatggtttccaagaaggccaggaacgatcagaagacctagatgagtacatggaaagagtagaatccagcatcaaaaaccgcttaccgaagttgatagaagacatgaaactatcgggaaatcctcctaagggctcctgtgtacgactccaccatgccgtggcttccnggatgttactcataattaagggttgagcngtgccgttgtttttcacgcaagcct

SEQ ID NO: 1287 - DNA, 466 bp, Arabidopsis thaliana
  unsure at all n locations
  Clone ID: ARABLI-09-Q1-B1-G2
atgatttttgntcccagaagagataaacgtcgganccacgcgtacgtaaactcggaattcggctcgagatgagttggatatgtttaatacaaaatttctcntgtgaaaaaaaaaaaaaaaagggcggccgccgactagtgagctcgtcgacccgggaattaattccggaccggtacctgcaggcgtaccagctttccctatagtgagtcgtattagagcttggcgtaatcatggtcatagctgtttcctgtgtgaaattgttatccgctcacaattccacacaacatacgagccggaagcataaagtgtaaagcctggggtgcctaatgagtgagctaactcacattaattgcgttgcgctcactgcccgctttccagtcggggaaacctgtccttgccaactggcattaatngaatccgggcaacgcgcnggggaagangcngttttggcgttatttgggngcca

SEQ ID NO: 1288 - DNA, 408 bp, Arabidopsis thaliana
  unsure at all n locations
  Clone ID: ARABLI-09-Q1-B1-G5
tcgagcccatttctattccaactcccaaaaatggcgattcgtcttcctctgatctgtcttcttggttcattcatggtagtggcgattgcggctgatttaacaccggagcgttattggagcactgctttaccaaacactcccattcccaactctctccataatcttttgactttcgattttaccgacgagaaaagtaccaacgtccaagtaggtaaaggcggagtaaacgttaacacccataaaggtaaaaccggtagcggaaccgccgtgaacgttggaaagggaggtgtacgcgtggacacaggcaagggcaagcccggaggagggacacacgtgagcgttggcanccggaaaanggtcacggaagtggcgtcgcagtccanacggggtaaacccggtaaaagaanc

SEQ ID NO: 1289 - DNA, 410 bp, Arabidopsis thaliana
  unsure at all n locations
  Clone ID: ARABLI-09-Q1-B1-G8
tcgagatttgagtccagctcaagagctacnnnnnnnnnnnnnnnnnnnnnnnnnnnnnnnnnnnnnnnnnnnnnnnnnnnnnnnnnnnnnnnnnnnnnnnnnnnngggtaaacaacaagaagagtgggacacaagtcaccacagcaacaatgatcaacatgaccaatctgcgactacttcttcaaagaaacatgttccaccacttcactctcttgagttcatggaacttcagaaaagaaaagccaagttgctctccatgctcgaagagcttaaaagaagatatggacattaccganagcaaatgagaattgcggcggcagcctttgaagcggcgggttggnctaaggangggcaaagatatacactggcgttagcgtcaanggcaatgtcaaagacactttcggtgttta

SEQ ID NO: 1290 - DNA, 414 bp, Arabidopsis thaliana
  unsure at all n locations
  Clone ID: ARABLI-09-Q1-B1-H10
ggagtgatcaagaccgagatgccatttttaaggcttacattgaagccttgaatgaggatcctaagcaataccgaattgatgctcagaagatggaggaatgggcacgaagtcagacttctgcttcactagttgacttttcctctaaagaaggagatattgaagcagttcttaaggacattgcaggaagagctggtagtaaggaggggtttagttacagcaggttcttcgctgttgggctctttcgtttgcttgagcttgcaagtgctactgattcaactgtcctggacaaaccttgtgcatccctaaatatcaacaaagaaaaaccttgatcgggaactggatgtgttancgtaacctgncttcaaaacctgtcaaaccaaaggaattgcctaaaggagtattccaaaaggaana

SEQ ID NO: 1291 - DNA, 408 bp, Arabidopsis thaliana
  unsure at all n locations
  Clone ID: ARABLI-09-Q1-B1-H2
tcgaggagtgatcaagaccgagatgccatttttaaggcttacattgaagccttgaatgaggatcctaagcaataccgaattgatgctcagaagatggaggaatgggcacgaagtcagacttctgcttcactagttgacttttcctctaaagaaggagatattgaagcagttcttaaggacattgcaggaagagctggtagtaaggaggggtttagttacagcaggttcttcgctgttgggctctttcgtttgcttgagcttgcaagtgctactgatccaactgtcttggacaagctttgtgcatccctaaatatcaacaagaaaancctggatnnggaactggatgtgtaacntnacctgcnttcaaancctgtccaagccaangaattgccctaaaggagtatgtcc

SEQ ID NO: 1292 - DNA, 411 bp, Arabidopsis thaliana
  unsure at all n locations
  Clone ID: ARABLI-09-Q1-B1-H4
ctcgagctgctactgatttcgaatctttacgcttaatcaattattcatctggattttcaaatccaatccttttcctccctggtgaccaagtaattggggattaacaaagggactggggctttattaagctcgaaacaattgttcttcactctggccgcttctgcaaagtcgtgtgcttctcgcacctctgcgcaggtgtggggtggccttgaagtggtgacttcactctgtcttccaaggatttctctagcttctatcatttggaggctccgtcgtgtttccgagggtcttacccttgatacngctaaaaanttactacgcccaactaataacaacctccttaagcctttaaaannaacttttaatccgngcaaaaaattaaacttgggtncttaaaatggttccaanttt

SEQ ID NO: 1293 - DNA, 414 bp, Arabidopsis thaliana
  Clone ID: ARABLI-10-Q1-B1-A1
agattccaaaaaaaataaaataatacaaatctctctttttctctctaaaaaatcttgatatggatcaaaacgtaccaataagcaagaagctatggaacatcgtacgttttctcttgtacatgatccgcaaaggcgtctcaaaaaacaaactcatcgctgacttcaacgccactctcaaacgtggcaagaacctcatgttccaccaacgtcgtcgtgtccacgccggttccaccgcctcagccgctctaaacgctacttcagccaccgcgtcatcgcgacaagagtacgagtttagctgcagcaacactccaaactattcattccctttctctaatatggctttcatgaggaaaaagagtcacaataatctcttcacgtgtggtcaaaacgcctcagacgcttgacgacgacgtt

SEQ ID NO: 1294 - DNA, 386 bp, Arabidopsis thaliana
  unsure at all n locations
  Clone ID: ARABLI-10-Q1-B1-A10
cgaggtgctcgagactgtagagtgaagtttgatttatttagagagataagttaaaaaaaaaatggtcggtatggatttgttcaaatgtgtaatgatgataatggtgttggttgtctcttgtggtgaagctgtttctggagctaagttcgatgagctttatcggtcaagctgggctatggatcattgtgtcaacgaaggcgaagtcacaaaactcaagcttgacaattactctggagctgggtttgaatcaagaagcaaatacttgtttggtaaagtctctatccagattaagcttgttgagggtgattcagcaggaacagtcactgctttctacatgtcttcanatggtccgaaccacaacgaattccattttgattcctaaggaa

SEQ ID NO: 1295 - DNA, 421 bp, Arabidopsis thaliana
  unsure at all n locations
  Clone ID: ARABLI-10-Q1-B1-A2
ctcgaggaagtctctggttcctgatcccatgaaacaagagcctttagtaattgaaaacactccagatcctttagcaggggaacagacatggccaacagaggaagaaatggctgaggctgacaaaaatcagaagcagggcaggctaaagaagaagactttgccgcgagggacttcagaatatcaggctgcttggattgtggatgagnacagatgaataggattccgataatggtgattctgatgataatggtatggtattggatataggagaggattccaatcaagaaggaatgtatgaccaaagaatttgaggatgacggaaaatcattgaacctgcgggataatgatactgaaactcaagaatgaatcccaaatggtggacgatgaanacttgacagaagaacaaantaaaggatgaaat

SEQ ID NO: 1296 - DNA, 415 bp, Arabidopsis thaliana
  unsure at all n locations
  Clone ID: ARABLI-10-Q1-B1-A3
tcgagctttcatctccagatctgctgctgaagataaattagtcagcaatcgtcatagctatggcgattagggtttttcttacccttctcctcttcttatcatctgcaattctatctttctctctttatgaagatcaagccggcctcactgattggcaccaaaggtacattgggaaagtgaagcatgcagtattccacactcaaaagactggaagaaagcgtgttatcgtctcaaccgaggagaatgttgttgcttcacttgatctcagacatggggagatattttggcgacatgttctcgggacaaaggacgctatcgatggggttggtattgccttggggaaaatatgttatcactctttcatcaagaaggaagtactttaaagagcctggaaacttcctgatngtcaaatggt

SEQ ID NO: 1297 - DNA, 420 bp, Arabidopsis thaliana
  unsure at all n locations
  Clone ID: ARABLI-10-Q1-B1-A8
tcgagaatattcatcgcaattcgtatcggtttaaagtaaaaaagcaatgggaggtggtaaagacaagcatcatgatgagcaagagaaaggatttcatggttttccaggaggtggacattacccacctgctcaaggaggttaccctcctcaaggttacccaccacaacaagggtatcctccagctggaggctacccacctgccggatatcctcctggtgcttaccctgctgcgcccggtggttatcctcctgcacctggaggttaccctcctgctggctatcctgcacctggagctcaccattcangacattctggtgggtggactcggaggcatgatagcaagtgcagctggtgcaaccgcaagcagcttatgggagctcaacatgttggtcacgcctctcacaaacccttacgggcatg

SEQ ID NO: 1298 - DNA, 413 bp, Arabidopsis thaliana
  unsure at all n locations
  Clone ID: ARABLI-10-Q1-B1-B1
cgaggagaagaaagaaaaatggtgctaaaggtgtacggacctcactttgcttcaccaaagagagctttggtcacactgatcgagaagggcgttgccttcgagaccatccccgtcgatctcatgaaaggagaacacaatgcagcctgcttatctcgctctacagccttttggtantgttcctgctgttgttgacngtgacgacaaaatcttcgagtcccgtgcngtgatgaggtacctacctgacaagtacaggtcacanggacctgatcttntggggaaaaccgttganaacagangtcaagttgaacaaaggcntgatgtggaagcgaccaactaccacncaacgctaattgnacttaacgcntcacataatgttcgcatcagtcatgggaatcccatctgatgagaagctg

SEQ ID NO: 1299 - DNA, 413 bp, Arabidopsis thaliana
  unsure at all n locations
  Clone ID: ARABLI-10-Q1-B1-B5
ctcgagattccttctgaaatattcatcgcaattcgtatcggtttaaagtaaaaaagcaatgggaggtggtaaagacaagcatcatgatgagcaagagaaaggatttcatggttttccaggaggtggacattacccacctgctcaaggaggttaccctcctcaaggttacccaccacaacaagggtatcctccagctggaggctacccacctgccggatatcctcctggtgcttaccctgctgcgcccggtggttatcctcctgcacctggaggttaccctcctgctggctatcctgcacctggagctcaccattcaggacattctggtggtggactcggangcatgataacaagttcagctggtgcanccgcagcancttatggagctcacatgttggtcacgcctctcacaa

SEQ ID NO: 1300 - DNA, 413 bp, Arabidopsis thaliana
  unsure at all n locations
  Clone ID: ARABLI-10-Q1-B1-B7
tcgagatgatggagaacgttgagaatgtagcgaaagctgtggctaggcttgcgaggaaatgcaacgatcccaagttgaagtgctttgagaattgttttagtgatatgatgaagactggagctgacccttatggttggcagtttgggtggaagaaaatggataagaaagctaagaaaatggaacgtttcatatcatctaatgctagtctctaccaggagactgagattcttgctgatcttgaacagactttcaagagaatgaagagcaatgaatctgctactgacaatcttttggagtatcagaaaaaagttacatggaaaagacacgaagtgaagaatctgcgggatgtgtctctttgggaaccgtacttatgactataccgtcattctcttggttagatnagttttcacaat

SEQ ID NO: 1301 - DNA, 415 bp, Arabidopsis thaliana
  Clone ID: ARABLI-10-Q1-B1-C1
cgagctcgagccgaatcggctcgagctcgtgtttatctctccgacgtaaccatggatagcgatactctctcaggattattggaaaacgtcgccaaaaaattccccgatcgccgagctctctccgtttctggaaaattcaatctcactcacgcgcgtcttcacgatctaatcgaacgcgccgcttcacgccttgtctccgacgctggaatcaaacccggcgatgtcgttgctctcaccttccctaacaccgtcgagtttgttataatgtttttagcggtgataagagctagagccacggcggcgccgttgaacgcagcgtacacggcggaggaatttgagttttacctctccgattcagattcaaaagctattgttaacctctaaagaagggaaacgcaccggctcaaagaaacaa

SEQ ID NO: 1302 - DNA, 392 bp, Arabidopsis thaliana
  Clone ID: ARABLI-10-Q1-B1-C11
tcgagaacaatattgcccggtttgctaatcgtggatggcgtatttactactattatactcagtggacattcactttgatagcaatctacttcgggatgggatcattgctttcaatttatggatgtttacaatacaagaagcaagggaacactggacttatcgctgatcaagtaggaatcgatgcagagaacgggtttcgttcgcctcttatagatggtgacaacatggtttcgttcgagaagagaaaaacttctggttcggaagcactaaagtcatatgttcatctcttccagattatatatcacatgggtgctggagcagcctgtgcttacaagacagtatatattggaccgtgattttcccgtttctgtctttacaagactatgagatga

SEQ ID NO: 1303 - DNA, 408 bp, Arabidopsis thaliana
  unsure at all n locations
  Clone ID: ARABLI-10-Q1-B1-C2
ctcgagcgcagttcaattagggtttcaatctctctgctctgcttgtcatcancaccaccaccaccaccgtcgtcgtctctctgtatctctccggcgggttctctctctacttcccccggnggattaaaagatggaccantcttttattttgatattccgttagcttgttcagttattgtagaagctgtaccgtcaagacttttaatatctcaaatggatgatggtgggcatcgtgagaatggtcggcataaagcagcagttcagggccagtggttgatgcagcatcagccgtcgatgaaacaagtgatgtcgataatagcagagcgcgatgcancgattcagggagagaaatctggngatatcagagaaaaaagcaacagtagntgaaaaggacatggcgtttcttca

SEQ ID NO: 1304 - DNA, 415 bp, Arabidopsis thaliana
  Clone ID: ARABLI-10-Q1-B1-C5
cgagggaagcagctcaagtcctataaactcaaacacatcaacaagagtattcaagagggagatgctgtgttgatgcggtcgtcggagcctggaaaaccgtcgtacgtagcgagggtagaggcgatcgagacggacgcgcgtggatcgcacgcgaaagttcgtgtgaggtggtattatcgccctgaggaatctatcggagggaggagacaattccatggagccaaggaggtttttctctctgaccacttcgattttcaaagcgccgatacgattgaaggaaagtgtaaggttcacagtttcagtagctacaccaaacttgactctgttggaaacgacgacttcttctgtcgtttcgaagtacaattccactaccggcgcgtttgattctgacagagtcaccgtgttcctgcaaagt

SEQ ID NO: 1305 - DNA, 423 bp, Arabidopsis thaliana
  unsure at all n locations
  Clone ID: ARABLI-10-Q1-B1-C6
agttaaagtgtcatttttaggattttctaagaagaaaaaaaaaacagggaagannnnnnnnnnnnnnnnnnnnnnnnnnnnnnnnnnnnnnnnnnnnnnnnnnnnnnnnnnnnnnnnnnnnnnnnnnnnnnnncaggaggtcaaaaaattctttaaagagccgtttagaccaaacccatttttataatcatcaatggacgatgatggatttcgcaattggggatactatgaaccagcggctgcttcttcgtttaaaggtaatctcggtttgcagcttatgtctactattgaccggaacactaaaaccgttttaaccgggtcgtgaatccgaatccntaangattgggttcaaagggntcgtancaatcccnaagagcaagacatgaactatagcctgggattaatcaaaccaaaanggacaaa

SEQ ID NO: 1306 - DNA, 396 bp, Arabidopsis thaliana
  unsure at all n locations
  Clone ID: ARABLI-10-Q1-B1-C9
tcgagccgatatatcgttaccagagaaagagagctcagagatttagttagcttaatttttcttttcgttttgaaattaaggaagtgattgttatcaccggaggagagagagaaaatgttgggaattttcagtggagctatagtatcgccgccggaagagttagtggctgccggaagcagaantccgtcgccgaaaacaaccggatcanctttagtaaaccggttcgtccangaaaaatccatccgctgtttctgtacaagtcggcgactatgttcagcttgcttacagccatcacaactagagtcctctccggcctaagatnatttggagctaatgantaaatattnctgcttgttcnaaggctcacttgacaanntatgaaaccttgaaacaaca

SEQ ID NO: 1307 - DNA, 406 bp, Arabidopsis thaliana
  unsure at all n locations
  Clone ID: ARABLI-10-Q1-B1-D1
gagctaaagttcttctcgctcgtaggaaccagagagattctgtctgattaatgtggggtttatggttatgctagcgagatcaaagctagctcnagatgtgagcagaagatcacagtctttgcaaagaatctgctactacgcaagtctctcctctagattttcnggcggcggcggagatgatggcggcggcagcgcaccggaaatcggtggtaccgattcagcaaacnaatgggagaagctccttanaccattcgatctggattctctaaggaattcatttcacaagataactcccnttcanctcgataagctacttgagttanctctcaatgtatccacttcaatggagttgttctcatggaccggttctcanaacggttatcggtcactcnttcgatgtgtatca

SEQ ID NO: 1308 - DNA, 391 bp, Arabidopsis thaliana
  unsure at all n locations
  Clone ID: ARABLI-10-Q1-B1-D10
ctcgagtcttaacatcgtaggtatcgccaaccataaaaagaggaagttctagcttagcttcaacaagggacttgagatcaacaactggatacccatctcggagaagcagtaccagtgtttgaaaacctgtttcatttatcacttagcactgaagtagatttctgttggaatgttctaccaattctgcttgagaaatctccaaatctaaagactctcaccattcaggctttgcattatactactaatcactatggggatgagaacactgtttgcgattgtttggaggtgtattctttcttatcgtcctgccatattgaggttctaaagataacccagttcaagggagatatcggagagatggtgcaaataaaagcatatcttgggngaaatt

SEQ ID NO: 1309 - DNA, 387 bp, Arabidopsis thaliana
  unsure at all n locations
  Clone ID: ARABLI-10-Q1-B1-D11
cgagctcttctttcagtcatcacagaaaacaaaaaaaacaatggcggataagctcactgacgatcagattacagaatacagggaatctttcaggttattcgacaagaatggtgatggttccattacgaaaaaggagctcggtaccatgatgcgttcaatcggtgaaaaaccgacaaaagctgatcttcaggacttgatgaacgaagcggatttagatggtgatggaaccatcgatttccctgagttcttgtgcgtaatggctaanaancaangtcatgatcaagcgccgcgtcanactaaaanancaatggngganaagctcactgangatcagnttacagagtncagggaatctttcangttattcgacaagaatggtgatgnttc

SEQ ID NO: 1310 - DNA, 455 bp, Arabidopsis thaliana
  unsure at all n locations
  Clone ID: ARABLI-10-Q1-B1-D12
attgttcagcctgccnaagagcaatgnaatcgcatgcncccgtacgtaagctcagaattcggctcgaggaagaacaatggcttcctctatgctctcttccgctactatggttgcctctccggctcaggccactatggtcgctcctttcaacggacttaagtcctccgctgccttcccanccanccgcaangctaacaacgacattacttccatcacaaagcaacggggggnagagttaactgcatgcangtgtggcctccgattggnaaagaagaagtttgagantctctcttaccttcctgaccttancgattcctaattggctaangaacttgactancttatccgcaacaagtggattccttgtgttgaattcnaagttggagcacggatttgtgtaccgtgagcacggtaactcaccccgggtactatgatggacgggtactggncaatgt

SEQ ID NO: 1311 - DNA, 418 bp, Arabidopsis thaliana
  unsure at all n locations
  Clone ID: ARABLI-10-Q1-B1-D2
tcgagcaaaattttcaggagagagaatcaaaccaaaattttcgacgacggtaaattgatgtcgtcggtgatggttgaattgccgtccggtgtagtatccggctttcgtctgacatatattggcttccacagcagtacatggtcggcccttgtctagcatcatcggctctttcagcggtgatggctagctcacggtgttaatccggcgtagttcggttttcttttccttttggtttatatcacggttacgtttcgaccgttgattgtctttagatcagaattcattgggtatgtgtgttggtgatggcgttggttttcaatccaaagcttgcttaattaagatctaattccaacctatcctttgagtttaaaggtttacggataataattangcagtttgcgtttttgagatgaagatt

SEQ ID NO: 1312 - DNA, 416 bp, Arabidopsis thaliana
  unsure at all n locations
  Clone ID: ARABLI-10-Q1-B1-D3
gagcaggttatactcacagcaatggcgctcatgggcagcattcttcattcaagcggcatggaggaaacattgcaaaaggaagctttctaagacangagacaacgagaatattccacaaggcacgcaactcaatcttgcatcaacgctctacgtgtccagatttgtgtccaaagctttgcaaaatcgacgaaaagatacagcagattgttccagctctcctgatatgtcacctccggtacctcataaaccagccgatctcgagtttgcaaaggctgaagcatagtgtgtctttgaaggaaaatgactctctacacanacaangtagtgaagactccatggtaagctcaaaacatgccctacaacgtaactttccaagttantgtcaaataattgactcatcaccacgtcctagatat

SEQ ID NO: 1313 - DNA, 413 bp, Arabidopsis thaliana
  unsure at all n locations
  Clone ID: ARABLI-10-Q1-B1-D6
cgagcgcgacgactgtgagagtttgtttcgcgaacattctctgagtttctctcgacgcgacggcgattgcgaatgtcttctccttctgattctcgtctctctgtgtctccgggataagtaatcgaagatgaatatgattcagcgattcatgcaatctatggcaaagacgcgtggcctctgtcatccagattgcgtaaaagcaagtagtgagcaagaagattacgatgcgtctcagctcagtatttggtggataatgctgggaaggaagacgaccagngagaaatggatgaagcaagctctcagttcactatcganaacttgcatcagtatatggtggaaaatgtctggaataagangtaagatgtgcanggagaaggaacaaccactcactgtcaaagactgccttgaatgtg

SEQ ID NO: 1314 - DNA, 392 bp, Arabidopsis thaliana
  unsure at all n locations
  Clone ID: ARABLI-10-Q1-B1-D9
cgagcttcttctcatcnctcncccagaggtgttgttgccatggctggatccggaaagtttttcgttggaggaaactggaagtgtaacgggactaaggacnccatcgccaagcttatcnccgatctcaacagtgcaaccttggaagcagatgtagatgttgttgtgtcacctccatttgtctacatcgaccaggtcaaatcctcgttgacagaccgtattgacatatcaggtcagaactcttgggttgggaaangtggagccttcacnggtgaaatcagcgtggaacagctcaaagaccttggctgcaagtgggtcattcttgggcattccgaacggagacatgtcatcggaagaanaagatgagtttatcggggaataaaactgccatatgc

SEQ ID NO: 1315 - DNA, 412 bp, Arabidopsis thaliana
  Clone ID: ARABLI-10-Q1-B1-E5
gagattttttctctataaatcctttattattgttataaaaactccgatggatcggcaaaattccgatgacatcatgagatttctcgatggaatggctagctccgacgacgttcttttcggttttcttgacgaaggaaaccagtcaccggaagatttctccgtaaacctcaacgccggcgaagatgacggtgacgaagacgacaataataacaattctgaagataacaaagctttttggcaggaacacgaacaacttcttcaggggacactgtataggacaagttccattgagacaaagattagacaagctacaaaagaagcgttgaaacaagttaaatctaagggtctttattgtgtttgccggcgaccagtggacggcggttgccggagttgcttacgtggcgaaatctct

SEQ ID NO: 1316 - DNA, 421 bp, Arabidopsis thaliana
  unsure at all n locations
  Clone ID: ARABLI-10-Q1-B1-F4
cgaggagggaatggagagttgctgtcggagcgtcatagcttcaaggacgtttcatctgcggtcaagtggccgtctatttccctctcttagcttaactcatctcaagggcaagctatctctctccatcaactcgttttcctccaagattcagtctcatgctctccgaggagttggtataggcgagtcagataagaaaaatcccctgccgcgaggggccggagaaggagtcaaggaagatgcgaggagtaagctgcttcatgtagttttggtctctcctcagattcctgggaatacaggttgcattgcaagaacatgtgctgcctcaactgtttggtccgcatttantcgggccattaaggttttcaagttggatgacgccaggagttaaaccnagctggtttggattaattggccctttgtt

SEQ ID NO: 1317 - DNA, 417 bp, Arabidopsis thaliana
  unsure at all n locations
  Clone ID: ARABLI-10-Q1-B1-F6
tcgagcttcctttttctttccttatatcgagaaaagcctctgcctcatatagagataactaaacagaacagagcaagaactatacagccataacaatggctgtcacaaaacttattctctttgcttctgcattacttctaacagctctatttatcggcgttaatgcatccaggtccaatgaaacatggcatgaacatgcagttgagaacccagatgaagtcgctgccatggtggacatgagcattcgaaacagcacagagcggagaagattaggttacttctcctgcgccaccggcaacccaatcgacgatttgctggcgtttgcgaccgcaaatggcagctccgtcgcaaacgtttagccgattgctcaatcggatttgggcgcaacgcaatcggangccgcgacggtcgtttcta

SEQ ID NO: 1318 - DNA, 420 bp, Arabidopsis thaliana
  Clone ID: ARABLI-10-Q1-B1-F8
tcgagcttctctctgcagaaaccgtaattaaaaaccccccacaacttcttcaacataacgtcttcttcttccatctttcgttgcattcacgtttttaaaggttctctgaatcactccattaaaaatagctttgaacaagttttctcaatagtcaacaaaaacaatggccgttgaagctcaccatctaaatcctctgttctcttccaacagagaaatgattcatcccgttgaagcaagcggtgtagtctataacacccagatgagatacggcaccgttccgacgtttaaccccaccgtggaatgtcaaacttctctgtttaacccaatctacaacatctcaacaagtcgatcgtttggttcatcaatccatgaaaccaacgatacaagtccgttgatagttctctcacattcaacaagcga

SEQ ID NO: 1319 - DNA, 412 bp, Arabidopsis thaliana
  unsure at all n locations
  Clone ID: ARABLI-10-Q1-B1-G1
gaggttaacggatgcatgttgggctctctcttacctttccgatggcacttcctcatcagtcgaatgaatcaggcgttcaagggctgggaggaagtgttaacggatgcatgttgggctctctcttacctttccgatggcacaaatgacaaaatccaatctgtcattgaggcaggtgttgttcctcgactcgtcgagcttctccagcatcaatcaccatctgtgcttattcctgcccttcgtagtattggtaacattgtcactggagatgatctgcagacacagtgtgtaattagtcatggtgcacttcttanccttttgagccttctgactcacaatcataaagaagagcatcaaaaaggaagcttgctggacaatctcaaatatcactgctggaaacagggancagattcag

SEQ ID NO: 1320 - DNA, 418 bp, Arabidopsis thaliana
  unsure at all n locations
  Clone ID: ARABLI-12-Q1-B1-E7
ctcgaggggtcgtgtcactactccatccgaggaggattcaaacaacggtttaccggttcagcaacccggtacaccgaaccagcgaaccagagttcccgtgagtcaattcgcgccgccgaattatcagcaagctaatgttaacctatctgttgggaggccatggagcactggtttgtttgattgtcaagcagaccaagccaatgccgttttgaccacaattgtaccttgtgtaacatttggacaaatagcagaagtgatggatgaaggagagatgacttgtcctcttggaactttcatgtacttattgatgatgccggctttatgctctcactgggtgatgggatnaaagtatagagaaaaaatgaggagaaaatttaatccttgtggaagctccatattcagattgtgccagtcatgt

SEQ ID NO: 1321 - DNA, 420 bp, Arabidopsis thaliana
  unsure at all n locations
  Clone ID: ARABLI-12-Q1-B1-F3
tcgagagaaaaagaagagagaatgctctcagtctcagcctctcctcaccaccactaaccccagaagaatcctcnnnnnnnnnnnnnnnnnnnnnnnnnnnnnnnnnnnnnnnnnnnnnnnnnnnnnnnnnnnnacaacactagaggaatgggtnnnnnnnnnnnnnnnnnnnnnnnnnnnnnnnnnnnnnnnnnnnnnnnnnnnnnnnnnnnnnnnnnnnnnnnnnnnnnnnnnnnnnnnnnnnnnnnnnnnnnnnnnnnnnnnnnnnnnnnnnnnnnnnnnnnnnnnnnnnnnnnnnnnnnnnnnnnnnnnnnnnnnnnnnnnnnnnnnnnnnnnnnnnnnnnnnnnnnnnnnnnnnnnnnnnnnnnnnnngtttcttcttctcgtcctcaacgtcgatttctcctcaaccggcgacat

SEQ ID NO: 1322 - DNA, 392 bp, Arabidopsis thaliana
  unsure at all n locations
  Clone ID: ARABLI-12-Q1-B1-F4
tttaatggaagcagttcgttcaacaacaaccttatctaattttcatctactgaatattttagtcctgcgttctctcaagcctctgcatcgtctatctttctctttctctgcctcagcaatggagagtgatgcatcttgtagcttagttttgtgtgggaaatcctctgtggaaactgaggtagcaaagggtttgaagaacaagaactctcttaaactcccagataataccacagttncactcattttanaatcctgagggctaagaaattgggttaaanatgatgataaatccctcaatctttcantcctnaagaaaccnaatangaactcancggtttgggacgggtncccattttggtcntccnncgnttggcctccaaccaangaggttt

SEQ ID NO: 1323 - DNA, 427 bp, Arabidopsis thaliana
  unsure at all n locations
  Clone ID: ARABLI-12-Q1-B1-G1
ctcgagttcttcccacgctgtgtgaccctaggagggcgacgaggccgggaagaactcactgtgtcaagctggtccatcgtttgtaccctgaggtggacccgtccttaaacccggaccacgtccctcacatgctacacaagtgtcctgactcgatccctgacccaaaggcggtccagtacgtgcgtaacgaccgtggcacccccatggtgctagacaacaattactaccgtaacatcctagacaacaagggtttgctccttgtggaccatcagctcgcacacgacaaacgaaccagaccaatcgttaagaagatggctaaggaccaaggcctacttcttcaagggagttcactaagggcaatccagatnttatccgangaacaaaccctttgactggctctaagggtgaagatnaaggaagcaatgtt

SEQ ID NO: 1324 - DNA, 471 bp, Arabidopsis thaliana
  unsure at all n locations
  Clone ID: ARABLI-12-Q1-B1-G3
agaagagcaaanactcgcatgnacccgtacgtaaactnaagaattcggctcgagatcaaacggttctggtttcggtgtcgttctcgcaacacataacgctgattcggggagacttgcgtcgaggaaagcgagtgacctcgggatcgngaancagaacgggaagatagagtttgcacagntatatggtatgtcagatgcattgtccttcgggttaaagagagcagggttcaatgttagcaagtacatgccgtttggacccgtcgcaaccgctataccgtatcttctccgacgcgcttatgagaaccggggaatgatggccaccgggagctcatgaccgtcaactcatganggatggaacttaagaggagattaatcgccgggattgcgtaaagagaagagtatggagccattaaatgaaaattgggaaatgtagatgaataaatttcctcctatgtagtttaagaaaattga

SEQ ID NO: 1325 - DNA, 417 bp, Arabidopsis thaliana
  Clone ID: ARABLI-12-Q1-B1-G6
ctcgagatgtttggcgttgatcggtttgatgctattctaccccctggaacaggagcgattatggctgtcggagcatctcaaccttcagtggttgcaactaaagacggccgcattggcatgaaaaaccagatgcaggtgaatgtgacggcagatcatcgtgtcatctatggtgctgatcttgcacagttcttgcaaacattggcaagcattattgaggacccaaaggaccttacattctaggccaaattactgcttttcgcatcccaagtcttctctgcttttgattccatgggaagcttgtatttctgcggtaatcagtttccttgatagaacaaaccttttaaagattaaacataatcatttctttgtttgagatatatcctccgcaacattttctgcatggaaaaggccgtccca

SEQ ID NO: 1326 - DNA, 404 bp, Arabidopsis thaliana
  unsure at all n locations
  Clone ID: ARABLI-12-Q1-B1-G9
ctcgagtcctcttgttgggttagatacacatccgagaatcgatctcgctattgacggagcagacgaggtagatccgaatcttgatttagtcaaaggtcgtggaggtgctcttctccgtgagaaaatggtggaagctgtggctgacaagtttattgttgtggctgatgataccaaactcgttacaggactcggtggaagtggattagctatgccggtggaagttgttcaattctgctggaactttaatttgattagattgcaagacctcttcaaggaatttggatgtgaatcaaagcttagagttgatggtgatggcaagccttatgtgactgataacagtaattacattattgatttgtattttaagactcctttgaangatggattcnctgcgggtaaagaaa

SEQ ID NO: 1327 - DNA, 418 bp, Arabidopsis thaliana
  unsure at all n locations
  Clone ID: ARABLI-12-Q1-B1-H1
cgaggcgagtccgtgcgactccgaagctcttcacctacgttctcgtcggtttcatcgctctactcggcttgacttgcctctactacggctcttcgttcgctcccggatccagaaagtccgatgagttcgatggatctaataaccgcgttcgcaccggaatcggatccttgaggaatcganatattgtgcttgcantgagccgtttcgaagttcctaaaagtgttccgatatgtgattcgagacactcggagttgataccgtgtttggatcggaaccttcattaccaagttgaaattggaaactcaatttatccgttaatggagcactatgagcatcattgtcctccatcagaacggcgtttcaattgccttgttccgcctcctggttggttataanatccgttaaggtggcctggtga

SEQ ID NO: 1328 - DNA, 425 bp, Arabidopsis thaliana
  unsure at all n locations
  Clone ID: ARABLI-12-Q1-B1-H12
actcggnattcggctcgagcacaaagataaggaaaccatgtctgtgtcagcgatctttggtaccggaatcgtcaccgttgctgcttctccggttctccgccaatttcaagttccaaaattgggtaatggaggaggattagggatggtgatagagtgttcgtcgaggccacagaanaaatcgacggctcatcacaggaagacgaggccgaanaagactcanccttgggacattaagagaaagcctactgtttacgctcctcttcctcctcttccggcggaatggantcccgtttcactctcgcttctgacgacggtggtgctgccactgctgcgggaagatttggttccaaggcgctgccnatttggtanganttacctgccgaatttggnttgtantctaagtttgagaaacttttggttggttg

SEQ ID NO: 1329 - DNA, 417 bp, Arabidopsis thaliana
  unsure at all n locations
  Clone ID: ARABLI-12-Q1-B1-H5
ctcgaggagaaaaggggcactaaacacagtacacgagattcttgagagattggaggcccatctaaaggcggatggccaattcactgttgttgcaaacatgagaggaaatagtgctcaggaagtggctgagcgtgtgctgagccaaccatcattgtcaggattgcagggaccgacaataagcccagtgtactgtacacaaaatggaaaagtatcggttgactactatgccatcgtgatttgtgtaccaaaaaaggccctatacgactctgtgaagcaacttagagcggccggaggcagtggggtattagtttcacctttgacctacatttttgatgaggatactccaagatggggtcagctcctganaaacctccgggatttaaatgctttggtaaggaagatgcatatgctgaacaa

SEQ ID NO: 1330 - DNA, 423 bp, Arabidopsis thaliana
  unsure at all n locations
  Clone ID: ARABLI-13-Q1-B1-A1
ctcgagatatatcacagccatggtggttgtcactcacatctccacttccttccaccaaatctctccttccttcttccatctccgtcttcgtaatccctccaccacttcttcgtctcgtcccaaactcgacggtggtttcgctttgtcaattcgagcttacatagagaaaccaaactctttctccaccttcgctaacaaagtcatcggttctcttcccgttatcggactcctcgctcgaattatcagcgatgaaggcggcgttggtagagatctcgtcgatttcgctgagtttaggaaacgagttgggaataaatgtactcctgatgantctaaggcttctaagagtttcaacaacgacgaagnaangnaagtgaacccttggangtgcntcngtgttgttgggttgctgcaataggtgcangt

SEQ ID NO: 1331 - DNA, 417 bp, Arabidopsis thaliana
  unsure at all n locations
  Clone ID: ARABLI-13-Q1-B1-A10
tcgagcttggattctttctggtcaccatggcttcggttactttctctgtccccaagggtttcactgaattctcaggattgcgaagctcctctgcttctcttcccttcggcaagaaactttcttccgatgagttcgtttccatcgtctccttccagacttctgcaatgggaagcagtggtggatacaggaaaggtgtgactgaggccaagcttaaggtggccattaatggattcggtaggatcgggaggaacttcctgagatgttggcatggtcgcaaggactctcctcttgatatcattgccattaaagacactgggtggcgtcaaacaaggcttcccaattacttaaatacnaactccaatccccgggnaacctttgaatgcctgaatgtccaaaacctttctgggagaanaactg

SEQ ID NO: 1332 - DNA, 493 bp, Arabidopsis thaliana
  unsure at all n locations
  Clone ID: ARABLI-13-Q1-B1-A3
atgaattanttggccgcccatanacaaaganannacgtcccanncatacgtaanntcngaattcggctcgagcgaatttctcgtagattcaaattggggctnnnnnnnnnnnnnnnnnnnnnnnnnnnnnnnnnnnnnnnnntctgtttctgaatcaacagctttgctttgtctcaaagagctttatcttcttctctatcgttccaagatccttgttgattactgcgctcaatctagtaagttatggctcttgttacaaaacccttcgatttctgggtatttccatgatttgaatcaagaaatttcgactcttttggatgttttacctgtcaatgatcttggtctaagcgatgacattagagagcaaatcgagttgttgcagaagacagtcaaggaaagcgaagattgtatatcgataagaacgatgagtcattacgtgaatcaatccaatccgtttcctgatgggtttgagaacggtaagattccgaagttc

SEQ ID NO: 1333 - DNA, 453 bp, Arabidopsis thaliana
  unsure at all n locations
  Clone ID: ARABLI-13-Q1-B1-A5
aaanggccggcccacgcgtacgnaaactcggaattcggctcgaggcagatcttcgtcaagactttgaccggaaagaccatcacccttgaagtggaaagctccgacaccattgacaacgtcaaggccaagatccaggacaaggaaggtattcctccggaccagcagcgtctcatcttcgctggaaagcagcttgaggatggacgtactttggccgactacaacatccagaaggagtctactcttcacttggtcctgcgtcttcgtggtggtttctaaatctcgtctctgttatgcttaagaaagttcaatgtttccgtttcatgtaaaactttggtggtttgtgttttgggggccttgtataaaccctgatgaataaantgtccaacaagttccgttcctggtaaccccttccttccaaatgacaagtccaacttcttccttaaaaaaaaaaan

SEQ ID NO: 1334 - DNA, 461 bp, Arabidopsis thaliana
  unsure at all n locations
  Clone ID: ARABLI-13-Q1-B1-B12
ttttangccgccagaagaganaaagtcgcntncacncgtacgtaagntcggaattcggctcgagcacaaaagaaaaaaacacaagtttcctgattcctctcttctctgcgattttagctctagggatcgatttcggcgtcaaacgtcgtcgttttcgaccatctcctacttactactactcagctgcttctgccttctanggttctttctccgttcaccctccgccgcacgagttgtccagctccgccgcattcttctgtctccagatcaccggctttaagcaaatccggctgcttttcactctaattcgtaaaccacttgtgggganttgagcatcttttacattctccaaaatctctgctttcnagggttttggtgagttttggtgggatgaatantgtgttcagtgattagattcngaatggataaagctcgctaagctcaatagcagtcaanaagtc

SEQ ID NO: 1335 - DNA, 475 bp, Arabidopsis thaliana
  unsure at all n locations
  Clone ID: ARABLI-13-Q1-B1-B3
gaagagcanagaaagtcgcntccacccgtacgtaanatcngaattcggctcgaggcatgtctttcttctgggctttttccttttctccttcatctttcatttgccgattccttatctcctctttcagctccagttcaaaattttattcacctaaaccattcttgtccaagtagtatattaacgtattcaagaaacagcacttacttcaccaatctcaaaacacttttgtcctctctctcttcccggaacgcttcatactctaccggattccaaactgccacggcgggacaagctcccgaccgtgtcaccggacttttcctttgtcgcggagacgtctcacaagaagtttgccgtaactgcgtcgccttttccgtcaaaggagactttataatggngtccgtataacaaaagaagtccgtgctttaatacgatgaagtgtatgcttanatactcccaccgaaatantctctcgaac

SEQ ID NO: 1336 - DNA, 480 bp, Arabidopsis thaliana
  unsure at all n locations
  Clone ID: ARABLI-13-Q1-B1-B4
ccagaagagacanaaagtcgcgnccnacncgtacgtaanatcngaattcggctcgagaaaaactccaaaacctctctctctttcttcctcacacgcttttttcatttctcaactgtaaaaaatctgatccaatggagaaagacgatgcaacggcgtcgttttcacctagcttcagtacttattccggcgatagactcgtcgaaatcgccgaacgagtctgttacaaagagaaatcagacgccgaattcgagttttcgacggcggcgacttcttcttccggtgacggtggactagttttccctgtatttaacaagaatctaatctccggagatgtttctccggagaaagtaattccgttgaaggatctattcctccgtgaacgtaacgatcaacaaccaccgcaacaaacatactcatccgtcttccgacgaagaagaagaagacgacgagtttgattcgattccgagcgaaatctattgg

SEQ ID NO: 1337 - DNA, 420 bp, Arabidopsis thaliana
  unsure at all n locations
  Clone ID: ARABLI-13-Q1-B1-B5
cgaggaagttttggctgcaagaggtgtcaanccaactctgtctcntaatctgaatactcttgaattaatcgaggcttcnggagtgaagcgtcttctgttttgcggtgtgggttgccaagtgcaagcattgagatcagtggagcancatctgaatctggaaaagttgtatgtactaggcaccagttgtgtggacaacggnacacgatatggactagacangtttctgaaagcagctagtaaagagccanagactgttctccattatgaatttatgcaagattacaaggtccaactcaaacacntggatggacacattgaaagaggttccctatntctctctaactgcaaacgaattagtanatgtcatanctccatcgtgttacaagctgcnttgattacacaaatgcattaacggatttg

SEQ ID NO: 1338 - DNA, 420 bp, Arabidopsis thaliana
  Clone ID: ARABLI-13-Q1-B1-B7
ctcgagaatgtctctccaagaatctgcgccttcactcgccgtcgttggcgttaccggagccgtcggacaagaattcctctccgtcttatccgatcgagacttcccttatagctccatcaagatgcttgcatcgaaacgctccgcagggaagcgtgttgccttcgatggccatgaatacacggtggaggagctcacggcggatagcttcaacggtgtagacatagctttgttcagtgctggtggatccataagcaaagagtttggtcctctggcggcggagaaaggaaccattgttgttgataatagctcggcttttaaaatggttgatggagttccgcttgtgattcctgaagtgaatccagaagcaatgaaagggatcaaagttggaatgggcaaaggggctttgattgcaaaccctaa

SEQ ID NO: 1339 - DNA, 433 bp, Arabidopsis thaliana
  unsure at all n locations
  Clone ID: ARABLI-13-Q1-B1-C10
ctcgagcacaacacacacacacacagagagcaagcaaaagaggcggctagggatcagagagtggttccttcactgaaagtttcttctttttcattctcntcttctccttcagattcctnnnnnnnnnnnnnnnnnnnnnnnnnnnnnnnnnnnnnnntctgnnnnnnnnnnnnnnnnnnnnnnnnnnnnnnnnnnnnnnnnnnnnaaccaaattcgtctccacgattgtttcttctgagttttgatttttcagatctcgcttcttttcccgatttgttcaaatcatcatgggcttaacctggatggtataaatggggattaaatttcattccacaaaagctccgaagttttaattnattaatnggctaactggttaaccnggtggtataaaaanaaancttgtggtgtggtgggttccccnaagttttcaagg

SEQ ID NO: 1340 - DNA, 411 bp, Arabidopsis thaliana
  unsure at all n locations
  Clone ID: ARABLI-13-Q1-B1-C11
ctcgagcaaaagaacaccttgggctaccaaacagggacgatgtgaaggccggggttatagcatacaagatcgccgctcatgcagctgatctagccaaacagcatccacatgctcaggcatgggacnatgcgctgagcaaagcgcggtttgagtttagatggatggaccaatttgctctgtcgttggaccccatgactgctatgtctttccatgatgaaactcttccagctgatggagccaaggttgcacacttttgctccatgtgtggaccaaaattctgctctatgaagataacagaagacatccgaaagtatgcanaggagaatggttatggcagtgctgaagaagcaatcagacaaggaatgggatgctatgagtgaagaattcaaacatcgcaangaaaaccattaa

SEQ ID NO: 1341 - DNA, 467 bp, Arabidopsis thaliana
  unsure at all n locations
  Clone ID: ARABLI-13-Q1-B1-C12
aaattttangccgccagaagagnaataacgtcgcatncacncgtacgtaagntcngaattcggctcgaggggtcttcctcgtttgctccgcttaagcaccatgaaggtcaccgtcgtctcccgcagcggcagagaagtcctcaaagctccccttgacctccccgattcggngactgttgctgatctgcaagaagcgtttcataagagagctaagaagttttacccgtcgaggcaaagactgactcttcccgtgactcctggatngaaggacaaacctgttgtcctcaataacaagaaatcactgaaggaatactgtgatggaaacaacaactccttaactgtaatcttcaaaagacctgggggcacaagtttcctaacgcaaaactcctcctcctccaataaccttggcctctcctaancaaccntgtctttaacaacttcccggttaaaaanttccttggggtaat

SEQ ID NO: 1342 - DNA, 476 bp, Arabidopsis thaliana
  unsure at all n locations
  Clone ID: ARABLI-13-Q1-B1-C3
ccgaagagcacanaaagtcgcntccgacccgtacgtaaantcngaattcggctcgagcttctctcattttcttcttctccaagcccccctcctttctatatatatctgaaattggtcttttataaaacaaacttccatttttcgtatggctgcttcttttcttacaatggacaatagcagaaccagacaaaacatgaatggttctgctaattggtcacaacaatccggaagaacatctacttcctctttggaagatcttgagataccaaagttcagatcttttgctccttcttcaatctctatctctccttctcttgtctctccttccacttgtttcagtccctctctttttctcgattcccctgcttttgtctcctcctctgctaacgttctagcttctccaaccacaggagctttaatcacaaaacgtaactaaccagaaaggtataaatgaaggagacaaggagcaacaacaa

SEQ ID NO: 1343 - DNA, 433 bp, Arabidopsis thaliana
  unsure at all n locations
  Clone ID: ARABLI-13-Q1-B1-C7
gagaagaaaaacagagcatcataagaagaaaaaaaaaagcaatgggatccttagttcatgtgaaagaagccacagttattactccttccgaccaaacaccttcttctgttctgtctctctccgctttagattctcagcttttcctccgattcaccattgaatacctcctcgtttacccacccgtttccgacccggagtattctctctccggtcgtctcaaatccgctctctctcgcgctctcgttccttacttccctttctccggccgcgtccgagaaaaacccgacggcngcggaggtctccgangtcaaattgccgtgggcaaaggtgctcctggttcctgaaacccgtttcctgaaatcctcacgtngccnttgactttcaagaaaacctccccgggaacgttaactaactgggagaaaagcntcctttc

SEQ ID NO: 1344 - DNA, 426 bp, Arabidopsis thaliana
  unsure at all n locations
  Clone ID: ARABLI-13-Q1-B1-C8
ctcgagcgaaaacaatggaaaaagcaacggagagacaaaggatactgcttcgtcatcttcaaccttcgtcatcttccgacgcctctctctctgcctcagcttgcntgtccaaacacantggtgnatatcaanatgganatgangttgtcattgtcgnggcacaaaggactgcactttgcaangcaanacgtgncagcttcaangatacatttcnagacgagttcttgcctctgtattgagagcattgataganaaaactaatgtaaacccaagtgaagttggtgacattgtaatgggtactgttttgggaccaaggatctcagagagccatgtgaatgcangatggctgcgttctangctggtttccccgaaactgttcccatcangaatcgtgaacanacagtgttcatctgggcttcangctgt

SEQ ID NO: 1345 - DNA, 414 bp, Arabidopsis thaliana
  Clone ID: ARABLI-13-Q1-B1-D11
ctcgagaattccgcaccaccacatccacgtgtctcaacctccactctcctacgtctctccaccgtcgccggcgtctgcagcgtctgcttcatcaattcctcgccgtctctctgaaagaaaaaaaggaaccacctttctctctctgttttgctcgatctgttgtaatttactctgtagcgatcatcagatcgccggcgttttaaaccgccatgaaactctccgacgttggattagacgttgtcaaaactccgagattggttaaattgattgcgtttgcgtttctctcaatctcaacaatttttctcttcaatcacttctcagattccttctcttaaccaatctcttccttttcccatctcctctttcttcaaacgtcaaccgaaagctaatcaaaaccaacataacatccggtcg

SEQ ID NO: 1346 - DNA, 475 bp, Arabidopsis thaliana
  unsure at all n locations
  Clone ID: ARABLI-13-Q1-B1-D3
ncagaagagacacaaagtcgcntcnacncgtacgtaaantcngaattcggctcgagtcttctccttcacctttgagtttctcgaggctcttttcttaattttactgctaaatagtagtgtttactgtcttcagccgccgtcgccggattccattatcgaaggcgacggaagcagtatcttaggttttgtccgacgaagctccgtttgattgttatcggttccgttgtattcgtcgatcttccattttcgcatttgttttctatatccgaagatgggaagcagtccagctccgtttgccgatattggcaagaaagccaaagatctcctaaacaaggattacatttttgaccacaagtttactctcacaatgctgagtgctacangaacggaatttgtggctactgggtttgaagaaggatgatttcctttttgggcgatataagcacactatataaaggtcaaaacaccattgttg

SEQ ID NO: 1347 - DNA, 483 bp, Arabidopsis thaliana
  unsure at all n locations
  Clone ID: ARABLI-13-Q1-B1-D4
gnacgcccagaagagacataangtcgcatncacncgtacgtaaactcngaattcggctcgagcgaggtctctctatctctctctttcgtacacttcgcgcttctcttcctgtcagaggcgtttctcatggctcctcttactctctccgttgatgtgaagagctcttcagcgacctctcatgatgtttcgaagagggtaatgcagagttcacagctcaaaataaacaaaggcttttttgcatctgttaatacacaagaagataaaccctttgatttcttccgcactctctttgaggggtttatagcaggaggtacagctggagttgtagttgaaacagctttatacccaattgatactattaagactagacttcaggcagctcgtggaggtgggnaaaattgttttgaanggtctttattcaggattagctggaaatatcgctggtgtcntaccggcttcggctttatttgttggagtttacna

SEQ ID NO: 1348 - DNA, 491 bp, Arabidopsis thaliana
  unsure at all n locations
  Clone ID: ARABLI-13-Q1-B1-D6
attttccaggccgntctatagaaaaganatgacgtcncanncacgcgtacgtaaactcggaattcggctcgagccgcactgcaagcactttggcaattgccaaggttaaagaactcgctgttagcattgaggggaagagtgtagaggaaaagaaaggtttattggctaaatgtgctgctacgactctctcatctaagcttatcggtggagaaaaggagttttttgctacaatggttgttgatgctgttatggccattgggaatgacgacaggctaaatctgattgggatcaagaaggttcctggtggcaatatgcgagactctttcctcgttgatggtgtagctttcaaaaaaacattctcgtatgctggttttgagcaacagccaaagaaatttcttaaccccaaaattctcttgcttaacatcgaattggagttgaaatctgagaaggaaaacgctgaaattaggctgtcagattcatcacagtaccag

SEQ ID NO: 1349 - DNA, 424 bp, Arabidopsis thaliana
  Clone ID: ARABLI-13-Q1-B1-D8
ctcgagattcctccgaaagtttatagatttcactctcccccgaactatacaaaattccctcaaaaggaaaaactaaaaagccgatcttggcttttttgtttctgagtgcatctcgatacttggaagcattctttggtgaggctgattcattctcatctgtgaaagtctttggcttttgaagcaatactatggaaggaattcagcatcctatacctcgcactgtcgaagaggtttttagcgactttcgtggtcgtagagctggtctcatcaaggctctctctactgatgtacagaagttttaccatcagtgtgaccctgagaaggaaaacttgtgtctttatggacttccaaatgaagacatgggaggttaatcttcccgttgaggaggtccctcctgagcttcctgaaccagcgttaggcatca

SEQ ID NO: 1350 - DNA, 425 bp, Arabidopsis thaliana
  unsure at all n locations
  Clone ID: ARABLI-13-Q1-B1-E1
ctcgagccagctcagatgagtctggagtttccaagtttaaaacctctctacctcgatttgagcaaatcctgatttactctcatcctcatcatctctcatcatcgagattcatagtctcttttgccgcttggattcttccaaggttagtgagctgctatggcaactcatcagcaaacgcaacctccttccgattttcccgctcttgccgatgaaaattcccagattccagaggctactaagcctgctaatgaggttcagcaagctaccatagctcaggatcctccaacatctgtgtttaagaattctgaaccaatacgggaggatnaaattcagaacgctatcaaattcctttcgcaaccgagggttanaggntctcctgttatacatagaagatcttttcntgagangaaaggtctcactaaaaa

SEQ ID NO: 1351 - DNA, 360 bp, Arabidopsis thaliana
  unsure at all n locations
  Clone ID: ARABLI-13-Q1-B1-E5
ctcgagcttccttctccaaaaactgcgaataaagaagatggactgtgtgtgatttgtgtggatgcaccatctgaagcagtgtgtgtgccgtgtggacatgtcgccggatgcatttcttgcttgaaagagattgaaaacaagaaaatgggatgtcctgtttgtcgcgccaacattgatcaggtcattaagctatatcatgtttgaagcatatctcctctatggctggaagatattgaaactatctcctattttttactttgtctttaaaagataactacaaatttttttattgtgtgtatgttatgtggtgaagtcaaagaagtcgaaatatagaatcacgacaaanaaaaaaaaaaaggg

SEQ ID NO: 1352 - DNA, 425 bp, Arabidopsis thaliana
  Clone ID: ARABLI-13-Q1-B1-E8
tcgagcacactttctctctctctctctagaaaaagaaagaaagaagaaaaacttattgttattcccatttcgcccctatccgaaaaatggttgaagctcaatcatggacaacgcggcggatgagcaatcctagattcgacgccgccgcaaccgccgcaccaaccatcgtagacatccccggaacaccaccacactcctccgcttcttcaccactcaaacccttcttcctctcttcccccaccgtatcaccaacaatcctcacggcggctataatcgccgcctggtttggctcaaatataggagtcctcctcttaaacaaataccttctcttctactacggtttccgttacccaatcttcctcaccatgacacacatgttatcatgcgccgcctatagctccgccgtaatcaatatcgccggaatc

SEQ ID NO: 1353 - DNA, 423 bp, Arabidopsis thaliana
  unsure at all n locations
  Clone ID: ARABLI-13-Q1-B1-F1
ctcgaggcacagttgagcaggacggaaagaccatcaaactccagatctgggacacagcaggccaagaacgtttcaggacaatcactagcagctactacagaggagctcatgggatcattgtcacttatgatgtcacagacctagagagcttcaacaacgtcaaacaatggctgaatgaaattgaccgttacgctagcgaaaatgtgaacaagctactggttgggaacaagaacgatctcacttcacagaaagttgtatccactgagacagctaaggcttttgcagatgaacttgggattccattcctggaaacaagtgctaaaaatgcaaccaatgtggaagaagctttcatggctatgactgctgcaattaagacaagaatggctaaccaaccagctggaggtgccaagccancaacggtcc

SEQ ID NO: 1354 - DNA, 474 bp, Arabidopsis thaliana
  unsure at all n locations
  Clone ID: ARABLI-13-Q1-B1-F4
naagagacacaaagtcgcatcnacncgtacgtaaactcngaattcggctcgagaaacaatgacggacacttgtcagcggctgaactaaaggcgcttatcattgggatcagctttgaggatatagattttgacaaggatgatgctgtgggaaaagttctccaagattttgataagactcttgatgagcaagttgatcaagaagagtttgtccgtggaattaagcaatggcttatccaggcaatgggaggtgctccatctggtcctgaagctggccctcgaacaatgaaattccttgacaatttccatgtgcaaacaaagagagagcatgctttgttgggagataacgagaatggtgagaatgatgaggaaggcggtgaggttgcagacccaaaatggatcaccattaaagcagctctgctgctactgttaggagctgccantgcanctgcatttgctgatcctttantccgacac

SEQ ID NO: 1355 - DNA, 424 bp, Arabidopsis thaliana
  Clone ID: ARABLI-13-Q1-B1-F8
ctcgagaacaacttcaaccttgcatcgtcttgttcaagaaactccttgtacttgacatgacgaactgtggatcccttgaatgcttccccaagggtatcggaagtctcgtgaagctcgaagttctgttgggatttaagccagccaggtccaacaatgggtgcaagctcagtgaagtgaaaaatctcacaaaccttcggaaacttggtctttctctgactcgtggcgatcagatagaagaggaggagcttgattctttgataaacctaagcaagctgatgtccatttcgatcaactgctatgatagctacggcgatgatctcataaccaaaatagacgcccttactcctccacaccaagctccatgagctttctctacaattctatcctggaaagtcgagtccatcgtggttgagtcctcacaagc

SEQ ID NO: 1356 - DNA, 449 bp, Arabidopsis thaliana
  unsure at all n locations
  Clone ID: ARABLI-13-Q1-B1-G1
tacgtaaactcngaattcggctcgaggaaaaaaggaaagaggagagaagaaagaaaaggaaaagacccaaactttgagaaacaccttcattctcttccttccttcatcaaagcttaaccttttttaatttttatcctcgntttttcaattcnnnnnnnnnnnnnnnnnnnnnnnnnnnnnnnnnnnnnnnnnnnnnnnnnttacgaatcttttgttccagatcgtgagagaggaggagttggaagaatgaagatgactattgggtctttgttccaancctaattttgcagattaatttcgtttttgttgatttctgttttggggtttgcnttgctgattccngtggattaaanggttccttttggacaacacaaatttgttgggtttttttttgggggaaaagagaattaaaantttctccnttagaatcggcgtttgggttgaaaaaa

SEQ ID NO: 1357 - DNA, 444 bp, Arabidopsis thaliana
  unsure at all n locations
  Clone ID: ARABLI-13-Q1-B1-G10
tacgtaanctcggaattcggctcgagcaaactcttctttcagtcatcacagaaaacaaaaaaaacaatggcggataagctcactgacgatcagattacagaatacagggaatctttcaggttattcgacaagaatggtgatggttccattacgaaaaaggagctcggtaccatgatgcgttcaatcggtgaaaaaccgacaaaagctgatcttcaggacttgatgaacgaagcggatttagatggtgatggaaccatcgatttccctgagttcttgtgcgtaatggctaagaatcaaggtcatgatcaagcgccgcgtcacactaaaaaaacaatggcggataagctcactgacgatnagatttacagagtacaaggggaatccttcaaggttattcgacaagaatggtgaatnggttcaattacgaaaaaaagggagctccgt

SEQ ID NO: 1358 - DNA, 396 bp, Arabidopsis thaliana
  unsure at all n locations
  Clone ID: ARABLI-13-Q1-B1-G11
ctcgagggtcgatgaagaagcggagttcgcatannnnnnnnnnnnnnnnnnnnnnnnnnnnnnnnnnnnnnnnnnnnnnnnnnnnnnnnnnnnnnnnnnnnnnnnnnnnnnnnnnnnnnnnnnnnnnnnnnnnnnnnnnnnnnnnnnnnnnnnnnnnnnnnnnnnnnnnnnnnnnnnnnnnnnnnnnnnnnnnnnnnnnccgtcgtaatcattctgatgattctgattcagagtcttctgaagatgatagaagacagaagcggaggaacaaagtcgcagcttcttctgactcagaagcaaatgtttcaggcgatgatgtttcacgcgttggacgtggttcttccaagcggtctgagaagaaagagcaggaaacctcatcacaaggaaanaacgaaa

SEQ ID NO: 1359 - DNA, 427 bp, Arabidopsis thaliana
  unsure at all n locations
  Clone ID: ARABLI-13-Q1-B1-G2
ctcgaggaaaaagatctcaaaatgctcacgacacctccacgaacnnnnnnnnnnnnnnnnnnnnnnnnnnnnnnnnnnnnnnnnnnnnnnnnnnnnnnnnnnnnnnnnnnncaatcgaactctgtatacaactctttcctcaagtgtttctccgacaagacgaaatctccacaatcccaaatcactgacaatgtcttctctcagacaaaccctgctttctcctccgttcttcgtgcttacatccgcaatgcgaggttcaacacttcctctactcttaaacccaccatcataatcactcctcgctccgagagccacgtcagcgccgccgtcacttgctcaaaaaccctaaatttcctcctcaaaatccgaagcggcgggcatgactacgatggtctctcttacatttccgacaaaccanttttcaatc

SEQ ID NO: 1360 - DNA, 424 bp, Arabidopsis thaliana
  unsure at all n locations
  Clone ID: ARABLI-13-Q1-B1-G6
ctcgagggcttgtggatgtatcccgatctggaaccttgacatatgaagctgttttccaaacaactgcagtgggtctaggccaatctacttgtgtaggaatcggtggggatccttttaacgggacaaactttgtcgactgcttggagaaattctttgttgatcctcaaacagaaggtatcgttctcattggagaaatcggaggcactgcagaagaagatgctgcagcattgataaaggcaagtggtactgagaagcctgttgttgcttttattgctggacttactgcaccaccgggtcgtcgaatgggtcatgccggagccattgtttccggtggtaaaggtacggctcangacaaaattaagagtttgaatgatgctgggagtgaaggttgttgaatctccggctaaagattggattaacgatg

SEQ ID NO: 1361 - DNA, 63 bp, Arabidopsis thaliana
  unsure at all n locations
  Clone ID: ARABLI-13-Q1-B1-G8
ctcgnnnnnnnnnnnnnnnnnnnnnnnnnnnnnnnnnnnnnnnnnnnnnnnttcnaaatnncg

SEQ ID NO: 1362 - DNA, 386 bp, Arabidopsis thaliana
  unsure at all n locations
  Clone ID: ARABLI-13-Q1-B1-G9
ctcgagctggaactaaaggatatatatggctggtcttatgaagttaggatgcttggtctttgtcttcgtgattgcggccggtccaatcacagcaaaggcggctctgagctgtggcgaagttaacagcaatttgaaaccgtgcactggctacttgaccaatggtggtatcactagcccaggcccacagtgctgcaatggtgttagaaagcttaacggcatggtccttacaaccctagaccgtcggcaagcatgtcgttgcattaaaaatgccgctagaaacgtcggccctggtctcaacgctgaccgtgctgctgggattcctatgagatgcggaatcaaaataccttacagtanccaaatcangttcaacaacangtgcaacaacg

SEQ ID NO: 1363 - DNA, 461 bp, Arabidopsis thaliana
  unsure at all n locations
  Clone ID: ARABLI-13-Q1-B1-H11
atgatnatttgagccgccagaagagcaataacgtcgcatncacgcgtacgtaagctcggaattcggctcgagcttgttaacattctcacttcacagaaagttgtatccactgagacagctaaggctttcgctgatgaacttgggatcccattcttggaaacaagtgctaagaatgctaccaatgtcgaagaagctttcatggccatgactgctgcaatcaagaccagaatggcgagccaacctgcaggaggatctaagccaccaacggtccagatccgaggacaacctgttaaccagcaatcaggctgctgctcctcttaattcgctttggtaacacttaaccatattatgtcattcgtttgcatgtaagaaatctaaacaacgttgcttcttaaatcttttggaattggnttttcaatttttcacttgtgtccaaaaagcctttaaattccttggtaang

SEQ ID NO: 1364 - DNA, 468 bp, Arabidopsis thaliana
  unsure at all n locations
  Clone ID: ARABLI-13-Q1-B1-H2
aatacagtcgcatncacccgtacgtaanctcngaattcggctcgaggaaccagaaccagcagcaacatagctacaaggtgaagtttatgtgcagctatggcggcaagattcagccacggcctcacgataatcagctcacttacgtaaacggagaaacgaagattctttccgttgatcgcgggattagattccctgttttagcttccaaactctccaccgtatgcggcggcggtgatggcggcggaggagaagttacgtttaagtatcagcttccgggagaagacttagacgctttgatctcggttacgaacgatgatgatctggagcatatgatgcacgagtacgatcgcttgcttcgtttgtcgtctaagccagcgaggatgcgtttgtttctcttcccggcttcttctgggatttggttctcaaaagttcgactcaatcggatcgagatcgcctcgtcnaaggcgt

SEQ ID NO: 1365 - DNA, 447 bp, Arabidopsis thaliana
  unsure at all n locations
  Clone ID: ARABLI-13-Q1-B1-H4
cgtaanctcnagaattcgggctcgagcaaaaaacagagcattttttttgggtcaagagcaagaaaaaacagagcatacttttgcaaaaagcagagcttggagcgctttcttgtcatctaaaattcaaaggcagagacgatgggagatgtagttttgttcatagatgaaacatatttgaaatcgagttttaatcgctgtagaatctgtcacgaagaagaagctgagagctactttgaagctccttgttcttgttcaggaaccatcaagttcgctcacagagattgcatacaacgatggtgtgatgagaaaggaaacacaatttgtgaaatttgtctccagttttcggttattttgttgataaagcatgcatttgatgcggtttatggaactgaagagtatccctatacaatattcacggtcttaacattgaangctataaggcatact

SEQ ID NO: 1366 - DNA, 421 bp, Arabidopsis thaliana
  Clone ID: ARABLI-15-Q1-B1-D6
ctcgagtttttttttttttttttttcaggaaagggtgaaaaaacagatcctaaattagatgtaaacaaaaactattttgtctagttgtcattttttcttgtcttgtcctaatttacaacttgtcatttcaatacaaaatattgaaaaaggagaaacaaattgaagaaaaaaaaccaaaaaaaaagaatttgtcacaagatgttgataatcgcctgcttcttggaacaccctaacgaaaacaaatcatcttcccgagatctcttcttgccaacacactctactgcgacgtcgtttggtttctcgttactcacattgaaaatgttgactccgaatagcctaaccacagtctgaaccggactagaccggactttccaagtggatatacaattgccggtctgggtccggttgatttcccgaaaca

SEQ ID NO: 1367 - DNA, 425 bp, Arabidopsis thaliana
  unsure at all n locations
  Clone ID: ARABLI-15-Q1-B1-D7
ctcgagccaaaacaaacgaaacttctctgcaatagccttctccaaatttcctcactttcacgcgtttcagtcttctctatataaacttgtttcatcancccatcaaaatcccactcaaattctgtttcagtgttcttcaaattctcaatctttctctcaattcatctaaagggttcctcaaagtttcaatctttctctctgaatctaaaccatggctcgttgtagcaacaatctcgtagggatactcaatttcctagtatttcttctctcgatcccaatcttagctggtggaatctggctaagccaaaaagggtcaacagagtgtgaaagattcctaagacaaaacagtgattgctcctgggtgttttccttaatggttgtagcaatanctgggtctaataagttcatgttgtanaagtcacatg

SEQ ID NO: 1368 - DNA, 459 bp, Arabidopsis thaliana
  unsure at all n locations
  Clone ID: ARABLI-15-Q1-B1-D9
ctcgaggagagaacacagagaggcgagagcgacgtagggttggtgtttcgtacggattttctcggtcaatcttagtttctccggcgagagattgcttttcaggaatcatcatggtgagaaagagaagaacggatgctccatctgaaggaggtgaaggctctgggtctcgtgaagctggtccagtctcangtggtggacgtggttcacagcgaggtggtttccagcaagggangangacaacaccaaggtggaaaggggttatactcctcaacctcaacaagggangtcctggtggtccntggatatgggcaaccaacacaacaacaacaacagtatggaaggaccacaatntttaccangggaaaangataanggaggacctcctcaacaaanggangtccaagaanggnatgggcagtggcccttgnaggttgaccttccttctggaccaccgcanaa

SEQ ID NO: 1369 - DNA, 132 bp, Arabidopsis thaliana
  unsure at all n locations
  Clone ID: ARABLI-15-Q1-B1-E1
tcgagactagttctagatcgcgagcggccgccctttgtatttttttcattaatcaaataactcgtttttctctcnnnnnnnnnnnnnnnnnnnnnnnnnnnnnnnnnnnnnnnnnnnnnnnnnnnnnnnnng

SEQ ID NO: 1370 - DNA, 468 bp, Arabidopsis thaliana
  unsure at all n locations
  Clone ID: ARABLI-15-Q1-B1-E11
tcgagctaaaatcaaaatctctctgatttgttgttttgttgatgttttatgaagtgatttgcattagattggattgaaatggctacggagcctacaaggagctggttccagatacggcagcagaaaccggataaatcaagccctactaaaaagggacaagagggaaatgtgaagaatcttgggagacctcctatgaatgatgcaccatctaatgctactaaacagaaagttgctgcagcgaagcaatatatcgagaatcattataaaattcagaagaagagtctccaggaaagaaaagagcgtcggagcatccttggnacaaaaacctaacctgatgctgatgttaacggtttgaagacaagantggttatattaaagaacctttgagaaaaaagggaattggantanatgctccnacaaaggacaanaaattgggggttgatncctttgaacggcttaccancattg

SEQ ID NO: 1371 - DNA, 460 bp, Arabidopsis thaliana
  unsure at all n locations
  Clone ID: ARABLI-15-Q1-B1-E12
tcgaggtgacacaagcagcagtatcatcgtcgtcatcactcactagcaaagctcgagcttcttccttcttcttcaatggtcgctctcttccttctctgaacccgatctctccgtttctgttcctccccacaagtagatccttcgctctcgtcgtcaagagcactctcggtacaaccaccttgcatgcagaaggaatggagacaaatctttacttaggatgactttaagtggggatagctcggaaactgtagagatgacttcaactgatatgattttcgagccgattttggagcatggagttttccggtttgattgntccgttgaccataggaangntgcttttcctantgtttcatttaagaacagcaaagaccgggaagttcctantgtgagtcacattgttccagcatatattcctaattgtggttgtcctcaggaccaacaagttgtcacctttgag

SEQ ID NO: 1372 - DNA, 424 bp, Arabidopsis thaliana
  Clone ID: ARABLI-15-Q1-B1-E5
ctcgaggtctggttttgttgcgttcttccgatttgggttggagaggaaatggcgtcgggatggggaataacgggaaacaaagggagatgctacgatttctggatggatttcagtgaatgtatgtctcactgcagagagcccaaagattgtacccttcttcgtgaagattacctcgagtgtctccaccattccaaagagtttcaaagaaggaacaggatatacaaggaggagcagcgtaaactaagagcagcttcgaggaaaggtgaagaagccggagatgggactcacaaccatcactaagtctcaacaatcctccttcaagcttcatccgattccagagaagaataataaaaggttcatgggaagattttgtatcttgggaatctctaaacgctttgattgtttttcaattttcaatttaacc

SEQ ID NO: 1373 - DNA, 429 bp, Arabidopsis thaliana
  unsure at all n locations
  Clone ID: ARABLI-15-Q1-B1-E7
ctcgagntcggntcanntcttcgatctgggctttcgtgtctttttgcgttttgattggtaataaaaagaagctttttaaaaactttttccatggctggaagtgaagaagttaatcttattgagagcaagacagtggttcctctcaatacatgggttctaatatccaactttaagctagcttacaatctcctgcgtcgccctgacggaacttttaaccgtcatctcgcagagtttctagaccggaaagtccctgcaaatgccaaccctgttaatggggtcttctcttttgatgtgatcatcgatcgccaaactaatttgcttagcaagagtttacaagaccagctgatgctgggcacttcaccaaagtattactggatctacagaatcctggttgatgggtgaaaatagtgccctgttaattgtcntcct

SEQ ID NO: 1374 - DNA, 416 bp, Arabidopsis thaliana
  unsure at all n locations
  Clone ID: ARABLI-15-Q1-B1-E8
ctcgagattggcttaatcttttgagtagtatcagtaggagtgaagtgaatgagtcatcagttcaagatgtggaggagggtgaagggtttttgtctaggagtttggaggggaagaaggcgacggatttgaggttggcggcgattgcggttgggacgtcgagtcgtggtgggttggggaagcttcagattcgtgggagtgggtttgagagtaaggtgactgatgttggtcttggtgctgttgctcatggttgtccatctcttaggattgtttctttatggaacttgcctgctgttagtgatttgggtttgtctgagatcgcacggtcatgcccgatgattgaaaaacttgacctttcacggtgtcctggaataactgacagtggattggttgctantgctgagaactgtgtgaatcct

SEQ ID NO: 1375 - DNA, 452 bp, Arabidopsis thaliana
  unsure at all n locations
  Clone ID: ARABLI-15-Q1-B1-F11
ctcgagtgctatcctatcatcttgcctagcangcaaagatttcactccgcgaaaaagatgattcattcggatcaacatgaaagcccaactacattgccagaatttanatattggaaagaggtttacctccgtgcttctatggtacaatcctcttcccgcggagcctcctttcttctcggtccgcagagacaaaatgtaggactggtgccaacagttaatcacggnagaaaggactcantgcgccaanatcactaactnnnnnnnnnnnnnnnnnnnnnnnnnnnnnnnnnnnnnnnnnnnnnctgtcttttctgntatacttaagtnnactttccccggttccgttgntactgngggctttaacgcaattgatcgggttanccaaatatcccttcaaacacaacataggtngtcnanangatttnggntaaccgncaaaagcacgaaaagcc

SEQ ID NO: 1376 - DNA, 418 bp, Arabidopsis thaliana
  unsure at all n locations
  Clone ID: ARABLI-15-Q1-B1-F6
ctcgaggttaaatgttcagcacgatgcgttctacgcgcagcacaatttgagcatgagcagttttctggttgcagcttcaaaaactgttctcattgacttcatctcttcccctgaagtgaacttctttaagaaaattgctggtcggttcgggcgtaatggaccaagtcttgtgttccggtttcttggtcaagacgagttcgagccaacgacaaacagaacttacggctctatcttgagtaacttgacttttgtcaagacgtttgcttcagggattcttgtccccaagtcttacatattgccacttgatgaccagcagtacttgcttcctcatacatccttggttcaagatgctcacaaagcangattanaagtttttgtgtcaggttttgcaaaatgatattgatattgcacacgacta

SEQ ID NO: 1377 - DNA, 418 bp, Arabidopsis thaliana
  unsure at all n locations
  Clone ID: ARABLI-15-Q1-B1-F8
ctcgagaatcacagaattggtgtggcaaaagataagtgatcctgaaagcatagctgagatacttaaacaggtctacacagaccattctatcaatgtggataaagtattctcacgtattgtggaggtcacacagcatccggctgctgcagcatcgtttgcttcaatcatgcttgctcctggtggagagctatctttctccgaagctttatctaggtgtaaggaaaacaatgttcagatatgtctcatgtatggaagagaagatccatgggtgagaccgttatggggaaagaagataaagaaggaaatccccaacgctccatactacgagatcagcccagcgggtcactgcccacacgatgaagtccctgaggtggtgaactatctgatgcgcgggtggatnaagcacctggagtctggt

SEQ ID NO: 1378 - DNA, 133 bp, Arabidopsis thaliana
  unsure at all n locations
  Clone ID: ARABLI-15-Q1-B1-G11
ctcgagcgctgcctgaagaggtacgcttcgtgtattattagtcttagcgatatgcattgattccatttaaatattcgacctnnnnnnnnnnnnnnnnnnnnnnnnnnnnnnnnnnnnnnnnnnnnnnnnnnnn

SEQ ID NO: 1379 - DNA, 421 bp, Arabidopsis thaliana
  unsure at all n locations
  Clone ID: ARABLI-15-Q1-B1-G2
tcgagctctttatcagaaactcgatttctccatcgacgacatcgtcaagaacttaacttcagctaacgtgatcggaactggaagctccggtgtagtttacagagtcacaatcccgtccggtgaaactttagctgtgaagaaaatgtggtcaaaggaagaaaacagagcgtttaactcagagatcaacactcttggatcgattcgacataggaacataatccgtcttttgggttggtgttcgaatcggaatctgaagcttttgttctatgattatcttcctaacggaagtttaagctctctgcttcacggtgccggtaaaggaagtggaggagctgattgggaagcacgttacgacgtcgttttaagcgttgcacatgcactaacctancctcatcatgaatggtcctcctcccgantccta

SEQ ID NO: 1380 - DNA, 421 bp, Arabidopsis thaliana
  Clone ID: ARABLI-15-Q1-B1-G3
cgagggagcacagccaggtcctgtcttgtcgtggtatcaacgagtcaaaattgcagttggagctgcaagaggccttgagtacttgcatgaaaaagctaatcctcacatcattcaccgtgacattaaatccagcaatgtcctcctctttgaagatgatgttgccaaaattgctgactttgatctctctaatcaagctcctgatatggcagctcgccttcattccacccgagttcttgggacttttggttaccatgcccctgaatatgcaatgaccgggcagttaaatgccaagagtgatgtctacagctttggagttgtcttactcgaacttcttacaggtcgaaagcctgttgatcatagactacccagaggccagcaaagtttagtcacatggggctacacctaaactgagtgaaagaca

SEQ ID NO: 1381 - DNA, 325 bp, Arabidopsis thaliana
  unsure at all n locations
  Clone ID: ARABLI-15-Q1-B1-G7
ctcgaggacttggttaaaaatcttgagttggacttgtttcattgtgtccctcgttgctgcagccggatcagtgcaaggactcatacaaagtctcaaggatttcaagcctttccaggctccttagtgaaaatatgtgttctcgccaacgtctccaagaacacaagttccatgcactctcttccctccaataaaagtttctatttctttgtagtttattggtgtgagacaatctcataccaaaatattgtacctctacttgcttgtcttaaacaaatctatcatcaagtttatcccaaaaaaaaanannnnnnaaaaaaaaaagggg

SEQ ID NO: 1382 - DNA, 447 bp, Arabidopsis thaliana
  unsure at all n locations
  Clone ID: ARABLI-15-Q1-B1-G9
gagaaaacagcttcttcttcaaagcgagacctatctgagtcgactcgtaacgagttgatttttttttgttttcttctctactggtttcgcttttcgagcttctcgtctccgttaatcgttaaatctagctcattgatccgatatccattgttttctctcgccggcgcgtcattgtcattcgtcgtcgagttctgattgttttaactatggaagctcgtcgtggagtctaattcattattgagcttgaggattggttcggttgatggtcttttccaccgtttgaaagagttcntcagtttaacatccnggtgttggatcnagtcacctgtattgaaagtgggaaaaaactaacttngtgaancaangtcncaaagggntgtgaatttttggccncaaaatcaagtnaanttagcntgncanttctaataagacccnaatgggaattgg

SEQ ID NO: 1383 - DNA, 460 bp, Arabidopsis thaliana
  Clone ID: ARABLI-15-Q1-B1-H10
ctcgaggttagtgtttggcaacccacagagaacactctgatgatacgatggactgttcatggaattcctcgtggtccgtgggagactcgtggtcgattcgatggtacttctgagtataaattcgataagaatggcaagatttatgagcataaagtcgataacatagccattaattcgcctccaaagtttcaaatgctcactgttcaagagcttgttgaagccattagctgcccttcgactcccaagccgacctactttgagttcggagattgattcatcatcatcgtctgaaacatcatgctggtgttatgtatactagtagtcttttgtgtggttataaatagagtggtactgtaatatagatgaagaaggaacgatttaaaataaacccaatagcatgaatacattacacgctttttttgcgtataataatcaataaaacgcctatatgtacatataa

SEQ ID NO: 1384 - DNA, 421 bp, Arabidopsis thaliana
  unsure at all n locations
  Clone ID: ARABLI-15-Q1-B1-H6
ctcgagggcgtttggagaccgaagaagtctctctcgttatcatgtcgtccttcagcctcggtttcagctgcttcttccgccgtcgacgtcaatgaggntgtgacttcagagaaaccaaccaaaacgcttccgtttcgaatcggtcatggtttcgatctacatcgtttagagccagggtatcctctgatcatcggtgggattgttattcctcatgatagaggctgcgaagctcactccgatggcgatgtgttacttcattgtgtagtggatgcaattttgggagcactagggcttccagatatagtcagatttccctgactctgatnctaaaatgggaaagggagctgctcntctgtattcatcaangaaagctgtgngactcatggacnaangcanggtatgacatagggaaaacctagac

SEQ ID NO: 1385 - DNA, 416 bp, Arabidopsis thaliana
  unsure at all n locations
  Clone ID: ARABLI-15-Q1-B1-H7
tcgagtctgatttataaaattgaccaaaacaagtcacagaggagaccccggaaaccaaacagtcgacgattacgaagatgaggatcactgtcatganngccggtgaacaaatcatcactctcgatgtcgattctcaggagactgttgagaatgttaangccttgctcgaggttgagtccaatgttccgattcagcagcagcagctgttgtataatggaaacgagatgggaaattccgataaattgagtgccttgggtgttaaggatgatgatttattgatgatgaatgggtttccaaatgcctcatctggtantgccactagtgccggcggggaatgattttgggcatgaatcccganngggtccagctttgnaaccctgcnagnctttcagnnaacacattcgttggggattccn

SEQ ID NO: 1386 - DNA, 425 bp, Arabidopsis thaliana
  unsure at all n locations
  Clone ID: ARABLI-16-Q1-B1-A1
ctccgagaatacattaacagtcaaatgagacttggtatgtttgatggtaaccttgggccgtacgctaatcttggggccaagagatgtttgtactccggcccataaacatttagctcttgaagcagcccatcaagggattgttcttctcaaaaactctgctcgctctcttccactctcccccagacgccaccgcaccgtcgccgtgattggtccaaactccgacgtcactgagactatgatcggcaactatgcanggaaagcatgcgcctatacgtcgccgttgcaaggganttcaagatacnccaaggacacttcaacaagctggctgtgcccggcgttgcttgcaaagggaancaaaggatttggtgcaaccggaggcancggcgcctttaagccgacncnaccggttcctgttnatggggatt

SEQ ID NO: 1387 - DNA, 424 bp, Arabidopsis thaliana
  Clone ID: ARABLI-16-Q1-B1-A4
gaggcttgtgagcagacatacgggtttatgccgtgtactaagaccgctcttggaaacgtgtttctgattttggtttatggatttctcatgtttacggctgcgacgtatctctctgctggaagtgagcttcttcttgagatccttggacctggaattgtcggtggtttgtttcttccgatgcttggtgctcttcctgacgctatgcttatcatggtgtctggactatctggagatgcagcaactgctcaaagccaagtctctgtgggaatgggtttgcttgctgggttccactgttatgctctcactgttatctggggaaacttgtactgtgggttggcaaagttgtgatcttccgtgattcaattgctgtaaacaaccaaggacaccaaaaggctttcacctaaaagattctggtgtaactgtt

SEQ ID NO: 1388 - DNA, 420 bp, Arabidopsis thaliana
  Clone ID: ARABLI-16-Q1-B1-A8
ctcgagctccagaacattttgcacattccgtttcactccgtgttgttggatcccccaaagaaaatgagttgctttgggtgttgtggggaggatgatgatatgcataaaactgctgattatggaggtcgtcataaccaagccaaacactttcctccaggaaatgatgcaaggcaccaccaagcctctgaaactgcacagaagggtcctccagttgtgaagttgcagcctattgaagtacctattatcccttttagtgaactcaaagaagcaactgatgattttggatcgaattctctcatcggtgaaggctcttatggaagagtatactacggggtattaaacaatgatctgccttcagcgattaaaaagttggattctaacaaacagcctgacaatgaattccttgctcaagtttccaag

SEQ ID NO: 1389 - DNA, 490 bp, Arabidopsis thaliana
  unsure at all n locations
  Clone ID: ARABLI-16-Q1-B1-B2
atgatctagttgntcagccaagaganagaaatcgcntccangcgtacgtaanatcggaattcggnnnnnnnnnnnnnnnnnnnnnnnnnnnnnnnnnnnnnnnnnnnnnnnnnnnnnnnnngaagaanaanaagaagaaggagatcaaggaactcgaagtgtgtgtgtgtgtgtttgccttctcttgtcttttagttttttctctctttggctgtgatttcgtcggcgaagagagacatagatcggatatggcggctgataatacgggttcgaaatcgagctccgctgcggattcttacgttgggagcttgattagtttgacatctaagagtgagatcagatacgaagggattctttacaatattaatacaagatgaatccantatccgacttcaaaacgttccattaattggnactgaangaaggaaaaaagatggtccacaaagttcctccaaagtgacaaagtttacgaagtacataatgttccgtg

SEQ ID NO: 1390 - DNA, 425 bp, Arabidopsis thaliana
  unsure at all n locations
  Clone ID: ARABLI-16-Q1-B1-B4
ctcgagaaaaaagttttcttcaaaatttattcatttgctcattgtgtttttgcttctttgtacgtttctttctcgtaccgaatctgctcttccttancaccatgaactgttcttggggaggaagcggatgaattattataagcccaacagtgccataggaacaccatcatcaactagtgaccacgctccaggcagtaatgggaggaagttgatgagtatatatagacccaatggagacatatttacaggaccatcaggcagtgggcatggtgggggtcgcactccaagccccctagtatatatatattaatgtgtaatcaaggactcacaagcgaaacctttaaatcccgattcacgtataacgttatgccttggtgtagtatatgtttaaattcngttttcaaaagccaagtttttcaattcnc

SEQ ID NO: 1391 - DNA, 425 bp, Arabidopsis thaliana
  unsure at all n locations
  Clone ID: ARABLI-16-Q1-B1-D2
ctcgagttactccttcatgcttcgaactaagaatccatctgggaaggtccctaaccagctctatttgactatggatgacttagctgatgagtttggaattggtactcttcgtttgaccacaaggcagacgtttcagcttcatggtgttctgaagcagaatcttaagactgtgatgagctcgattattaaaaatatgggtagcacgcttggtgcatgtggtgatctgaacagaaatgttcttgctcctgctgcaccttatgtgaagaaagactatctctttgcacaagaaactgctgacaacattgcggctcttctttctcctcaatcagggttctattatgatatgtgggttgatgggagagcanttcatgactgctgaacctccaaaaggtaatgaaagctcnaaaatgataactcccatggga

SEQ ID NO: 1392 - DNA, 474 bp, Arabidopsis thaliana
  unsure at all n locations
  Clone ID: ARABLI-16-Q1-B1-E3
gccaagaanacagtaatcgcntccangcgtacgtaaantcgnaattcggctcgagttggnnaacaaagagaanccnaanaacgagagagttcttgagagtttctttggttggtactacgcttcttcatcagttgctgtcttgatcgctttcaccgtcattgtttacattcaagatcatctaggatggaaaatcgggtttggaatacccgcgattctcatgctgctcgcgggtttcttgtttgttttcgcgtctcctctctacgttaagcgcgatgtgagcaagagtctgttcactggtttagctcaagtggttgctgcagcttacgtgaagagaaacttaactttgccggatcatcatgactccagagattgttattaccgtttgaaagattctgaactcaaagctccaagtgacaaattgaggtttttaaacaaaagcttgtgccataaagtaaccgcgaatgaaagaccntg

SEQ ID NO: 1393 - DNA, 421 bp, Arabidopsis thaliana
  Clone ID: ARABLI-16-Q1-B1-E5
ctcgagcatccttcaagaacacaaagctagacagaaaaaaaaaaatgtgttcctcaaaattaaaaaatctgacccaagaaaacatttctcagatcaacggccgtccggttcttcaaccgaagtcgaaccaagttccgacattagaccgacgtaactcactaaaaaaatcgcctcctaagcctttgaatccaattgcatcaaagataccctcaccaagaccaatttctctaatctctcctcctttgtctcccaacacaaaatccttaagaaaaccggccggttcttgcaaggaacttcttaggtctagctctacaaaatcgaaaccagtgatatcaccagagaacagtgatggtggctacaaagaggttatgcctatggtgattgttcaaaagcagcctggaagtatagcagctgccagaag

SEQ ID NO: 1394 - DNA, 419 bp, Arabidopsis thaliana
  unsure at all n locations
  Clone ID: ARABLI-16-Q1-B1-E7
ctcgagttcgggaaaagtatttggtgtgataaattccctctccagcttctcggtgacacagatattttgcttccaaataaaacgagtccggtcactggcgctcactgacttcgtcttcctccatctccgatccattggtttaacaagcgcgtgagggccagatagaccgagaatcatgggaaacggaaactcaacggagacgaaagagtcgcgccgatcaaagatgcgtaagaagattcaaaactttcgcagccgccgccgtcttagtcgtccaggatccggaagcgtctctggattggctagtcagagatctgtgagcgcanatgatttcgccggcattgctcttctcactcttatcggcgcggagatgaagttcaaggacaagtggctcgcctgtgtttccttcggggaacaaactt

SEQ ID NO: 1395 - DNA, 429 bp, Arabidopsis thaliana
  unsure at all n locations
  Clone ID: ARABLI-16-Q1-B1-F1
ctcgagnnnnnnnnnnnnnnnnnnnnnnnnnnnnnnnnnnnnnnnnnnatctgcttgttgtaagcatttcactgcctatgatttggaaaaatgggggaatttcactagatacgacttcaatgctgtggtcacagaacaggacatggaagacacatatcagcccccatttgagacttgtataagagatggtaaagctagctgcttgatgtgttcatataatgcagttaatggggtccctgcttgtgcgcaaggagacttattacaaaaagctccgagttgagtggggattttgaaagggtacattacatcagactggtgatgctgtggcaactaattttgccgtaccaagggatataccaaagtcanctgaagaanctgttgctgatgccataaaagcaagggtggatataaaattgtggaacatacatg

SEQ ID NO: 1396 - DNA, 78 bp, Arabidopsis thaliana
  unsure at all n locations
  Clone ID: ARABLI-16-Q1-B1-F2
ggaattcggctcnaagtgtatgagttggatatgtttaatacaaaatttcnccttgtgaaaaanannannnnaaaaagg

SEQ ID NO: 1397 - DNA, 421 bp, Arabidopsis thaliana
  Clone ID: ARABLI-16-Q1-B1-F6
ctcgagggtttggatacatttgagacagttccagaggcggctccagcagagttgaaagagcctccaatcgaagatcagcttgcgtttcatactttatggccggaatctcataaactctatggtcatggtaatgaactattttctctctgctctgaccacaagggaaaccttgttgcttcatcgtgtaaggctcaatctgcatccatggcagagatatggctatgggaggttgggacatggaaagctgttggtcgtttgcaatctcacagcttgacggtgacgcacttggagttctcttatgatgacactctgctcttgtctgtctcaagagatcgtcacttctccgttttctctatccaaaggacagacaatggtgaggttaagtcacaaactcatggcaaaggttgaaagcacacaagaa

SEQ ID NO: 1398 - DNA, 473 bp, Arabidopsis thaliana
  unsure at all n locations
  Clone ID: ARABLI-16-Q1-B1-G4
tangacagaaacgcaccagcntacgtaaantcggaattcggctcgaggaaaaatgggattacctcaaaataagctcagttttttctgcttcttcttcctcgtctctgtactaactcttgccccattggctttctccgagatcttcttagaggagcatttcgaaggtggatggaaaagtaggtgggtcttgtctgattggaaaagaaacgaaggcaaagctggaacctttaagcacactgccggtaaatggcccggcgatcctgacaataaaggtattcagacttataatgatgccaagcattatgcgatttctgcaaagattcctgagtttagcaacaaaaaccggactcttgttgtccaatactcagtcaagnattgaacaaagacatgaatgtggtgggtgcttacaataaanctcctgtctggctaaggttaancaagaaacaanttttggtgggngatactccaaaaca

SEQ ID NO: 1399 - DNA, 426 bp, Arabidopsis thaliana
  unsure at all n locations
  Clone ID: ARABLI-16-Q1-B1-G6
ctcgaggacactggattggaactatattccgcacgcaataacaagaaccaaacacctctccacttagctttcgttagcattttcatggaagctgccaaattcatcgttgaaaagacgaattcagtcgaccttgatgaactcaatttcgccttatcaagtggatctacttgtattgttgggattatactggagagatttccagagctagctaggaaaaatgcttgggaggttgaagacggctcgcgatcaacgttactgcattatgcgtgtgacaaaggtgaccttgaactgacaagtatattgttaggactcaatcaagggactaagaagaagctcttaacagcaaaaggttatcacctctgcatctaacagtccaaaagaggctcaatttataatcctgganggagtttaanggacaagtcccca

SEQ ID NO: 1400 - DNA, 408 bp, Arabidopsis thaliana
  unsure at all n locations
  Clone ID: ARABLI-16-Q1-B1-G7
ctcgagggtcgatgaagaagcggagttcgcatannnnnnnnnnnnnnnnnnnnnnnnnnnnnnnnnnnnnnnnnnnnnnnnnnnnnnnnnnnnnnnnnnnnnnnnnnnnnnnnnnnnnnnnnnnnnnnnnnnnnnnnnnnnnnnnnnnnnnnnnnnnnnnnnnnnnnnnnnnnnnnnnnnnnnnnnnnnnnnnnnnnnnccgtcgtaatcattctgatgattctgattcagagtcttctgaagatgatagaagacagaagcggaggaacaaagtcgcagcttcttctgactcagaagcaaatgtttcaggcgatgatgtttcacgcgttgggccttggtcctccaagcggtctgagaanaaagaacaaggaaacgtcatcacaagaaaagaancgagaattaggaaat

SEQ ID NO: 1401 - DNA, 427 bp, Arabidopsis thaliana
  unsure at all n locations
  Clone ID: ARABLI-16-Q1-B1-H3
cgagagcaaaaccgcgagctctcatggcttccggcggcaaagattccgatcgtaccttagggtacatgacacggaaagatacagaagtcaagcttccaagacctactcgtgtcaagaacaaaactccggcgccgattcaaataactgccgaacagatattaagagaagctcgagagagacaagaagctgagatccgtcctcccaagcanaaaatcactgattccactgagctttccgactacagactccgccgganaaangaatttgaagaccagatccgtcgcgcgagatgggcacattcangtttgggtcaaatacgctcaatgggaagagtcacagaaagattacggctcgtgctcgaantgtttgggaacgaancatagnagggagattttagggnnccatancctttgggntcaaagtacgc

SEQ ID NO: 1402 - DNA, 484 bp, Arabidopsis thaliana
  unsure at all n locations
  Clone ID: ARABLI-16-Q1-B1-H4
cnctatgcacagagaaacgcgnccacgcctacgtaaaatcggaaattcgggcccgagatcagaanccttaacaagacaatttgtngtctggtctcaacaaaacccttcttttctccatttttcttttttgctttgtttctgtgctacgatttgtcaaaaaaaagaaacccaaatcaaaagcttcgaaatttcataagatttctttgtttttctgaagatccaaggcacacaaaaaaacagctttttttgtttcttcaatcaaggattttccagggttttgataaccccatgggttcagggttctctctgtttcaaaagaatttatcgtcttgttatggagatcgagatctgttgcagcctgggtttaggagatttgcctgaaagttggtgtggctttgattccccaagaatttggattcccgttgagatctgtagaatcnccaaagctaaaacacggctttcaatggcgcttcctggggctgan

SEQ ID NO: 1403 - DNA, 266 bp, Arabidopsis thaliana
  unsure at all n locations
  Clone ID: ARABLI-16-Q1-B1-H8
cgcgtangtaaactcggaattcggctcgagcaccttagtgacccacttcacaccaccattatcgataccttctcttcctcctgatgtggtggcttttagcttctactggtgtcatgtaatgatgtggtggcttttagcttctactggtgtcatgtaatgatgtaacgtcgttattttaaagaaaatttggcaccttttgtnnnnnnnnnnnnnnnnnnnnnnnnnnnnnnnnnnnnnnnnnnnnnnnnnnnnnnnnnnnnnnnnnn

SEQ ID NO: 1404 - DNA, 438 bp, Arabidopsis thaliana
  unsure at all n locations
  Clone ID: ARABLI-17-Q1-B1-A4
ctcgagctcgattacttgggaaaccctagcttggttcacgctcagagcattttggccatttgggccacacaagttattttgatgggagccgttgaaggctacagagtcgcaggaaatgggccattgggagaggccgaggacttgctttaccccggtggcagcttcgacccattgggtttggctaccgacccagaggcattcgctgagttgaaggtgaaggagctcaagaacggaagattggctatgttctctatgtttggattcttcgttcaagccatcgtcactggtaagggaccgatagagaaccttgctgaccatttggncgattcaattaacaacaacgcatgggccttcgccaacaacttgttcccgggaaatnanccaaattttaacccgtantttgcctcaatcctttggctcctgaattnttaaaagaaa

SEQ ID NO: 1405 - DNA, 401 bp, Arabidopsis thaliana
  unsure at all n locations
  Clone ID: ARABLI-17-Q1-B1-A8
ctcgagttcaaaagtaaaacaagacaaacaaaaaatacacttaaccatttatttttctctcatgaagaataatactcaacctcaatcatctttcangaaactttgccggaaactatcaccaaagagggaagattcagccggagagatacaacaacataacagtagcaatggtgaggacaagaacagagagttagaggctgttttttcttacatggatgcaaacagagacggtagaatctcaccagaagagcttcaaaagagtttcatgacattgggagaacaattgtctgatgaagaagccgtagctgctgttagattgtctgatacggacgggagatgggatgttggattttgaggaattttcccaattaatcaaagtnnattaccaanaaagaaaagaa

SEQ ID NO: 1406 - DNA, 440 bp, Arabidopsis thaliana
  unsure at all n locations
  Clone ID: ARABLI-17-Q1-B1-B3
gagtttgggaaaaaaaatatataccanaataaaagannnnnnnnnnnnnnnnnnnnnnnnnnnnnnnnnnnnnnnnnnnnnnnnnnnnnnnnnncgataaatttttgttgaggaagaatttttgttgtaaagagagtttaattaaattatgccttcaatagaagatgagctgtttccgtcaacgccgggtaaattcaaaattgaccggtcaaaccgtcagctccaccgttgtttcgcttctacgagcaccatgtttctttgggctctcttcctcatcgctctcaccgcttcttacttgagtttccaaagcttcgtccgattcccggtaancgttaacnaaacgcttcttggggcgggaacccaatggggaaaaacaaggtcgtaactccggctcaaattcaaccgcnnccggngggaacccccgttccttgttaccgggg

SEQ ID NO: 1407 - DNA, 392 bp, Arabidopsis thaliana
  unsure at all n locations
  Clone ID: ARABLI-17-Q1-B1-B6
gagcaatgataaaacagaaagttgattcagccacagagagaaccaccgattgaaaccgttaagagaatccatctcggttcctatctttggtctgttgacttcatttgtggaggcttaagctatcggatggggatcattaatcatctttgagtgaggcagagatttctctctaggagctctctttcgttttatttatatgtcgacattatataatgtgtttttctctgggagagaagcagatttggagttagagaagtactattttcatttgttcttttaataactttgttgcaatttgttgaagttttgtttcccttgagttctttctgttgtaacaatttacaataaccagccattacattgcaaaaaaaaaaaaaaaagggggggcnccc

SEQ ID NO: 1408 - DNA, 418 bp, Arabidopsis thaliana
  unsure at all n locations
  Clone ID: ARABLI-17-Q1-B1-C4
cgaggatgcattgtacaaggtgaaagaccccgaggttaaatgtttcattgagaaatgcttggccaccgtatcgcttagagtctctgctcgtgagttactagatgacccttttctccgtatagacgatggtgagtttgatttaagatcagttgatatggaagattcggtcgggccactctataggcagccgcaccatcttcctgactactacaattacccgtcgaatagtagctctttgaatcgtcagtactcaaatggcaactacccgtcgaatagtagctcattgaatcgtcagtactcaaatgggtaaaatagtcatcacgaagtatcaaaatgggttgggcgttataatccagctgagacagaaggaaaactcaccggatcnaaccccttngaatccccaaaacnattgagattc

SEQ ID NO: 1409 - DNA, 424 bp, Arabidopsis thaliana
  unsure at all n locations
  Clone ID: ARABLI-17-Q1-B1-C6
tcgagcccttgaaaacgttaaatgatcttctcctccgatcattagtctctttaatctttctcagcctcttcttgttcgtgatctctcttcctccggaaaaagatgtcggccggtaacggaaatgctactaacggtgacggagggtttagtttccctaaaggaccggtgatgccgaagataacgaccggagcagcaaagagaggtagcggagtctgccacgacgatagtggtccgacggtgaatgccacaaccatcgatgagcttcattcgttacagaagaaacgttctgctcctaccacaccgatnaaccaaaacgccgccgctgcttttgccgccgtctccgangaagaacgtcaaaangatcaagcttcnatccaacantngaacccntaacaacctttaaagagaaaattaaggnccaaag

SEQ ID NO: 1410 - DNA, 429 bp, Arabidopsis thaliana
  unsure at all n locations
  Clone ID: ARABLI-17-Q1-B1-C7
tcgagcaggttatactcacagcaatggcgctcatgggcagcattcttcattcaagcggcatggaggaaacattgcaaaaggaagctttctaagacaagagacaacgagaatattccacaaggcacgcaactcaatcttgcatcaacgctctacgtgtccagatttgtgtccaaagctttgcaaaatcgacgaaaagatacagcagattgttccagctctcctgatatgtcacctccggtacctcataaaccagccgatctcgagtttgcaaaggctgaagcatagtgtgtctttgaaggaaaatgactctctacacaaacaaggtagtgaagactccatgttagctcaaaacatgccctacaacgtaactttcaattantgtcaaataatttgactcaacaacacgttctaaatattaaaaaaaaccnt

SEQ ID NO: 1411 - DNA, 389 bp, Arabidopsis thaliana
  unsure at all n locations
  Clone ID: ARABLI-17-Q1-B1-D1
cgagctagcctcatcagacatatacttgagtataggcttcttaaggcgtnnnnnnnnnnnnnnnnnnnnnnnnnnnnnnnnnnnnnnnnnnnnnnnnnnnnnnnnnnnnnnnnnnnnnnnnnnnnnnnnnnnnnnnnnnnnnnnnnnnnnnnnnnnnnnnnnnnnnnctaagtttgtttttgttgttggctctctgttccagcttgtattatcaaatttgagatacatatcttcttagatacagaagattgtgatactatcattgttatgtatttctggggtttccaagtttcttatnccttactantactggttttgatttgatccctaaataatttacagaaagntgtaanctgnntccaaaggancaannnaaannaaaaaaaggg

SEQ ID NO: 1412 - DNA, 423 bp, Arabidopsis thaliana
  unsure at all n locations
  Clone ID: ARABLI-17-Q1-B1-D3
gagcgtcggatgagtcagctcacgggaatcaagagcaaagagattttgatttgggttacgatctctgagatctttgttaatcatcaagatccgactcaaatcacttttgctaatcctacgggactatcacgtactttccccgtcactgcttttgaagaagacgaatgattcatttgtcaacgctcaccatcatgatactttgcttagctaaattatcttttgttttttccttataattccttttgtttagctaagttctattttcaacatttgtatttctgcatcttttccattagagattttnnnnnnnnnnnnnnnnnnnnnnnnnnnnnnnnngggngggcgccgactantgagcccctcgacccggggaattaantccgggaccnggtanctggaaggggttacaaacntttccccaaa

SEQ ID NO: 1413 - DNA, 444 bp, Arabidopsis thaliana
  unsure at all n locations
  Clone ID: ARABLI-17-Q1-B1-D4
ctcnantgtcancttcgtgaacaccaggcgtaaggttgattggcncacagacaaaatgagaagccgtgaccacacagtctctgcaactcacggagacatggaccagaacaccagggacatcatcatgagagagttcaggtctggttcctcccgtgttctcatcaccactgacctcttagctcgtggtattgatgtccaacaagtctccctggttatcaacttcgatctcccaactcagccagagaactaccttcaccgtatcggaagaagtggaaggttcgggagaaagggtgttgcgatcaatttcgtgacccgtgatgatgagangatgctgtttgataatcanaaattctacaatgtgggtgtccaaanaactgccttccnaacgtggccgattngccgttnaagggaaaaaannaatccggntccggttccgtttttggc

SEQ ID NO: 1414 - DNA, 393 bp, Arabidopsis thaliana
  Clone ID: ARABL1-01-Q1-E1-E12
agttataaataaaaatttattttattttcctgaatagcttaagagaaatttgatcttcgtcttcgtcactacgtccccagctctcgagctttgggcactcgatttcctctatacatttccttaaaacccaaaattcttaagcctaatccaaaggagaaaaaaacagagcatttttcttcttctccaatttaaacagtttcctaataatctcactttgtctactcgattctcccaactccaatttgactcatcggaatcatgccattatcaatgaatcctccgacgaatccgccaccattgttccgttgcatctccgtcatgtaactcctcacttccgccttaatcatctcttgcaccaccgccataaactcgcctccgttaccgggaaaagac

SEQ ID NO: 1415 - DNA, 138 bp, Arabidopsis thaliana
  Clone ID: ARABL1-031-Q1-B1-G12
gtcgagcactggacaaagggtaagcgatctaagagatctagatccgatttccaccatcaaaacctcactgaggaagagtatcgaactttttgcctcatgcttcccgctcgcgacaaccgtcagcctcctcctcctccg

SEQ ID NO: 1416 - DNA, 421 bp, Arabidopsis thaliana
  unsure at all n locations
  Clone ID: ARABL1-019-Q1-B1-G1
actctttcgtcgactaatgtgatttattgttcaccggagtattaaagaagatgatgatcggagaaactcgcaggacttatcccactgttgaaatacctccatggccggtacttgaagagcttacaacgtcggagttttttttctccggtgatgaatagtccagattgtagcatgcttgaagctttggcggggttgcagcgttatttgccgtctaacgaaccggatccggagtcatacccggatctattgggtccggattcaccaatcgatgcttactcatgcgaccatttccgtatgtacgatttcaaagtcaggaggtgtgctcgtggccggagtcatgattggacggagtgtccgtacgctcatcccggagaaaaagctcgccggagagatccganggaagtacattactctggtacgg

SEQ ID NO: 1417 - DNA, 411 bp, Arabidopsis thaliana
  Clone ID: ARABL1-025-Q1-B1-C6
aactctttcgtcgactaatgtgatttattgttcaccggagtattaaagaagatgatgatcggagaaactcgcaggacttatcccactgttgagatacctcgatggccggtacttgaagagcttacaacgtcggagtttttttctccggtgatgaatagtccagattgtagcatgcttgaagctttggcggggttgcagcgttatttgccgtctaacgaaccggatccggagtcatacccggatctattgggtccggattcaccaatcgatgcttactcatgcgaccatttccgtatgtacgatttcaaagtcaggaggtgtgctcgtggccggagtcatgattggacggagtgtccgtacgctcatcccggagaaaaagctcgccggagagatccgaggaagtaccattac

SEQ ID NO: 1418 - DNA, 120 bp, Arabidopsis thaliana
  Clone ID: ARABL1-025-Q1-B1-G9
gaattggcttcaccactctcaaaagaaaacgagaaccggtttggtgtgtagatcatcttgaacctttttgaggttttcacattctgagtttatattaagagagggaataatattttggtt

SEQ ID NO: 1419 - DNA, 393 bp, Arabidopsis thaliana
  Clone ID: ARABLI-14-Q1-B1-A5
ctcgagccgctcgagccgctcgagcggctcgagaagagattcaagagtcgcttcttactccgaggttctacacgacggacttcgaggaaatggaacagcttttcaacacggagatcaacaagaaccttaacgaagcagagttcgaggctctgcttcaagagttcaagaccgattacaaccagacacatttcgtgaggaacaaggagtttaaagaagctgcagacaaattgcaaggacctctccgacagatcttcgttgagttccttgagcggtcttgtactgctgagttctctggtttccttctctacaatgagcttggtcgaagactcaagattacaaaccctgttgtggctgagatcctctcgcttatgtctagagatgaagcaagacatg

SEQ ID NO: 1420 - DNA, 408 bp, Arabidopsis thaliana
  unsure at all n locations
  Clone ID: ARABL1-024-Q1-B1-A8
tcacaatctacagacacctcaaggaaaaccctgagttccaatgttacccaatcttcaagtactttgagaactggtgtcaagacgagaaccgtcatggtgatttcttctctgctttgatgaaagctcagcctcagttcctcaatgactggcaagccaagctctggtctcgcttcttctgcctctcggtttatgtgacaatgtacctcaatgactgccaaagaactaatttctacgagggtatcgggttaaacacaaaggagttcgatatgcatgtcatcatcgagacaaaccgaaccacggcaagaatattccctgcggtgctggatgttgagaaccctgagttcaagaggaaactggatagaatggttgtgagctatgaaaaactgctggctatangagaaacagatg

SEQ ID NO: 1421 - DNA, 422 bp, Arabidopsis thaliana
  Clone ID: ARABL1-024-Q1-B1-C9
gcttgtgagcagagagagagagcgagcgaggaggctagagaatcgagaatcgatcttcgccgaaccaccttgtcttctcttagctcatcgaatctctccgtcgccgtcgattcttcccgccggtgaatctctgccttattgttttcttcaatttgatcgtcctgaattcatcgtcctatttagggtttcgatcacaatctgaagaggaggtcatggacgtttctgctagaaagtcacaaaaagctgggcgcgaaaagttgaggagggaaaaactgaatgagcattttgttgaactgggaaatgtactcgatccagagagacccaagaatgacaaagccacgattctgactgatactgttcagttgttgaaagagctcacatctgaagtcaacaaactgaaatctgagttacacgcattgaca

SEQ ID NO: 1422 - DNA, 268 bp, Arabidopsis thaliana
  Clone ID: ARABL1-032-Q1-E1-C4
atccaaaagttcactgctgcaacattgaaacaaatacacagaaggagaacagattacaataatgatgtaagaaagatatataggtcttaggttctcttgacagggtcaaagttggagacgccgacgacgacaccaatgatgacagtgaggacgaggccaccagaagcaatgctgagcaagaaattcttgagggaatgagagattccacaaccaacagcttcagctatctccggaatcaccatcgaagcagtaatagcagccgcggaag

SEQ ID NO: 1423 - DNA, 361 bp, Arabidopsis thaliana
  Clone ID: ARABL1-029-Q1-B1-H4
atcaacctcaaaaatctctctcctctctctctctgtatatagaagaatctccattgtctttaatttctctccatttctctttctctcttccttcaaagttttctcttttcttgatgggtttaagagagtaaagatcatcaagtactatgcattaaattgagaagttattaaaaatttcgaaagtaattaaagattgttgatgatgaagagattaagtagttcagattcagtgggtggtctcatctctttatgtcctacaacttccacagatgagcagagtccgaagagatacggtgggagagaatttcagtcgatgcctgaaagataccaagaagaagaagaagctatagtagaagaaaga

SEQ ID NO: 1424 - DNA, 382 bp, Arabidopsis thaliana
  Clone ID: ARABL1-025-Q1-B1-B5
cgctcatcaacctcaacaatctctctcctctctctctctgtatatagaagaatctccattgtctttaatttctctccatttctctttctctcgtccttcagggttttctcttttcttgatgggtttaagagagtaaagatcatcaagtactatgcattaaattgagaggttattatcaatttcgaaagtgattaacgattgttgatgatgaagagattaagtagttcagattcagtgggtggtctcatctcgttatgtcctacaacttccatagatgagcagagtccgaggagatacggtgggagagagttgcagtcgatgcttgaacgatacgaggaagaagaagacgctatattagaagatagacgacacgtgggcttgt

SEQ ID NO: 1425 - DNA, 355 bp, Arabidopsis thaliana
  Clone ID: ARABL1-023-Q1-B1-H6
gcaaaaacagagtttttttttcttatcttgagaaagttcaacagaagatgatgttcgagaaagacgatctgggtctaagcttaggcttgaattttccaaagaaacagatcaatctcaaatcaaatccatctgtttctgttactccttcttcttcttcttttggattattcagaagatcttcatggaacgagagttttacttcttcagttccaaactcagattcgtcacaaaaagaaacaagaactttcatccgaggaatcgacgtgaacagaccacggtctacaagcggaatacgggaacaagaaccctggataacctcaactaacaattcaatcccaaactccaaaaggaaaag

SEQ ID NO: 1426 - DNA, 282 bp, Arabidopsis thaliana
  Clone ID: LIB22-031-Q1-E1-C7
ggtcttactccaagaattggcttgacgccatcaagggatgggtcttctttttctatgacacccaaagggactcccttcagggatgaacttcacattaacgaagacatggacatgcacgaaagtgcaaaacttgagaggcagagacgagaggaagctagaaggagtttacgctctggtttgactgggcttcctcagccaaagaacgagtaccaaatagttgcacaacctcctcctgaggaaagtgaagagccagaagagaaaattgaggaagacatgtcagac

SEQ ID NO: 1427 - DNA, 390 bp, Arabidopsis thaliana
  Clone ID: LIB22-033-Q1-E2-G2
cccacgcgtccgggctcatccaacagctcttctacgtgctctgatgaaggaaatgttgaaatcatggagagaaggaggatagagatggagaagaagaagaaaagaagagctgttactgtggtagcaatggaagaagataacttgaaagatgatgatgctcatagacttactctgaatcttggtggtaataatattgaggggaatggtgtgaaaaagacgaaacttggaggagggattccgagtcgggcgatttgttgtcaggtagacaactgtggagctgatttaagcaaagttaaggattatcatagacgtcataaggtctgtgagattcattctaaagctactactgcacttgttggaggaattatgcagcggttttgtcagcaatgt

SEQ ID NO: 1428 - DNA, 347 bp, Arabidopsis thaliana
  Clone ID: LIB22-033-Q1-E1-G2
cccacgcgtccgggctcatccaacagctcttctacgtgctctgatgaaggaaatgttgaaatcatggagagaaggaggatagagatggagaagaagaagaaaagaagagctgttactgtggtagcaatggaagaagataacttgaaagatgatgatgctcatagacttactctgaatcttggtggtaataatattgaggggaatggtgtgaaaaagacgaaacttggaggagggattccgagtcgggcgatttgttgtcaggtagacaactgtggagctgatttaagcaaagttaaggagtttcatagacgtcataacgtctgtgagattcagtccaaagctactac

SEQ ID NO: 1429 - DNA, 342 bp, Arabidopsis thaliana
  unsure at all n locations
  Clone ID: LIB22-031-Q1-E1-H8
cacatggaagagaacaacaacgacaagatcaagaaaagacaaagatttgtaagaaaatgggaagagctccatgctgcgacaaggcaaacgtgaagaaaggaccatggtcaccggaagaagatgtgaagctcaaggattacatcgacaaatatggcactggtggcaactggatcgcactgcctcagaaaattgggctgaagagatgtggtaagagttgcagactgagatggcttaattacttaagaccaaacatcaaacatggtggtttttctgangaagaagatagaatcatcttgagtctctaaattagcattggaagccggtggtccataattgcagctc

SEQ ID NO: 1430 - DNA, 412 bp, Arabidopsis thaliana
  Clone ID: LIB22-087-Q1-E1-D10
tttaatctcaagctcataggaatttgatctccacattatatcttgatcatcaccacaagaaaaacatttcaacttcttttatcagcaatcacaaatcaaagagatgggaagagctccatgctgtgagaagatggggttgaagagaggaccatggacacctgaagaagatgaaatcttggtctcttttatcctcaaccatggacatagtaactggcgagccctccctaagcaagctggtcttttgagatgtggaaaaagctgtagacttaggtggatgaactatttaaagcctgatattaaacgtggcaatttcaccaaagaagaggaagatgctatcatcagcttacaccatatacttggcaatagatggtcagcgattgcagcagaactgcctggaagaatcgataacgag

SEQ ID NO: 1431 - DNA, 424 bp, Arabidopsis thaliana
  Clone ID: LIB22-087-Q1-E1-E2
aggaggaaggtgacgaaagaatccattgaagtgatagctcagagcattggactctccactctttctccggacgtctcagccgctcttgctcccgatgtcgagtatcgcgtccgagaggtcatgcaggaagctatcaaatgcatgcgtcatgctcgacgcaccactttaatggctcatgatgtcgattctgctcttcatttcaggaatttggagcctacctctggctccaaaagtatgcggttcaagagagctcctgagaacagagatctatacttcttcgatgacaaagatgtcgagctcaagaatgttatcgaagctcctctaccaaatgcacctcctgatgcatctgttttctctcattggttggcaattgatggtattcaaccttccattccacagaattctcctctccaagccatatctg

SEQ ID NO: 1432 - DNA, 418 bp, Arabidopsis thaliana
  Clone ID: LIB22-056-Q1-E1-H3
cacacacgtccgtagagaagcagatccaagagcttgtagaggcaattgtgcttcccatgacgcacaaggaacgttttgagaagctgggtgttcgtccaccaaagggagtgctcttgtatggtcccccagggactggtaaaactttaatggctcgtgcctgcgcagcacagaccaatgccaccttccttaaattggcaggccctcaattggtccagatgttcattggagacggagcaaagcttgtccgtgatgcctttcaacttgccaaagagaaagctccgtgcattatcttcatagatgaaatcgatgccattggtacaaagcgtttcgacagtgaagtcagcggagacagggaagtgcagaggactatgttggagttgctcaatcaacttgacggattcagtagcgatgaacgtat

SEQ ID NO: 1433 - DNA, 369 bp, Arabidopsis thaliana
  Clone ID: LIB22-056-Q1-E1-E11
catcaaactaaaactcgagagacaagaaatcctcagaatctttaacttaatggcgctcgaggctcttacatcaccaagattagcttctccgattcctcctttgttcgaagattcttcagtcttccatggagtccagcactggacaaagggtaagcgatctaagagatcaagatccgatttccaccaccaaaacctcactgaggaagagtatctagctttttgcctcatgcttctcgctcgcgacaaccgtcagcctcctcctcctccggcggtggagaagttgagctacaagtgtagcgtctgcgacaagacgttctcttcttagcaagctctcggtggtcacaaggcaagccaccgtaagaacttatc

SEQ ID NO: 1434 - DNA, 427 bp, Arabidopsis thaliana
  Clone ID: LIB22-023-Q1-E1-G11
caaaaatgatgatcggcgaaaataaaaaccggccacatccaacgatccatatccctcaatgggatcaaatcaacgatccaacggccacaatctcttcaccattctcttccgtcaaccttaacagcgttaacgactacccacactctccgtcaccgtatctcgactccttcgcttctctcttccgttacctcccgtcaaacgagttaacaaacgattcagactcatcaagtggcgacgagtcatcaccactcaccgactcattctcctccgacgagtttcgcatctacgagttcaaaatccggcgatgcgctcgaggtcgatctcatgattggacggagtgtccgttcgcacatcccggagaaaaagctcgacgacgtgatccgagaaagtttcattactccggcaccgcttgtcctgagtttcgtaa

SEQ ID NO: 1435 - DNA, 409 bp, Arabidopsis thaliana
  Clone ID: LIB22-068-Q1-E1-A4
cttcactgcaattcacaagcaaccttcaaactaaaactcgagagacaagaaatcctcagaatctttaacttaatggcgctcgacgctcttacatcaccaagattagcttctccgattcctcctttgttcgaagattcttcagtcttccatggagtcgagcactggacaaagggtaagcgatctaagagatcaagatccgatttccaccaccaaaacctcactgatgaagagtatctagctttttgcctcatgcttctcgctcgcgataaccgtcagcctcctcctcctccggcggtggagaagttgagctacaagtgtagcgtctgcgacaagacgttctcttcttaccaagctctcggtggtcacaaggcaagccaccgtaagaacttatcacagactctctccgggg

SEQ ID NO: 1436 - DNA, 387 bp, Arabidopsis thaliana
  Clone ID: LIB22-051-Q1-E1-D4
gattaagccatgttctacggcttattctcatgattggaccgagtgtgcttttgttcatccgggagaaaatgcgaggaggagagatccgaggaagtatccttacacttgtgtcccctgtcgcgagttccgtaaaggatcatgcccgaaaggagattcttgcgagtatgctcacggggttttcgagtcgtggcttcaccccgcgcagtataaaacccggctttgtaaagatgaaacgggttgtgcaaggaaagtttgtttctttgctcataaacgcgaagagatgagacctgttaatgcttcaactggctctgccgtggctcaatctccgtttatcagcttggagatgatgccaaggttgtctcctcttgcttagtcttcaggagtttc

SEQ ID NO: 1437 - DNA, 437 bp, Arabidopsis thaliana
  Clone ID: LIB22-078-Q1-E1-H1
gcggttgaggttttactgaccgggattcatggttcggttatggaagaagaggaggaggaactgaagagtgttgtgactaagtatccagctgatgcatcacttcctgatattaacgaaggtgtttatggaactgatgattttaggatgtttagctttaaggttaagccatgttctagggcttattcacatgattggactgaatgtccttttgttcatcctggtgagaatgcaaggaggagagatcctaggaagtatccttacacttgtgtgccttgtcccgagtttcgtaaagggtcttgtcctaaaggagattcgtgtgagtacgcgcacggtgttttcgagtcttggcttcacccggcgcagtataggacacggctttgcaaagatgagactggttgtgctaggagagtttgtttctttgctcatagacgggatga

SEQ ID NO: 1438 - DNA, 422 bp, Arabidopsis thaliana
  Clone ID: LIB22-075-Q1-E1-D4
cttgtttcttcatcatcacctacttcaatcaaaaaacattccaactttcttctcaatttcattccaggatagtattatgtgcagtggaccaaagagcaatctctgctcttcaagaaccttaacagaaatcgaatcaaggcaaaaggaagaagaaacaatgcttctcctcgaattcgctgcttgtgatgatcttgactcgttcaagagagaggttgaagagaaagggcttgatttggatgagtcagggttatggtattgcagacgtgtcggttctaagaagatgggtcttgaagaaagaacacctttaatgggtgcagctatgtatggaagcataaaggttttgactttcatcgtttccactggaaaatctgatgtgaacagagcttgtggtgaagagagagttactccgcttcactgtgctg

SEQ ID NO: 1439 - DNA, 339 bp, Arabidopsis thaliana
  Clone ID: LIB22-034-Q1-E2-G1
cagacgcgtccgcccacgcgtccggttgaagagaaagggcttgatttggatgagtcagggttatggtattgcagacgtgtcggttctaagaagatgggtcttgaagaaagaacacctttaatggttgcagctatgtatggaagcataaaggttttgactttcatcgtttccactggaaaatctgatgtgaacagagcttgtggtgaagagagagttactccgcttcactgtgctgttgctggctgttctgtgaatatgattgaagtcatcaatgtcttgcttgatgcttctgctttggttaactctgttgatgctaatgggaatcaacctttggatgtg

SEQ ID NO: 1440 - DNA, 362 bp, Arabidopsis thaliana
  Clone ID: LIB22-047-Q1-E1-C3
ggaatgacacccatgaggacacctcaaagaactcctgctggtaaaggtgatgctattatgatggaagcagaaaacctggccagattaagagactctcagacacctttgctaggaggagaaaatcctgagttgcacccttctgacttcactggggtcactccgagaaagaaggagattcaaacgcctaatccaatgttgaccccttcaatgactcctggtggtgctggtcttactccaagaattggcttgacgccatcaagggatgggtcttctttttctatgacacccaaagggactcccttcagggatgaacttcacattaacgaagacatggacatgcacgaaaagtgcaaaacttgaga

SEQ ID NO: 1441 - DNA, 424 bp, Arabidopsis thaliana
  Clone ID: LIB22-078-Q1-E1-F9
aatttcttcactgcaattcacaagcaaccttcaaactaaaactcgagagacaagaaatcctcagaatctttaacttaatggcgctcgaggctcttacatcaccaagattagcttctccgattcctcctttgttcgaagattcttcagtcttccatggagtcgagcactggacaaagggtaagcgatctaagagatcaagatccgatttccaccaccaaaacctcactgaggaagagtatctagctttttgcctcatgcttctcgctcgcgacaaccgtcagcctcctcctcctccggcggtggagaagttgagctacaagtgtagcgtctgcgacaagacgttctcttcttaccaagctctcggtggtcacaaggcaagccaccgtaagaacttatcacagactctctccggcggaagagatga

SEQ ID NO: 1442 - DNA, 417 bp, Arabidopsis thaliana
  Clone ID: LIB22-004-Q1-E1-G7
ttcacctctctctctctttcttctccactgtaacctcccaattcaaaaacaattataaaccaaacttgattaatatatatttctttatcatcatctcttcgaaatgcaagatattcatgatttctccatgaacggagttggtggtgggggaggaggaggagggaggtttttcggtggaggaattggcggcggaggaggtggtgatcgaaggatgagagctcatcagaacaatatacttaaccatcatcaatctctcaagtgtcctcgttgtaattctcttaacacaaagttctgttactacaacaattacaatctttctcagcctcgtcacttttgcaagaactgtcgtcgttactggactaaacgtggtgttctccgtaacgtttccgtccgaagtggttgccggaaagctaaacg

SEQ ID NO: 1443 - DNA, 423 bp, Arabidopsis thaliana
  Clone ID: LIB22-075-Q1-E1-G6
caggaagtgttcaaaggaacgaaatacacttcttcttccatttgatgtctgtggtccgaatgaaaaatatctctgtattaaccagaaacgtgtttcataagcatctttaactcttcagctctcaaattcttcatgaatatctctgcttatcgatcaagtgagagcaaatgcaatttttaagagccagctattggatctataactgaagaggatatatatagagatgatgagttcttcttctccaacacaacttgcatctttaagagacatgggaatctatgagccatttcaacaaattgtcggttggggaaatgttttcaaatctgatatcaatgatcatagtcccaatactgttacttcctctattattcaggttgatcctagaattgatgatcacaacaacaacatcaagataaattatga

SEQ ID NO: 1444 - DNA, 385 bp, Arabidopsis thaliana
  Clone ID: LIB22-063-Q1-E1-H9
atatataaaaaaaaaaaagtgagagagagagcaaatctgtgtgatggaagttgctcttgagtttgggattatttatcttttcaatatcatttgatgaagaaggatggtgagatgggaagaagtgatgtcaggaggagtaggagatgaaagagagacaacgttggagtggtgaagaagatgcattgttacgtgcttacgttagacagttcggtccgagagaatggcatcttgtgtctgagcgtatgaacaaacctttgaaccgtgacgccaagtcttgtttagagagatggaagaattatcttaagccagggatcaagaaagggtctttgacagaggaatagcagaggcttgtgatccgtcttcaggagaaacacgggaacaagtg

SEQ ID NO: 1445 - DNA, 392 bp, Arabidopsis thaliana
  Clone ID: LIB22-088-Q1-E1-F11
cagagtcttcgtctgcaagagagaacaataccactcaatcataatctataacaatggacgtctatggcttatcttcaccagacttacttcgaatcgacgaccttcttgatttctccaacgaagacatcttctccgcttcttcttccggtggttccaccgccgctacttcctcttcttctttccctcctcctcaaaaccctagtttccaccaccaccatctcccttcctccgccgatcatcactccttcctccacgacatttgcgttcccagtgatgacgcagctcatcttgaatggctttcgcaattcgtggacgattctttcgctgattttccggcgaatccattaggaggaactatgacttctgtcaaaactgaaacttcctttccgggg

SEQ ID NO: 1446 - DNA, 417 bp, Arabidopsis thaliana
  unsure at all n locations
  Clone ID: LIB22-044-Q1-E1-E12
cacagatttgctctccggctttgggactaacatagatccatcccatggtcagcggatacctttttatgaccattcatcatcaccttctatgcctgcaaagagaatcttgagtgattcagaaggcaagttcgattatcttgctaaccagtggcagatgatacactctggtctctccctgaagttacatgaatctcctaaggtacctgcagcaactgatgcgtctctccaagggcgatgcaatgttaaatacagcgaatatcctgttcttaatggtctatcgactgagaatgctggtggtaactggccaatacgtccacgtgctttgaattattatgaggaagtggtcaatgctcaagcgcaagctcaggctanggagcaagtaacanaacaacccttcacgatacaagaggagacagc

SEQ ID NO: 1447 - DNA, 413 bp, Arabidopsis thaliana
  Clone ID: LIB22-015-Q1-E1-A11
agatcactctctgattcactctgagagacaaactggtttactttggttctgtttgacaaaaggagacatgcaaaaataaatctctatcccttgtttttcttcttcgcttcatcgattactcaaagaggttgttggttgtgagaataattagcttgttaaggaagacgttatgatgcatcagatgttgaataagaaagattcagctactcattccactttgccataccttaatactagcatctcttggggagtggttccaactgattccgttgctaatcgtcgcggttctgctgaatcactaagcttgaaggttgattcaagacctgggcatatacaaactacaaagcaaatcagttttcaagaccaagattcatcttcaacacagtccactggtcaatcttatactgaagttg

SEQ ID NO: 1448 - DNA, 416 bp, Arabidopsis thaliana
  unsure at all n locations
  Clone ID: LIB22-032-Q1-E1-B8
ctttgagagagagagcaaatgaaaaaaacccaaaaaactcttttctccaaccattaccatctcatgaacactctcacaggaggctctctcttctcagagagcctacccatctaatatttcttcatctgagtctcttttacttctctcaaagtatcgatctttattcttctttttgtaaaccctctctctctctctgatttctactgacctgtttggaagatatgatggctcatcactccatggacgatagagactctcctgataaaggatttgattccggcaagtacgttagatacacgccggaacaagttgaagctcttgagagagtttatgctgagtgtcctaaacctagctctctgagaagacaacagcttattcgtgaatgtcncattctctgtaacatcgagcctcgacag

SEQ ID NO: 1449 - DNA, 421 bp, Arabidopsis thaliana
  unsure at all n locations
  Clone ID: LIB22-041-Q1-E1-F7
atctcctttgagagagagagcaaatgaaaaaaacccaaaaaactcttttctccaaccattaccatctcatgaacactctcacaggaggctctctcttctcagagagcctacccatctaatatttcttcatctgagtctcttttacttctctcaaagtatcgatctttattcttctttttgtaaaccctctctctctctctgatttctactgacctgtttggaagatatgatggctcatcactccatggacgatagagactctcctgataaaggatttgattccggcaagtacgttagatacacgccggaacaagttgaagctcttgagagagtttatgctgagtgtcctaaacctagctctctgagaagacaacagcttattcgtgaatgtcncattctctgtaacatcgagcctcgacag

SEQ ID NO: 1450 - DNA, 386 bp, Arabidopsis thaliana
  Clone ID: LIB22-086-Q1-E1-F5
attttcctctctcttctctctcttctctctcttctctctacttagctgcctcgcttttgctccttttacctctttccatctttcaatctcctttgagagagagagcaaatgaaaaaaacccaaaaaactcttttctccaaccattaccatctcatgaacactctcacaggaggctctctcttctcagagagcctacccatctaatatttcttcatctgagtctcttttacttctctcaaagtatcgatctttattcttctttttgtaaaccctctctctctctctgatttctactgacctgtttggaagatatgatggctcatcactccatggacgatagagactctcctgataaaggatttgattccggcaagtacgttagatac

SEQ ID NO: 1451 - DNA, 327 bp, Arabidopsis thaliana
  Clone ID: LIB22-013-Q1-E1-A1
agaaaggtaaaagagacggagacgaaccaaaacaaggaagaaagaagaagatcttacatacgaagatcactctctgattcactctgagagacaaactggtttactttggttctgtttgacaaaaggagacatgcaaaaataaatctctatcccttgtttttcttcttcgcttcatcgattactcaaagaggttgttggttgtgagaataattagcttgttaaggaagacgttatgatgcatcagatgttgaataagaaagattcagctactcattccactttgccataccttaatactagcatctcttggggagtggttccaactga

SEQ ID NO: 1452 - DNA, 457 bp, Arabidopsis thaliana
  Clone ID: LIB22-031-Q1-E1-A4
ggatggccgtgatgagcctgagagaggaaactctaatcagcagtttacgcaggatttatttgtgccatcttctgggaaactaaaacgtgatgattcatctgcacactatcaaaatggtggatctatacctcaacaagatggtgcaagcgatgctatccctgaggcaaactttgaatgtgctgcactccgtataacctatgttggcgatagaaagatcccacgagatttgattggctcatcatcgaagattctccaagttgatgggccaatgcctgacccgtatgatgaaatgttgtccacacccaatatatacagttttcaaaggaccaatgacaagtttaatgatggcaaaactcctggtccaaacgaaatccaaacgagcactcctgttgctgtaccaaacgatatcattgaagatgatgaagagctgttgaaccaagatgatgatgatgacgag

SEQ ID NO: 1453 - DNA, 410 bp, Arabidopsis thaliana
  Clone ID: LIB22-056-Q1-E1-G12
cacacgcgtcagcccacgcgtccggaatgaatctctgtttcttgttttggaaccgagatggcttcctaacaattgggcttttctctgcctcttcctaggaatctgaagctcttctctactctctactctatcactccatctgtgaacatatctttcttattcttctaggcactatctatttttcactttttgtaattggaatttggagatggctatgcaaactgtgagagaaggtctcttctctgctccacagacttcttggtggactgcttttggatctcagccgttggctccggagagtctcgccggcgattctgactcattcgccggagttaaggtcggatctgtcggagagacaggacaacgtgtggataaacaaaacaactctgcaacgcacttagctttctcac

SEQ ID NO: 1454 - DNA, 427 bp, Arabidopsis thaliana
  Clone ID: LIB22-014-Q1-E1-E7
gtgaatgaatctctgtttcttgttttggaaccgagatggcttcctaacaattgggcttttctctgcctcttcctaggaatctgaagctcttctctactctctactctatcactccatctgtgaacatatctttcttattcttctaggcactatctatttttcactttttgtaattggaatttggagatggctatgcaaactgtgagagaaggtctcttctctgctccacagacttcttggtggactgcttttggatctcagccgttggctccggagagtctcgccggcgattctgactcattcgccggagttaaggtcggatctgtcggagagacaggacaacgtgtggataaacagagcaactctgcaacgcacttagctttctcacttggtgattgtaagagtccaagacttgtgccaaagcctc

SEQ ID NO: 1455 - DNA, 397 bp, Arabidopsis thaliana
  Clone ID: LIB22-055-Q1-E1-D6
ctcgctgtccctccttctctttctcattcattgcaatgggcagaagatgctcacactgtggaaacgtaggacataactcaagaacatgttcttcttaccaaacaagagtagttaggctctttggtgttcatctagacaccacaagctcttctccgccgcctcctcctcctccctcgattttggccgctgcaataaagaaaagtttcagcatggattgcttgccggcatgttcctcctcttcctcttcctttgctggttatctctccgatggtctcgcccataaaacacctgaccgcaaaaaaggggttccatggacggcggaagagcaccggacgtgtctaattggattagaaaagcttggaagaagagattggagaggaatctctagaaacttcgt

SEQ ID NO: 1456 - DNA, 383 bp, Arabidopsis thaliana
  Clone ID: LIB22-020-Q1-E1-E8
gaggcaagcaaccaaatctcagagacaattataacagtatagagaaggaagaaagaaaagaaaaagaaaccgttgttgatttagatacagagaagagaagatcatctaacatgggaagatctcctatctctgatgactctggtctcaagaaaggtccttggactcctgatgaagatgagaaacttgtcaactatgttcaaaaacatggtcatagtagctggagagcccttcccaaactcgctggtcttaacaggtgtgggaagagttgcaggctaagatggacgaactacttgagaccagacatcaagagagggagattctctccggacgaggaacagactatcttgaatcctcattcagttcttgggaacaagtggtcaacg

SEQ ID NO: 1457 - DNA, 419 bp, Arabidopsis thaliana
  unsure at all n locations
  Clone ID: LIB22-038-Q1-E1-A1
aacacacacaananaaaaaaactgtaacgaccaaaaaaaaagaggacgcgttagaagaaaaaaaaagaacaatccgataaaaagatccggcgatgtcaaacccgacccgtaagaatatggagaggattaaaggtccatggagtccagaagaagatgatctgttgcagaggcttgttcagaaacatggtccgaggaactggtctttgattagcaaatcaatccctggacgttccggcaaatcttgtcgtctccggtggtgtaaccagctatctccggaggtagagcaccgtgctttttcgcaggaagaagacgagacgattattcgagctcacgctcggtttggtaacaagtgggctacgatctctcgtcttctcaatggacgaaccgataacgctatcaagaatcattggaactcgacg

SEQ ID NO: 1458 - DNA, 436 bp, Arabidopsis thaliana
  Clone ID: LIB22-059-Q1-E1-C11
cccacgcgtccgcccacgcgtccggttaagaaatatcatagtaatgacaaccgtgataaggacaatactggtttgggcgatggtgataaggacaatacttgtaagggggatgatgataaggaaaaatctggtagtggcggttgtgagaaggaaaatgaagggaatggcggaagtggtaaggacaataatggtaatggcgattctcagcctgcggagtgttcaactggtcagaagcaggttgtctgcaaagaaattggttgtggaaaagcctttaagtatccttcacagcttcaaaagcatcaggattctcatgtgaaattagactctgtggaggcattttgttccgagcctgggtgtatgaagtactttaccaacgaagaatgcctcaagtcacacataagatcctgtcatcagcacatcaactgtgagatatgtg

SEQ ID NO: 1459 - DNA, 412 bp, Arabidopsis thaliana
  Clone ID: LIB22-064-Q1-E1-H5
gagaggttgaaacctcaggaagagaaagctgaggaagatagatctaaggttgatgatcttcgtggtacacctatgagtgttgggaatttggaagagttgattgatgagaatcacgctattgtttcttcttctgttggacctgagtactacgttgggattttgtccttcgttgataaagatcagcttgaacctggatgttcgattttgatgcataataaggttctctctgttgttgggattctacaagatgaagtggatccaatggtgtctgtgatgaaagttgagaaagctcctttggagtcatatgctgatattggaggtttagaagctcagattcaggagattaaggaagctgttgagcttcctttgactcatcctgagttgtatgaagatattggtattaaaccaccaa

SEQ ID NO: 1460 - DNA, 332 bp, Arabidopsis thaliana
  Clone ID: LIB22-022-Q1-E1-A3
gagacaaggaccatcgggaggattgaatcggcaaggagatcggaaacctgatggtggagataagaaagagaagaagtttgagccggcggcaccaccggctcgtgtagggaggaagcaaaggaagcagaaatggccataggcggcggcgagacttccgacggtgactccgtctactaagtgtaagctccggttactgaaattggaacggatcaaggattatttgttgatggaagaagagtttgtggcgaatcatcagaagttgaaacctcatgaacacaaagctgacgaatatagatctaacgttgatgatcttcgtggtacacctatgagtg

SEQ ID NO: 1461 - DNA, 404 bp, Arabidopsis thaliana
  unsure at all n locations
  Clone ID: LIB22-028-Q1-E1-B4
atagaagccacttcctcctgctcaagccgtgagagaggcaaggagtgatgctccacgtggtggtggaggccgtggaggatttaaccgtggtcgtggtggttacaaccgtgatgatggtaacaatggatattcagggggatacactaaaccctcaggtgaaggagatgtttcaaagtcttcttacgagaggcgtggcggtggtggtgctcctcgtggttccttccgtggtgaaggtggtggacctggtggtggtcgtcgtggtggattcagcaatganggtggtgatggggaacgtcctcgaagggcctttgagcgtcgtagtggaactggcagagggagtgacttcaagcgtgacggatctggtcgtgggaattggggaactccagnggaagagatagctgctg

SEQ ID NO: 1462 - DNA, 337 bp, Arabidopsis thaliana
  Clone ID: LIB22-035-Q1-E1-H7
cagacgcgtgggcgtggtggaaacaatagggattcaaggaacagtgatggtcctgccaatgaaaacggatatggtggaggctacagacgctcataagaaggagatggagctagacgtggtgggcctgttggtggataccgtggtgatcgccgtggaagctacagcaatggtggtgattcaggtgactctgaaagaccacgcaagaactatgaccgtcacagtagaacagcgtacgggaatgacgataaacgtgatggagctggccgtgcgaattggggaaccactcaggatgatattactccggtgactgaagaatccacagctgttgtggacaaga

SEQ ID NO: 1463 - DNA, 347 bp, Arabidopsis thaliana
  Clone ID: LIB22-080-Q1-E1-B2
atcgagctacttcctccgccggctttgctgtgtgtgtgatcgttcgtttactaaatctgaaacaagtatctaacgccttgccggagatgtcgagctcaggccaaactcagttccgttatacacagacgccgtcgaaggtggttcatctgcggaatcttccatgggaatgcgtcgaagaggagctcatcgacctttgcaaacgattcggcaagatcgtcaataccaagagcaatgtcggcgccaatcgcaatcaagctttcgtcgaatttgctgacttgaatcaagctatatcaatggtttcgtattaagcgtcatcttcagagcccgcacagattcgtgggaaaact

SEQ ID NO: 1464 - DNA, 386 bp, Arabidopsis thaliana
  Clone ID: LIB22-056-Q1-E1-F8
gctacttcctccgccggctttgctgtgtgtgtgatcgttcgtttacgaaatctgaaacaagtatctaacgccttgccggagatgtcgagctcaggccaaactcagttccgttatacacagacgccgtcgaaggtggttcatctgcggaatcttccatgggaatgcgtcgaataggagctcatctacctttgcaaacgattcggcaagatcgtcaataccaagagcaatgtcggcgccaatcgcaatcaagctttcgtcgaatttgctgacttgaatcaagctatatcaatggtttcgtattatgcttcatcttcatagcccgcacagattcgtgggaaaactgtctatattcagtactctaatcgccatgagattgttaacagtca

SEQ ID NO: 1465 - DNA, 334 bp, Arabidopsis thaliana
  Clone ID: LIB22-080-Q1-E2-B2
atcgagctacttcctccgccggctttgctgtgtgtgtgatcgttcgtttactaaatctgaaacaagtatctaacgccttgccggagatgtcgagctcaggccaaactcagttccgttatacacagacgccgtcgaaggtggttcatctgcggaatcttccatgggaatgcgtcgaagaggagctcatcgacctttgcaaacgattcggcaagatcgtcaataccaagagcaatgtcggcgccaatcgcaatcaagctttcgtcgaatttgctgacttgaatcaagctatatcaatggtttcgtagtatgcttcatcttcagagcccgcacaaat

SEQ ID NO: 1466 - DNA, 416 bp, Arabidopsis thaliana
  Clone ID: LIB22-081-Q1-E2-A5
gctctccctctcctctccctttgagaaatccctaactctttgctcttctcttcccggcgatctatctctccgatttgggtattgaaatggcaactcctatggttgaagatacgtcaagcttcgaagaggatcagcttgcttccatgtccaccgaagatatcactagagctactcgtcttctcgacaacgagattcgaattctcaaggaagacgcgcaaagaacaaatctagaatgtgattcttacaaggagaagattaaggagaatcaggagaagattaaactcaacaagcagctgccttacttggttggcaacattgtcgagattttggagatgaatccagaagatgatgctgaggaagatggtgcaaatattgatcttgactcgcaacggaaaggaaaatgtgttgtgttgaaa

SEQ ID NO: 1467 - DNA, 441 bp, Arabidopsis thaliana
  Clone ID: LIB22-017-Q1-E1-A6
accacgcgtccggtcgctctccctctcctctccctttgagaaatccctaactctttgctcttctcttcccggcgatctatctctccgatttgggtattgaaatggcaactcctatggttgaagatacgtcaagcttcgaagaggatcagcttgcttccatgtccaccgaagatatcactagagctactcgtcttctcgacaacgagattcgaattctcaaggaagacgcgcaaagaacaaatctagaatgtgattcttacaaggagaagattaaggagaatcaggagaagattaaactcaacaagcagctgccttacttggttggcaacattgtcgagattttggagatgaatccagaagatgatgctgaggaagatggtgcaaatattgatcttgactcgcaacggaaaggaaaatgtgttgtgttgaaaacgtctacac

SEQ ID NO: 1468 - DNA, 433 bp, Arabidopsis thaliana
  Clone ID: LIB22-008-Q1-E1-F8
acagaccatggacagtctggagctatgaactatggcacaaacccataccaaaccaacccgatgagcaccactgctgctactgtagcaggaggtgcggcacaaccaggccagctggcgttccaccagatccatcagcagcagcagcagcaacagctggcacagcagcttcaagcattttgggagaaccaattcaaagagattgagaagactaccgatttcaagaaccacagccttccccttgcgagaatcaagaaaatcatgaaagcggatgaagatgtccgtatgatctcggctgaggcgcctgtcgtgtttgcaagggcctgtgagatgttcatcctggagctgacactcaggtcgtggaaccacactgaggagaataagaggcggacgttgcagaagaacgatattgctgctgctgtgactagaaccgata

SEQ ID NO: 1469 - DNA, 418 bp, Arabidopsis thaliana
  Clone ID: LIB22-043-Q1-E1-B12
tacagactatggaaatggaatcattcatggacgaccttttgaacttctctgtaccggaagaggaagaagacgacgacgaacatacgcaaccaccgaggaatattactcgccggaaaactggattacggccaacagactccttcggtctctttaataccgacgaccttggagtggttgaagaagaggatttggaatggatttcaaacaaaaatgcttttccggtgattgaaacattcgtcggtgtattaccgtcggagcattttcctataacgtctcttctggaaagagaagcgactgaggtaaaacagctgagtccggtttcagtacttgagacgagtagccatagctccacaacgactacctcaaacagtagcggcggaagtaacggaagcacggccgtggctacgaacaaacacac

SEQ ID NO: 1470 - DNA, 426 bp, Arabidopsis thaliana
  unsure at all n locations
  Clone ID: LIB22-026-Q1-E1-B8
atccatacctttcnttcttcatcttcatcttcacgcagcgacttctttgattctctctttttattctcagctccaatttcaacctgcatttctctcttctcaattttgggtttctttttttgatatctcatttgatcagatcgacgaagagaggaagaaggtttgagctgagagatctttggaggtagaaagaagatctcaaaaacgatgtcgtttacaggaactcagcagaaatgcagggcgtgcgagaagacagtgtaccctgtggagcttctctcagctgatggaatctcttatcacaaggcttgcttcaaatgctctcactgcaaaagcagacttcaactgagcaattattcatcaatggaacgagtggtgtattgtaggcctcattttgagcagcttttcaaggagtctggtagtttcagc

SEQ ID NO: 1471 - DNA, 438 bp, Arabidopsis thaliana
  Clone ID: LIB22-076-Q1-E1-B3
attttctattgcagagagaaagagagttagagaaagagagagagagagagagagagagagagatgaaacttgtgcaagaagaataccgtaaaggaccgtggacagaacaggaggacatcctcttggtcaactttgtccacttgttcggagatcgaagatgggattttgtagcgaaagtttcaggtttgaaggtggagggagaaacataagaataggtttaaacaaaacaggaaagagttgcaggttaaggtgggttaattacctgcatcctggtctcaaacgtggtaagatgactccacaagaagagcgtttagtccttgagcttcacgccaaatggggaaacaggtggtcaaaaattgcccgggaattaccggggagaacagataatgagataaagaactactggacgactcatatgaggaagaagctcaagagaag

SEQ ID NO: 1472 - DNA, 355 bp, Arabidopsis thaliana
  Clone ID: LIB22-035-Q1-E1-D8
aggacgcgtgggcggacgcgtgggcgatcacctaagatccgatccgcgagcgtttcagacttcgatcagatccgattaagagaagcatatcaggtcgggtatgactcgtcgatgttctcaatgcactcacaatggccacgcctctcggacttgtcccaaccgcggcgtgatgctctttggtgttcggctcagcgaaggttcgatccggaaatgtgcaagtatgggtaatcttagccattacacgggttctggatcgggtgggcttggaaccgggttaaaaactccgggttctccgggtgatgtcactgaccatgtcgctggtgagggttactcgtctgaggatttctttgctggc

SEQ ID NO: 1473 - DNA, 375 bp, Arabidopsis thaliana
  Clone ID: LIB22-056-Q1-E1-G9
cacgtgttttgttttctttgtctccgatttttttcgcgacgaagaagaagacgagagatagagagagaagtagagaaatcgaaggaatctgtaaccgattttaagatctcaatttttagggttgttgatttttcaatttctgggttaattttttttagggttttcatttggaatcatgtcggatgcgtattgtacggattgtaaaaaggagacggagttggttgtcgatcactcagccggagataccctttgctccgagtgtggtttggttttggaatctcactccattgatgagacctctgagtggcgtaccttcgctaatgaatcttccaacagcgatcccaatcgtgtcggtggtccaaccaacccgcttct

SEQ ID NO: 1474 - DNA, 417 bp, Arabidopsis thaliana
  Clone ID: LIB22-055-Q1-E1-F7
accacgcgtccgcaaaggttcaggacctttcagatcagtcaaaagggtcaaaatcaacaaacgatcatcgtgaacagggaagaccattccagactaataatcctcatccgaaggatgctcaaacgaaaaccaactcaagtaggagttgcacaaaggttcacaagcagggaattgcacttggccgttcagtggatctttcaaagttccaaaactatgaggagttagtcgctgagctggacaggctgtttgagttcaatggagagttgatggctcctaagaaagattggttgatagtttacacagatgaagagaatgatatgatgcttgttggtgacgatccttggcaggagttttgtttcatggttcgcagaatcttcatatacacgaaagaggaagtgaggaagaatacccggggac

SEQ ID NO: 1475 - DNA, 412 bp, Arabidopsis thaliana
  Clone ID: LIB22-004-Q1-E1-C9
aaagaatcatgggacaaggaccatcgggaggattgaatcggcaaggagatcggaaacctgatggtggagataagaaagagaagaagtttgagccggcggcaccaccggctcgtgtagggaggaagcaaacgaagcacaaagggccagaggcggcggcgagacttccgacggtgactccgtctactaagtgtaagctccggttactgaaattggcacggatcaaggattatttgttgatcgaggaagagtttgtggcgaatcaagagaggttgaaacctcacgaagagaaagctgacgaagatagatctaaggttgatgatcttcgtggtacacctatgagtgttgggaatttggaagagttgactgatgagaatcacgctattgtttcatcgtctgttggacctgagtacta

SEQ ID NO: 1476 - DNA, 311 bp, Arabidopsis thaliana
  Clone ID: LIB22-018-Q1-E1-G7
acggacgcgtgggctcattgcttcatcattaccaaatcatcaacttaatcgtttctctcaaatttagggttttctcttttctcgaaagtcttgcggttttctgaatcatctctatctggtttgagggtttcgtttgatatctggagaaaggggtttctggaaacaaggagttcataattcgcgatcttgatctatcgatcttcatttatatataaaagcgtgaatgagattatgatggagtcgataggtggtaaatataatccagcagtagtagttccttattttacgaagctcccctcggttacagcatt

SEQ ID NO: 1477 - DNA, 358 bp, Arabidopsis thaliana
  Clone ID: LIB22-060-Q1-E1-G8
gccccggaggccagccttttcctcaccgcagcttctctgaagaagtctctgttcttgatgggcactttactcagctgggcttgaacagcgtagcctacttgatgggcaatgatgatgagactacgaaatggcatgtcgatgctgcctctgcccacgactccagcatctgcagcaacaatgtctacactctcgagatgtgcatgactggtctggacagagagaaagctgctgtcttctacaaggatgaagctgacaagactgggtcactgactgataactctggaatcagaaagatccttcccaagtctgagatctgcgactttgaattcgagctctgcggctactctatgaactcaat

SEQ ID NO: 1478 - DNA, 420 bp, Arabidopsis thaliana
  Clone ID: LIB22-043-Q1-E1-D11
ttcaacgatagcgttgtgctctggagaagtgtttgatcgcagaaaagcttcgttctttgtagtctacaggcgtggaaggaatggcaaaaagctcgttctctcctcctactacaagtcctgtcgctcacacaacaaggcgagatggccttatctgcaatcggtttcgaaggttacgagaaacggctcgaggtgactttctttgagccaagcatctttcaagactccaagggactgggactccgtgctctgaccaagtcccagcttgatgaaattcttacacctgctgcatgcacgatcgtttcatctctctccaacgatcaattggactcttacgtactctctgagtccagcttctttgtctacccctacaaagtcatcatcaagacttgcgggtacactaagctcctcctctctatccca

SEQ ID NO: 1479 - DNA, 398 bp, Arabidopsis thaliana
  Clone ID: LIB22-056-Q1-E1-C5
accacgcgtccgcccacgcgtccgatctcattgcttcatcattaccaaatcatcaacttaatcgtttctctcaaatttagggttttctcttttctcgaaagtcttgcggttttctgaatcatctctatctggtttgagggtttcgtttgatatctggagaaaggggtttctggaaacaaggagttcataattcgcgatcttgatctatcgatcttcatttatatataaaagcgtgaatgagattatgatggagtcgaaaggtggtaaaaagaagtccagcagtagtagttccttattttacgaagctcccctcggttacagcattgaagacgttcgtccaaactgtggaatcaagaaattcaaatcttctgtctactcaaactgctcaaagaggccat

SEQ ID NO: 1480 - DNA, 362 bp, Arabidopsis thaliana
  Clone ID: LIB22-080-Q1-E2-B7
cactaagctcctcctctctatcccaccacttctaaagctggctggtgagctctctctgagtgtcaagtctgtgaagtacactcgcggctccttcctctgccccggaggccagccttttcctcaccgcagcttctctgaagaagtctctgttcttgatgggcactttactcagctgggcttgaacagcgtagcctacttgatgggcaatgatgatgagactaagaaatggcatgtctatgctgcctctgcccaggactccagcaactgcaacaacaatgtctacactctcgagatgtgcatgactggtctggacagagagaaagctgctgtcttctacaaggatgaagctgacaagactgggt

SEQ ID NO: 1481 - DNA, 388 bp, Arabidopsis thaliana
  unsure at all n locations
  Clone ID: LIB22-012-Q1-E1-H11
atcattgcttcatcattaccaaatcatcaacttaatcgtttctctcaaatttagggttttctcttttctcgaaagtcttgcggttttctgaatcatctctatctggtttgagggtttcgtttgatatctggagaaaggggtttctggaaacaaggagttcataattcgcgatcttgatctatcgatcttcatttatatataaaagcgtgaatgagattatgatggagtcgaaaggtggtaaaaagaagtccagcagtagtagttccttattttacgaagctcncctcggttacagcattgaagacgttcgtccaaacggtggaatcaagaaattcaaatcttctgtctactcaaactgctcaaagagggcatccctgagtacagcgtg

SEQ ID NO: 1482 - DNA, 403 bp, Arabidopsis thaliana
  Clone ID: LIB22-068-Q1-E1-B3
gccatcctgagtaccagcgtgcaccgatcttcataatatagttagagctttctttactttccagtttataagtttcttctttcagagctccttttctgctggttcccggatctaatcgttctctcctcctactacaagtcctgtcgctcacacaacaaggcgagatgcgcttatctgcaatcggtttcgaaggttacgagaaacggctcgaggtgactttctttgagccacacatctttcaagactccaagggactgggactccgtgctctgaccaagtcccagcttgatgaaattcttacacctgctgcatgcacgatcgtttcatcgctctccaacgatcacttggactcttacgtactctctgagtccagcatcattgtcgacccctacaaagtcatcat

SEQ ID NO: 1483 - DNA, 385 bp, Arabidopsis thaliana
  Clone ID: LIB22-044-Q1-E1-A2
cttcatcattaccaaatcatcaacttaatcgtttctctcaaatttagggttttctcttttctcgaaagtcttgcggttttctgaatcatctctatctggtttgagggtttcgtttgatatctggagaaaggggtttctggaaacaaggagttcataattcgcgatcttgatctatcgatcttcatttatatataaaagcgtgaatgagattatgatggagtcgaaaggtggtaaaaagaagtccagcagtagtagttccttattttacgaagctcccctcggttacagcattgaagacgttcgtccaaacggtggaatcaagaaattcaaatcctctgtctactcaaactgctccaaagaggcatcctgagttacagcgtgcacc

SEQ ID NO: 1484 - DNA, 413 bp, Arabidopsis thaliana
  Clone ID: LIB22-068-Q1-E1-B8
acggacgcgtggggcttcatcattaccaaatcatcaacttaatcgtttctctcaaatttagggttttctcttttctcgaaagtcttgcggttttctgaatcatctctatctggtttgagggtttcgtttgatatctggagaaaggggtttctggaaacaaggagttcataattcgcgatcttgatctatcgatcttcatttatatataaaagcgtgaatgagattatgatggagtcgaaaggtggtaaaaagaagtccagcagtagtagttccttattttacgaagctcccctcggttacagcattgaagacgttcgtccaaacggtggaatcaagaaattcaaatcttctgtctactcaaactgctccaagaggccatcctgagtaccagcgtgcaccgatcttcataatat

SEQ ID NO: 1485 - DNA, 398 bp, Arabidopsis thaliana
  Clone ID: LIB22-060-Q1-E1-E10
catcattaccaaatcatcaacttaatcgtttctctcaaatttagggttttctcttttctcgaaagtcttgcggttttctgaatcatctctatctggtttgagggtttcgtttgatatctggagaaaggggtttctggaaacaaggagttcataattcgcgatcttgatctatcgatcttcatttatatataaaagcgtgaatgagattatgatggagtcgaaaggtggtaaaaagaagtccagcagtagtagttccttattttacgaagctcccctcggttacagcatttaagacgttcgtccaaacggtggaatcaagaaattcaaatcttctgtctactcaaactgctccaaaaggccatcctgagtaccagcgtgcaccgatcttcataatatag

SEQ ID NO: 1486 - DNA, 413 bp, Arabidopsis thaliana
  Clone ID: LIB22-018-Q1-E1-D6
acttcatcattaccaaatcatcaacttaatcgtttctctcaaatttagggttttctcttttctcgaaagtcttgcggttttctgaatcatctctatctggtttgagggtttcgtttgatatctggagaaaggggtttctggaaacaaggagttcataattcgcgatcttgatctatcgatcttcatttatatataaaatcgtgaatgagattatgatggactcgaaatgtggtaataagaagtccagcagtagtagttccttattttacgaagctcacctcggttacagcattgaagacgttcgtccaaacagtggaatcaagaaattcaaatcttctgtctactcaaactgctccaaaatgccatcctgagtaccaacgtgcaccgattctcataatatagttatagctttc

SEQ ID NO: 1487 - DNA, 393 bp, Arabidopsis thaliana
  Clone ID: LIB22-028-Q1-E1-E8
acacatcaacttaatcgtttctctcaaatttagggttttctcttttctcgaaagtcttgcggttttctgaatcatctctatctggtttgagggtttcgtttgatatctggagaaaggggtttctggaaacaaggagttcataattcgcgatcttgatctatcgatcttcatttatatataaaagcgtgaatgagattatgatggagtcgaaaggtggtaaaaagaagtccagcagtagtagttccttattttacgaagctcccctcggttacagcattgaagacgttcgtccaaacggtggaatcaagaaattcaaatcttctgtctactcaaactgctccaagaggccatcctgagtaccagcgtgcaccgatcttcataatatagttatag

SEQ ID NO: 1488 - DNA, 398 bp, Arabidopsis thaliana
  Clone ID: LIB22-041-Q1-E1-G9
catcaacttaatcgtttctctcaaatttagggttttctcttttctcgaaagtcttgcggttttctgaatcatctctatctggtttgagggtttcgtttgatatctggagaaaggggtttctggaaacaaggagttcataattcgcgatcttgatctatcgatcttcatttatatataaaagcgtgaatgagattatgatggagtcgaaaggtggtaaaaagaagtccagcagtagtagttccttattttacgaagctcccctcggttacagcattgaagacgttcgtccaaacggtggaatcaagaaattcaaatcttctgtctactcaaactgctccaagaggccatcctgagtaccagcgtgcaccgatcttcataatatagttatagctttcttt

SEQ ID NO: 1489 - DNA, 424 bp, Arabidopsis thaliana
  Clone ID: LIB22-037-Q1-E1-D9
aattaccacatcatcaacttaatcgtttctctcaaatttagggttttctcttttctcgaaagtcttgcggttttctgaatcatctctatctggtttgagggtttcgtttgatatctggagaaaggggtttctggaaacaaggagttcataattcgcgatcttgatctatcgatcttcatttatatataaaagcgtgaatgagattatgatggagtcgaaaggtggtaaaaagaactccagcactagtagttccttattttacgaagctcccctcggttacagcattgaagacgttcgtccaaacggtggaatcaagaaagtcaaatcttctgtctactcaaactgctccaagaggccatcctgagtatcagcgtgcaccgatgttcataatatagttatagctttccttacgtttcagtttaaa

SEQ ID NO: 1490 - DNA, 404 bp, Arabidopsis thaliana
  Clone ID: LIB22-064-Q1-E1-E8
attgcttcatcattaccaaatcatcaacttaatcgtttctctcaaatttagggttttctcttttctcgaaagtcttgcggttttctgaatcatctctatctggtttgagggtttcgtttgatatctggagaaaggggtttctggaaacaaggagttcataattcgcgatcttgatctatcgatcttcatttatatataaaagcgtgaatgagattatgatggagtcgaaaggtggtaaaaagaagtccagcagtagtagttccttattttacgaagctcccctcggttacagcattgaagacgttcgtccaaacggtggaatcaagaaattcaaatcttctgtctactcaaactgctccaagaggccatcctgagtaccagcgtgcaccgatcttcataatata

SEQ ID NO: 1491 - DNA, 423 bp, Arabidopsis thaliana
  unsure at all n locations
  Clone ID: LIB22-005-Q1-E1-B2
accacgcgtccggcttcatcattaccaaatcatcaacttaatcgtttctctcaaatttagggttttctcttttctcgaaagtcttgcggttttctgaatcatctctatctggtttgagggtttcgtttgatatctggagaaaggggtttctggaaacaaggagttcataattcgcgatcttgatctatcgatcttcatttatatataaaagcgtgaatgagattatgatggagtcgaaaggtggtaaaaagaagtccagcagtagtagttccttattttacgaagctcccctcggttacagcattgaagacgttcgtccaaacggtggaatcaagaaattcaaatcttctgtctactcaaactgctccaagaggccatcctgagttacagcgtgcaccgatcntcataatatagttatagctt

SEQ ID NO: 1492 - DNA, 404 bp, Arabidopsis thaliana
  Clone ID: LIB22-042-Q1-E1-C8
acgcatccttgaaccgcataatttcgtctggagatcctgttcataggattgtcggtagtttgagcggtaccttgggatatgtaatgagtgagcttgaagatggcaagcctctaagccaagttgttcaagctgccaaaaagctggggtacactgaaccagatccacgtgacgacctcggtggcatggatgttgctagaaagggtttgattcttgctcgacttcttgggaagaggataattatggacagcattaagatagagagcttgtatccagaagagatgggacctggactcatgtctgtggatgatttcctccataatggaatagtaaaacttgatcagaatatagaggagagagttaaaaaagcttcatcaaaagggtgtgtgcttcgttatgtctgtgtg

SEQ ID NO: 1493 - DNA, 390 bp, Arabidopsis thaliana
  Clone ID: LIB22-086-Q1-E1-G7
acccacgcgtccgcagaaggacgaggctcttttctctgccaatgctgcggctttggcttcaaggagatcttccccaagagtcaccaacgagggtgtccagaaggctgctgctgctttgaagggatctgaccaccgtcgtgcaaccaatgttagtgctaggctagatgctcagcacaagaagctcaatctcccaatcctaccaaccacaaccattggatccttcccacagactgtagagctcaggagagttcgtcgtgagtacaaggccaaaaaggtctcagaggaggactacgttaaagccatcaacgaagagatcaagaaagttgttgacctccaagaggaacttgacatcgatgttcttgtccacggatagccagatagaaacgacat

SEQ ID NO: 1494 - DNA, 430 bp, Arabidopsis thaliana
  Clone ID: LIB22-001-Q1-E1-F8
ctcatagcctaccctttttccttcctcctctccgattcttcctccgtcagtaaaagaaaatcaaaatggcttcacacattgttggatacccacgtatgggccctaagagagagctcaagtttgcattggaatctttctgggatggtaagagcactgctgaggatcttcagaaggtgtctgctgatctcaggtcatccatctggaaacagatgtctgccgctgggactaagttcatccctagcaacacctttgctcactacgaccaggttcttgacaccaccgccatgctcggtgctgttccacctaggtatggatacactggtggtgagatcggccttgatgtttacttctccatggctagaggaaatgcctctgtgcctgccatggaaatgaccaagtggttcgacaccaactaccattacatcgtccc

SEQ ID NO: 1495 - DNA, 417 bp, Arabidopsis thaliana
  Clone ID: LIB22-044-Q1-E1-E1
catacatgctgctttccaaggctgccaagggtgttgacaagtcattcgaacttctttctcttctccctaagattctcccgatctacaaggaagtgattaccgagcttaaggctgctggtgccacctggattcagcttgacgagcctgtccttgttatggatcttgagggtcagaaactccaggcctttactggtgcctatgctgaacttgaatcaactctttctggtttgaatgttcttgtcgagacctacttcgctgatatccctgctgaggcatacaagaccctaacctcattgaagggtgtgactgcctttggatttgatttggttcgtggcaacaagacccttgatttggtcaaggcaggtttccctgagggaaagtactctttgctggtgttgttgatggaagggacatctg

SEQ ID NO: 1496 - DNA, 411 bp, Arabidopsis thaliana
  Clone ID: LIB22-068-Q1-E1-A10
gattcttcctccgtcagtaaaagaaaatcaaaatggcttcacacattgttggatacccacgtatgggccctaagagagagctcaagtttgcattggaatctttctgggatggtaagagcactgctgaggatcttcagaaggtgtctgctgatctcaggtcatccatctggaaacagatgtctgccgctgggactaagttcatccctagcaacacctttgctcactacgaccaggttcttgacaccaccgccatgctcggtgctgttccacctaggtatggatacactggtggtgagatcggccttgatgtttacttctccatggctagaggaaatgcctctgtgcctgccatggaaatgaccaagtggttcgacaccaactaccattacatcgtccctgagttgggccctg

SEQ ID NO: 1497 - DNA, 391 bp, Arabidopsis thaliana
  unsure at all n locations
  Clone ID: LIB22-020-Q1-E1-G5
tatcaacctcctgctctcttctccacaccgctgttgatcttatcaatgagactaagcttgatgatgaaatcaagtcatggttggcgtttgctgcccagaaggtcgttgaagtgaacgctttggccaaggctttggctggtcagaaggacgaggctcttttctctgccaatgctgcggctttggcttcaaggagatcttccccaagagtcaccaacgagggtgtccagaaggctgctgctgctttgaagggatctgaccaccgtcgtgcaaccaatgttagtgctaggctagatgctcagcagaagaagctcaatctcccaatcctaccaaccacaaccattggatccttcccacagactgtanagctcaagagagttcgtcgtgagtacaa

SEQ ID NO: 1498 - DNA, 402 bp, Arabidopsis thaliana
  Clone ID: LIB22-028-Q1-E1-F1
atactgatgtcatcaccattgagaactccaggtctgatgagaagcttctttccgtgttccgtgaaggagtgaagtacggtgctggaatcggtccaggagtctacgacatcgactctccaagaataccatcttctgaggaaatcgcagacagggtcaacaagatgcttgctgtcctagagcagaacatcctttgggttaaccctgactgtggtctcaagacccgtaagtacaccgaggtcaagcctgcactcaagaacatggttgatgcggctaagctcatccgctcccagctcgccagtgccaagtgaagaaaagcttgatttgaacaaggaaacgtttttttttctctaaaatggttgtgttttatttggtttaataactttcttaaaaatatttttagtc

SEQ ID NO: 1499 - DNA, 457 bp, Arabidopsis thaliana
  unsure at all n locations
  Clone ID: LIB22-018-Q1-E1-E7
agagatcttccccaagagtcaccaacgagggtgtccagaaggctgctgctgctttgaagggatctgaccaccgtcgtgcaaccaatgttagtgctaggctagatgctcagcagaagaagctcaatctcccaatcctaccaaccacaaccattggatccttcccacagactgtagagctcaggagagttcgtcgtgagtacaaggccaaaaaggtctcagaggaggactacgttaaagccatcaaggaagagatcaagaaagttgttgacctccaagaggaacttgacatcgatgttcttgtccacggagagccagagagaaacgacatggttgagtactttggtgagcagttgtctggttttgccttcactgcanacggatgggtccaatcctatggatctcgctgtgtgaagccacagttatctatggtgatgtgagccgtcccaagcaatgaccg

SEQ ID NO: 1500 - DNA, 421 bp, Arabidopsis thaliana
  Clone ID: LIB22-016-Q1-E1-G8
tgatgatgaaatcaagtcatggttggcgtttgctgcccagaaggtcgttgaagtgaacgctttggccaaggctttggctggtcagaaggacgaggctcttttctctgccaatgctgcggctttggcttcaaggagatcttccccaagagtcaccaacgagggtgtccagaaggctgctgctgctttgaagggatctgaccaccgtcgtgcaaccaatgttagtgctaggctagatgctcagcagaagaagctcaatctcccaatcctaccaaccacaaccattggatccttcccacagactgtagagctcaggagagttcgtcgtgagtacaaggccaaaaaggtctcagaggaggactacgttaaagccatcaaggaagagatcaagaaagttgttgacctccaagaggaacttgacatc

SEQ ID NO: 1501 - DNA, 419 bp, Arabidopsis thaliana
  Clone ID: LIB22-048-Q1-E1-A2
ctcgctgtgtgaagccaccagttatctatggtgatgtgagccgtcccaaggcaatgaccgtcttctggtccgcaatggctcagagcatgacctctcgcccaatgaagggtatgcttactggtcccgtcaccattctcaactggtcctttgtcaggaacgaccagcccaggcacgaaacctgttaccagatcgctttggccatcaaggacgaagtcgaggatcttgagaaaggtggaatcggtgtcattcagattgatgaggctgcacttagagaaggactaccactcaggaaatccgagcatgctttctacttggactgggccgtccactccttcagaatcaccaactgtggagtccaagacagcacccagatccacactcacatgtgctactcccacttcaatgacatcatacactcc

SEQ ID NO: 1502 - DNA, 425 bp, Arabidopsis thaliana
  unsure at all n locations
  Clone ID: LIB22-016-Q1-E1-G3
aacttgatgatgaaatcaagtcatggttggcgtttgctgcccagaaggtcgttgaagtgaacgctttggccaaggctttggctggtcagaaggacgaggctcttttctctgccaatgctgcggctttggcttcaaggagatcttccccaagagtcaccaacgagggtgtccagaaggctgctgctgctttgaagggatctgaccaccgtcgtgcaaccaatgttagtgctaggctagatgctcagcataagaagctcaatctcccaatcctaccaaccacaaccattggatccttcccacagactgtacagctcaggagagttcgtcgtgagtacaatgccaaaaaggtctcagaggangactacgttaaagccatcaaggaagagatcaagaaagttgttgacctccaagaggaacttgacatc

SEQ ID NO: 1503 - DNA, 415 bp, Arabidopsis thaliana
  Clone ID: LIB22-007-Q1-E1-B3
cccacgcgtccgcaaggacgaagtcgaggatcttgagaaaggtggaatcggtgtcattcagattgatgaggctgcacttagagaaggactaccactcaggaaatccgagcatgctttctacttggactgggccgtccactccttcagaatcaccaactgtggagtccaagacagcacccagatccacactcacatgtgctactcccacttcaatgacatcatacactccatcatcgacatggatgctgatgtcatcaccattgagaactccaggtctgatgagaagcttctttccgtgttccgtgaaggagtgaagtacggtgctggaatcggtccaggagtctacgacatccactctccaagaataccatcttctgaggaaatcgcagacagggtcaacaagatgcttgctgtc

SEQ ID NO: 1504 - DNA, 369 bp, Arabidopsis thaliana
  Clone ID: LIB22-037-Q1-E1-B8
aaagaaagagactgaatcaatcaacggaccttgaagtcaataagctcagcagttttcttgaagaagtaggcagatgtgttgactacaggagtagtgatagcatccgtcactataccacggcctaatctttcacctgtgtaaaacctaatttatcaatctccaacaacaagatcagatatgaaatgactgaatctggtggatcaaggaggtaccggcatgaaaagtgaggctcccatcggacccaagaaaacaagttttggaatcgttcaccggtcaactactaaccttctcccgattccctccttcggcaagaaaaacttctcaaccacgcctttcaaccacaacggaaggcccgcaaccaaaagggcc

SEQ ID NO: 1505 - DNA, 395 bp, Arabidopsis thaliana
  Clone ID: LIB22-074-Q1-E1-G5
aggccgtctcatcattccagtgccctaccatcttctcctcctcctcaatctccggctttcaatgccgttctgatccagatctcttcggttctcccgtcggtggatcatctcgccgtcgtgtccatgcctccgccgggatttcttcctcattcaccggggacgctggattatcctccaggatcttaagatttcctcctaatttcgtccgtcagctgagcattaaagcccgtagaaactgtagcaacatcggtgttgcacagatcgtggcggctaagtggtccaacaacccatcctccgcgttaccttcggcggcggcggctgctgctacctcgtctgcatctgcggtttcttccgccggatctgcagccggaacctcgtccgccggcgccgcccct

SEQ ID NO: 1506 - DNA, 391 bp, Arabidopsis thaliana
  unsure at all n locations
  Clone ID: LIB22-030-Q1-E1-F8
accacaaaaagagagagaagagaacgagagaatcattgagaaacgaaacaacaatggccgtctcatcattccagtgccctaccatcttctcctcctcctcaatctccggctttcaatgccgttctgatccagatctcgtcggttctcccgtcggtggatcatctcgccgtcgtgtccatgcctccgccgggatttcttcctcattcaccggggacgctggattatcctccaggatcttaagatttcctcctaatttcgtccgtcagctgagcattaaagcccgtagaaactgtagcaacatcggtgttgcacagatcgtggcggctaagtggtccaacaacccatcctccgcgttaccttccggcggcngcggtgctgctacctcgtctgc

SEQ ID NO: 1507 - DNA, 288 bp, Arabidopsis thaliana
  Clone ID: LIB22-056-Q1-E1-D12
caacttaatcgtttctctcaaatttagggttttctcttttctcgaaagtcttgcggttttctgaatcatctctatctggtttgagggtttcgtttgatatctggagaaaggggtttctggaaacaaggagttcataattcgcgatcttgatctatcgatcttcatttatatataaaagcgtcaatgagattatgatggaatcgaaaggtggtaaaaagaattccagcagtagtatttccttattttacgaagctcccctcggttacaccattgaagacgttcgtctaa

SEQ ID NO: 1508 - DNA, 427 bp, Arabidopsis thaliana
  Clone ID: LIB22-041-Q1-E1-D10
accacgcgtccgcggacgcgtgggcttcctcctctccgattcttcctccgtcagtacaagaaaatcaaaatggcttcacacattgttggatacccacgtatgggccctaagagagagctcaagtttgcattggaatctttctgggatggtaagagcactgctgaggatcttcacaaggtgtctgctgatctcaggtcatccatctggaaacagatgtctgccgctgggactaagttcatccctagcaacacctttgctcactacgaccaggttcttgacaccaccgccatgctcggtgctgttccacctaggtatggatacactggtggtgagatcggccttgatgtttacttctccatggctagaggaaatgcctctgtgcctgccatggaaatgaccaagtggttcgacaccaactaccattaca

SEQ ID NO: 1509 - DNA, 337 bp, Arabidopsis thaliana
  Clone ID: LIB22-079-Q1-E1-B6
cccacgcgtccggtcagaaacgaccagcccaggcacgaaacctgttaccagatcgctttggccatcaaagatgaagtggaagacctcgagaaaggcggtattggagtcattcagatcgatgaagccgcacttagagaaggattgcctcttaggaaagccgaacactctttctacttggactgggctgttcactctttcagaatcaccaactgtggcgtccaagacagcactcagattcacactcacatgtgttactcaaacttcaacgagcccaagaggccgtcagacaagccccttcgtctcccacttcaggatgtctacaagattggtggtattg

SEQ ID NO: 1510 - DNA, 353 bp, Arabidopsis thaliana
  Clone ID: LIB22-079-Q1-E1-F6
cccacgcgtccggtcagaaacgaccagcccaggcacgaaacctgttaccagatcgctttggccatcaaagatgaagtggaagacctcgagaaaggcggtattggagtcattcagatcgatgaagccgcacttagagaaggattgcctcttaggaaagccgaacactctttctacttggactgggctgttcactctttcagaatcaccaactgtggcgtccaagacagcactcagattcacactcacatgtgttactcaaacttcaacgagcccaagaggccgtcagacaagccccttcgtctcccacttcaggatgtctacaagattggtgggattgggaccgtgccaatggg

SEQ ID NO: 1511 - DNA, 294 bp, Arabidopsis thaliana
  Clone ID: LIB22-054-Q1-E2-E4
gtgctgaactgacaacgcgttcatgcaacatctcttccactcaagaccattcagttgcagttatctccgcatgacactgtgcgactgtttgcgcctggaacggtgagactcgccaggagtacagcgaggtgtacccaacgtgctctaccattggggtctacgtgcaggtcctgatctgcgtgttcattctggtggagacacaactcttttgaggcaatacggtgttaaagccgacgagctctttgagaagactgatgttgttcctgatgctacttctaatgaatcccctcagtt

SEQ ID NO: 1512 - DNA, 400 bp, Arabidopsis thaliana
  Clone ID: LIB22-077-Q1-E1-A11
ctttgcccatctctcatctccactcgtcgcattccgtaagtaacatcacatgacagagacattaatggcttcccacattgttggatatccacgtatgggacctaagagagagctcaagtttgcattggagtctttctgggatggcaagagcagtgccgatgatttgcagaaggtgtctgctgatctcaggtctgatatctggaaacatatgtctgctgctgggattaagtatatcccaagcagcaccttttctcattatgaccaggtgcttgacaccaccgccatgcttggtgctgttccatctagatatggatttaccagtggtgagatcggtctcgacgtttacttctccatggctagaggaaatgcctctgttccaactatggatatgaccacgtgg

SEQ ID NO: 1513 - DNA, 357 bp, Arabidopsis thaliana
  Clone ID: LIB22-045-Q1-E1-B4
accacgcgtccgctttgcccatctctcatctccactcttctcattccgtaagtaaaaaaacaaaaaacaaacaaaaatggcttcccacattgttggatatccacgtatgggacctaagagagagctcaagtttgcattggagtctttctgggatggcaagagcagtgccgatgatttgcagaaggtgtctgctgatctcaggtctgatatctggaaacagatgtctgctgctgggattaagtatatcccaagcaacaccttttctcattatgaccaggtgcttgacaccaccgccatgcttggtgctgttccatctagatatggatttaccagtggtgagatcggtctcgatgttta

SEQ ID NO: 1514 - DNA, 402 bp, Arabidopsis thaliana
  Clone ID: LIB22-080-Q1-E2-D12
tctcatcgccactcttctcattccgtaagtaaaaaaacaaacaccaatcaaaactggcttcccacattgttggatatccacgtatgggacctaagagagagctcaagtttgcattggagtctttctgggatgggaagagcagtgccgatgatttgcagaaggtgtctgctgatctcaggtctgatatctggaaacagatgtctgctgctgggattaagtatatcccaagcaacaccttttctcattatgagcaggtgcttgacaccaccgccatgcttggtgcagttccatctagatatggatttaccagtggtgagatcggtctcgatgttgacttctccatggctagaggaaatgcctctgttccagctatggagatgaccaagtgggttgacaccaact

SEQ ID NO: 1515 - DNA, 373 bp, Arabidopsis thaliana
  Clone ID: LIB22-063-Q1-E1-A4
atcctcctctccgattcttcctccgtcagtaaaagaaaatcaaaatggcttcacacattgttgggtacccacgtatgggccctaagagagagctcaagtttgcattggaatctttctgggatggtaagagcactgctgaggatcttcagaaggtgtctgctgatctcaggtcatccatctggaaacagatgtctgccgctgggactaagttcatccctagcaacacctttgcgcactacgaccaggttcttgacactaccgccatgctcggtgctgttccacctaggtatggatacactggcggtgacatcggccttgatgtttacttctccatagctagaggaaatgcctctgtgcctggcatgggaatgac

SEQ ID NO: 1516 - DNA, 392 bp, Arabidopsis thaliana
  Clone ID: LIB22-038-Q1-E1-A9
cggacgcgtgggttcgccttctcttagcctaccctttttccttcctcctctccgattcttcctccgtcagtaaaagaaaatcaaaatggcttcacacattgttggatacccacgtatgggccctaagagagagctcaagtttgcattggaatctttctgggatggtaagagcactgctgaggatcttcagaaggtgtctgctgatctcaggtcatccatctggaaacagatgtctgccgctgggactaagttcatccctagcaacacctttgctcactacgaccaggttcttgacaccaccgccatgctcggtgctgttccacctaggtatggatacactggtggtgagatccgccttgatgtttacttctccatggctagaggaaatgcct

SEQ ID NO: 1517 - DNA, 378 bp, Arabidopsis thaliana
  Clone ID: LIB22-006-Q1-E1-F5
cccacgcgtccgctgacgcgtgggatcaccattgagaactccatgtctgatgagaagcttctttccgtgttccgtgaatgagttaagtacggtgctggaatcggtcgaggagtctacgacatccactctccaagagtaccatcttctgaggaaatcgcagacagggtcaacaagatgcatgctgtcctatagcataacatcctttgggttaaccctgactgtggtctcaagacccgtatgtacatcgatgtcaagcctgcactcacgagaattgctgatgctgataagctcatctgctcacagctcgccagtgccacatgatgatgagcttgatttgaccatggaaacgtctatttgtctcgaaaatggttgtgtttt

SEQ ID NO: 1518 - DNA, 416 bp, Arabidopsis thaliana
  Clone ID: LIB22-049-Q1-E1-C11
catacgcgtctgcggacgcctggactgacgcttcggctgtcctatatcatatcatcctttgcgttaaccctgactgtggtctcaagaccgtaagttaccgatgtcaatcctgcactcaagaacacggttgatgcagttaagctcatccgctctcatctcgtcagtgccaagtgtcgaagagcttgatttgaacaatgaaacgtttttttttctctaacatggatgtgttttagttggtttactaactttcttgtcaatatttttactctaaggtagatttgctgcacatggatgctttcttgtcgagagagacaaaggctatagcatcatttggatttgatgcaatgtcagtgattatccttttgtctccaatatatttctctgatgtaaagtcctttttctaaggtatcttgaaa

SEQ ID NO: 1519 - DNA, 400 bp, Arabidopsis thaliana
  Clone ID: LIB22-074-Q1-E1-G3
atctcatctccactcttctcattccgtaagtaaaaaaacaaaaaacaaacaaaaatggcttcccacattgttggatatccacgtatgggacctaagagagagctcaagtttgcattggagtctttctgggatggcaagagcagtgccgatgatttgcagaaggtgtctgctgatctcaggtctgatatctggaaacagatgtctgctgctgggattaagtatatcccaagcaacaccttttctcattatgaccaggtgcttgacaccaccgccatgcttggtgctgttccatctagatatggatttaccagtggtgagatcggtctcgatgtttacttctccatggctagaggaaatgcctctgttccaactatggagatgaccaagttgtttgacacca

SEQ ID NO: 1520 - DNA, 422 bp, Arabidopsis thaliana
  Clone ID: LIB22-067-Q1-E1-F6
agcccacgcgtccgcccacgcgtccgcccacgcgtccgtcttagcctaccctttttccttcctcctctccgattcttcctccgtcagtaaaagaaaatcaaaatggcttcacacattgttggatatccacgtatgggccctaagagagagctcaagtttgcattggcatctttctgggatggtaagagcactgctgaggatcttcagaaggtgtctgctgatctcaggtcatccatctggaaacagatgtctgccgctgggactaagttcatccctagcaacacctttgctcactacgaccaggttcttgacaccaccgccatgctcggtgctgttccacctaggtatggatacactggtggtgagatcggccttgatgtttacttctccatggctacaggaaatgcctctgtgcctgccat

SEQ ID NO: 1521 - DNA, 420 bp, Arabidopsis thaliana
  Clone ID: LIB22-010-Q1-E1-A4
cttcacctaacctaacccttttccttcctcctcctcgaatcctcccccggtcattaaaagaaaatcaaaatggcttcacacattgttggatacccacgttatgggccctaagagagagctcaagtttgcattggaatctttctgggatggtaagagcactgctgaggatcttcagaaggtgtctgctgatctcaggtcatccatctggaaacagatgtctgccgctgggactaagttcatccctagcaacacctttgctcactacgagcaggttcttgacaccaccgccatgctcggtgctgttccacctaggtatggatacactggtggtgagatcggccttgatgtttacttctccatggctagacgacatgcctctgtgcctgccatggaaatgatcaagtggttcgacatcaacta

SEQ ID NO: 1522 - DNA, 430 bp, Arabidopsis thaliana
  Clone ID: LIB22-069-Q1-E1-A6
cacttagcctaccctttttccttcctcctctccgattcttcctccgtcagtaaaagaaaatcaaaatggcttcacacattgttggatacccacgtatgggccctaagagagagctcaagtttgcattggaatctttctgggatggtaagagcactgctgaggatcttcagaaggtgtctgctgatctcaggtcatccatctggaaacagatgtctgccgctgggactaagttcatccctagcaacacctttgctcactactaccaggttcttgacaccaccgccatgctcggtgctgttccacctaggtatggatacactggtggtgagatcggccttgatgtttacttctccatggctagaggaaatgcctctgtgcctgccatggaaatgaccagtgtcgcacactacatacatcgcctgattggccc

SEQ ID NO: 1523 - DNA, 413 bp, Arabidopsis thaliana
  Clone ID: LIB22-079-Q1-E1-G6
tgacaagtcatttgatcttctctcccttctccccaaaatcctcccagtttacaaggaagtcattgcagagcttaaggcagctggtgcctcctggattcagcttgatgagcctctctttgtcatggatctcgagggtcacaaactccaggcttttagcggtgcctatgctgagcttgaatcaactctctctggtctgaatgttcttgtggagacctacttcgctgatatccctgctgaagcatacaagacccttacttccttgaagggtgtgactgccttcggatttgatttggttcgtggcaccaagaccattgacttgatcaagtcaggtttcccacagggcaagtacctctttgctggtgttgttgacggaaggaacatctgggccaatgacctcgctgcctctctcatca

SEQ ID NO: 1524 - DNA, 450 bp, Arabidopsis thaliana
  Clone ID: LIB22-082-Q1-E2-E11
cttacggattcaaatctcagatctagctcaaccatggcgttgctcgtcgagaagacctcaagtggccgtgaatacaaggtcaaagacatgtctcaagccgatttcggtcgtctcgaactcgagctcgccgaagttgagatgcctggactcatggcttgtcgtaccgaattcggaccttctcagccattcaaaggcgctagaatcaccggatctcttcacatgaccatccaaaccgccgtactcatcgaaaccctaactgctctcggtgctgaagtcagatggtgttcctgcaacatcttttccactcaagaccacgccgccgcagccatcgctcgtgactccgccgctgttttcgcctggaaaggtgagactcttcaggagtactggtggtgttacgagcgtgctctagattggggtccaggtggtggtcctgatctgattgttgatgat

SEQ ID NO: 1525 - DNA, 415 bp, Arabidopsis thaliana
  Clone ID: LIB22-003-Q1-E1-D11
attagcctaccctttttccttcctcctctccgattcttcctccgtcagtaaaagaaaatcaaaatggcttcacacattgttggatacccacgtatgggccctaagagagagctcaagtttgcattggaatctttctgggatggtaagagcagaagaagctcaatctcccaatcctaccaaccacaaccattggatccttcccacagactgtagagctcaggagagttcgtcgtgagtacaaggccaaaaaggtctcagaggaggactacgttaaagccatcaaggaagagatcaagaaagttgttgacctccaagaggaacttgacatcgatgttcttgtccacggagagccagagagaaacgacatggttgagtactttggtgagcagttgtccggttttgccttcactgcaaa

SEQ ID NO: 1526 - DNA, 505 bp, Arabidopsis thaliana
  unsure at all n locations
  Clone ID: LIB22-089-Q1-E1-F6
cctttaccngcccaataccggtcaaancattcccgggncgacccacgcgtccgcggacgcgtgggcttccagatggagacctccgggagaagattgagaaacttgcttcttctctaaagtttcctttgaagaagctgtttgttgtcgatggatctacaaggtcaagccatagcaatgcttacatgtatggtttctttaagaacaaaaggattgttctttatgatacgttgattcagcagtgcaagaatgaggatgaaattgtggcggttattgcacacgagcttggacattggaaactgaatcacactacatactcgttcattgcagttcaaatccttgccttcttacaatttggaggatacactcttgtcaagaaactccactgatctcttcaggagtttcggatttgatacacaacctgttcncaatgggttgntnaaaatttaaccaaacggtanncccactggcaanatctantaanctttggcctgaacctcgttagtcn

SEQ ID NO: 1527 - DNA, 442 bp, Arabidopsis thaliana
  unsure at all n locations
  Clone ID: LIB22-089-Q1-E1-F7
acgcgtccggaagggtttaagttagggcttttgaagtaaaccaattttgtgcgtctcccttttcttcttctcttcccaatttcaccgcctctctctatcgccggaaattaaccatgaaacgcggcggaagaagctacgtaacttcacctccatcattctccaacgacgctaaaaagcttctcgtctgcacaggaaacactgtctctgttttcagcgccgccactggcttacaggtcatacagctccagtaacaactctaattgttgttcctgcatcaagtcctgctcaaaaaatcctttgttattgttggactgcttctcttgatggtactattcgtcattgggatttctctggacctgagctaatgaaaactaattgatggctcaaccttccgaattaanccaanggtaaacnancncntttggagcgaacctcaacaaan

SEQ ID NO: 1528 - DNA, 508 bp, Arabidopsis thaliana
  unsure at all n locations
  Clone ID: LIB22-089-Q1-E1-F8
aanacggtccaacatcccgggtcgacncacgcgtccgcccacgcgtccgttttttttttttttttaaacaaaacaagaaaganagcacgtataataataacatccagaagaggttcaggttaaagtgcatcaaanccactaaaattaccaaagtgacattcactttcacaagaaaatgtttccaaaatggaaaaagganaaaaaaaacaatggaagtgtnaacaacatcagaagatataccttganagaacataagccaatggcaatcatgataatggntaacttgataagagcaatacgagactaataatgatgtangatcatcatcatgaatcacaggaaataaggaacacctgtccttggccctctcatttgattggtcncctccgtcccccgtgaaaaacntnaaattccctttcaangttgcnntngaaaccccattntnaaacccccattcccaaaannggttncanttatttggggccagaccaacacagtttcaaaaacc

SEQ ID NO: 1529 - DNA, 521 bp, Arabidopsis thaliana
  unsure at all n locations
  Clone ID: LIB22-089-Q1-E1-G1
angttagccgcctttaccggcccaaaattcccggancgacccacgcgtccgcggacgcgtgggatttgaccattttcatcttcaaacaatggcggtttcaaagcttacattggctgctacgagcggtaagagctgcaaaatactcttagggctgagattacttgccttctcagccacgttatctgcagctattgtaatgggactcaacaaagagacaaagacttttattgtgggcaaagttggaaatactccaattcaagctacttttactgctaagttcgaccacacaccagcttttgtgtttttcgtagtagctaatgcaatggtgagcttccacaacttgttgatgattgctcttcagatatttggagggaaaatggagttcactgggttttcggcttctctcaatcgccaatccttgacatgctaaatgngacnccaaattncggngggaancaancccggggggnntcatggcggaggtaggaaagaacgggaacaaacacgccaagatgggacaa

SEQ ID NO: 1530 - DNA, 419 bp, Arabidopsis thaliana
  unsure at all n locations
  Clone ID: LIB22-089-Q1-E1-G10
attgcgagttctaagcctacaggtagtgaaggattgaaatgtgccattgatcacatccttgaagctgagcagaagggagaaatcaacgaggacaatgttctttacatcgtcgagaacatcaatgtcgccggtaacttctatttcttacttgtaggatacgtaatcaatcctctagacgtctctgcttgcataaggaattggacattagtgttttaagtgaatcctagaaatccggaattgtaaccataacaggaaattaggctcatgtaggttggttttttggtctcccctgaagaggctggattgtatatggttttgtgaagctgatatcttgatttctgctgaaacagcgattgagacaacattgtggtctatcgagtggggaattgcagagctagtgaancatcctgaaatccaaa

SEQ ID NO: 1531 - DNA, 411 bp, Arabidopsis thaliana
  unsure at all n locations
  Clone ID: LIB22-089-Q1-E1-G11
acgcgtccgttcaacacctgaggtgcgcgaagatagacacttcttcatcctctccgtaattctcaaaattagggttttcttccggcagctctctcagttgtactgcaagcattcttttctagatatttaagatgtcaaggacgaggactgctgcttctgaggctcatgactccatggaatctgaggaaagggtagaccttgatggtgacaatgatcctgaggagattctggaggaggaagttgaatacgaagaagttgaannnnnnnnnnnnnnnnnnnnnnnnnnnnnnnnnnnnnnnnnnnnnnnnnnnnnnnnnnnnnnnnnnnnnnnnnnnnnnnnnnnnnnnnnnnnnnnnnnnnnnnnnnnaaggcatgttgaacttcttgcacttcctccacatggttcaaaag

SEQ ID NO: 1532 - DNA, 507 bp, Arabidopsis thaliana
  unsure at all n locations
  Clone ID: LIB22-089-Q1-E1-G2
ccggnccaaaaattcccgaancgacccacgcntccgcccacgcgtccgtattttctctctctcagttaaccagagagagcatcaatggcttctacttcttctctagcgctctcacaagctctccttacacgagccatctctcacaatggctctgaaaactgcgtctctataccagctttctctgctctcaaatccacttctccacgcaccagtggcaccatctcttcccgtcgacgaaacgcctccacgatcagtcactctctccgccctctggttcgtgcagccgccgtagaggcaatcgtgacaagttctgattcgtccctggttgataagtcggtgaacacgatcaggtttctggcaatagatgcggttgagaangngaaatcangtcatccaagtcctcctaangggcgtgcnccgangttccnanattttggtcnaatgaaattcatgaantttaaccccaagaaaccttaacgggtttaaaccgtgatcgtttcgttcccn

SEQ ID NO: 1533 - DNA, 500 bp, Arabidopsis thaliana
  unsure at all n locations
  Clone ID: LIB22-089-Q1-E1-G4
caantattcgcggaatcgacccacgcgtccgaaaggacatactgacatatcggctgcaccaagagtcgcttctactgggactaaagggatagtagaagtgtagagggatacattccaaaccatgtgggatatgagcctgttgtgcagagaaagggtccaggattcccttcttttactgaaggaggccattctactcagttgcttcagaaatatggatctgatgataataacagtttccacaatggtaaggatgcagatgacgttttaagagagtcgtctcctgggtttgatgttcttgtggataatgaggctggagattctgagtattatcatgttgaagatcgatatggacgtagaagtcaggagagagggaactcagagtatgaccctgatttcaatgcaanttccgaatggggattaaanaaccattacntgaacaacgttttggatccanatgatcggagggaagacaggggatggggccatcgtcnagtttctct

SEQ ID NO: 1534 - DNA, 474 bp, Arabidopsis thaliana
  unsure at all n locations
  Clone ID: LIB22-089-Q1-E1-G5
acgcgtccgatctcctgtccttttttcatatataataattcatcataaatatttattgatttgattctatctcttatatatattttcgatctctcctgaaaagagaaaaaagttggaaacttcgacgaatgtgtttataaatctttttattttctatctgtcttgatttagttttatcttttttggaatcggtctgaagttggacaaaagaatccgccattttctcntcggtctctctgctcttctcttcagtatcggatctgggtctccttcgctttcntttcaagattattttgggagacnaggaggcgttagctgtaattcattgtanacttgctttggcnattaaagcccgtcacacaaaaaaaagtaaaaagcaacanacncncntnnattgnaancacttttttaaggganaagggnggggcctncttnnggncccggtggggaaaaaatttggccaaaaganattac

SEQ ID NO: 1535 - DNA, 487 bp, Arabidopsis thaliana
  unsure at all n locations
  Clone ID: LIB22-089-Q1-E1-G6
tcccgggncgacccacgcgtccggacgtgtctccgtcgtatgaaagccttgtggatggaagcgggagattcatccccaacagaaaagtattggagttaaggcagaagttgatcaagtttatggaaactcatatctacccaatggaaaacgagttctccaaacttgctcaatcagatatgcgatggaccgttcaccctcaggaggaaaagttaaaggaaatggcaaagagagaaggcctatggaacttatttgttcctgtagatagtgctgctagagctagaagagaactggcggctaccgagaataaacataacctctcgggcaagtcttttgatcaattgtttggtgagggcctcacgaacctggagtatggttacctttgtgaaatnnaggggtccttccggtttgggcnccanaggtgtttaactgtgggtgcaccagatactgggaaacatggaggtgatactgcggtatggtaacaaagaac

SEQ ID NO: 1536 - DNA, 477 bp, Arabidopsis thaliana
  unsure at all n locations
  Clone ID: LIB22-089-Q1-E1-G7
acgcgtccggttgtacaagtaccaaggatgttggtacgacaaagatattctccaagcaatcctcaatttcaacaaaaactttcagccacaagaaacggatataattgttgcttctttccccaaatcgggtacgacttggctcaaggcactcacattcgcactcgcgcaaagatcaaaacacacttcagacaatcatcctctgctaactcataatcctcatgagctagtgccgtacctcgagctcgatctttatctcaaaagctcgaaaccggatttgaccaagttgccatcatcatctccgagattgttctcaacccacatgtcctttgatgcgcttaaagtaccgttgaaagagtctccttgcaagatngtgtacntgtgcaaggaccttgaaanaccttntggggaaccacttggggggtttccaaaaacnccatgantgggggaaaacaatttaaagtcccaaggctttgttcg

SEQ ID NO: 1537 - DNA, 531 bp, Arabidopsis thaliana
  unsure at all n locations
  Clone ID: LIB22-089-Q1-E1-G8
cntttacgccgccttttacngggcccaaatantngtcnaaacattcccgggncgacccacgcgtccgcggacgcgtggggttcgaatcgggcaattttcgtctggagaaatctggagataggattttgatcgatttctaagctctaatctcagttttttgggtagctccggtgatccttgagatggcgggtcagaatcctaacatggatcaattcgaggcctacttcaaaagagcagatttagacggagatggtcggatcagtggtgccgaagctgttggattttttcaaggatctggtttgtctaagcaggttctcgcccagatatggtcgctttctgatcggtcacacagtggtttccttgatcggcaaaacttttataattctctgagacttgtaacagttgcacagagcaagagagatntgacacctgagaatggtnaagcaacaccggaaaannnccnggaanaanccaattnccacctcccaaaanttaanctttcaactanccctggnaccccgacctaatcct

SEQ ID NO: 1538 - DNA, 509 bp, Arabidopsis thaliana
  unsure at all n locations
  Clone ID: LIB22-089-Q1-E1-H1
aacgttaccctgctttaccggcccagaattcccggatcgacccacgcgtccgcccaaatttgaccttaatccccaaatcgtctgcagggtggttaatgtccagttgcttgctaataaggacaccgatgaggtctacactcaagtcactctgcttccacttcaagagttttcgatgctaaatggggaggggaaagaggtcaaggagttaggaggggaggaagagaggaacggaagctcatccgtcaagcggacacctcatatgttctgtaaaaccttaacagcgtctgacacaagcacacatggaggcttctctgtacctagaagagccgctgaagattgttttgctcctcttgactacaaacaacagaggccatctcaagagctcattgcaaaggacctccatggagtanagtggnagtttcnccatatccatagaaggcaaccaagggnggaatctactcacaactgggttggngtanctttgcantcaaaagaatcctcgtccnctg

SEQ ID NO: 1539 - DNA, 472 bp, Arabidopsis thaliana
  unsure at all n locations
  Clone ID: LIB22-089-Q1-E1-F5
acgcgtccncttcagcttcatcggccgttgcatttcccggcgataagagagagaaagaggagaaagagtgagccagatcttcatcgtcgtggttcttgtttcttcctcgatctctcgatcttctgcttttgcttttccgattaagatcgtagaccatggccgatgctgatgacattcaacctattgtctgtgacaatggtactggaatggttaaggctggattcgctggagatgatgctcccagagcggttttccccagtgttgttggtcgacctagacatcatggtgtcatggttgggatgaatcagaaagatgcgtatgttggtgatgaagcacaatccaaaagaggtatcctcacattgaaataccctantgaacatggngtttgttaacaaatnggaangaaatggaaaaagatttggnatcacactttctacaatgagctcccgttattgctcctgaagagcanccg

SEQ ID NO: 1540 - DNA, 526 bp, Arabidopsis thaliana
  unsure at all n locations
  Clone ID: LIB22-089-Q1-E1-D2
tacgccgncttttaccgggcccaaaattcccganancgacccacgcntccgcccacgcgtcncgctcgatttgaagagagaaaattcgttcgatttcgttttctcttcttcttttggattttcccggaaaattttggaatcggtgagtctctatcgattactggtcaaccatgaatatctttagatttgctggcgatatgagtcacttgatcagtgtcttaatccttcttctcaaaatctacgcgacgaaatcttgcgctggaatctctctcaagactcaagagctctatgcgcttgtgttcttgactcggtacttggatctgtttacggattatgtatctctgtacaacagcatcatgaagattgtcttcattgccagctctttggctatcgtttggtgtatgcgtaagcatccacntgtnaagganggcatacnaataaaggncctggnnanaatttcgncaccaantangttggngttaaccgtgttttgtaccggggaacttatcctgaaatgaaaaattcc

SEQ ID NO: 1541 - DNA, 486 bp, Arabidopsis thaliana
  unsure at all n locations
  Clone ID: LIB22-089-Q1-E1-D5
ttcccgggtcgacccacgcgtccggcgannnnnnnnnnnnnnnnnnnnnnnnnnnnnnnnnnnngaaaaagatgaagtggagaagttaatgttcaccaacttaatactgcaaagtcgaaatctttctttcttcttctttgccttctttcaagtgctttccctctctcattctccttcttcctcctctgtttctttgttgttctaaacttaaaaaaagattgaagttgcaagtaacagaggagctgtctcagatctggttctaaagcgagagaaagagattttgagttgaggaaaaatgagtaaagaagagttcatgaagatccagacttgtgttcttaaagtgaacatacactgtgatggctgtaagcaagaaagtcaagaaaatcctgcaagaaaatcccaaaggggtttcaacgaacaaagattgactcagagcaagggaaagtgactgtcctctgggagcgtaaatccttcagttccatcaan

SEQ ID NO: 1542 - DNA, 518 bp, Arabidopsis thaliana
  unsure at all n locations
  Clone ID: LIB22-089-Q1-E1-D6
ctttacccgnccagtaccggtcaaaaattcccgggncgacccacgcgtccncccacgcgtccgcgaaatcttatctctctaatctgttgttacagttcgtagagtcatggcgttagcatcaaccacgttgccgacgaagtccggattatctctttggtgtccgtcttctccgtctctcgctcgccgatttcccgctcgtttttctccgatcggttctagaatcgcttccagaagcctcgtcactgcttcgttcgctaacgagaatcgcgagtttgtgattgttggtggaggaaatgctgctggttatgctgctagaacttttgtggaaaatggaatggctgatggtcggctatgcattgtgaccaaagaggcttacgcaccttatgagagaccggctttgacaaaaagcttacttgtttccaacanaggaaanaanccaactcnnttaacaaggatttcaaaacttgcctttggaggtggtgganaaaaggcaaacaccanattgggtataagggaga

SEQ ID NO: 1543 - DNA, 497 bp, Arabidopsis thaliana
  unsure at all n locations
  Clone ID: LIB22-089-Q1-E1-D7
taccggtcaaanattcccggggtcgacccacgcgtccggccctaatcccggctgctcgtcgggggaaaataacccggcagggattgagcaacagcgtgagtcccaaagtgagagacagtgtgaatcccaaagtgagagagtgagtgttttagcgacagagagatatggccggattaacgagaacggccggtgcttttgcggtaactccacacaagatctccgtttgcattctcctgcagatatacgctccttccgctcagatgtctcttccttttcctttctcttccgttgctcagcacaaccgcctcggcctctacttgctctctcttactaagtcttgcgatgatatatttgagccgaagctggaaaagctcatcaaccagttgagggaaattggtgaagaaatngacccttgggtaaatggacaatttaactaanaanatttccccctttggcttcaccagatgatcaatnaaatttctttaatgacatgcgag

SEQ ID NO: 1544 - DNA, 456 bp, Arabidopsis thaliana
  unsure at all n locations
  Clone ID: LIB22-089-Q1-E1-D9
ggaaccggtcanagaattcccgggncgacccacgcgtccnaatccctaaagtctcaatctttaagcaaataaacaaaaaagctcctatcttttttattccaatggctccaacactcttgacaacccaattctcaaatccagctgaagtaaccgactttgtagtctacaaaggaaatggtgttaagggtttatcagaaacaggaatcaaagctcttccagaacaatacattcagccacttgaagaacgactcatcaacaaattcgtcaacganacagatgaagccattccagttatcgatatgtcgaaccctgatgaggacagagtcgctgaagctgtttgtgatgctgctgagaaatgggggttctttcaagtgatcaatcatggagttcctttgggaagttcttgatgacgtcaaggntgcgactcacaagttcctcaatctccctggtgaagaa

SEQ ID NO: 1545 - DNA, 398 bp, Arabidopsis thaliana
  unsure at all n locations
  Clone ID: LIB22-089-Q1-E1-E12
actccgatgaatggagttttaggaatgctgaaaatgctgatggacaccgatcttgatgcgaagcagatggactatgcgcaaactgctcatggcagtgggaaggatcttacatcactaataaatgaggttcttgatcaggcaaagattgaatccggaaggctcgagcttgaaaatgtgccttttgatatgcgttttattcttgataatgtttcatctctcctctctggcaaggcaaatgaaaaaggaattgagttggccgtttatgtttctagtcaagttcctgatgttgtagtcggtgatccgagtcggttccggcagatcattacaaacctggttggaaactcaatcaaattcacacaggaaaggggacacatatttatctcagtgcancttgcaga

SEQ ID NO: 1546 - DNA, 490 bp, Arabidopsis thaliana
  unsure at all n locations
  Clone ID: LIB22-089-Q1-E1-E2
cgacccacgcctccggcaccaacgnccataactggcactgggtccgaaaccaattgccttgaatggtctcgcaacttcttcaccaaacaattctccggcgttgatatcctctccggcgaaggtaatcttttcatcaaggtcagtaagatcgagaaagtcgaaggcgaggcttatgtgaatgtgaggaaggggaagattatccctggctacgagcttaacgtctctttatcttgggaaggtgaggctaaagattccgatgggaagacgcttttgaaagctgatggattggtcgatatgccttatatctccgatgagaatgctgatgaagatccggagattaggttttcggtgaaggatnagggaacgattgggaagacttttgaaggaacccattgttaanaaaggggaaagggaaatttttcgggaaaaggttngggtttaagttnnaggctatggcnaaaaggaaggccccttttagggaatgaattgg

SEQ ID NO: 1547 - DNA, 519 bp, Arabidopsis thaliana
  unsure at all n locations
  Clone ID: LIB22-089-Q1-E1-E4
tacgccgncctttaccggcccaaaaattcccggaatcgacccacgcntccgaaacccaaaagaaactaggaagaggagtaaataatatttgttttaaagaaatgattctccacaaaatggcgttcttggccgttattctcttcttcttgataagcagcagcagcgtttgcgttcatagccgtgaaacgtttgcttgcgatacaaaggacgcagcaacagctacactgagattctgccagctttcagttcctataccggagagagtcagagatttgatcggacggttgacattggccgagaaagtgagcttgttagggaacactgcggcggcgataccacgtctaggaatcaaagggtacgagtggtggtcggaggctttacacggcgtttcaaatgtgggaaccggtactaagttccgtggggggttanccgnaancaacaantttcccccaagtcatcaccaccgttgcttcnttcaangccnccttgtgggaaaccaaccggacgggttgtgtcaaa

SEQ ID NO: 1548 - DNA, 475 bp, Arabidopsis thaliana
  unsure at all n locations
  Clone ID: LIB22-089-Q1-E1-E9
ntttttacgccgcccaggtaccggtcanagaattcccgggncgacccacgcgtccgggatcataaaagcaaagcaaaggattagttcaattgcaattctctaattcaaagtttggatccctaactgtaaaatccctaattcnnnnnnnnnnnnnnnnnnnnnnnnnnnnnnnnnnnnagtaaccgtcctaagaatttccggcggcgaggggacgacggcggcgatgaaattgacggtaaagttgctaccccctcgtcaaaaccgacttcgactctttcctcctcgaaacctaaaacactctcagcctcggccccgaagaagaaactcctaagtttcgccgacgacgaggaggaggaagaagatggagctccccgtgtgacgataaagcctaagaacggcaagagaccgtgtcaaatcctcttcccgtctcggcgtttcgggatnttctcacaagacactcctcaaacaagggaac

SEQ ID NO: 1549 - DNA, 513 bp, Arabidopsis thaliana
  unsure at all n locations
  Clone ID: LIB22-089-Q1-E1-F1
tacgccgnctttaccggccaaaattcccgaatcgacccacgcgtccggtcctttttaagctccaaaagattgttgctttttctcttgcttaagtttttgatttattcttcttcttcgaaaagtctgtacctcgcaagagtttgattgtccttgtgttgcgatttccatgtttagtatctgcatttgatagccttcgatgctgcatgcaattcccaagactctttctgattgctacaacgccgtgatttctctctgccatttccttcgatttgatttctgggttctcttcttctcgtctctcttctgcatgtttcgccactctaccttagaaaaaaggttactttcgcctccgatttaggctcgatttgatgaattcgtcgtcgtgtggctatttatcaaattgagcattaagggttctgaattgtggggntcaaaaatggttttaaccaaccggnctggtngttttttgtccgctacaaaaagcctaatggattctcaaaaggggtaatgttg

SEQ ID NO: 1550 - DNA, 215 bp, Arabidopsis thaliana
  unsure at all n locations
  Clone ID: LIB22-089-Q1-E1-F2
aaaattcccganacgacccacgcctccgcaaacgtatcnttctttctttttttctcgtaagtgttgccttttattaaaacgaagtgtgcgtatcttgttttcacgcttgctaattaaatcattgtaaacaaanaataattaaataaagtttggtttctnnnnnnnnnnnnnnnnnnnnnnnnnnnnnnnnnnnnnnnnnnnnnnnnnnnnnnngg

SEQ ID NO: 1551 - DNA, 528 bp, Arabidopsis thaliana
  unsure at all n locations
  Clone ID: LIB22-089-Q1-E1-F3
ttacgccgncctttaccggccaaaaattcccggaatcgacccacgnnnnnnnnnnnnnnnnnnnnnnnnnnnnnnnnnnnnnnnnnnnnnnnnnnnnnnnnnngaattcgagaaccagatctactaattacctgagagaaaaaagatctgctctgtttgtctgaaacagacagaagtcaacaaatctttcatttgttttttagcaaatcaaagaaatggccggagggttcgtcagtcaaacgccgggtgttcggaactacaattacaaactgacaccgaaagtgtttgtgacatgtttcatcggtgcttttggtggtctcatcttcggatacgatctcgggatctcaggaggggtaacctcaatggagccattcttggaagagttcttcccttacgtctacaagaagatgaaagaacgcacatgangaacgaatacnggtcnaatttggaaaantaancttcnnaanccnctttaatttcgnccccccnaagntggcgggtttgggngtccttctctcnttgcctcca

SEQ ID NO: 1552 - DNA, 496 bp, Arabidopsis thaliana
  unsure at all n locations
  Clone ID: LIB22-089-Q1-E1-F4
ttcncggaaccgacccacgcgtccgcccacgcgtccggaagttttatgaggaccgagagaactaagtttaagaaaaatgttgaaaaaagcgtattagcagagggacaaacgctttttagggttttagatttcctctgagagagaattttcgaaagcttgagagagatttccaactacgttagccatggcgagcaccaaagttcaaaagattatgacccaacctatcaacttgatttttaggtttcttcaaagtaaagctaggatccagatttggctatttgagcagaaagatttgaggattgaaggaagaatcactggttttgacgaatacatgaatctagttttggatgaggctgaagaagtgagcatcaagaagaacaccaaggaaaccaccttggaangggttttacncaangggngncancataacnctgatggatgaacncngggaaagtgatgtcngtctcaaacaactctcttcgatgaccttcaagct

SEQ ID NO: 1553 - DNA, 415 bp, Arabidopsis thaliana
  Clone ID: LIB22-089-Q1-E1-D12
atacacacttcttctcttaacaacacaacacaactttgaatttttcaccctcactttcatttatctcaaatctccttccagaaaagcgagggaatagtgttgttgagaggtttgtgatttccttttgaaaaaatgatggcttgtggcttaagcaagagccttggcttgtcttcctccttgaagaagcaacaaggcatagtgagtatccttggtggcatttcgtcgaacacttcatctgcaccttcacttaggcgaactttctccgccgatttgtcctccaagacttgggtttcccaaaatgggttttctcctatgaagagaatctcttcctctgagaagcttcgtcctgacgaagaagaagcagaggaagaatcaagattcggagtcgatatctgggcacaagattcaacaaaga

SEQ ID NO: 1554 - DNA, 441 bp, Arabidopsis thaliana
  unsure at all n locations
  Clone ID: LIB22-089-Q1-E1-A8
gattactgattcttcattgacggtaggagtcaccacttttggcggcgattccttgttctctattttttttgcacaagcaacatttagcttctgcaaactccagttcatctctcaaccctcatatcgccgtgttttctcgctctagtaccgcgagctcggacgaaccaggaagcaatccgttaatctagaagcggtgttgagaagatgacgattacatcaaatatctctgtacagaacgataacctcgttgttcaagggaagactatccttaccaaaatccctgacaacattatcctaactccggttaccggtaatggattcgtttccggttcatttataggcgcgacgtttgaacaaaagcaaagagtcctcangtgttccccaaacngngttatnggagggnncttcgggttaatgtgcngtttccggtttaanccaagg

SEQ ID NO: 1555 - DNA, 489 bp, Arabidopsis thaliana
  unsure at all n locations
  Clone ID: LIB22-089-Q1-E1-B1
nacgacccacgcctccgctaagagtaaggcggaggctaaaaggactaaatatatgtttacaccaagtgaatctaatgatgtttcagacctacatgagaatttgctaagccacagggacgcaatgcattcctcctttgccggtggtgatactcgttattcagattatgaccctcctaattttttggaagatatggaatcagattattctgaatctgaaactgattcttctgatatggaggaggatactgatgatgacattcccttgctgtcaggagctgggcgtcattccgagcgacgcaatacttttagtagacatacgtcaggagaagatgaaagtacaagcantgaggaagatnattatgagtcatccatttctggncnactcctcccaacctttattccnaaatccctaatatngaggctaantacgggtttccaactggcaagcncaaggggaaaaagaaacttccgggactcttccaaggaaag

SEQ ID NO: 1556 - DNA, 435 bp, Arabidopsis thaliana
  unsure at all n locations
  Clone ID: LIB22-089-Q1-E1-B11
gccgcccaganaccggtcaaganntcccgggncgacccacgcgtccggagaagttagatcttcttcttcgtgagctatgccatttacgatgaagatccaaccgattgatatcgattcttcaccaaccgtagctagagctgaatcaggaaacaaaccggtgctcaaatctcgtctcaaacgtttgtttgatcggccgtttacaaacgtattgagaaactcaacaactacaaccaccgagaaaccattcgttgtcaccggtggtgaagttcaatgcggcggagtagtgacggagttcgagccgagttctgtttgcttagcgaagatggtacagaacttcattgaagaaaacaacgagaaacaagctaaatgtggacgtaatcgttgtaattgctttaacggcaacaacgatggttcttccgatgatgaatcagatnt

SEQ ID NO: 1557 - DNA, 494 bp, Arabidopsis thaliana
  unsure at all n locations
  Clone ID: LIB22-089-Q1-E1-B2
ttacgccgncctttaccgggccaaaaattcccggaancgacccacgcctccgcgggacgcgtgagggaagaaaacttcgtctctcttctctgcttcgccctctcatttcctgtgagataaaggcggagtctctctccaagttattttgctcatccatcgattcttagagttcaaaatggttgatcaagttcagcaacccactattgcgcagaaagctgccgggcaagttcatgcgttcaagtgtttccaaggacgttcaattgggttaccagaggccttctatgtatcaaagacatgcaacctacggaaactactccaatgcggcatttcaatttcctccgaaatcccggatnttggaaaaatggcttccccgtgtttgtccaaaccnaggaaaaaaggggtncacnaactttgcccttgatttccaaaggggnggggnttccgngngngttcccaaaaagggggggggcccaaatggaaggtnttaacctttt

SEQ ID NO: 1558 - DNA, 508 bp, Arabidopsis thaliana
  unsure at all n locations
  Clone ID: LIB22-089-Q1-E1-B3
ttaccggnccaaaaattcccgganccgacccacgcntccgagctattcccnctagcctaacaagagagagcccttatctgacccatccaatcttcaacatgtaccacacgggagcatgagttgcttaggtacatccacaagttacaaaataaagatctatcattgtgccacagcatgattccacttggatcttgtacgatgaaattgaatgccaccactgaaatgatgccagtcacatggccaagtttcaccaacatgcacccttttgctcctgttgaacaagcccaaggttatcaggaaatgtttacgaatttgggtgagctcttatgtacgatcactggatttgactctttctcattgcaacctaatgccggtgctgctggcgaagtacgccgggctcaagggtatcccgttcataaccaaatgtcaanaggcgatcatcacagaaatgtgtgcatcatacctgtttctgcacacgggacaaaccctgctagtgctgccatgtgcg

SEQ ID NO: 1559 - DNA, 515 bp, Arabidopsis thaliana
  unsure at all n locations
  Clone ID: LIB22-089-Q1-E1-B5
cctttacgccgccaaataccggtcnagcattcccgggtcgacncacgcgtccgagtgaagtaacttcaaaggccctaaactcacttccttacgattcacccggtcaagcctttgtggtttttgagaagccanctggggtccctgctgttggaaagttctccaacacattgactttcgttgttaangaggttgacccaagcacaggtgaagcagaagatgatggagtanaagatgagtaccagctagaggatcttgaggttgtagctggagattacatggtgaaagtgggtgtctccaatttcaggaatgcgtgggaaagcatggatgaagaagatgagcgtgtagacgaatatggccttggccaaagagagagtttgggagaagctgtaaaggctgtcatggatcttcctggcatgcaaaccttttaangggaacgggnaacaattccgcccaatgcaaggtccacacacgtgtcnattgtcaaggtgtgtacatangcaacgtgaaagtgttat

SEQ ID NO: 1560 - DNA, 513 bp, Arabidopsis thaliana
  unsure at all n locations
  Clone ID: LIB22-089-Q1-E1-B6
ccttctacgccgnccagtaccggtcaaaaattcccgggncgacccacgcgtccncgattatgttcggatactcaccagtccagctccctatgctagataaggacggttcaggagggattgtcgcactttctcaatctccatttgctggaagagttccatcaaactcagctactgcaaaaggcgaaggcaaacaacctgttgcagaagaaggttcatccgaggatgcatcagaacgaccaacgggagacaacagcaacctcaataccgctttctctttcgacttttctgccataaaacctggaatggcagcagatgtgaantttggaggatccggggcacgtcccaacttaccgtgggtctcaaccactgggttcaaggcccacacggacggacaatcccaggtgtcacataccggttaaaacncaaaccanntttaaaancctnngccctttccaangggcccncaaatttcaccggaaggattttttacggcaccaagccnaaggattactt

SEQ ID NO: 1561 - DNA, 438 bp, Arabidopsis thaliana
  unsure at all n locations
  Clone ID: LIB22-089-Q1-E1-B9
ctacatatatatanacgcacatacgtacacagttcgaaggttttagctgcgagtatgaggaaggaactgtgtagaaactttcagcgtggcagttgtaggtatggggaaaactgtagatttcttcatccacaacaagctaagccaaataatccctttggctttggtacnnnnnnnnnnnnnnnnnnnnnnnnnnnnnnnnnnnnnnntagttcgaacccttttggatttggtgtacaaagtggtggttccagcagaccgaatcagttccaagaatacttggtcacgaacggcttctacacctactggtggtggtgctgctgcttctacacagcagactgggtaaacagacgcagccggcagatcataaatgcacagatcctgctgccgtgtaagcgggtaatgcaaagacnnattttaagaatganagacccatttgga

SEQ ID NO: 1562 - DNA, 502 bp, Arabidopsis thaliana
  unsure at all n locations
  Clone ID: LIB22-089-Q1-E1-C1
ccggnccagaattcccggaancgacccacgcctccgattacaaataagctcctatcttctttctttcttttagagatcttgtaatctcctcttagttaatcttctattgtaaaactaagatcaaaagtctaaatggagattaacggggcacacaagagcaacggaggaggagtggacgctatgttatgcggcggagacatcaagacaaagaacatggtgatcaacgcggaggatcctctcaactggggagctgcagcggagcaaatgaaaggtagccatttggatgaagtgaagagaatggttgctgagtttaggaagccagttgtgaatcttggtggtgagactctgaccattggacaagtggctgcgatctcaactattgggtaacagtgttaaagtggagcctatcnggnnacagctaaanccggtgtgaatgctantagtgattgggttatggagagtatgaacaaaggcactgatagttatggtgttactactgggt

SEQ ID NO: 1563 - DNA, 514 bp, Arabidopsis thaliana
  unsure at all n locations
  Clone ID: LIB22-089-Q1-E1-C3
acgttacgccgcctttancggccaaaattcncggaacgacccacgcgtccgcgcgtccatttttttttctcaattcggcttcaaaaattcgttagatagagaagaatctaaaagtctctctcggtcatcggaatatcttcttctcaggaattcgacgagactattcgaaatcggaaatcgcgctttgaatctgaaactcagaatttagaggacgcttactccaaagaatctagggtgttaactttctaagaaaaggagtttgttaaaacaatgaagtataaagatgagaagtacgagaaagctgagaagggttcaaggattttgcccaagacagttttactgattcttctttgtggactttcgttctatcttggagggttgtattgtgggaagaacataattgaagttagtgatgttgcaaaagctgnatcctcctnccttaaatgttgatgactcncttcaagtcaaatcngttctttctcggaatgtancagtgactaccaagattacactc

SEQ ID NO: 1564 - DNA, 485 bp, Arabidopsis thaliana
  unsure at all n locations
  Clone ID: LIB22-089-Q1-E1-C4
tttaccggccaaaaattcccggaatcgacccacgcntccgcttgttcgtnatctctcttcctccgggaaaaagatgtcggccggtaacgggaaatgctactaacggtgacggagggtttagtttccctaaaggaccggtgatgccgaagataacgaccggagcagcaaagagaggtagcggagtctgccacgacgatagtggtccgacggtgaatgccacaaccatcgatgagcttcattcgttacagaagaaacgttctgctcctaccacaccgatcaaccaaaacgccgccgctgcttttgccgccgtctccgaggaggagcgtcagaagattcagcttcaatctatcagtgcatcgttagcatcgttaacgagagagtcaggaccaaaggtggtganaagaaattcggcngagaaaaaaaaacgaanggttaaantaanccnggggttacnctcaangggcaaaaatcattccaancttttt

SEQ ID NO: 1565 - DNA, 467 bp, Arabidopsis thaliana
  unsure at all n locations
  Clone ID: LIB22-089-Q1-E1-C5
acgcgtccggtttcaggtcacctgttgcacaatctctgctcagccctaaaagcttactcctttcaactttctggaggccttctcgtagcctagcgtcatagatggatttgatggagaagaacttggagttagtggagattcagaaactagaaggccacaccgatcgtgtttggagcgtagcttggaaccccgtttcttctcacgccgacggtgtttcaccgattcttgcttcttgcagtggcgataacactgttcgaatctgggaacaaagctctctctctcgctcctggacttgcaagacagttttggaagagacgcatacaagaactgtgaggtcgtgcgcttggtcaccctcaggacagttattggccactgcaaattttgaatggtacaacgggcatttgggaanaattacggttctgagtttgagtgtatttccactttggagggacatgaaaacgaagtca

SEQ ID NO: 1566 - DNA, 523 bp, Arabidopsis thaliana
  unsure at all n locations
  Clone ID: LIB22-089-Q1-E1-C7
agcctttacgccgnccagtaccggtcaannattcccgggncgacccacgcgtccgcggacgcgtgggaagtcctctcttttccgaaggatctgactttatcccggaattctgacgccgaagcttaaatggaaaaagaagatgagctccagaagttaaacggtcaagtttcagctccacgagacggagatgtagaagatgacgatccactagtgttgagttctcaagctttggcggcgcttcgggaatttctagcagaccagaacaagactgttgcgaagcacgccaccggcgtcttccgtcgccggaggagaagaatccgataaagtggagctggttacggaggattggagactcagccagttctggtacgaacctgaaactgcagagactgtagcagatgaagtgggcactccctctcaaaagaantccaaagcctgcaaaagtcccttgcaattgcttgccctaactccccnacgtttatctcaaggaaaagagatcctaagtcttcaggtgcaattgctg

SEQ ID NO: 1567 - DNA, 473 bp, Arabidopsis thaliana
  unsure at all n locations
  Clone ID: LIB22-089-Q1-E1-A6
acgcgtccnaaaaaaaaagagaaactcgaaaacgagaaaaatggcgagctccgatgctctcttgccaatctccgccagagaagaagaaccattatgtccttacacgagattaccaatggccgacccgaatcaagaaacccatggcccccggagaagaagaccctttaaaggtctcctcgccgtctcatttggtctcttgttcatcgccttttacgtcgctctcatcgccacacacgacggatctagatccaacgacgaagggatcgatgaaacagagacgataacgtcacgtgcacgtcttgctggtgtgtcggagaaacgtaacgatgggttatggaaactttccggtgatcggaacacgccggcgttttgaatgggacaatantaagttgncctgggaaacnancggggtttcattttcagcctgagcaaaattggntgaacgatcctaacggtccattgttctacaaggg

SEQ ID NO: 1568 - DNA, 432 bp, Arabidopsis thaliana
  unsure at all n locations
  Clone ID: LIB22-087-Q1-E1-H8
acgcgtccggttttttttttttgtttccttctttgatctttctttcagaagaaaagattgatttaaatttgagaaaccaagcgactgtttgtttactttctttattattacagatttacaggtacagacaaagttgtatgtaagtgtgattagaacagtggatgctcttatcacgggtccacttgctctctaaaaagaatattgaagctcataattacatctttagagactaaaacaatcttaatcattcaccttcaccaagtacttgtgtccagaagaaaaagaaggaaaaaaagaacacaccattcaagaaagagagaagcttcttgtgataagaaatttcacaagattggggttttaacattccaagggagangactttgtcctgtcccctattcatcttcaagacccttatgagtttcgggtcctgag

SEQ ID NO: 1569 - DNA, 468 bp, Arabidopsis thaliana
  unsure at all n locations
  Clone ID: LIB22-087-Q1-E1-H9
acgcgtccgagtactccaagtttcatggtcattcccctgctgttgtcactggaaagcccattgatcttggtggttcattaggtagggaagctgccacaggtcgtggtgtagtatttgccaccgaagctcttcttgctgagtacgggaaatcgattcagggtttgacatttgttattcaaggttttgggaatgttggaacatgggctgcgaagctgatccacgagaaaggcggtaaagtggttgcagtaagcgacattactggtgcaatcaggaaccctgaaggtatcgacatcaacgctctcataaaacacaaggacgcaactgggaagtctcaatgatttcaatggtggagacgctatgaattcagatgaaattgctcattcatgagtgtgatgttctcaatccatgccgcctccttggtgggtgtccttgaacaanggaaaatgctgggagaanttgaaggcaaaa

SEQ ID NO: 1570 - DNA, 420 bp, Arabidopsis thaliana
  unsure at all n locations
  Clone ID: LIB22-088-Q1-E1-A10
tatcatcaccatcagggctgaaggagagggtggcttgcgccatggggcacctgcaagaggtgatgggagagagggagttgctgatccagctgtgggtgcctgttgagacaaggagcggccgagtgctgagcacggaggagcagccttactctatcaacaccttctcccagagccagagcctggccctctaccgagacgcctcagctggctacagcttcgcagcagaagttgggtcggagcagctggtggggctgcctgggcgtgtgttcctgaggagaatgcctgagtggaccccagacgttcggtttttcaggaaggaggagtaccctcgcattggatacgcccgcaggtaccaaggttcgaagccaccctcgccctcccactcttccaanggaacgtccgggaaactgcttngcgttg

SEQ ID NO: 1571 - DNA, 507 bp, Arabidopsis thaliana
  unsure at all n locations
  Clone ID: LIB22-088-Q1-E1-A3
aaacgtttacgccngccctntaccgggccaaaaattcgtccanncattcccacggtctccgcaaacatnntngctctaatgtgcctaaagctgaaatgactttggatgaaactttggaagcacttggtctcaatgctaactctaagcaagataaggttcaggagacaaaaccaaatgctgattcttccaaaaaggcttcttcacgatttgtgttggaaatanattccaagtatctgaatcttgagaacganttgaggagaacgtatggttcaaaggctatgcgatcatttgagagtgagagtggctctcaaggtggtaagtagctctagacgangggggaaggcgtggagtccatcatatcacaaaanacggttctggtatctccaaaagagaattggtccccatgggataaatnnttctcaatggagtttctaaagactaaaagatgggaacaactacttcagatataaccaatcatcctcaaaatgatcaaggctcaagaagaac

SEQ ID NO: 1572 - DNA, 442 bp, Arabidopsis thaliana
  unsure at all n locations
  Clone ID: LIB22-088-Q1-E1-A6
acgcgtccgngccggaacagcattctccggtagcttcaacgaagagtttgacttaacttggggtgaacacagaggcaaaatcttcagtggaggaaaaatgttgtcactctcactagaccgggtttccgggtcgggttttaaatccaagaaagaatatttgttcggaagaatcgacatgcagcttaaactcgtcgccggtaactccgctggaaccgtcactgcctactacttgtcatcggaaggaccaacacacgacgagatanactttgagtttcttggtaatgaaacagggaagccttatgttcttcacactaatgtatttgctcaaggcaaaggaaacanagaacaacaagttttatctctggtttgatccaaccaagaacttccacacttattcncttgtctggagaccacaacacatcatatttatggtagataatgt

SEQ ID NO: 1573 - DNA, 429 bp, Arabidopsis thaliana
  unsure at all n locations
  Clone ID: LIB22-088-Q1-E1-A7
aaccgacgnnnnnnnnnnnnnnnnnnnnnnnnnnnnnnnnnnnnnnnnnnnnnnnnnnnnnnnnnnnnnnnnnnnngattaaacctctaaaatcagggagtttttttcttctggtttcggattctcagaaaaattagcaagtctttgtcttttgctgctggttgcatagcccccattgaagcttttttcctctcaatcttaatgttctcaagagggcttctgcagcaagcgaaatgggacaaagaaataggaatgttgatttagaaatggagcaagcagcaatctcaagcttctctccaagcagagccttgcatccttttangcagctttccgcaacaaccgggataataataatatgcctgctatggttgcacacgttccnaatttagaacctcattctcttcaagatctttctctaacctggggagt

SEQ ID NO: 1574 - DNA, 414 bp, Arabidopsis thaliana
  unsure at all n locations
  Clone ID: LIB22-088-Q1-E1-A8
gggcggacgcgtgggctgaaagggaaacctangtttgctgatttcaatctcatgcctcctgattggggtgctaattttgctccttgggtttctactatggntcaagcttatccttgtcttgagaaagttgatttgaanaggatgtttgttactgatgatgatttagctcttcttgctgactcttttcctgggtttaaagagcttatcttggtttgttgtgaaggttttggtactaagtggtatctctattgttgccaacaagtgcagaaagctgaaagtgcttgatttgattgagtctgaagtcacggatgatgaaagtggattggatctcttgtntccctgaagatgtaactttgtttgggagtccttaagcttttgactgtgtggaagctcctaatcaantttaaaggcgcc

SEQ ID NO: 1575 - DNA, 490 bp, Arabidopsis thaliana
  unsure at all n locations
  Clone ID: LIB22-088-Q1-E1-B1
aacgttagcagcctttaccggntcagtannggtcacncattccagggtccaggcaanaatggaanaagcanagcataatgaagctgaggaagcacaagggattgaagctagggaagcaaaacagattgaagctggggaaacttcaagatcatctangaaattgattacttttgagccaaagttggttataaacaaaggaatatcggttcttggattcgttctgcggttatttgctgtttttggaactataggaagcgcgcttgccatgggaacaacacatgaatctgttgtctctttgagtcagctcgtacttctgaaagttaaatacagcgacttaccaacgctcatgtaaaatattcagtgatcagtatatcgatgaatcatgaatttgattgtgtatatataataatactgctctgttttataagtttttcgtggttgcaaacgccatttctggtgggatatttggttctttctccaacctgtgagt

SEQ ID NO: 1576 - DNA, 416 bp, Arabidopsis thaliana
  Clone ID: LIB22-088-Q1-E1-B10
acgcgtccgctctactcaaggaactccacaaaaattaaaatctcacaactccaacatcttcttataacacgtcttgatttatctttaagaaccaaacaaaaaaccaaaacctagaagagaaaatgggagatcaaggagtacaacaaatgcaacagcctattgttgtgtatccaaacgcttacaataaacagtatccagacccttctacaaaaccttcttcttcctctggctcaagcggaaactttgggacggtcttcatagtcctagccgtgatctttgtcttgtcggctcttgcttgtgtctttggaaggctatgtaaccgtgaaagccgcgcggctaagcagcaacatagcaagcatccgaagcatgagaaagcttcttccaagaagagccgttgagaatcggccttggagcgt

SEQ ID NO: 1577 - DNA, 476 bp, Arabidopsis thaliana
  unsure at all n locations
  Clone ID: LIB22-088-Q1-E1-B11
cgttacacngcctgtacgcctcaagcattccaaggtcgacccacncgtccggaactcgttgcagagcccacaggcgcccgttctatgtcttttgttggcacacacgagtacttagctccagagatcatcaaaggtgaaggacatggaagtgcagttgattggtggacctttgggatctttctttatgaactattgtttggtaaaacaccgtttaaagggtcaggaaatcgagcaacgctcttcaacgtggttggtcagcctcttagattccctgaatctccggttgttagcttcgcagctagggatttgataaggagtttgcttgtgaaggagccacaacatagattagcttataagcgtggagcaacagagataaagcaacatcctttctttgaaggagtgaattgggctctggttccaagttgccagtccaacgggagaatcccaaaaccgggttgtcttgaagcctttgaanc

SEQ ID NO: 1578 - DNA, 413 bp, Arabidopsis thaliana
  unsure at all n locations
  Clone ID: LIB22-088-Q1-E1-B12
tgcttgtgaagctaatggtgttcangattatggatggtactatgtgggttcataatcctagaactgctttgcttaaagagtttctttctgattctgaacgttttggtcagcttaaaactgtacagagttgtttctcatttgctggagatgaagattttcttaaaaacgatatccgtgtgaaacctggtcttgacgggcttggtgcgctaggagatgcggggtggtacgcgatcagagcaactcttttagctaataactttgagcttccgaaaactgtgactgctttccccggtgctgtnttgaatgaagcaggagtgatactttcctgtggagcatctttgagttgggaagatggacgaactgcaactatatattgttcattcttggctaacttaacaatggagataactgcc

SEQ ID NO: 1579 - DNA, 506 bp, Arabidopsis thaliana
  unsure at all n locations
  Clone ID: LIB22-088-Q1-E1-B2
ngttacgcctgcctgtaccgggtccanaattcccggatcgacccacgcgtccgatttcctctctgatcgccagtgatttangcttctgcaacgaagagatggctttagtcggaggtgttggcgatgtccctgctaatcagaacagtggtgaggttgagagcctcgctcgtttcgctgtcgatgaacacaacaagaaagagaatgcacttcttgagtttgcnagagttgtgaaggcgaaagaacaagttgtagccggaacactgcatcacctgactctggagattctcgaggcaggacagaagaagctttacgaagccaaagtgtgggtcaagccgtgggttgaactttaaaagagttacaaggagttcaaagcctgccagtgatgcccctgctatcaacttcctcccgatcttggctgcaaagcaangtgaacatgaatctggatgggangggaaattccccggagatgattcaagaagtgaaancatgtttgctgaaccangctg

SEQ ID NO: 1580 - DNA, 519 bp, Arabidopsis thaliana
  unsure at all n locations
  Clone ID: LIB22-087-Q1-E1-G9
aactgtttcncctggcccgtaccaagtccggaaattcccgggtcgacccacgcgtccgcggacgcgtgggtttttttctctgatcttcgagttctgataattgctcttttttctctggctttgttatcgataatttctctggattttctttctggggtgaatttttgcgcagagatgggttcggcgaacaacgagtacgagtttctgagtgagattgggctgacttctcacaacttgggatcttacgttgctggcaaatggcaagccaacggacctcttgtttcaactctcaatcctgctaacaatcagccaattgctcaagttgtggaagcttctctagaggattacgagcaaggtttgaaagcttgcgaggaagcagctaaaatatggatgcaagttacggctcctaagagaaggtgataacctcaagacaagattgggggatgcactaagattcaaaccttgactaaccttgggccgtccntccttccccttggaaatgggaaaagattcctngct

SEQ ID NO: 1581 - DNA, 511 bp, Arabidopsis thaliana
  unsure at all n locations
  Clone ID: LIB22-087-Q1-E1-F12
aactgtttcgcctggcccgtacaagtccgganattcccgggtcgacccacgcgtccgcgaagcatccttcaaggaagcattaaggaggaatgtggcagcaaatcccggggtgtgttccatatcttctagcttggattccgatactgcggaaatctccacgacgtttaagatcgagctaggggatagtaacgccgttgagagatgcagcgtattgcaacgcttccatagtttcgagaagtggatgtgggataatatgctgcatcctagtgctttatctgcatttaagtatggtgctaagcaaagcagtccgctttttcgcatatgcagaatctgtgcggaactacactttgtcggagatatttgctgtcctagttgcggtcagatgcatgctggtccagatgttggtgagttgtgttttgctgagcaagtggctcaactcgggggataaatttgagaaaganggagatactgggcttttatccttgccgtanctcaatccttgtcctccctc

SEQ ID NO: 1582 - DNA, 474 bp, Arabidopsis thaliana
  unsure at all n locations
  Clone ID: LIB22-087-Q1-E1-F3
cttntacgccgctcggtacngctcaagaattccnnggncgacccacgcgtccgcactcgcagaatatttgttctcatctgattcctccgatctgccatgtctcggcttttctaacgctaagaagtttcacagacgcggcgaaggagagggaggaaggagatagatctctttttccgtcgcgataataataaaaaataaacgtgtctagaggctgttactgaagagttgattcatacggagagaggatagaaatggcagatgggatatcgagcttttggggtcctgtgacttctactatagagtgttgtgagatgaactacgcctactcatcctacattgctgagttctacaacactatatccaatgtccctggaatcctattggctctcattggtcttgtcaatgcattaaggcaacggtttgagaagaggtttagcattcttcacatttcgaatatgatacttgctatcggca

SEQ ID NO: 1583 - DNA, 457 bp, Arabidopsis thaliana
  unsure at all n locations
  Clone ID: LIB22-087-Q1-E1-F5
aggaaccggtcanagaattcccgggccgacccacgcgtcancgttactctcgtgtttatctctccgacgtaaccatggatagcgatactctctcaggattattggaaaacgtcgccaaaaaattccccgatcgccgagctctctccgtttctggaaaattcaatctcactcacgcgcgtcttcacgatctaatcgaacgcgccgcttcacgccttgtctccgacgctggaatcaaacccggcgatgtcgttgctctcaccttccctaacaccgtcgagtttgttataatgtttttagcggtgataagagctagagccacggcggcgccgttgaacgcagcgtacacggcggaggaatttgagttttacctctccgattcagattcaaagctattgttaacctctaaagaaggaaacgcaccggctcaagaagcagcttcaaagctgaaaatctctca

SEQ ID NO: 1584 - DNA, 457 bp, Arabidopsis thaliana
  unsure at all n locations
  Clone ID: LIB22-087-Q1-E1-F6
tcacgcgnccagataacggtcntagncctcccgggccgacccacgcgtcaactcggatctccttctcttctctctctcgctaagaactatagaagatgggattgttctcccacaagatctccagagatgatctgaaaccaggcgatcacatggattcntggcgtaacgcttatatctactctcatcacggagtctacgtaggagatgagaaagtcattcatttcactcgtggaggtggtctagaattcggaacaggaacagttttggacaagatcatcgatatttcaataccaaatcatggaanaagagacaaaaagtgtattgattgtggagatcantccaatctcggtggtgtaatctcntcttgtcttgattgttttctcgccngagggaaatctagatcncttcgaatacagtggcctctccgtntagcnttctagccaagacgagggtggna

SEQ ID NO: 1585 - DNA, 425 bp, Arabidopsis thaliana
  Clone ID: LIB22-087-Q1-E1-F7
acgcgtccgttaaaaaataattaaacatggaacagtaggatgctaacatgactgacgagactgtagctgctcaaaagaaagtctaagctaaattagaaccaaagggcactcctgaggatgctgaaaacctaaaaaattaaggcaatgaggaatttaagaaaggaaactacgcagctgctatttaacactattccgatgcattggatattcaaagaagtgaagctatcctcactaacagagctgccgcttatatcagcttaaaaaaatataaagaagcattattcgactgtgagcaagctattggtctcaaccgatagttcctgaaatcttattaaagagcctataaatgttacatgtagttgggtgacttgcctaaggccaaggaagtctctgaagttgctaaagaccttggagatgctgaagct

SEQ ID NO: 1586 - DNA, 529 bp, Arabidopsis thaliana
  unsure at all n locations
  Clone ID: LIB22-087-Q1-E1-F9
aactgtntcccctggccctaccaatccgganattcccgggtcgacccacgcgtccgcagaatcatcccaattcaagcaaagatccgagaaatcttcatgcctgcactaagttccacgatgaccgaaggcaaaatcgtctcttgggttaaatcagaaggcgataaactcaacaaaggagagagtgttgttgttgttgaatctgataaagctgatatggatgttgagactttctatgatggttatctagctgcaatcatggttgaagaaggtggtgttgctcctgttggttctgctattgctttgttagctgaaactgaagatgagattgctgatgctaaagctaaagcttctggtggtggtggtggtggtgattctaaggctcctccggcttctcctcccacggctgcagtttgaaagcacctgtgaagtgttgaagaaagnaagggttgcagcttgctcccgggttgtccaattaanggcggttggccggcgttctgccggtgcaatcccgggcttctgaaagggaagg

SEQ ID NO: 1587 - DNA, 457 bp, Arabidopsis thaliana
  unsure at all n locations
  Clone ID: LIB22-087-Q1-E1-G10
acgcgtccgcttagatcgatttctaaagnnnnnnnnnnnnnnnnnnnnnnnnnnnnnnnnnnnnnnnnnnnnnnnnnnnnnnnnnnnnnnnnacccatggctaatcgttatgatccaaatcctttcgctgaggaagaagaagtcaatcctttcgctaatgctagaggagttccacctgcgtcgaattcgagactttcgcctttgcctccagagcctgttggtttcgattatggtcgaaccgtagacattcctcttgacagagctggtacacaggatttgaagaagaaagagaaggaactccaagccaaagaagctgagctaaaacgacgagagcaggacctcaaacggaaagaagatgctgctgcacgagctgggaatcgttatttgaagtgaaaaactggncgcctttcttccacttatccaccatggacatcgcaaacgaaaattccggttcatc

SEQ ID NO: 1588 - DNA, 505 bp, Arabidopsis thaliana
  unsure at all n locations
  Clone ID: LIB22-087-Q1-E1-G12
aaactgtttcgcctggccgtacaaagtccggaaattcccgggtcgacccacgcgtccgtattcggaaagtgaggaagatacactgaagcaaaagagcaagtcatggcggcgacatcttcctctgcttttctccttaatccgttgacttctcgccaccgtcctttcaaatactcgccagagctctcttctctctccttatcctctcgaaaggctgctgctttcgatgtttcctcagctgctttcacgctcaagagacagagccggagtgatgttgtgtgcaaggctgtatctatcaagccagaagctggtgttgaagggctcaatatcgccgataacgccgctcagcttattgggaaaactccgatggtgtacttgaacaatgtagtcaaggggctgtgttgcaagtgttgctgctaagcttgagatnatggaaccatgttgcagtgtcaaggataagattgggtacagtatgattactggatgctgaagagaaaaggacttataa

SEQ ID NO: 1589 - DNA, 473 bp, Arabidopsis thaliana
  unsure at all n locations
  Clone ID: LIB22-087-Q1-E1-G2
gccgccagtacgnctcaagaattccagggncgacccacgcgtccgcccacgcgtccgcaaaaattagggcaaaattagnnnnnnnnnnnnnnnnnnnnnnnnnnnnnnnnnnnnnnnnnnnnnnnnnnnnnnnnnnnnnnnnnnnnncaaggaaaatttagggttttcgatgaaggaacctttgcagaagaagaaggtggttgttcgtcacttgccgccttctctttcacagtccgatctcttatctcaaattgatcctcgtttcgctgatcgttacaattgggtttcgtttcgtcctgggaagtccagctataaaaatcagaagtattcacgggcctatgtaagtttcaaggcaccaagaagatgtttatgaagttcgctgcatttttcaacggggcatgtgtttgttaatgaaaanggtgctcagtttaangctatagttgaatatgcacccttcctcagcgtgttcccga

SEQ ID NO: 1590 - DNA, 477 bp, Arabidopsis thaliana
  unsure at all n locations
  Clone ID: LIB22-087-Q1-E1-G3
naacttctacccgccggtacggctcaagaattccanggncgacccacgcgtccnaaaaaaaacaaacccgtgacgccattaacgaaggtcgagcttccttgacaccacacaatgcattctcctcgtaagctatttcacgcgcggtcatcactcgccacgcgccgatcaacggntcttgtcgtattaacttccctagctattggaatcgccggtttcacatttggactcgccgtaattcttataccgggtctccgattaaccggtcgtaattgcttgacgaacactcctccgaagacggtgcgagtcgtttgggacgtcgccggaaatagtaatggcgttgttagtggcgaaaagaagaggcataaggttatgggattcgttggtattcaaaccggatttggatctgctggccggagacgatcacttaagaaagacatggatgccgtcagattcaagaaggtcttcgacgtttggaaa

SEQ ID NO: 1591 - DNA, 484 bp, Arabidopsis thaliana
  unsure at all n locations
  Clone ID: LIB22-087-Q1-E1-G4
cttntacgccgctcagtacgcctcaaagaattccagggncgacccacgcgtccncctcgccctcggctactcttttctcttcttgcctctcgtctccgccgctgattcagctgccgccgacaaaggaatatggaagaaaaagatgtgtatacgcaagatggaactgttgatattcacaaaaatcctgcaaacaaggagaaaaccggaaattggaaagcttgccgcttcattctcggaaatgagtgctgtgaaagattggcctactatggcatgggcactaaccttgtgaattatcttgagagccgtctgaatcaaggcaatgctacggctgcaaataacgtcacgaaattggtctggaacatgttatataactcctttgaattgggagcctttatagctgatgcttaacttggacgatattgggaccnattgcaacttttgttttcaatctatgtctccggtatgactcctttgacaattatca

SEQ ID NO: 1592 - DNA, 459 bp, Arabidopsis thaliana
  unsure at all n locations
  Clone ID: LIB22-087-Q1-E1-G6
ggaaccggtcaangaattcccgggccgacccacgcgtcnncaaattataaacccattttccttcataaatttctaaaataaaaccccttaaactttcattcacatcatccaacccccaatgggtcgaatcttgaaccgtaccgtgttaatgactcttctagtcgtaacaatggccggaacagcattctccggtagcttcaacgaagagtttgacttaacttggggtgaacacagaggcaaaatcttcagtggaggaaaaatgttgtcactctcactagaccgggtttccgggtcgggttttaaatccaagaaagaatatttgttcggaagaatcgacatgcagcttaaactcgtcgccggtaactccgctggaaccgtcactgcctactacttgtcatcggaaggaccaacacacgacgagatagactttgaagtttcttgggtaatgaaacagggaag

SEQ ID NO: 1593 - DNA, 460 bp, Arabidopsis thaliana
  unsure at all n locations
  Clone ID: LIB22-087-Q1-E1-G7
ggaaccggtcanagaattcccgggncgacccacgcgtccgcccacgcgtccgcccacgcgtccgcaaaaaccaaacaaacaaacaacaaaccagaagttttatttttgttaaagagtaaccaaaaaaaaaaaacagagtaccttcttcttcacacacataaaaagagacggtaccaaaaaataaaaacagagcaaaccacaaaaatggggaagcatttattccgatcatctcctccaccggagaaaccaacagctcatctctctctcgcggaatcagctgttcaagaatgtatgagcaacatcaacaccgtcatatcaaaatggacttctccggctgcttcttcctccgacgacttcctcttctccaccaacagtcgtcgtgaagcagaggagtttgttacagccgttagacatctacaaagcacgatgcatcgtttggtttccgttaacccttcctcgg

SEQ ID NO: 1594 - DNA, 517 bp, Arabidopsis thaliana
  unsure at all n locations
  Clone ID: LIB22-087-Q1-E1-F11
aactgtttcncctggccctacaagtccggaaattcccgggtcgacccacgcgtccggtanagagaaatcaagaatggatttgcagagaggctttgtgttcttgtctttggttctatcttttatgataatcgaaacgacggcgtatcgagagagacagctgctgctgctgcaaccaccgcaagaaacggcgatagataccgcaaacgcggtggtgacggttcaagatcgaggtttgaagacgcggcgaccggagcataagaacgcatacgcaacgatgatgtacatggggacgccaagagactacgagttctacgttgcgacacgtgttttgatcagatcgttgagaagtcttcacgtggaagctgatctcgtcgtcatcgcttctctcgacgttcctctccgatgggttcaaacccttggaagaagaagatggagctaaaagtggtgaagagtttgaaaaatgttggataatccatacaaggagacagaccaaacttcaacaagtngattcaaagct

SEQ ID NO: 1595 - DNA, 446 bp, Arabidopsis thaliana
  unsure at all n locations
  Clone ID: LIB22-087-Q1-E1-C9
gggcgcaaatctctttcactcttaaacctcataaccttagagatcatcagtcatcaatcatcttcttcgttgttatcacttctttagtagctctcaacgagatttctccaaaatcagcgatgcctttaacgagatcaaagagtcttccggcgacggagaacggtggatccgatcgggagacactccaatcaggaagatcagtggctgggattctctataaatggactaattacggaaaaggatggagatctagatggttcctcctccgcgacggaatcttatcgtattccaagatccgaagaccggagaatgtcaatctcttatctccttccgatgatctgaggttaatcggagatatttccaccgatcgtctcttgagaatgangagttgtagtggccgtagtcctcggaaacatcacaanaacattgggcattggtcacctcaa

SEQ ID NO: 1596 - DNA, 462 bp, Arabidopsis thaliana
  unsure at all n locations
  Clone ID: LIB22-087-Q1-E1-D1
gtagcctcaagaattccaanggncgacccacncgtccgtgcgcganttcgaagatcaacatccatggcgtcacaggtaaggtcagtaaaagttggcaatctctcttcaggagcaactgagcatgatattaaagagtttttctctttctctggtgaagttgaaagcatcgatatccaaagtaacgagcatagtgcttatgtcacatttaaagaaactcaaggagcagagactgctgtgctcttatctggagcgagtattgccgatcaatcagtcatcattgagttggctcccaactacagtccaccagcagcccctcatgctgaaacacagagcagcggtgcagaatctgttgtccaagaaggcaagaagatgttgtgagcagcatgttagcaaagggtttcattcttgggaaagatgctgtcggcaaagcaaaagcttttgatgagaaacatggtttcacct

SEQ ID NO: 1597 - DNA, 516 bp, Arabidopsis thaliana
  unsure at all n locations
  Clone ID: LIB22-087-Q1-E1-D12
aactgtttccctggccctanaagtccgganattcccgggtcgacccacgcgtccggagagatggagtcgcagaagaagatagctcatgagatcggaggtatgaagaacgatgctcttcgctttggtcttcacggcgttaagagcgatatccttagatctcatcctctcgaaacggcttacgaatctgggaagcaatcacaagaagaaatgaagaggagagtgatcacgcatacttatggagctgctcttcctttgaagatggatcttgatagacaaatcctttctcggtttcagagacctcctggaccaattccttcatcaatgcttggccttgaagtctacacaggagctctaagataattttggttttgaggattacttgaatgatcctcgcgaatccgagacgctgaaaccaatagactttcaacacgggatgggaaagtttcggctttggtcctcctccaaaagggcccaagccttcccaaagtttcatggttantcaaccaacaatcaaaa

SEQ ID NO: 1598 - DNA, 467 bp, Arabidopsis thaliana
  unsure at all n locations
  Clone ID: LIB22-087-Q1-E1-D4
cgccgcncggtacgcgtcanagaattccagggncgacccacgcgtccnattttctcctaccaaaatctgggtttcgatcaattttaggtcttttgattcctacttgtctaatcgtcttgcaatttcaaagatgacagttgttggagatgttgctccaattccaaggaggaacagttctacttgctctaatgatatcgctgctccgttattaccagagtgtcatggagatgaagttgctcatgatgaattcaatggagcttcttttagtggcgcggtttttaacctcgccacgactataattggtgctggtatcatggctttgcctgctacaatgaagattcttggacttggacttggaatcacgatgattgttgttatggctttcttgactgatgcgtcgattgagttcttgcttaggtttaagtaaagctgggaagaatcgatcttacggtggtttaatgggtggt

SEQ ID NO: 1599 - DNA, 457 bp, Arabidopsis thaliana
  unsure at all n locations
  Clone ID: LIB22-087-Q1-E1-D5
ncaggaaccggtcaaagaattcccgggccgacccacgcgtccncccacgcgtccgactctgcaagttaaatggtttttctcatggtgtgggagatagagactatgttcctactaaggatgttatatcagcaagtgtcaagcttcctattgctgagagaataccgccatacactacctggatatttttggacagaaatcaaagaatggctgaagatcagtctgtggttggtcgaagacaaatctactatgaacaacatggtggtgagacgctaatatgcagcgatagtgaggaagaaccagaacctgaggaggaaaaacgtgaattttccgagggtgaagattccattatatggttaattgggcaggagtatggcatgggtgaggaagtgcaggatgccctttgccagttgctaagcgtagatgcttctgatatcctggaaagatacaatgagctcaa

SEQ ID NO: 1600 - DNA, 438 bp, Arabidopsis thaliana
  unsure at all n locations
  Clone ID: LIB22-087-Q1-E1-D6
antcccgggccgacccacgcgtccncgaattttcaggtttctctttccgtttgtttgaagaagcttttaagtagaattcataaaatcttgcttagcttctgggtttgatttgtttgtggtaaagttttgattttttttttagtttgagagctggatttgtgattctttctctgggttggtgaagttttttacttgcttcgatcttatagatcagagcttctagcagcgtaaaaaatgcagacgaggtatatggagaggactaatagtatgagagagaagagaaaattggaggaagatgataatcagcagcagcagcaacagcctgagcgtaaaaggccagctcttgcaagtgtaattgtggaagccttgaagatggatagtttacagaggctttgttcttctttggaaccgattcttcgccgagtggtaagtgaagag

SEQ ID NO: 1601 - DNA, 469 bp, Arabidopsis thaliana
  unsure at all n locations
  Clone ID: LIB22-087-Q1-E1-D8
tacgccgcccaggaaacggtcanagaantcccgggccgacccacgcgtcnangcaattcttagtttctcttctatcccctttctgggttttgtttgaaccctagctcgctttggatccagtggttttaagttaaaggtaaatttatcgaaagtaagtagattcctaatggcagcttccaatcattcatctggtaaacctggaggagttttaagtgatgctttatgtagggagctctggcatgcctgtgctggacctcttgtaaccctacctcgtgaaggggaacgagtttattatttccctgaaggccacatggagcagctcgaggcatcaatgcaccaaggtttggagcaacagatgccttccttcaacctcccatctaagatcctctgtaaagttatcaacatccaagcgcagggcagagcccgagactgacgaagtatatgcgcaaataaccttattgccaagaac

SEQ ID NO: 1602 - DNA, 491 bp, Arabidopsis thaliana
  unsure at all n locations
  Clone ID: LIB22-087-Q1-E1-D9
cgganattcccgggtcgacccacgcgtccgattnaatttgccctcttgtttcatgtttggtcctgtcaatcttccctttctttcttctcagctatttgcaacaaagaaggcagactctatgtcatgttggacactattggatttgtacctaaaccccagcaccgatgccccattcccgttgattatgaccctgataaggtgctcctaccaagtgataaaaccgcagatacaattgtcagaaatttgacctacgtaacagaggatgaatcctctaagtctcagtttcctctatttggcggaaacataagctggtctgaacgaagaagaaagcttcaaactgaaacctgagatgaaggtcattgcggattcatgccacgtggtggtgctgaaatgtcatctccnggataaagaatacgttaaagaagtgcanaattgttgttgccacggggaatttccnatgccataatgatgaaacccaaccaanccatcaa

SEQ ID NO: 1603 - DNA, 478 bp, Arabidopsis thaliana
  unsure at all n locations
  Clone ID: LIB22-087-Q1-E1-E4
ctctacgccgntcggtaggcntcanagaattccnagggncgacccacgcgtccncccacgcgtccgacatcttatctgcagttagatttgggacatgttgaaccatgtatttctggtcctaaaaggcctcatgaccgagtgcctctgaaagatatgaaggctgactggcatgcatgccttgacaatcctgttggattcaagggttttgcagtgccaaaagaaaaacaagaagaagttgtgaagttctcatacaacggacaacctgctgagatcaagcatggtagtgttgttattgcggcaattactaagttgtacaaacacgtcaaaccctagtgtcatgatcggagcagcactcgttgcaaaaaaagcttcagatcttggcctgaaggtaaaaccatgggttaagacaagtcttgctccagggtctaaaagttgtcgagaaatatttggatcgaagtgggctccgagagtccttgac

SEQ ID NO: 1604 - DNA, 462 bp, Arabidopsis thaliana
  unsure at all n locations
  Clone ID: LIB22-087-Q1-E1-E6
cgcgntcaggaaaccggtcacagaattcccgggccgacccacgcgtcnnggaagagagagacggcgatggcggctacaggatctggacggtctcaattcatttccagttccggcggtaaccgaagcttctccaattctccactcatcgagaactctgattctaatcagattattgtctctgagaagaagagctggaagaatttctttgcttacttaggccctggttttcttgtttcaatcgcatatattgatcctggaaactttgagactgatctgcaagctggagcacactacaagtatgaattactttggatcatattggtggcctcatgtgcggctttggtgattcaatctctggctgctaatcttggtgttgtcacaggaaaacatttggctgagcaatgtagagccgagtactccaaagttccaaactttatgttatgggtcgttgctgaaattgca

SEQ ID NO: 1605 - DNA, 442 bp, Arabidopsis thaliana
  unsure at all n locations
  Clone ID: LIB22-087-Q1-E1-E8
anctcccgggccgacccacgcgtcnacggacgcgtgggcggacgcgtggggcttgatcataagcaagagcggcttcctcggctttgtcaaatgtcccgagccaaaccctaattccattcctcgttgantctcttatctccgctgcaaatttcccccacggccttttcctcactcctctgtatgatctttcttcatcaattccaaccttttcttcttcttcggagttagaaacgtcgccgttttgaatttcttccttaatcatcatctccggtgactcaaatgagaaaaagtcatcggagtaatcataattagggcaaaagaaggcttgaggttcagatgattgatccaagaaacagctctcgttccataagagtgattcttgtgatgagctccaaagaacttggcagatgaatacatggaagattgggaatantccataagt

SEQ ID NO: 1606 - DNA, 461 bp, Arabidopsis thaliana
  Clone ID: LIB22-087-Q1-E1-F1
gtacgcctcaagaattccaaggtcgacccacccgtccgctttctcacatctactcgatttctgaatcgcgaacgcagcgagcgatccggaatcgagagagagagctaccaatttttccaacttgttcggttccttataaagctgtttactttcccttgcgaattctctctctctctactataaagcaatacccttttctttcttttttggtaacccccaaaccctactttgtccagcgagaaaggaagaggggtttcgtctgattccgctaaatctctaagtctttatctaaagatcatggattccgatgatgatatgcacgatatgggactcggtagattatgattattacagcggcggcacctatgatgacaacgatagtgatgaaactgatttcgggtttggtgaggctgacaccggacgatgccgccatcatccgctcctatcgctctaagagtaat

SEQ ID NO: 1607 - DNA, 443 bp, Arabidopsis thaliana
  unsure at all n locations
  Clone ID: LIB22-087-Q1-E1-C8
gaattcccgggccgacccacgcgtcantacaaatctaagcttctgtcgttgacttcgaaaactgatatctataagtcaaaatccccattctcaatcgctcatcgtcttgtagaactaattgactaaacaatggcggacaacacaggatccgagatgaaatcaggttcgtttatgttagagaaatccgccaagatctttgtcgctggacataggggattggttggatctgccattgtccgcaagctccaggatcagggtttcaccaatttggtccttcgaacccattcagagcttgatctcactagccaatcagatgttgaatctttctttgctacagagaaaccagtttatgtcatcctaagctgctgctaaagtcggtgggattcatgctaacaacacatacccagctgatttcattggggtcaatctccaaatccagacca

SEQ ID NO: 1608 - DNA, 431 bp, Arabidopsis thaliana
  unsure at all n locations
  Clone ID: LIB22-086-Q1-E1-A6
acgcgtccggaaggactaagacatcacgaggaacacgatgggtgaagcggtcaaggatgggagagaagaagtgattcaagcttggtatatggatgatagtgaagaggatcagagacttcctcaccacaaggatcctaaagagtttgtatcgttggacaaacttgcagagctgggagtacttagctggagacttgatgctgataactatgaaaccgatgaggatttgaaaaagatccgtgaatctcgtggttactcttacatggacttttgtgaggtatgcccggaaaagcttccaaactatgaagtgaaagtgaagagctttttcgaagaacatttacacactgatgangagatccgttactgcgttgcaagaactggttaccttgatgttaaaaattcttatgaanccttgggttaagggtattnggtaa

SEQ ID NO: 1609 - DNA, 460 bp, Arabidopsis thaliana
  unsure at all n locations
  Clone ID: LIB22-086-Q1-E1-A8
gtgaaggtcangaattcccgggccgacccacncgtcancccacgcgtccgatacaagagaagcaattagaaaggcttaaccataattagagattcacaaccaaagcaaaatggcatcatacaagctcttccgcattgcttttctagtgtgcctctcttcctctatgatgatcaacacttgctcagcctcacgccgccttctccaacaacaacctcttcctcaaatcccaaatctgcctattccaacaatgggactacctccattgccatcgacgttgccacaaccgtctttaccaactctccccacaatgcccactgcaatgtctccatttccaatgccatcagctttgccacaaccaaatcttcccaccattcccacggcaatgcctccaatgccaactttgccttcatttccaacaacaattccttctccttcggacnaataatccaancaattcctt

SEQ ID NO: 1610 - DNA, 481 bp, Arabidopsis thaliana
  unsure at all n locations
  Clone ID: LIB22-086-Q1-E1-A9
acgcgtccggttancttcgaatccaaatttctgtgtctgcttttgattcacagagaaggagcaggaaagatgttggatatcaatctatttcgtgaagagaaaggtaacaatccggagattatccgagaatcgcaacgccggagatttgccagcgttgaaatcgtcgatgagatcattaagctggacaaggaatggcgtcagcgtcaatttgaagttgatagcttcagaaaggagttcaacaagctcaatangcaagtggcgcagctcaaaattaaaaaaggaagatgcgagtgagattattcaacaaactgagaanaacaaacaagattctactgcaaaaggangctgaaattcntgaagcctaatgctgctttgaaanncnaagttggnngcaggttggnaattttggnccatgattcccggntccattggataanggangangcnaataacctgtggattaacccgttggggggaaaan

SEQ ID NO: 1611 - DNA, 480 bp, Arabidopsis thaliana
  unsure at all n locations
  Clone ID: LIB22-086-Q1-E1-B1
tttaagntgccggtgccgtcaagaattaacgggtcgacncacgcgtccggaatcntcttccctcctccttcttctctctctctcgtttctcaactaccgtctctctgcttcttctgttcccaaaaccggaaactttacttcgtggaattttcccttgtttctgaaatggaagacacaacatttaccaaagtgttcgttggaggattagcttgggaaacacacaaagtctctctcaggaattactttgaacagtttggtgacattgttgaagctgtcgttatcactgataaatctagtggtagatctaaaggctatggctttgttactttttgtgatccggaagcagctcagaaagcttgtgtagatncagctcctgttattgatggaagaagagctaattgtaatccntgctgcttttggngttcaaaanattaaaacctntttcnccaatccaagggnaaatntggggggaaaagggaa

SEQ ID NO: 1612 - DNA, 505 bp, Arabidopsis thaliana
  unsure at all n locations
  Clone ID: LIB22-086-Q1-E1-B11
tacngcccccggaaaatcccgaagtcgacccacgcgtccgaaggaacaaaggtgaggtttcangacacagacagaacaaacaacgaagaaaattcaaaatcttatttcaattcaacgtatactttccttaaattaggaatttggttttcgagaaaattgagatccgaataactatggtgagactcaagacgagtctctgggttcttctccttgccctcgtttcaattcagttaaatggttcgtttggatctgaatcaagtaaagtagcttatgtcacacttttgtatggagatgagttcttattaggagttagggtattgggtaaatcgattcgtgacactggatccactaaggatatggtcgctttggtttctgatggtgtctcaaactactccaagaagttactcaaggctgatggatggnaaagtagaagaagattaatttactggcaaatccaaatcaaagttcancccgaccaaggtccggggtgtttanaccaaacctt

SEQ ID NO: 1613 - DNA, 513 bp, Arabidopsis thaliana
  unsure at all n locations
  Clone ID: LIB22-086-Q1-E1-B12
tttgcctgtgcntaccggcccgganatcccgngtcgacccacgcgtccggganaaagtttatcagtcatacaaatcccgaccaacaacaacaaaaccctaaaatcaagcttcgaaaatgggagagatgatgtacaagctcttcgcttcagcgtcactactaaccctaggattgtatcatctcatctgcactttcttccatctccttaaatctccccaatcctacgccgcgaaacccttttacccttttccacgtctctcctccgtcaccggaaacaaccaccacaatcacaaccgcctccaaaatctaccactgttcatcctcatactctctctattcgtcgctttccttcacgaaaccctaatctccttctactccgattctctcgtcaaaggaagtactcctgttcaccggattctcatnctctcaattccgccgccgtgttcttcctcttcntcatcaatcgccattttanaatcnctcctcccgaatttcaacctcngttaatcccctc

SEQ ID NO: 1614 - DNA, 471 bp, Arabidopsis thaliana
  unsure at all n locations
  Clone ID: LIB22-086-Q1-E1-B2
gtnccggtcaagaattaacgggncgacccacgcgtccncagatgcgattttcttctccttcttcattgtgctcttnnnnnnnnnnnnnnnnnnnnnnnnnnnnnnnnnnnnnnnnnnnnnnnnnnnnnnaagctttcgttttgtgtttctgattttgattcgattttgatgctcatcgaagagaacccttgattttgttgctgtagttcatagagattttacacattttgtggaatttagtggatttatgatgatgggtaggttagtttttgtaatctggctctataattgtctctgtttgctgctactctcgagcttgggtgacgcggatcaggccaacatagattgcttaaggacctttaaatctcaagtagaggatccaaatagatatttatcgacttgggtttttggcaaacaagactggctgggtaaaaccgcaagttcaattggtgtgaccttgttggcatgata

SEQ ID NO: 1615 - DNA, 390 bp, Arabidopsis thaliana
  unsure at all n locations
  Clone ID: LIB22-086-Q1-E1-B3
acccacgcgtccnaccgtacatcactcttcatcattgcttgtatcctctaccaaaacatctgccacctccaggtcctccgtcttgatgaattcgcacgctgcttcgcctctgagatcaaagatttcagttccatactcgccgagcatctcaaaatccgtcgtgaactgaagattgtcagtcaccggttcagacgattcattcttttgtcattgtttttcgtcactgccactcagttcatggcattgctgactaccatcagagctagtgttccctttaatatctacgaagttggcgagctcgcgttatgctccacaagcttggtgtcaggactattcatatgcttgaaaagtgcaacacaaatgactcacaaagctcaatcagtnacgagc

SEQ ID NO: 1616 - DNA, 463 bp, Arabidopsis thaliana
  unsure at all n locations
  Clone ID: LIB22-086-Q1-E1-B6
aacttctccgccgcncggtaaaggtcacagaattcccgggccgacccacncgtccntgctctcattgacgagaagatcctatgtatgcatggtggattgtcaccggaattggaaaacttggggcagattcgggagattcaaaggcctacagagattccagacaatggtcttctttgtgatttactttggtctgatcctgatcagaagaatgaagggtggactgatagcgatcgaggtatctcctgcacgtttggagccgatgtagtcgctgactttttggataagaatgatctcgatctcatttgcagaggccatcaggtagtggaagatgggtatgagtttttcgcaaaacggaggttagtcacaatattctcagctccaaactatgggaggagagtttgacaatgccggtgcattattgagccgtggatnaatctctcgtttgctcctttgagantctgaa

SEQ ID NO: 1617 - DNA, 514 bp, Arabidopsis thaliana
  unsure at all n locations
  Clone ID: LIB22-086-Q1-E1-B9
ccnatctcctacgcccccgganatcccgaatcgacccacgcgnccgcacagttaaaccctcacaaaatttcctcaggactaataatctgcgatcgatcgtcgttatgataagtctctaaagaagattgatgattctggattacattatcatgggaggagcttgttcaaggaagagagatcaacaagttgagatattttaaacagaggtgtctctggaaaatatagcaagagttcaagttcgaaatggttagctacttcgctctctaggtctggctccgatgttaaacggaagaatggagaatgcccgtcgcttatggagctctgtgtccgcaagatacaggaggacattgatagatataccaagttctctgacctacctagagatatcagtcagcagatttttgatgaattggnttantcccanaagttaactttaaaagtccccttgaagcnattcnggaactgtngaaatccaaggatcttaccttgggggaataaccctgggagtttaatg

SEQ ID NO: 1618 - DNA, 523 bp, Arabidopsis thaliana
  unsure at all n locations
  Clone ID: LIB22-086-Q1-E1-C10
gaactgtttcccttccctacngcnccgganntcccgangtcgacccacgcgtccgaaaaaaacttcagagcggtgatcagattcaccgatttttctcaaaatgctaatcaaatcccaaagattgactcttttctctcctctcttgtccaaaacaagacggatcccggttaactcccaccaaacactggtcgcagaatcggtgataactcggagaacactcggtgcgatcaccgcaactccgagttttcataaaaatccggtggtgattcgacggaggatcaaattagagagagttacgaggaactgcgtcagaattgatcggnnnnnnnnnnnnnnnnnnnnnnnnnnnnnnnnnnnnnnnnnggatctggtgaaacagagcatatgggaacaagatgaaaagagatagtgaaagtttcacaangtccggcgaattgggatgtngatttnttggaccgtttgattganntctcatccgacaacggtccgtcaatcngggcaaaaggaagctccatcgaaantc

SEQ ID NO: 1619 - DNA, 439 bp, Arabidopsis thaliana
  unsure at all n locations
  Clone ID: LIB22-086-Q1-E1-C2
gccggtcanaaattaacgggncgacccacgcgtccnttcaccactttgcagggttttagattcttgcactcttggaggttgagcttagttcgacatgaaggtctttatctaatctccactcgctggcaatgaagatgagagtggaaaccgcacttgcgatccttttggttctcatatcaattcaacaatgttatggaggtgtnagcaactatacatgtacgtgtttctcttcgggcaatcgaagtgatatcctgnaatctaactgttccacatcatgtaattgcagaccagacagagatcaatgggtatgtttgtgtcctgcaaatggatttccggttatagccattggtggttcaaattcgtcatgcttcacttcatgcaactgctctgctggtgctacaaaatcttcaaaanaagcaataattaaccganggaaacc

SEQ ID NO: 1620 - DNA, 472 bp, Arabidopsis thaliana
  unsure at all n locations
  Clone ID: LIB22-086-Q1-E1-C3
gtgccggtcanagaattaacgggncgacccacgcgtcancgcttgtgttccttaatcctccttggatcatcctcctaattactcagtgatcatgcatagattccttgtaaagctatcttcttcttcttcaccattctctaatcaattgagaagcttgaagaaccagcgtctgattctccctctattaccttcttcaaaaccttttacctcctcctctgtgtcaccacctccaagtcccttgaacgcttctaatcgatttgggtatccttattccgccgatttgtttcgaaatttgtcacctttaaacccaaattcgaggattttaggagtcaatgggattactagtagtaagatgtatcaagcagtgaagcggtcaagagaatcgattgaagtacgaagttccgaatgtcngaactggaccgggcggtttaacngncgnnaaacgaatggaaaaaatggtccaagggaaaan

SEQ ID NO: 1621 - DNA, 460 bp, Arabidopsis thaliana
  unsure at all n locations
  Clone ID: LIB22-086-Q1-E1-A5
ccgtaaaggtcanagaattcccgggncgacccacgcgtccncgttaaagctccacgccttgtcccaatttcctctttggttctttccttctgggcttgttattgttgtttctcgaaaaagaagaagaagcgatggtattgggattttagggattattgcggtttgttgtatatatatatatagaagctgagggattttgtgttgtgaagaacatcgaatcctgtttttttccgtaagaaagttcttagatttctccaagtgaaagaagatgtcatcagctggtgttgcgttaagtccggttcgtagcgagccattgattatgcctctggttcgtgccaattcttgtcttgattcttatcctgacgacaccatcatgatttaccttacacttcctggatnggtgataccaatgcnaatgnctgnatcncaattcaatngaattcggttaancttcggatca

SEQ ID NO: 1622 - DNA, 448 bp, Arabidopsis thaliana
  unsure at all n locations
  Clone ID: LIB22-085-Q1-E2-G2
ggccggtcanagaattaacgggtcgacccacgcgtccngctgatgcgatttgctctgttttcatggcgggcgcctcatcaccggcgagtttgagagcttctcgtagccgtcggctggggaaggagacgaatcgatccgatctattcaaaaaacctgcagttccattcgcattcgcgctaattcttgctgatgcaatcctagtcgcacttattatcgcctatgttccatacacgaagatcgattgggatgcttacatgtcacagtgggtttctcgggggagagagagactatgggaacttgaaaggcgatacagggccattggtttatccagcaggtttcctctatgtttactctgcagtgcagaacttaactggaggggaagtctancctgctcagattctttttgggtgttctctacattgtcaatctggggatcgtcctgatnatc

SEQ ID NO: 1623 - DNA, 444 bp, Arabidopsis thaliana
  unsure at all n locations
  Clone ID: LIB22-085-Q1-E2-G3
ggtcgancacgcgtccgatcctcttctctctctctcaatctcaatggctctgttttaaaangggcaaattagagagatttctccttcaataacaaaaaatcgccagctttatctctctctttttcacatcccatggctagatggtgacgacgattcacgcataaactagggttcccccacaaatcatcttacacgtatcctctattccttccttcctttctccgtcatcatcatttttcccaccgacaacaatctctcggagtttgggtattattacttctctcatcaaccaattgtaccactagatctcccagattccttcattatctctatcaataatggcgttgaagtctanttctgctgatggtaaaaccanaaagctccggttaaattctcattgngttaatttaagttggcntcntttanattttgggaacaatggca

SEQ ID NO: 1624 - DNA, 440 bp, Arabidopsis thaliana
  unsure at all n locations
  Clone ID: LIB22-085-Q1-E2-G4
cggggncgagccacgcgtccaaacaaagccagcgananagacanaggtcagaanatttgatttttcgtantcctcttcaaaggcaaacaatttacacagctatatatatatttttagggtttttgagtatctcgcgaggttttacatanatttctccattatggattcgatgatgaatcagaagactgttttggctgtgacggatgatgtggtgttacctgttagctctgttttanctataatgaaagagcttggaaaggaagtgattgagagttttgatcctctgattattactcaagcatccacaatnaatcagtttcctttggatgcttcctctgtggangcggtatttagccatttccaanacatctgatttccaagtgataaaatatgtggtgagttccaagaatcctgangcctggcggcaccggtttcggtgt

SEQ ID NO: 1625 - DNA, 442 bp, Arabidopsis thaliana
  unsure at all n locations
  Clone ID: LIB22-085-Q1-E2-G7
ggtcgacncacgcctctactttnagtcanncgnagagttcaaaggttgagccaagtggggaaacagatggtgacttgaaaagaaaacagtctgaggtagtctccgaggaacaaaaccgtcctaacaagtccccaaggagctttgacaaaccatcaccgagcaataaaaagggcaatggttttaagaaacccaagagcaagaaggtggactggagcgttttgaggccaccaaaacctcaaaccaaatagggtttaaattagctaactacagcaatctatatgctattagttacatcggttcatatgttctagtanatcgtttgttgctctgtctgtatcgtcattcccgtggtgttgcaacccgttggataaattatanccaaaagttttgaanttgtttgggttaaaattgcnctngttgtctaaaanaaaaaaaaaagggc

SEQ ID NO: 1626 - DNA, 479 bp, Arabidopsis thaliana
  unsure at all n locations
  Clone ID: LIB22-085-Q1-E2-H1
acgttaccttccgggccggtcaaaattaacgggtcganccacgcgtccgctcctctttgttgtaactgccgtcgctaccgacactcgtgccgttggagaattggcaggtatagccgttggagccacggtcatgctcaatattctagtcgcagggccatcgactggtggatctatgaatcctgtgagaactctaggaccagccgttgcatcaggaaactataggtcactatgggtgtatctggtggctcctacacttggtgccatatctggtgcagcggtctacacaggtgttaagcttaacgatagcgtgactgacccgcctcgtccggttaggagctttcgtcgttaagtgagtgagagacttgtttacaagtcntttgcnttgtataaatttactgtatgattatgtaatgatatgaaaaagctttggaagcntgttgtnaagaataaaangggatgttgactaataattccacnca

SEQ ID NO: 1627 - DNA, 446 bp, Arabidopsis thaliana
  unsure at all n locations
  Clone ID: LIB22-085-Q1-E2-H12
ggggccgaggnacgcgtcaanccacangtccgatggaagagaagaagaaggagcttgaagagttgaagtatcaatcaggttttggtaaccacttctcatcggaagcaatcgccggagctttaccgttagatcagaacagtcctcttctttgtccttacggtctttacgccgaacagatctccggtacttctttcacttctcctcgcangctcaatcaaagaagttggntgtaccgggttaaaccatcggttacacatgaagcggttcaagcctcgtgtaccatgctcanaagaagcttgtgagtgaagtttgatgcatcaaatagtccgtacgaatccgactcatccttcngtgggngacctnagcgatngtcctgatntcgggngtttgattttcgnntgggtgggggttaacttaccanttttggtgggaagctnggaaagctc

SEQ ID NO: 1628 - DNA, 477 bp, Arabidopsis thaliana
  unsure at all n locations
  Clone ID: LIB22-085-Q1-E2-H5
nctttgccgccgcccaggtacaggtcanagaattcccgggncgacccacgcgtccggtcaagtcaacaagaaaccgggtttgtctacaatggcttcgagcaagcagatctttttattgatgggatcgccaaaatactacctgatgggcttttgcagttgacaaatactacagagttgcaaatgggtcatgctttcttcaagaagccgtttgattttgatccatcttcatcactatcgttctatacacattttgtgtgtgcgcttgtgcctcctaagttgggagctgatggtggccatgggattgtctttgttgtatctccttccattgatctctctcatgcatacgcaactcagtacttgggggtcttcagcaacttaacaaatgggacttcctcttcacatctgctanctattgagctcgataacgttaagacatnanantttaatganctgganaaagcctcatgttggtattga

SEQ ID NO: 1629 - DNA, 459 bp, Arabidopsis thaliana
  unsure at all n locations
  Clone ID: LIB22-085-Q1-E2-H6
gtcaaggtcanagaattcccgggccgacccacgcgtcangagacgaactctttttctttctcgtgacgaatgtttctgtctagaagcttttaaggattaagactctccaaaattttgacgccgtgttattctcttcccgtctctcatggatccttcaagacgaccaccgaaggactctccttacgcgaatctattcgatctcgagccgttgatgaagtttagaattccgaaacctgaagatgaagttgattattatgggagtagtagccaggatgaaagtagaagcactcaaggtggggtagtggcaaactacagcaatgggtctaaatcgagaatgaatgcgagctccaagaagagaaagcggtggacagaagctgaggatgcagaggacgatgatgatctctacaatcaacatgttactgaggagcactaacgattaaatgccttgggggagcatgt

SEQ ID NO: 1630 - DNA, 418 bp, Arabidopsis thaliana
  unsure at all n locations
  Clone ID: LIB22-085-Q1-E2-H8
ggagaangaaagatagaagatcatggggaagatagaggagtacaagccggtaatggcgatgacgatgattcaactatgttatgcaggagtgactctctttgcaagagctactttggttcatggattaagccctcgggtttttatcctctataggcaagcctttgccaccattttcatcttcccatttctttacttatccaggagaaaatcaaagatagctatatcttctttggatctaaagagcttttctttaatattcttggtctcgcttataggcattacaatcaatcaaaatctatatcttgaaggtctttacttaacttcatcatcaatgggaagtgcagtgggtaacatcatccctgcaatcaccttcctcatctcaattctcgcccggataccaagaaactgaaatctccga

SEQ ID NO: 1631 - DNA, 449 bp, Arabidopsis thaliana
  unsure at all n locations
  Clone ID: LIB22-085-Q1-E2-H9
ggtaccggtcanagaattcncgggncgacccacgcgtccntcaagatctgacattgttatgtgcttgaattcttcatcaagctcgtcagaaaaacaccaaaaggtttcaaatttatctgaaattcgtgaaaccctaaaaagggttatgtcaaggtagaagagacagaacaaagatagatatggtaaggaagcagaagtacgggaaggtagtgttggtttcttgcatcgcgcttctagcaaccggactcattgccgactttctctgggctacttctcatcgattctcctccgccgcaatctccgccggattatctctaccttcttcacttaccaccgtaatcgttcctggccaggagaaagatacaaagaagaagaangatagtgtgaaggaaaggaaactgtctaatacgtttcaaagatttgcctgctccctgaantgaaatgggaaa

SEQ ID NO: 1632 - DNA, 483 bp, Arabidopsis thaliana
  unsure at all n locations
  Clone ID: LIB22-086-Q1-E1-A1
tttacgccgnccggtaccggtcanngaattcacgggtcgacccacgcgtccngttttttttcttccttttcctgatctaaattaacttatatttcttagggtttcacttcttgaaacatttaatcagaattaattaacctctctagggctttcatggcgaatccatggtggacaggacaagtgaacctatccggcctcgaaacgacgccgcctggttcctctcagttaaagaannnnnnnnnnnnnnnnnnnnnnnnnnnnnnnnnnnnnnnnnnnnnnnnnnnnnnnnnnnnnnnnnnnnnnnnnnnnnnnnnnnnnnnnnnnnnnnnnnnnnnnnnnttgagtggagacgaccacgagccacgtgaaggagccgtagaagcccccacgcgccgtccangtggaagtcctgccgggtccaagaacaaacccaaaggccacgttttcggtcacccngnattccccaaagggcncccaaaaccc

SEQ ID NO: 1633 - DNA, 487 bp, Arabidopsis thaliana
  unsure at all n locations
  Clone ID: LIB22-086-Q1-E1-A11
ccgatatcccanatcgacccacgcgnccgggcanctgcaanggcttctcatgtttcgacggctcgatcaccggctctttccttctcttcttcgtcttcctccttcttccccggtactactcttcggagattctccgccgtttcactcccttctccggctctccctcgccttcgtgtttcatgtcaagcctcctccgtcacttcgccttcttctccttccgatgtcaaaggaaaatctgacctgaaagactttctggcaatagatgattttgacacagccaccattaaaacgattttaagacaaggcttcagaggttaaggccttgctgaaatcaggggagagaaattatctaccttttaaagggaaatctatgtctaagatcnttgcaaaaaccttccatgagggaccncnggttttcttttgagaacagggttttttcttgcccngtggncaancgtttnnancnagggtcccaattaaaatcaaa

SEQ ID NO: 1634 - DNA, 451 bp, Arabidopsis thaliana
  unsure at all n locations
  Clone ID: LIB22-085-Q1-E2-G11
gtaccggtcaaagnattcacgggncgacccacgcgtccaaaaagatgagcgacggagacgacgctgctagacgccgtaccgcggcggtgactgattaccggaagaagctccttcatcacaaggagctcgaatcccgtgtccgaacagctagggagaatttaagagcagctaagaaggaattcaacaaaactgaggatgatttgaagtctcttcaaagcgttggccagattattggagaagtactacgtcctcttgataacgagcgattgattgttaaggcaagtagtggccctcgttatgtggtgggttgtcgtagcaaggtggacaaggaaaagcttacttctggaactcgagttgtcctggatatgactacgctgacaattatgcgagcccttcctccgtgaagttgatcctgttgtttaaaacatgttgcatgaagattcaaggcaac

SEQ ID NO: 1635 - DNA, 459 bp, Arabidopsis thaliana
  unsure at all n locations
  Clone ID: LIB22-086-Q1-E1-A2
ggtgccggtcanagaattaacgggtcgacccacgcgtccnaagaaaaccatttgttttcttagagagagccaagaatattaaaagagatatagagaaaagatttgctttaataatgccaacgtcgatacagtttcagagatcctccaccgccgcagaagcagccaacgccaccgtaagaaactatccccaccaccatcagaaacaggttcaaaaagtgagcctcacgcgcgggatggctgatgtgccggagcacgtggagctttcccacacgcacgtggttggtccttctcagtgcttctccgtcgtggtacaagacgtggaggctccggtttccacagtctggtcgatcctaagccgcttcgaacaccctcaagcgtacaaacacttcgtgaaaagctgccacgtgggttatccggagaacngtccaaaaaggtnggttcggtaaaaaaggtcaantt

SEQ ID NO: 1636 - DNA, 439 bp, Arabidopsis thaliana
  unsure at all n locations
  Clone ID: LIB22-086-Q1-E1-A3
cgtccngggcgattgagcgaagaagaaaccttcgttctctctcggaaatgacgaagaggaagaaggaagtaatagatgtcgattgctccgagaagaaagattttgtgattgattggtcttccgctatggataaggaagacgaagttcccgagctcgagattgttaataccaccaaacctactcctccgccaccgccaacgtttttctccgacgatcaaaccgattctccgaaactcctaaccgatcgtgacctcgacgagcagctagagcgtaaaaaagcgatcctgacattaggtccgggcttacccgacaagggtgagaaaattcgactcaaaatcgctgatccgaagaggagaaacancgtanagttttaaaaaggnccaaaattggngggggcaaaaattncaaaggncttntcttccaanaaccccagggttca

SEQ ID NO: 1637 - DNA, 451 bp, Arabidopsis thaliana
  unsure at all n locations
  Clone ID: LIB22-085-Q1-E2-D8
actttgncgccgcccaggtacaggtcaaagaattcccgggncgacccacgcgtccnagaaaaataaataaaagatctaactttgacggctctcttaatcttactcactccggttttaagtcggaatagactgatgggagcttgatggttattgttagatcagatgtggatttaaagccttcgctgaactaacaagtctatggaagaagcaaagacccttgttttacactgtatgttgtgaggaatttgtctgattttgggtgataaaggtgaagtctttgagtttgtaattttgagataagattggatggtgggaagagaggatgcgatggggaatgatgaagctcctcctggttctaagaaaatgttttggcggtctgcctcttggtctgcttcacggactgcatcacaagttcctgagggtgatgagcaaagcctgaacattccgtgtn

SEQ ID NO: 1638 - DNA, 453 bp, Arabidopsis thaliana
  unsure at all n locations
  Clone ID: LIB22-085-Q1-E2-D9
cggtagcggtcaagaattcacgggncgacccacgcgtccnactaaatccaattgaccgaataaaatccagtaaaccgatccataaaccaaaattggaagaaaacaatgcctgtttaataggtgttgaaactttgctgaaaaaaaacgaagcgagcaccctctaaaatgccttcgatttctctggcgccattgatttagttttctctctctgactacaaagtatccattcgttcaaaccagtttcttcccattttcgatttctgtcaaaattcaccaaccaactccaaaaactctgttattgaataagtttcttgatcttaaaacaaacgatctcaaagaatggcacgacacgatcctaatccatttgctgatgaagagatcaatccttttgcgaatcatacaagtgttcctcctgcgaagcaactcttatctcaagccacttccaacgggaaa

SEQ ID NO: 1639 - DNA, 407 bp, Arabidopsis thaliana
  Clone ID: LIB22-085-Q1-E2-E10
acgcgtccgcccacgcgtccgcccacgcgtccgaaaaaaagggttaggtggatctctcatgaaatcggtggagctcccccatatcttttttaaatagctttcttcttttggccccttacccagagatagattcttatatactactgagaatcttcaatttctgcaacttttgtatctcttcctgatggagtcttcaagtccccaccatagtcacattgttgaggttaatgttggaaaatctgatgaagagagaataattgtggcgagtaaagtctgtggagaagcaccatgtgggttttcaagattctaagaatgcttccggggatgctcacgaacgctctgcttctatgcggaagctttgtatcgcccgtcgtgctgtgtccagtgttcatgaattgttgaaattg

SEQ ID NO: 1640 - DNA, 442 bp, Arabidopsis thaliana
  unsure at all n locations
  Clone ID: LIB22-085-Q1-E2-E11
gtcanagaattcacgggtcgacccacgcgtccncccacgcgtccggtctctctctctcgggtcaaaattagggtttcgtttcactatccagagtgtatacaaaggttgttgtggagcttttatcagatcacaggaataagatggaggtatttggaaaatctcccatggttgttacatctgccaatgttatttacttgtctgcaattctgggtcgcgattgcgatggacacaaatgtgattggaaatgtgagaatgaaaatgtttgtgggaatatgtatcgctgcaaactaactggactaactcatgtctgcgacaagaactgtaaccagcggattctctatgataaccatagctctttgtgccgagccagtgggaggattttccctctctcgtccgtcgaagaacaagcggttaaaggtgttcgggaggaaacttgacnccg

SEQ ID NO: 1641 - DNA, 471 bp, Arabidopsis thaliana
  unsure at all n locations
  Clone ID: LIB22-085-Q1-E2-E2
acgttcactntgccaggccccggtccaagaataaacgggtcgacccacgcgtccncccacancgtccgtcnacttcctcatctacctcggggacatgtggtcagagtccaagtcctttgagaaacgtcagaaggaacacgacganaatgtcaagaaagtcatcatnaaggcttaagggtagcggatgcttccaaggacgggcttgtctgcactgctcgtaagccctggatcnctgttggaatgaggaacgttgactacaanagagcccggcatttcgangttgacttggggganttccgtaacatccttganatcaacaagganaagatgactgctatagtggagccncttgttaacatgggacagatttcccgtgctaccgtcccaatgaacctgtctctcgctgttgttgctgagcttgatgaccttaccgttnggggacttancaatggatatggaattaanggaact

SEQ ID NO: 1642 - DNA, 463 bp, Arabidopsis thaliana
  unsure at all n locations
  Clone ID: LIB22-085-Q1-E2-E3
ggcccggtcanaaaaaccgggtcganccacgcgtccaatttcctctgttttgaagtcgctgcttctgcttcttcatcttgtcttcttgattcagcagcatgttgattctgcctctatcgtcaagtttcttcctggttttgaagggtctcttccctttgagctcgaaaccgggtatattggtattggtgaggaagaggaagtgcaactgttctactacttcatcaagtctgagaggaatccaaaagaagaccctcttcttctctggctaagtggaggacctggctgctcttccatctctggccttctttttgagaatgggcctctggctatgaagctcgatgtttacaatggaactctcccttctttggtccctactacatattcttggacaaagacttccaacaatgaatattcttggatnagcccgtttgnactggcnttcnccaattcaagaactcaacaa

SEQ ID NO: 1643 - DNA, 410 bp, Arabidopsis thaliana
  unsure at all n locations
  Clone ID: LIB22-085-Q1-E2-E4
anaananngataganaaaaaaaatgggaggcaaaggtgtgatgatggtggcgatactttgcctttgggcactctctgcaacatctgaagcagtaacagangctganccaggtttgatnatnaacttctacaaggacacgtgtcctcaggccgaagacatcgtccgtgaacaagtcaaactcctctacaaacgccacaagaacaccgctttctcttggctccgtaacatcttccatgactgcgccgttgagtcatgtgatgcgtcgcttttgctggattcgacaagaaganagctangagagaaagaacacgacaggagcttcggacttagaaactttaggtacatcgacgagatnaaggaaactctcnaaaaggantgtcctggtgntgtcccaangttcctgaaaattc

SEQ ID NO: 1644 - DNA, 479 bp, Arabidopsis thaliana
  unsure at all n locations
  Clone ID: LIB22-085-Q1-E2-E5
ttactctcccgctcggtacangtctcnaattcccgggncgacccacgcgtccntcttgtttacgtncaggacaacgtcgggagaggctggggttacgggatctctgccgcgactatggtggttgcagccattgttttactctgcggaacnaaacggtaccgtttcaagaaacctaaaggaagcccttttacaacaatatggagggttggtttcttggcttggaagaaaagaaaggagagttaccctgcgcatccaagtcttttgaacggttatgacaacaccacggttccacacacagagatgcntaagtntttagacaaagccgcaatttccaagaacgagagctctcctagctcgaaggacttcgaagagaatgatccgtggatcgtttcgactgttacacaagtcgaanaantgaaactccgtgangaanttggtaccattttgggccannaaaaaatccttttcngggacaattt

SEQ ID NO: 1645 - DNA, 435 bp, Arabidopsis thaliana
  unsure at all n locations
  Clone ID: LIB22-085-Q1-E2-E9
aattcacgggncgacccacgcgtccnctctttttttttttttggtgtcacgaaaacgaacgaatcagtgtcggctcttgggttccgaacaaaaacaacattgtacgtcggatccaaaaaacgcgcgttatataaacgcttaatttctccaggattcttcttctgcttccgccattgctcgaaaatcgcgtcttctgacaatgtgctgaaactgagtcatcgtccgagttagcaaagtgaaacttcgaagtttctcttacactaatctcaggtttgggattttgtaagaaaccgcgtttacaaaatgttcaagttgaagcaatggttgatttatttggtgtgttcgttaagtaataatgaacacagaaggactgtttgtcaatattacatttgttcgaaacgcaatcgctaaaggggccgtttgtttaaatggaaa

SEQ ID NO: 1646 - DNA, 474 bp, Arabidopsis thaliana
  unsure at all n locations
  Clone ID: LIB22-085-Q1-E2-F3
ctgntcgggcccggtcacaaatacccgggncgacccacgcgtccngttcctttaatccgtaaaaaaaaacaaaaaaagttttgatttttctctgtgagtttgagtagtagtaattaatagaaacaatggaggttgattcaagcaaggatccgaaagtctaacgggtcaaaaccaaaaaattccggatggagtcggcacgacttgtgggtgactacgcacttggcccgagaattgggtctggttcgtttgcggtggtgtggttagcgaagcatcgatcttctggtttagaagttgccgtcaaagagattgataagaaacttcttagccctaaagtaagagataatcttcttaaagagatttcgatccttagcacaatcgatcatcctaatatcatccgattctacgaagcaatcganactggagataaggataattcctggtgttggantaatggtattggaggggatctgccng

SEQ ID NO: 1647 - DNA, 478 bp, Arabidopsis thaliana
  unsure at all n locations
  Clone ID: LIB22-085-Q1-E2-F5
tantcgccgcggcggtacaagtcacagaattcccgggncgacccacgcgtcancccacgcgtccgcggacgcgtgggtaaaacacaacccaaaaatggagttactaacgacggtcgcgagctttttcactccgacgactcttttcctccttcttaatcttatgatcggtacaatcgtcgtaacctctcgactcgggtcaggttcaagaaaacattaccagcatcacgatggattcgggtcaggtcatgctccggctccgttagctagagctccatcgattatcgaccgagtcaagtccatcaattttcatctctacaaatttcctcatccagaaactgagcttttctcgatgacagctcaccacgacataatcgggtcggatcttcatgtttacccggatccaaatccggctccgttacaacgtgctccttctcttttggattgggtcaaatncaacaacaaggtcctaattcaagtt

SEQ ID NO: 1648 - DNA, 476 bp, Arabidopsis thaliana
  unsure at all n locations
  Clone ID: LIB22-085-Q1-E2-F6
taactttccgccgnacaggtanaaggtcacngaattcccgggnccgatcgttggccncctgtttccgttttactcgacatcgttccgacgacttttgacctggaatcgacgcagtgacttcaattcaactattgcacttggtttgttggcaatggacaaaggagcacctcctagtatttttgtgaatgatgggtcattcatggaaagattcagacagcttcaacaggagaaagataaagacaaggataaggttgtccaagttgaggattctaagccggtgaagattatatcaaatcccaaacctgctgctaataaaatttccattggattaaagcccaatgatgcccagaagaaaggtggtaagcttgctttcagcttgaagcaaaagtctaagcttcttgcacctcctgtgaagcttggtacagaagaagatgaggatgatgangatgttaaacatgaacaangcttggattcgt

SEQ ID NO: 1649 - DNA, 469 bp, Arabidopsis thaliana
  unsure at all n locations
  Clone ID: LIB22-085-Q1-E2-D7
cgcggnacggtacaggtcanagaattcccgggncgacccacgcgtccnaaaccctcctctcttcatcgacatctctctttcactgcttcaatggcgtcttttgagcgttttgacgacatgtgtgacctgagattgaaacctaagattctccgaaaccttctctccgaatatgttcccaacgagaagcagcctctcaccaactttctatcactctccaaggttgtatcaaccatctccacacacaagctcttatctgagtctcctccagcttcaattgaccagaagcttcatgctaaatcgaaatcagccgttgatgattgggttgctagattatcagctttgatttcttctgatatgccggataaaagctgggtgggtatttgtttgattggagtaacatgtcaagaatgtagctcaaattgtttccttaaagtnnaancccggttnggtttaacagttattatcacat

SEQ ID NO: 1650 - DNA, 462 bp, Arabidopsis thaliana
  unsure at all n locations
  Clone ID: LIB22-085-Q1-E2-F9
cnccacgcgtctcggtaccggtcacnaattcacgggncgacccacgcgtccncttcttctttaacgtttatactttatatacatcgaaagcatttcttctttgtccgttcacatcattttcgaatttgtgttttccctanaaattgtctttttttttttctttcttatagagaaaatcaagaaaatgtaaaaaagattgatatatttatttattctcgttcaaatgaatcactctttatttgactcgttagtccatgtctcgtctcactctcttaatctctatttcctctcanatctctcaaaaagtgtagttttgtgacanaaactgttttttaaagttagctataagaagatgaggaagatcatagggtttagaatcgggagacgagtctcaagatggatctttcgcaaaanccggattcaacgttcangatacnaccgggatacactcgatccaagcna

SEQ ID NO: 1651 - DNA, 407 bp, Arabidopsis thaliana
  unsure at all n locations
  Clone ID: LIB22-085-Q1-E2-G1
tttgtgagtgaagagatttagagtaatcatgggtttaactcgaaatttcattttatggattcttttgtcatctctcttcacggcgattcaactaacgtcgtctcaacgcaacactccaccaccacgctctaaagacgccgatctctgcaacggcgtgttcgtttcctacacttacttaaccggtaccaagattaaaccaaacgacacgaagaaccagccgtaccggttcgaatcagagatcacggtcctaaacaacggccgcgacgagcttaaatcgtggcaagtctttgttaaattcgcccaccgcgagattcttgtttcagcgaccaacgctgttctctctgacggttctaacctcccggctaacgttgagaacgggaaaatcctcgcccggggtttcaancggg

SEQ ID NO: 1652 - DNA, 428 bp, Arabidopsis thaliana
  unsure at all n locations
  Clone ID: LIB22-084-Q1-E1-C7
aaaaaatatataccaaaataaaagannnnnnnnnnnnnnnnnnnnnnnnnnnnnnnnnnnnnnnnnnnnnnnnnnnnnnnnnncgataaatttttgttgaggaagaatttttgttgtaaagagagtttaattaaattatgccttcaatagaanatgagctgtttccgtcaanccgggtaaattcaaaattgaccggtcaaaccgtcagctccaccgttgtttcgcttctacgagcaccatgtttctttgggctctcttcctcatcgctctcaccgcttcntacttgagtttccanagcttccgcgantccggtagccgttatctaanccgcttcttggggcggcatccaagtgggagaaacaggttcgtacttccgctcaagatcnatcgcctccnggcgggatctccgttccttgttaccgggggcn

SEQ ID NO: 1653 - DNA, 422 bp, Arabidopsis thaliana
  unsure at all n locations
  Clone ID: LIB22-084-Q1-E1-D10
aaatcgaagcgtcggctactggaattggtacatctggaaaccctccggcgtctaaatcggcgattgagtctttacctagagtcgaaatctcggattgccacataggctcggaggctaattgcgctgtttgcacggagattttcgagacgganacggaggcgcgtgagatgccgtgtaaacaccttttccacgacgattgcatcgtaccgtggctatcgattcgaaactcttgtcccgtgtgcanattcgagctagcttcaaagccctaatcgacggagcaanaacnncnaggangataaccgccgntggggatgacgatttggagacttcccggtggnggattcnncgtaaggaggtttaacccagcaaatgaaganaccgnccatganaagttttgccaagtggggtttaacagtaaantg

SEQ ID NO: 1654 - DNA, 471 bp, Arabidopsis thaliana
  unsure at all n locations
  Clone ID: LIB22-084-Q1-E1-D12
tacgccgccggtaccncgtcaaaaattcccggggtccgacccacgcgtccgancatcatcaaggatcgaaaacattanntagctagttaagaggagagaganagagatggngatgaacattangtttccagttatagacttgtctaagctcaatggtgaacagagagaccanaccatggctttgatcgacgatgcttgtcanaactggggcttcttcganctggtgaaccatggactaccatatgatctaatgggcaacattgangaggatgacaaangaacactacacganacatatggaacaaaagttcanataaatgcttcgttccaaaggtttagataccctcgagaccgaagttgaagatgtcgattgggaaatcactttctacctccatcatctcnctcaatctaacctatacgacatccctgatatgtcaaatgaataccgattgggcaattgaaggattttgg

SEQ ID NO: 1655 - DNA, 415 bp, Arabidopsis thaliana
  unsure at all n locations
  Clone ID: LIB22-084-Q1-E1-E11
ggagtctctatcgtcgtcgtatccaaagctcttcaatggagaccgatctcaagtcaacctttctcaacgtttattctgttctcaagtctgaccttcttcatgacccttccttcgaattcaccaatgaatctcgtctctgggttgatcggatgctggactacaatgtacgtgganggaaactcaatcggggtctctctgttgttgacagtttcaaacttttgaagcaaggcaatgatttgactgagcaagaggttttcctctcttgtgctctcggttggtgcattgaatgggntccaagcttatttccttgtgcttgagngatattatgggataactctgtcactcaccgtgggtcaaaccttgctggttcagaagttcctcaggntggtaanggttgccatcaacgattgggatt

SEQ ID NO: 1656 - DNA, 433 bp, Arabidopsis thaliana
  Clone ID: LIB22-084-Q1-E1-E7
acgcgtccgctcatttctcgttcttctgattgatagatcgctcggaacttggaaagcagcgtaatcggtagggagtgatttgagttttggtgaggatgtctatggttgatgagcctttatacccgattgctgtgcttatcgacgagctaaaaaacgatgatattcagcgtagattgaactctattaaacggctttctatcattgctcgtgctcttggagaggagaggacaagaaaagagttgattccatttcttagtgagaacaatgacgatgacgatgaggtgcttttggctatggcggaagagttggggggttttattctgtatgtaggaggggttgaagtatgcatatgttctgcttccacctttggagactctatccactgttgaggaaacttgccgtgagggagaaagctgtggattcactttgtaga

SEQ ID NO: 1657 - DNA, 410 bp, Arabidopsis thaliana
  unsure at all n locations
  Clone ID: LIB22-084-Q1-E1-F11
caacaccatccaaccaccacctccagagcaaagaannnnnnnnnnnnnnnnnnnnnnnnnnnnnnnnnnnnnnnnnnnnnnnnnnnnnnnnnnnnnnnnnnnnnnnattctgttggttttgcaatggtttggaggttcgttaatggcgtcatagactcgggagattaagggagaacaagtactctgcatcttctggatttctcactatttctccttctctagaggaataggcgagaaattgagattaataaaaaggggtgttttttggttctccttcgtttgtataaagcctgccgcttcttaaggttctttggaaattctcaagtgatggaggaaaatctggtttacttcgcatgagctattaacgaaatttcatcatgattgtctcactgtcacacttgtgggagtat

SEQ ID NO: 1658 - DNA, 428 bp, Arabidopsis thaliana
  unsure at all n locations
  Clone ID: LIB22-084-Q1-E1-F12
acgcgtccnaagaggccaaggtcatagccaagaaaccgggagtggtttcagtttttcctgacccacacttccagcttcatacaactcattcatgggactttctcaagtaccaaacatcagtaaaggtcgattccggtccaccttcatcagcctcagatggatcatatgatagcattgtcggaattcttgacacanggatatggccagagtcagagagtttcaatgacaaagacatgggtccaattccgtctcggtggaaaggtacatgcatggaagcaaaggacttcaagtcttccaactgtaacaagaaagatcattggagcaagatactacaaaaatcctgatgatgattcagaatactataccacaanggatgtcatcggtcacggttctcatgtgtcctccaacatagctggatctgccgttgg

SEQ ID NO: 1659 - DNA, 421 bp, Arabidopsis thaliana
  unsure at all n locations
  Clone ID: LIB22-084-Q1-E1-F6
aaacagaagcagtggcttctcattgatactcttaggcagttggagacagaaaaggtagatcttgagaacacagttgtagatgaaagtcaaagacaggctgataatggatgttccggtgaattaagacacgagaagttcagtgaaggcactgccactgagtctgatgatgataatgaacgaggtgatgccgccgaggtggaatttgatgaggaagaaaataccttttttgatacacgtgattttctttcttcaagttctttcaaggagtagtgggtctggttttcgtacatcancattttcgtccgatgaagatngctttgaagtctgaagatganattgatccttccatcaagtcntattggatgcaattatcctcngcgtcaaagaggaggnaanaatttagctggatccgggttganaa

SEQ ID NO: 1660 - DNA, 430 bp, Arabidopsis thaliana
  unsure at all n locations
  Clone ID: LIB22-084-Q1-E1-F8
aacgttaagaatcattgcttttctcgagaaaataatatttttaattgaatcgagaaactcttcaaagttgaattaagaagaatattacctcaattgagatttgagagacacgcatagagagattgattattgcatcgaatcaagcttggtttgttagtaatggcgggaatagctttagttttagatctactgaagaaatctcaatcnaagaacactctccactcatcttccttctattccgcctccgccgccgctgtttctgctgccgcctctgctccttttgcgtctaggtttctcttcggttcttttgagcctangagttgcgtantgtgatgctgctgctgcaanaganatggattncccttgggtggctatncnggnagaactgtcngcggatggttttgcagcgttcaaccccttgncgttagtt

SEQ ID NO: 1661 - DNA, 386 bp, Arabidopsis thaliana
  unsure at all n locations
  Clone ID: LIB22-084-Q1-E1-F9
agttcatgtcttgttccttcactgccaagttcaagtttctttatggcaaagatgttttgaaaaacaggcataagacattgaggaacttgtttaaatctgtgaataatcttttgatagaagatggttttagttgggatgatactagacagatggttgttgctgataactgcgtttgggatgagtatcttaanattcatcctgattcgagatcttttcggataaagtctataccttgttacaaagatctgtgcttggtttactcaagatggaatgtctgagcacaaagcctgangagagtnttaggtganggaagaatccaagacactgattcaggaagatgatgggtacaacagcaatatgtgaatcgtcaacagtcangtctaact

SEQ ID NO: 1662 - DNA, 472 bp, Arabidopsis thaliana
  unsure at all n locations
  Clone ID: LIB22-084-Q1-E1-G10
cttttacgccgcccggtaccggtctnaaaattcccggggtcgacccacgcgtccnaccacgcgtccgcaaacatggattcgatatagtaatcagtgatgttcatatgcctgacatggacggtttcaagcttcttgagcatgttggtctagagatggacttacctgttatcatgatgtctgcggatgattcaaagagtgtggttctaaagggagtaacgcacggtgcggttgattaccttatcaagcctgtacgtatggaggcacttaagaacatatggcagcatgtagttaggaagaggagaagtgaatggagtgtaccggaacattctgggagcattgaggagactgggcgaagagacagcagcagcaacatanaggaagtggtggtggtgcaactgtttctggtggaaangatgccgtggatgataactcatcctcggttaacgaaggtaacaattggaggagcacttca

SEQ ID NO: 1663 - DNA, 426 bp, Arabidopsis thaliana
  unsure at all n locations
  Clone ID: LIB22-084-Q1-E1-G8
tcctttcgtgaattttctctctctagggtttcgatttcaattttttccactgaacccgcgatttgaactgaaccttcaccgtccatcaccatctccggtggatttcgtaggcatctacggagcttacttgtttcaaagaaccttggatgttgtttccgattctccgaaagctctgtgttctttagtttgatacctcagatattggatgcccttgatataacttaggtagcttcttacagaggaaggatatgtnaggttaanttctgttcatttgcccttggatggttgctacgatgnaacttaantgcttcaccccaacncganagangatgacganccgtatgtgagacatctanaaggacgattcttcncgggatgancgggatagagtctgctgttgaaatcgctaggacggaaacgtgaaac

SEQ ID NO: 1664 - DNA, 490 bp, Arabidopsis thaliana
  unsure at all n locations
  Clone ID: LIB22-084-Q1-E1-H8
ctgtttacgcctgccangtaccggtccaagaattcccgggtccgacccacgcgtccgntaaaatctctctctgccaatctcatcttcaacctctctctaactctcgttttcgattctacaatggctgacaagaatattaggatcggaatcaacggattcggaangaattggtcgtttggttgctagagttgttctccagagggacnatgttgagctcgtcgctgtcaangaccccttcatcactactgagtnnatgacctacatgttcaagtacgacagtgttcacggtcaatggaaacacaatgaactcaagatcaangatgagaaggacccttctcttcggngaagaagncagtcactgttttcgggcatcaggaaccctgaggatatcccatgggccgaangctggagctgantacnttgttgagtctactggntgtcntcactgacaaagacaaggctgcagctcnacttgaanggtgggtgccaa

SEQ ID NO: 1665 - DNA, 425 bp, Arabidopsis thaliana
  unsure at all n locations
  Clone ID: LIB22-085-Q1-E1-A10
aagcgtccgatcagctttttgganaataaaccaaanaaaacattcgganaccctaaaatctccantacaantcgnaaatgncaaanaanagaaagctcgatggagaanaatctaacgaagctgaagaaccgtcgcagaagctgaagcagacgccggaggaggagcancagcttgtaattaagaatcaggataancaagganacgttgannaagttgaatacgatgaantagaggaanagcaagaagaanaagtacgaannnnnnnnnnnnnnnnnnnnnnnnnnnnnnnnnnnnnnnnnnnnnnnnnnnnnnnnnnnnnnnnnnnnngcgacctctggatctggcaatcaanangatgaatgacgatgacccaantcaagatctgttggaaccattttcaaaagggagcaagttttgagtccctc

SEQ ID NO: 1666 - DNA, 417 bp, Arabidopsis thaliana
  unsure at all n locations
  Clone ID: LIB22-084-Q1-E1-C6
gggcggacgcgtggggtccattactgcagcatttcttcgtatgcagtttcatgattgctttgtcaggggttgtgatgcttccctcttgatcgacccaagacctggaaggccatcagagaaaagcactggaccaaatgcaagcgtgagaggctacgagatcattgatgaggctaagagacagctcgaggctgcatgtccccgaactgtctcatgcncagacattgtaactcttgccacaaganactcggtcgcattagctggtggtccaaggttctcagtaccaacaggaagacgtgatggattaaggtcaaaccccaatgatgtgaacttacccggaccancaattccgggttagcgcatctatccaattgtttgcanctcaaggtatgaataccaacgatatggttacacttattg

SEQ ID NO: 1667 - DNA, 522 bp, Arabidopsis thaliana
  unsure at all n locations
  Clone ID: LIB22-083-Q1-E2-H12
aatccgggantcccgggtcnacccacgcgtccgctccgatcatgtcgtcgaagaaagcgaagacgaagaacgaggcgagtagcagccgtggtggcatcggcggagagagtatagtcgctgattgtggacgaaataaatcaacttgcggttactgtaaatcttctacccgctttagtatttctcacggtttatgggacagaagagactcaccgttaatgactatcaagctcttcttgacagtggatggagacgatctggctgctatctttacaaacctgagatggagaaagacttgttgcccttcttatacaatcccgcttgaaaagcaagtgattttgtcccttctaagggagcaacaacgagtgcgtagaagaataagaaanggttttggatggtgaaactaagatgcgaaaccngattgagcaagacagaaagattcaagaantcccctttccccccttgaagtttccagtgtcagnngaaaaaatccacttggganctggctaaaaggagaaaaaaacc

SEQ ID NO: 1668 - DNA, 465 bp, Arabidopsis thaliana
  Clone ID: LIB22-083-Q1-E2-H9
acgcgtccgcccacgcgtccgatttgttcgccggaatatgctcccttctcttaacgtcgatcacctgtttttctctttccctctctctctatttttctcaactaggaatcaaccatgaatctcccatcattctcacttctctcttctaattctttcatggaattttcaggttagaagaagattccgggcagattatctgttgattcgaagaataccgaatacgcgtttgaaatttctgaagaattatgggatacttggacttggccttgtcgtattccaaccagccgcagactgttgaagctccagcgagcggaggaggtctcagccagaatggaaaatttagctatggatatgcaagctccgctggcaagagatcatctatggaagacttttttgaaactagggatcgacggtatcaatggagaaatagttggtctatttggaagtttttgatgggccaaggtg

SEQ ID NO: 1669 - DNA, 418 bp, Arabidopsis thaliana
  unsure at all n locations
  Clone ID: LIB22-084-Q1-E1-A10
atttttgctatttttattattttccgtgtttaatttctgattcagacaggaagattaatattaancactagttgtgcaaattcacaatttttttttgtggatgggaacaaatttctggcacacgtattccaatccaaatcgacaatatacgcgtcnctgatggatatgttttggnttcagtgagaaacagagattgattttggttttctttaatcatggtggagccttatgagacacgtaacaacggtgaagcatcccagatgatcaagatatcagagttataaccatcacaanttccaggactaacatcttcattaatcatcgccattgcntgnatttganagtgttccatgtcaggntcangtaanttcaaggtggnatcattcgacacctgaaggttctcaccatttactcatat

SEQ ID NO: 1670 - DNA, 428 bp, Arabidopsis thaliana
  unsure at all n locations
  Clone ID: LIB22-084-Q1-E1-A12
attcccnaggtccgacccacgcgtccnaaggacgcgtgggggaagctccgatctgagttttttttagcaatggcgaaaatgattcctancctcgtctctctaattcttatcggtcttgttgcgatcgcctccgccgcagttattttcgaggagcgctttgatgatggntgggagaacagatgggttaaatctgagtggnagaaggatgataacactgctggggagtggaagcacactgcgggaaattggtctggtgacgctaacgataaaggtatccaggaccagtgaaggactacagattctacgccatttcagctgagttccctgaanttcagtaccaangacaatgaccttagtcttccaattctcagtcanggcangaagcaaanggcttgactgcctgtggngggctaacatgaangctacta

SEQ ID NO: 1671 - DNA, 406 bp, Arabidopsis thaliana
  unsure at all n locations
  Clone ID: LIB22-084-Q1-E1-B10
atttccaacgattttttctcttccatggctttttttcgctgatcggnaaatcaaacgtttgtttcggtttcgatggtggaagctacntcgaatttgacgccgactcagagatatgcggccggcgcattgtttgcgatcgctttgaaccaagcgcaaatcaaccagactcagccgctgggaaccccggcggcggaagacgacgacngaagngatgnagagcgaagaagcaattgcagtagcggagattctgtctccgaatgaccccaacctttgggtacacgagacgtctggccttcttcgccccgttttcagatgtcttganattgattcancggcntggcttgggtctcgancaaaacagcttgcctcntctccggcctaancaccacatcggggggngttcacg

SEQ ID NO: 1672 - DNA, 462 bp, Arabidopsis thaliana
  unsure at all n locations
  Clone ID: LIB22-084-Q1-E1-B11
agtacgcctcnaaaattccaaggtcgacccacgcgtccnagaagttcatgtcttgttccttcactgccaagttcaantttctttatggcaaagatgttttgaaaaacangcataagacattgaggaacttgtttaaatctgtgaataatcttttgntagangatggntttaggttgggatgatactagacagatggntgntgctganaactgcgtttgggatgagtatcttaagattcancctgantcnagatcttttcggntaaagtctataccttgtnacaaaagatctgtgcctggtttactcacatggaatgtctgagcacaanagctgaggagagtatnagtgaggggagaatccaagacactgattcaggaangatgatggggtacaaccagnataagtgaatccgtcaacaatcaagtcctaactcaanaaggaagccactntcacaccggggca

SEQ ID NO: 1673 - DNA, 485 bp, Arabidopsis thaliana
  unsure at all n locations
  Clone ID: LIB22-084-Q1-E1-B2
ttacgccgnccgtagccgtccaaaaattcaagggtcgacccacgcgtccgngaggttttctctcaagagctgccaaccatcgttgcccggagatttaaaaaacctgtgataaatcgtaactgagtgagagatatatacacatatatatacacagagggacaaggaaagagattgggatatgcgagtgcgcatcggttctgtcggaacggctaactcgcttgacctagggtttcgtcttccttgtgcttcgtggagtttttcgaatgggagaaagaacctttttgctttctaaccgtgttctatatttttgggagttgtcataagtaaagcagtatgacgcttgaagatttctttaccctaacagaaataaaagatggactcacggtcacttctcgtgttgaagaacttgtgtcctgttatgcagaagtaataaaggattcagttttgaagaatagtggngatgcntttaagacaatgggactgct

SEQ ID NO: 1674 - DNA, 491 bp, Arabidopsis thaliana
  unsure at all n locations
  Clone ID: LIB22-084-Q1-E1-B3
tttacgccgtgccgtagccgtccanaaattccagggtcgacccacgcgtccganggacgcntccgcccacgcgtccggcgatcgacaagcttccacttcttctctttctctccatactcntctgcctcaatcgccctgttcttagcgacaccgatgaagaggacattcttctcacaggaatcaanagctacagaacaacacagaatctaacaatcttaagcaagaacgaanacgcagaatgcctagctgacgaaatcgcagaccaattcaagaacaaacccttgtagaacgacactggctcagccacagtacctggaactgagccacagttcgcaaactaccctcaagattctagcanaaatgcnactttgaanggtcncagncacgagagacgggctcgattatgcctgcatgtgttcctccgtttagaatcaaactcgtcctcanaaacntcaccaagtacaatactcaatgagtttgaagattcccag

SEQ ID NO: 1675 - DNA, 413 bp, Arabidopsis thaliana
  unsure at all n locations
  Clone ID: LIB22-084-Q1-E1-B6
ctgcattcctcgcaatgcattggattacgagattctctgctttcttctccgccgcattagccatgattctcctttctccttcgctccaatccttttctccggcggcagctatccgatcatctcacccctacgccgacgaattcaaaccccaacaaaactccgattactcctccttcagagaatctccaatgttccgtaacgccgaacaatgcagatcttccggcgaagattccggggtctgtaaccctaatctcgtcnacgtagccatcactctcgacatcgattacctccgtggntcaatcgnagccgtcaaatcgattctccangcactcaatgtgcctcaaaancggtcttcntccagttcctcngtgntcgtccgagtctcnaaaacctaggaaccctgngtcggtcta

SEQ ID NO: 1676 - DNA, 473 bp, Arabidopsis thaliana
  unsure at all n locations
  Clone ID: LIB22-084-Q1-E1-B7
acgccgccagtaacggtcaagaattcccggggccgaccaacgtccgatcttccgttgcttttttttttcaatccgccgccacttttcgtttctcgtagcgttaaaatggcggtatcgtacaatgcattagctcagtctttagcgagaagtagctgcttcatccccaaaccttattcctttagagatactaagctgagaagcagatccaatgtcgtattcgcgtgcaatgataataagaacattgctcttcaagctaaggtagataacttgttggaccgcattaaatgggatgacaaaggattagctgtggcaatagcacaaaacgttgatacgggagcagtattgatgcaaggctttgttaatagggaggccctctccacaaccatcagttctcggaaagctacattctttagtcgatcaaggatctaccttatgggactaagggagagacatccaataacttcatcantatt

SEQ ID NO: 1677 - DNA, 412 bp, Arabidopsis thaliana
  unsure at all n locations
  Clone ID: LIB22-084-Q1-E1-B9
actgaaactgaaactgaaacacttctctctctctctctttctcgcttccacgaatcgagagttctacaaattcgcttcctagggtttctcaattcttctaatttcttcatttctatggcgagtcaatgagcgaaatggcggctagctccgcaatctctcttctcgatatcaaactccgacgattcggcgttggcgcaagtaaccatgaattgcgcctaactaagtggttcaaaggtgatcaagccggagctccgacgagaagattcacctgcttcgcagatatgttggcaccgattcgccgctctgagaagtcagaggaacggcgttttgatcagaagatgagtgctcacggtgccgggatcaaaacttcttcctctgcagtgccattttgcntctcctaaatctcgatttt

SEQ ID NO: 1678 - DNA, 418 bp, Arabidopsis thaliana
  unsure at all n locations
  Clone ID: LIB22-084-Q1-E1-C10
agaagaaagatagagaaaaaaaatgggaggcaaaggtgtgatgatggtggcgatactttgcctttgggcactctctgcaacatctgaagcagtaacagaggctgagccaggtttgatgatgaacttctacaaggacacgtgtcctcaggccgaagacatcgtccgtgaacaagtcaaactcctctacaaacgccacaagaacaccgctttctcttggctccgtaacatcttccannactgcgccgttgagtcatgtgatgcnntcgcttttgctggnttccagggagacngagagctaggagagaaagaacacgacaggagcttcgggacctacaaacttnaggtacatccaaggaagatnaaaggaagctctccagacnggaagtgtccctgcgtgtttgtccncatgttctggaca

SEQ ID NO: 1679 - DNA, 410 bp, Arabidopsis thaliana
  Clone ID: LIB22-084-Q1-E1-C11
ttttccgttctcattccctctcttctccgcatctctcactctctctgtgtatgtgtgatgtcatcgattgtgaatcgagctagttcagcttctcttcctaatttcctcgcatggcgtgctctggggtttcgcaccatctgctccggccgccttggtttcgctccgtctgttccagactcgccggtctccgcaggaaccaaaattttggaatcatttaaggaggaattcgaagtcggatcccgcgtggtctcgtttgagactggaaaaatcgctcgctttgctaatggttcaagttgttctcggcatggacgagaccaaagttctctctactgttacttgtgctaagaccgactcgcctcggggacttcttacctctcactgttgactatcaagagaagcaatacgctcag

SEQ ID NO: 1680 - DNA, 517 bp, Arabidopsis thaliana
  unsure at all n locations
  Clone ID: LIB22-083-Q1-E2-G3
gttcgccttnacgtacggctccggaatccnaggtcgacccacgcgtccgtctagctcttcgatttcacgtcactcttcactcaataaaaaagctactgcttcaaagctctacttcttcaatttactctcattcgtttgcgttgatgtagcaaaacaaaaaccaaaatggttcccgtctcgttctgcttcttctttctccttctcttgctctctgctggagagagttcatcgcaattagtttctggtccacacatcaccgatgttaacatactcttacctcccaagatgaagaatccggttgagtatcgccttcaaggaagtgatggctgcttcaaatggtcatgggatcatcatgatattctaacagtcacacctgagtttaattcgagcagtcattgttcgaccaacgcgcgtcctcaaatnaattcnccgtanantgggtanaaagganaacggcaatttatgccactgatatacnanactgggaagggtgattccctgcnagggccttaattgg

SEQ ID NO: 1681 - DNA, 482 bp, Arabidopsis thaliana
  unsure at all n locations
  Clone ID: LIB22-083-Q1-E2-E7
acgcgtccgctttttccgacaaggttcaagatcgattaaacattacatggaggagattcactagaaagaaaggaaaaaaatctctttgtctttgcagatgcgacacgcaaaacgacgattctgatctcgcttgtctgatttcaaaaacaatgagaagatagttctgattatataacacacaaaccctacttcattccttcatcatcgtctccaatcattacccaaagatccgtctttttctttacttcatgtcgaaagcaaacgtacaaagtgtgttncngctttcgccggaggttccgttacactgcatcggagggcaccgcgtgagattaaagacaatttccgaaaagtactcagagaatgggagttatgaccgttgattaatcncacaggttccngatncgaggttcagaancaagataagccaccagagaagatgcacaagtcaattatcaattccgnatcctccnctcctcatcgta

SEQ ID NO: 1682 - DNA, 447 bp, Arabidopsis thaliana
  unsure at all n locations
  Clone ID: LIB22-083-Q1-E2-E9
acgcgtccggaaaggacgaagaagagaagaagaagaaccttacaattgcttttgtaaatattgtaggtagtttaaggacgtcacttcctacatacatggatttatgtggaactcagatgctgcgcctctcatcgcctcatttcaaaacccttcatttggtgaggcatgcacaaggagtccacaatatagcattagaagagaagggagagaaacctgaatcagaaaagctttttgacgcccacctttctccaaagggtttgcaacaggtttcggaaaggcgcaaccaaatccttgaatcaggattacttaacactgtcgagttagtgataacctctccgctgtgcagagcaatggaaacttcaataggaatatttaggggacaaggatatgtaaatatatccgaagactttgcaaaagctaacaacttccctccaattgtagcacntt

SEQ ID NO: 1683 - DNA, 558 bp, Arabidopsis thaliana
  unsure at all n locations
  Clone ID: LIB22-083-Q1-E2-F1
gtnccctgttcgtaccgccccggaattcccgaatcgacccacgcgtccgcggacgcgtgggcggacgcgtgggtnnnnnnnnnnnnnnnnnnnnnnnnnnnnnnnnnnnnnnnnnnnnnnnnnnnnnnnnnnnnnnnggtgatcagatctcgtgccgacgaaaacgtgcgtctaaagcaatgctgttcgcactctgctatcttcaattcctcgatttatcttgaactgcgattgtttgttgttgtttcgatttcgttgggggtaattgggtgaattagagaagtgaatgagaaattcgccctgcgattctgtcctctgtccggtgatcgaattgccgggagcaaaaacaaggtccggattccaagccttcccccaantttgnngtaatggtccaatgggggccnaatgcngnctggatcctgaaattccaatttccctccccccaaatcaaggtttnaanttcnangggttcctccnaaattcccgggggttttnantccggnggttcaaatngaantcancgaattccnccaaggataatccccaaaaacggaataa

SEQ ID NO: 1684 - DNA, 403 bp, Arabidopsis thaliana
  unsure at all n locations
  Clone ID: LIB22-083-Q1-E2-F10
nctctctcgatttgaagagagaaaattcgttcgatttcgttttctcttcttcttttggattttcccggaaaattttggaatcggtgagtctctatcgattactggtcaaccatgaatatctttagatttgctggcgatatgagtcacttgatcagtgtcttaatccttcttctcaaaatctacgcgacgaaatcttgcgctggaatctctctcaagactcaagagctctatgcgcttgtgttcttgactcggtacttggatctgtttacggattatgtatctctgtacaacagcatcatgaagattgtcntcattgccagctctttggctatcgtntggtgtatgcgtaggcatccacntgtgaggaggtcanacgataaaggacctggacacatttncgtca

SEQ ID NO: 1685 - DNA, 458 bp, Arabidopsis thaliana
  Clone ID: LIB22-083-Q1-E2-F11
acgcgtccgatactctcttttgatggctggaggagagaaaagaagaggacttagtaaatcttgtgctcttcccatagtgattgctgggatagagagatatgcattcaaaggagttgcatcaaacttagtgacatatctaactgatgtagtgaagatgagcaattcaagagcagccacgactgtgaacacttggagtggcttcactttcatgttgcctctcttctctgctccttttgccgattcttattgggacagattcttcaccatccttgcttcttcttctctctactttgtgggtctagtgggattgacatttacggcatttgctgggtcacgttcgactacaaaaacaatctctctttacttcctctacacttcactttccctcgtcgctctaggccttggcgtcttaaacccatctctacaagcctttggtgctgaccagctcgactacgacc

SEQ ID NO: 1686 - DNA, 475 bp, Arabidopsis thaliana
  unsure at all n locations
  Clone ID: LIB22-083-Q1-E2-F12
acgcgtccgccttcctcgccaatcttcatcttcctcatgttttctctaattctccatggaagaaagtctgtggaattacagaaatggcgtaatttaagagttacagtgagcattgtgcaaaatgcatttccttttaccaccaaatcgttctcttctacaatagctaaagattcgagtccaaagggaagtactttcacagtctcttatctcgttgaatcattgggtttgactaaaaaacttgcagaaacaatctcaaagaaagtcaccttcgaagacaagatgctgagaaatctcttcgtccaaagcttcagtttttaaagtctagaggagcttcaagctctgaggtcatagagattgtttcgaatgttccaacaatcttggataagaaagagggaaagaaaggtaacagaattcgaaatatatcggttttgagagaattgggagtacctcagaagttgttgttttcattgcttan

SEQ ID NO: 1687 - DNA, 481 bp, Arabidopsis thaliana
  unsure at all n locations
  Clone ID: LIB22-083-Q1-E2-F3
acgcgtccgccttcccgtcgtcggaattacttcgccggcgctcatcacccacaaaaatcacgccaatccaaagatacagagacataatcaatctacctccgagaccactgtttcatggacttctcgcatcaatctcctcacgcgcaatggtcgattagcggaggcagcgaaggaattctccgatatgacactcgccggcgtagagcctaaccacatcactttcatagctctactctccgggtgtggtgattttacctccggaagtgaagccttgggcgatttgcttcatgggtatgcttgtaaacttggtcttgatagaaaccatgtcatggttggcaccgcaattatcggcatgtactccaaacgcgggcgttttaagaaaggctanattgggttttgattacatgggaagataaaaaattcgggtacttggaatacnatgatncaatggggtacatgagaaattggtcaagtncaataa

SEQ ID NO: 1688 - DNA, 542 bp, Arabidopsis thaliana
  unsure at all n locations
  Clone ID: LIB22-083-Q1-E2-F4
ctggttccctgttncgtacggccccggaattcccangtcgacccacgcgtccgctttctttctntcttgttgggtctctcttacttctttcttattcatctaaaacaatttcgatccatttacacataaatatatgtaactggccgtagaagaaacacattgaaggaagannnnnnnnnnnnnnnnnnnnnnnnnnnnnnnnnnnnnnnnnnnnnnnnnnnnnnnnnnnnnnnnnnnnnnnnnnnnnnnnnnnnnnntgcggacatttccagaggcagttttccaaagggctttgtctttggaactgcttcttcggcttttcagcatgaaggagcggtgaaggcagaaggcagangtccctacgatatgggacacattttcccacacttttggtaaaatcaccgattttagcaatgctgatgtccccggttgatnagtancatcgttaccaaggaaanatgtacaacttatgaagaaatatgggnaatgggncncttananaatttcccattcntgggccccgcatttttccaaaagggggt

SEQ ID NO: 1689 - DNA, 497 bp, Arabidopsis thaliana
  unsure at all n locations
  Clone ID: LIB22-083-Q1-E2-F8
acgcgtccgcccacgcgtccgcggacgcgtgggttcgacttttcctctctctcttatataaattatatattttgctttggttttttttttttcaccggatcgatcgagaagagagaaaagttcatcttcttcttgttctgattgtttgacaagttttacgacaatggcggtttacggcgagaaagaacattggtggctccgcaacaaggaagatcgttgataaatacatgaaagaagcaaagagtttaatagcgagtcaagatcaaaacgactgaaatcagctctaaatcttcnggaatctgcaccctcngtancncctcgttacgaactccgctctcgaactcaaagncaagttcccttcntaactcccgtcgatncaaaagacttcgcccgataggcttcaaggattaacatcccaagnccttaaattaaccgggnggnngggaaanatcccgggnaccgggttcatcngnagctttcctttaacncaatccttc

SEQ ID NO: 1690 - DNA, 459 bp, Arabidopsis thaliana
  Clone ID: LIB22-083-Q1-E2-F9
acgcgtccgaacaaagagagagagagagagagtgttatgttatgtctttattgtcaattagtaattttcttcgaattagatgttgtttctccgtcgaatcgccgtcgtcttctttgtcttcacctctttctccgccgctcagaactccacgtgtcctctggacttttccgtccttgaaccgttccggcgtccgaaacccgatggcgccaccacctgccagtacctcctccaagggctacgcctcctctactctcaccatctccgtcagacgggttcctttctcccgccacctgagtctgctgcttcttgctgggctgctctccagtcttccgtcgccggtttcctccctcgctttgacgtccgatccacctgcggtttccagacgccgtggatttcgcaggggtgcatggacatcaccaccaggtctcaattcgaatcccttatcctaactcctccctc

SEQ ID NO: 1691 - DNA, 460 bp, Arabidopsis thaliana
  Clone ID: LIB22-083-Q1-E2-G11
acgcgtccggaaaaagtttaatttgtctctttctctatttatctccggcgtcaatttcacggcggctacacgacggttatcgatgtcattgactgtaccggagttcgatttcagattgacgccacagtttggtttctcacagtcaccgatcggggagcgtaatttcgcggatgttgataatctggagaactgtattaagtatttgaatcagagcttagtcacctctggattctctgcttcgcttgacctcttcgctaccgatcctgtttcgattgctagaacttgcaattgcgtatacgctttgattcaacagaggcaacgagatgtggaatttagagaatctgctaatgatcagagacaacgacttttatccgatatggcgagactcgaagcaaaagttgaaaggcttgagactcaattgcaagctaaagaaagggaacttggttcggtgacaagaacg

SEQ ID NO: 1692 - DNA, 513 bp, Arabidopsis thaliana
  unsure at all n locations
  Clone ID: LIB22-083-Q1-E2-G12
cctggccgcaaaaggtccggaantcncgggtcgacncacgcgtcnnaaangantcgaganaacgcacaccgaagaaaacacacaagactccattattctcctgcttcttcgtctcttcaattattttctctgagactagctttgattcanccatggctaatgcagcatcaggaatggcagtccatgatgactgcaagctgaaatttatggaattgaagacgaaaaggacacaccgtttcatcatttacaagattgaggagctgcagaaacaagtgattgttgagaaaatcggtgaaccgggtcaaacccatgaggaccttgctgcaagtcttccagctgatgaatgccgctatgccattttcgattttgattttgtcagttctgagggtgtcccaaggagcaggatttttttcgtggcatggtctccggacacagcangagtgagaagcaagatgatctatgcgagctccaaggacaagttcaagaganaactagacgggantcaggtccaag

SEQ ID NO: 1693 - DNA, 542 bp, Arabidopsis thaliana
  unsure at all n locations
  Clone ID: LIB22-083-Q1-E2-G2
ntggttcgcctgttcgtacggccccggaattcccgaagtcgacccacgcgtccgcggacgcgtggggttttgcctttagcatctccgagtaaggaatccaggtccaaagcctcttctcttcctcctcctcgcttccttctcacgcaaccttggatccaccgcagctatgaagatcaccgccttgctcgttctcaagtgcgctcccgaagcttctgatcccgtcatcctctccaacgcttcggacgtctctcacttcggttatttccagcgatctagcgtcaaggagttcgtcgtctttgtcggtcgcactgtcgctagccgaacccctccttcccaacgccagtctgttcaacacgaagagtacaangttcacgcttacaatagaaatggcctttgcgcggtgggtttcatggacgatcattaccctggttcgaagtgctttctctccttctcaatcaagtcctagatgagtacaagaagaattttgggtgagtcatgganggccggcaaaaagaaagactccaatcaagccttgggcaata

SEQ ID NO: 1694 - DNA, 486 bp, Arabidopsis thaliana
  unsure at all n locations
  Clone ID: LIB22-083-Q1-E2-E6
acgcgtccgcttgtggattcccacttctttcttctgttttcttcttcctcttctttaaattggatgttttgggcaagaaacagagagaaacacgttaatttgagagtttgtcattgaatatttggtttgcaatggaaagagattttctgggtttgagcgacaagcagtatctaagtaataacgttaagcatgaggttaacgatgatgctgtcgaagaacgagggttaagtacgaaggcagctagagaatgggggaagtcaaaggtttttgctacttcaagtttcatgccttcttcagatttccaggaggctaaggcgtttccgggtgcataccagtggggatcagtttctgcggccaatgtttccgcagatgccaatttggtggtgcgttcaaaacgccgacgcccgcttttacnaaggcggtcaattccctttaccaactcaaccttccccttgttcaacnaatggcttccccccggattatccc

SEQ ID NO: 1695 - DNA, 439 bp, Arabidopsis thaliana
  unsure at all n locations
  Clone ID: LIB22-083-Q1-E1-A6
tacaatgcttatggtgtgtttaaagagaaagagatgtatgagagagtgtttggtgatgaagagaagcttaacaagtttctgagatggagagttcaggttttgganagaggtgttaaaatgcttcattttaaacctggtggtgttaattccattantcaagttacagatcttaangatatgccctaagangagagcttagagttgcttctaaatcagatcctctctcnnttttcaagataattaccctgannttggntgctactaagatattcacaanacgtgccttggtacttcagtggtgatctancanagttcagcccattcctgactcagagaacaccgancaagtttgtgatgtccaaacgaaggcaatgcagccaagaaacactcctacaanttccattancgccacaagatattccgggtgccatacgggggg

SEQ ID NO: 1696 - DNA, 466 bp, Arabidopsis thaliana
  unsure at all n locations
  Clone ID: LIB22-083-Q1-E1-B6
acgcgtccgcccacgcgtccgatttggtgtacctgttcagttacagaggttctggatttgggcaaagagacaaaaccatacctatcgtcccaatcgcccccttacgcctcaagaggaattacaaccggttggacaaataagggaagcatctaataaggcaaacactgcagaactcaagctttttttggaagtagagcacctggatttacgtcctattcctcctcctgaaaaatcaaaagaagatattcttcttttcttcaagctttatgaccccgagaaggcagtattaagctatgctggcaggctgatgggtgaaaagttccagtaagcctatggatataactggaaaactgaaatgaaatggttgggctttgctcctggatgaagaaatagaacttttgaggaaatcangtttgnaccttgtgttatgtgcgaacacttggataagaaaactcaatcagattgt

SEQ ID NO: 1697 - DNA, 466 bp, Arabidopsis thaliana
  unsure at all n locations
  Clone ID: LIB22-083-Q1-E1-B7
acgcgtccgcatttctctctgactacttcatttcctcttcccaacagttaaaaaaagttctgattcgattcaagccaagatccacgtataaagatatgttcatgcgtagaggtttggtatacaacaatatatacatataatagtttgtcgttatgcctggctccctgtatgccacgagtggataccgattttggttttaaaatcggctgccggtggcgtacaaggagtcaagcatgaccagaagcatatggtaactcaattgcatctacaactaaatatgaaatatctagttatgtatatggtttgtgttctataagatgttttcttcgaattttgatttttgtgttccatttgaataagcaaacanaantaanaccaagttttgtagttttttgctttctttctgatttggtccagtgcnttgattcaggttttgagttgaattcctttaaattcatattgnttt

SEQ ID NO: 1698 - DNA, 504 bp, Arabidopsis thaliana
  unsure at all n locations
  Clone ID: LIB22-083-Q1-E1-C11
actggntcgcctggccgtaaaggtccggaattcccgggtcgacccacgcgtccgaacatggggtacgacggctccaggtttgccttacgtagacgaggcgataactaatgctggaaactggctcattgggggtgatcttgaggttcttgagccagtgaagtacaatgatgggcttgatcgtttcaggctttcgcctgctgagttacgtaaagagttggagaagcgtaatgcggatgcggtgtttgctttccagctgaggaatcctgttcataatggtcatgctcttcttatgactgatactcgtaggagacttcttganatgggttacaaaaaccctattcntttgcttcatccgttaggtgggtttacaaaaggctgatgatgttcctttaagatttggaggatgaaagcaacacgagaaggttctaagaggatggtggtccncaatccggaaaactaaaagtggtttcnatattccccgtcaccctatgcaattaccncggg

SEQ ID NO: 1699 - DNA, 460 bp, Arabidopsis thaliana
  unsure at all n locations
  Clone ID: LIB22-083-Q1-E1-C12
acgcgtccgctcntcgtctcaacatttanggtttcagagatcggntgattttcacatccacaagtatggcgactcaaatcancaagaagagaaagtttgtagcggatggtgtattctacgctgaattgaatgaggttctcacaagagagctagcagaggatggttactctggtgttgaggttagggttactccaatgaggactgagattatcatcangagctactcgtactcagaatgttcttggtgagaaggggaggagaattacggaattgacatctcttgtccanaagagattcaagtttccaanttgacagtgttgagctccaatgctgagaangttaacaacaanaggtcctctgtgccaattgctcaagcctgagtctctaaggttacangctttccccggtggtccttgctggttcgcaagggccctgttancggtgttttgangatttggta

SEQ ID NO: 1700 - DNA, 485 bp, Arabidopsis thaliana
  unsure at all n locations
  Clone ID: LIB22-083-Q1-E1-C3
ggaattcccgangtcgacccacgcgtccggttttgagaatttgacaaaaatttgtttatgtaatcttagttttcgctgattttgagtaagttatcgacatggatattgatgtcggaccagttgatccatctgtcctatacgagcaagacctccatgtttcttctgctgtttgggaaggacaggaacgaggtctacttcgttgtcaagaacacacttcattgctacatcaatggaaactcactgatgaacaaattaacctcgtggacaaagctggtttcggttactttcgcaaaatcggtccaatgagtttaaacaattcactgatctctgcacttgttgagcgatggagaagagaaaccaatacttttcatcttcctttacgagaaatgactataaccttagacgaagttgctttagtacttggacttgagattgatggagattccaatggttggttccaaanttggtgatgaaggttgctatgn

SEQ ID NO: 1701 - DNA, 434 bp, Arabidopsis thaliana
  unsure at all n locations
  Clone ID: LIB22-083-Q1-E1-C7
tcttgtccgtttcatcttcacattggcaacatctctcttgattggtacagtcttctggcaaatcggaggtaacaggtcgaacgcaggggatctaacaatggtgataggagcattgtatgccgcgattatcttcgtgggaatcaacaactgttcaacagtacaaccgatggttgcagtggaaagaacagtgttctacagagaaagagcagcaggaatgtactcagccatgccatatgccatctctcaagtcacttgtgagcttccctatgtccttattcaaaccgtttactactcaancatggcgtacacgaaaagttcntctgggttcgtcntcgttaagctacttctcattcctctactgggacttactacngcatgatgactgtttccctcaacaccaagancntcnaagtcgcttcgatttttcgcctcaa

SEQ ID NO: 1702 - DNA, 428 bp, Arabidopsis thaliana
  unsure at all n locations
  Clone ID: LIB22-083-Q1-E1-C8
acgacaaagaaggacacccagtttgttacaatgcttatggtgtgtttaaagagaaagagatgtatgagagagtgtttggtgatgaanagaagcttaacangtttctgagatggagagttcaggttttggagagaggtgttaaaatgcttcattttaaacctggtggtgttaattccattattcaagttacagatcttaaagatatgcctaagagagagcttagagttgcttctaatcagatcctctctctttttcaagataattaccctgaattggttgctactaagatattcataaacgtgccttggtacttcagtgtgatctactcaatgttcagcccattcctgactcagagaaacanagagcaagtttgtgatgtccaangaacggcaatgcagnagaaacactcctacaagttcattangcca

SEQ ID NO: 1703 - DNA, 500 bp, Arabidopsis thaliana
  unsure at all n locations
  Clone ID: LIB22-083-Q1-E1-D10
taactggttcgcctggccgtaanggtccggaaattcccgggtcgacccacgcgtccggttttgaaagtgttcctgaaagctccattacaaaactctcgaggtctgagattaagcaggaattagtgaacgctcaaagaaagcacttggaacaaatgatactgcccaatgttttggaactagaggaggttgatccctttttcgatcgtgactcagtggatttttctctacgcatcaaaaaacgccttgaggaatcaaaaaagctgcagagagatcttcagaatcgtatcagaaaacgtatgaaaaantttggtgaagaaaagctttttgttcaaaagactccagaaggtgaanctgtcaggggatttcctgaagcagaggtnaantggatgtttggananaaagaggtggttgttccaaaagctatccagctccatctacgcccatggttggaaaaangtggcagggaacaaaccacaagccgatttaaaacataaactttg

SEQ ID NO: 1704 - DNA, 475 bp, Arabidopsis thaliana
  unsure at all n locations
  Clone ID: LIB22-083-Q1-E1-D4
angcgtcnnggtggattcatnaacaacttcanngatanttanaatcttccttctccttctgacgattgaattacatcttcttctgatagctgttctgatttttttctgtanacaaagtanattcaaagtggacaaacatcggtattttaatctcctctcgataatgaagtgtttcttgttctctggtggggataagagaggggaacagaagacccctatttcggtttcattgacctctatcttctctgaccgcgaaataaaccgaagcgggtcagagttcaactctcgtgatgtctctgggacgagcacangaatcatccatggggaggaagaactcgtaccctccggtgtctactagagcaagtaatctcaagagagttcagcattactgatctcaagtctgcaacaaaggaactttaagccgatctgttatgattggngaangcggtttcnggtttgtgtcntcagggggcac

SEQ ID NO: 1705 - DNA, 467 bp, Arabidopsis thaliana
  unsure at all n locations
  Clone ID: LIB22-083-Q1-E1-D6
acgcgtccgatcannnnnnnnnnnnnnnnnnnnnnnnnnnnnnnnnnnnnnnnnnnnnnnnnnnnnnnnnnnnnnnnnnnccaccaaggcaacagaggagtttgtccttgttgtttaagagataaactctctcgattacctaatactacgtcgtattacatcgttcacagannnnnnnnnnnnnnnnnnnnnnnnnnnnnnnnnnnnnnnnnnnnnnnggcggtgaaggatcatcggagagctggttcgatgtcgatgtctttcgctgttagggaagctttaaatggtaatctgatcgaagctttangtggaggattaangaaaagcagatctatggctcatgttcccaaggattatattgttagggatttgacnaagaagaagacggagaaattgaaatctacgacggttaagaagaagactgggttttggactaagttgcttcatcntaaagggaaaggcggtgg

SEQ ID NO: 1706 - DNA, 471 bp, Arabidopsis thaliana
  unsure at all n locations
  Clone ID: LIB22-083-Q1-E1-D7
acgcgtccgagaaaagaaaaaattgcaaagagaggaagaacaaagaaacttgaatggagaagagaaacgagagacaagtgattctttttcctctaccattacaaggttgcataaaccctatgcttcagctagcaaagatcctttactcaagaggtttttcgatcaccatcatccacacgcgcttcaacgcgcccaaatcttcagaccatcctctcttcactttcttacaaatccgcgacggcttgtctgaatctcagactcaatctcgtgatcttttgcttcaactcacgcttctcaacaacaattgtcagatcccatttcgagagtgtttggctaaactcattaaacctagttcaagattcaggaacagaggatangaaaattagctgtgtgatcgatgattccggttgggttttcacacaatccgtggccggngagttttaantcttcctcgatttggtccctcgggtg

SEQ ID NO: 1707 - DNA, 461 bp, Arabidopsis thaliana
  unsure at all n locations
  Clone ID: LIB22-083-Q1-E1-E2
acgcctccggngaacatggngaaccacggctcgtgggcttccttatccngaanaagcactcaccaaagctggaaactggttgattggaggtgatttacaagttttggagccnatcaantacaatgatggtttataccggtttcgtttatctccgtcgcagctgcgggaggagtttataangcgcggtgcggacncggttttcgcgttccagcttatgaacccggtgcataanggtcatgcgcttcttatgacggatacncgtacaagacttcttgagatgggttanaaaaaccctgtcttgttgttgaatccacttggngggtttacgaaggctgatgatgtacctctcagctggcgtatganacagcacnanaangtgttggaggatggngtattggatccanacancaccgtantctccaacttcccatctccgaatgctatacgctggcccaanctta

SEQ ID NO: 1708 - DNA, 477 bp, Arabidopsis thaliana
  unsure at all n locations
  Clone ID: LIB22-082-Q1-E2-H7
acgcgtccgnnnnnnnnnnnnnnnnnnnnnnnnnnnnnnnnnnnnnnnnnnnnnnnnnnnnnnnnnnnnnnnnnnnnnnnnnnnnnnnnnnnnnnntgtcttgctccgtcgccgtatgtaattctccggtgttttcaccgtcgtcttctctattctgcaacaaatcttcgattctctcgtcaccgcaagaatctctttctctaacgctttctcatcgcaaacctcagacctcttctccttcctctccatccaccaccgtttcttctcctaaatctccatttcgtctccgtttccagaaacctccgtccggattcgctcctgggtccattancttttggatctgaatctgtttctgcatcctctcctccgggaggtgttttaaagaggaaacgacctacaaggcttgatatagcgattgggtgttgcctggctttgtaantccgaatttcttcattcggcccgctggtgggctggcna

SEQ ID NO: 1709 - DNA, 508 bp, Arabidopsis thaliana
  unsure at all n locations
  Clone ID: LIB22-082-Q1-E2-G10
ccggnccggaatccgggatttcggattcaantctcanatctagctcaaccatggcgttgctcgtcgagaagacctcaagtggccgtgaatacaaggtcaaagacatgtctcaagccgatttcggtcgtctcgaactcgagctcgccgaagttgagatgcctggactcatggcttgtcgtaccgaattcggaccttctcaagccattcaaaggcgctagaatcaccggatctcttcacatgaccatccaaaccgccgtactcatcgaaaccctaactgctctcggtgctgaagtcagatggtgttcctgcaacatcttttccactcaagaccacgccgccgcagccatcgctcgtgactccgccgctgttttcgcctggaaaggtgagactcctcangagtactggtggtgttaccgaacgtgctcctanantggggtccaaagttggtggtcctgattctgaatggttgatgaatggtggtgacgctactccttttgantcaagaagg

SEQ ID NO: 1710 - DNA, 522 bp, Arabidopsis thaliana
  unsure at all n locations
  Clone ID: LIB22-082-Q1-E2-G2
cttttcgtacggcctccggaattcccgaaagtcgacccacgcctccgcacacacacanttgtcgaaatcttaacaccaatcccaaatcagaaaaatcaaaactttttattttantttatcaanatggcgcttatgaatggaagcatgaatctatcatcggtcaaatcatcgatgatcaaccaccgtcaaccaaacttctcctccgccgtctccagacccacttctttccggatctccgccgtgcaaaccgacccaaaaacaccagctgcttcatcggcgtcggcggcgacgacgactccggcaacgttgacgaagcccgttggagttaatgtgggtaaaggaaaatgggcaccaagagagttggaggacnaagaaagctttacaagcaaccgggactatccagatttagctgcgcttgaagctgtgctagaagacgatcgaaagcttttccctccgatngtgttcgccgngagaactagattgcntgaggaacgattaggacaagcagccgatggggtgaag

SEQ ID NO: 1711 - DNA, 520 bp, Arabidopsis thaliana
  Clone ID: LIB22-082-Q1-E2-G3
tggttccctgtacgtaccgctccggaattcccaggtcgacccacgcgtccgtggaagtggaagcccatttgatcctgttgtgtacgatggcaaaacctacttgcctggccaggcaaacaattgctacattttccctggtctgggtcttggtttgatcatgtctggggcaattcgtgtccgtgatgacatgctcctcgcagcttctgaagcattggccgcacaagtgacagaagagcattacgccaatggtctgatctacccgccattctcaaacatcagagagatctctgctaacattgcagcctgtgtcgccgccaaaacctatgacctcggattggcgtcgaacctgccacgtgcaaaggatcttgtcaagtttgcagagaacagcatgtacagccctgtgtacagaaactaacgttaaaaaagttttggttaagaaacctgcagattatactaatcacaaccccttgataatttcctaaaggcttgtaattaaagtttttttgtttggttggttggt

SEQ ID NO: 1712 - DNA, 476 bp, Arabidopsis thaliana
  unsure at all n locations
  Clone ID: LIB22-082-Q1-E2-G4
angcntccggatntctctcacaagatttctgaaaatggatatataatctcactgatttgttnctttttttgttcttgtttcgttttctatatgtttatggatgagttgtagtttccatctcccagccggatatagaaagaagaaacagaggaaatttgttcataaaggaggtacatatatacacatacaagtctctgtgaaatatgacatctcagctaaaacgaactttaaccaagagatacggtgttcttgaactgtgggagatcatagtgattgctctctttgcagccttcatagtaatccttgtcctttcagtttggctcagcttccgtaaaaagtccaaaagatctaatgctacaacgcttcctgtaactcaaagccctcgctttaccgaagaaaataaaagaaataagtgttgatcatggttcatctaacaacaatggtacttcttaacaaaactcctgatgagaaaattc

SEQ ID NO: 1713 - DNA, 518 bp, Arabidopsis thaliana
  unsure at all n locations
  Clone ID: LIB22-082-Q1-E2-G6
actggttcgcctggccgtacaggtccganattcccgggtngacccacgcgtccgctcncacctacaccacacctaaccaaaccccctacgattcacacagagagagannnnnnnnnnnnnnnnnnnnnnnnnnnnnnnnnnnnnnnnnnnnnnnnnnnnnnnnnnnnnnnnnnnnnnnnnnnnnnnnnnnnnnnnnnnnnnnnnnncatgatcgatctcatggcagcaatcatcaaaggagagcctgtaattgtctccgacccagctaatgcctccgcttacgagtccgtagctgctgaattatcctctatgcttatagagaatcgtcaattcgccatgattgttaccacttccattgctgttcttattggttgcatcgttatgctcgtttggaggagatccggttctgggaattcanaacgtgtcgaggcctcttaagcctttgggttattaagcctcgtgaggaagagattgatgatgggcgtaagaaagttaccaatctttttcgggtacacaaa

SEQ ID NO: 1714 - DNA, 519 bp, Arabidopsis thaliana
  unsure at all n locations
  Clone ID: LIB22-082-Q1-E2-G8
aactgttcgcctggcccgtacaagtccgganattcccgggtcgacccacgcgtccgcggacgcgtgggctctctaacttgaaagttgtttcctttttttgaatctgagctggttttggaattttggtgtcaagatttggaatttgaatctgtagtaagattcaggtttagtgggggagggaacaagttggaagcttttgctagttttgtcaaaggtgtcactaaagtactaactatcagaaaacattttcagccagaagcttggtgatgtatcttcagattttcaacaacccatctcatggcttagctcatttatgctactctagtcgggtttcgtgtagggtaagactgagtcgtgtccttgccatgccaccgtcttcagtcctcttgcatatggacgaaagcaatgatcttcccaagcccaagaagggtttttgtctgaggtgaagattcgagaancagtttaaacagtcctcctgnagattctttgcttangcaaggccaacacagtcnggaatta

SEQ ID NO: 1715 - DNA, 505 bp, Arabidopsis thaliana
  unsure at all n locations
  Clone ID: LIB22-082-Q1-E2-G9
angttccctggcctaccggtccggaattcccggatcgacccacgcgtccgctttgtctctgtcgcaatctcaaccatatggagaaagacatggcaatgatgggagacaaactgatactgagaggcttgaaattttatggtttccatggagctattcctgaagagaagacgcttggccagatgtttatgcttgacatcgatgcttggatgtgtctcaaaaaggctggtctatcagacaacttagctgattctgtcagctatgtcgacatttacaagttagttttaattactaatatgagaggatttgctagagatagttaactaaattctcccctttactcttgaccaatccatttttattgtgacctcatccaaaaatgacaagctttgcttatataacaatttgtcatcactatctgtgtcactgagtgatgcattgattataggatatgaaatgattccttgagaatgaagatttgaaaaaggtgtgtgtagttaagtataat

SEQ ID NO: 1716 - DNA, 486 bp, Arabidopsis thaliana
  unsure at all n locations
  Clone ID: LIB22-082-Q1-E2-H1
acgcgtccgcattttcatgtctcttcctancaaacgctctactttctccgccgcttctgcctccgacgactcttcttactcttctcctccgatgaaaaaggccaaaaacgacctccaccattcccctcaacancctaataccgccgacaaggttgttggctttcatatggaggaagatccaactcccgccgccgctaatctctctcggaagaaagctacacttccgcaacctactaanaagtttgtaatcaanctcaataangccaaaccaaactctaccaacaaactttgaggaagaatacatgggagaagttgcagtcagctatcagagcatattccntcaanaaaaaantttcgtttgaccctcganaagcctttaccaaggctgtttgataacctttgcttgcaatnagttgggtgggaaangctttaatgacaagattgagaaaggatgttgangagaacatcccggcaaccttgcgattc

SEQ ID NO: 1717 - DNA, 506 bp, Arabidopsis thaliana
  unsure at all n locations
  Clone ID: LIB22-082-Q1-E2-H10
ggaaaatcncgggacgacccaggcgtccgggagagacacacgcagattttgagctgcgtgctctgttttaagcttgaagggaggaaaaacatggcagaccaagaatcagataagaacattgagatttgggaagattaagaagctaatcaaaggacttgaaaccgcaagaggtaatgggaacaagtatgatctctcttataatgcctcctagagatcaagtagctcgtgtcactaagatgcttgctgatgaatacggaaccgcctcaaacatcaagagtcgagtgaatcgtcaatctgttttatctgccattacttctgctcaacaaagattgaagctttacaacaaagttcctccgaatggtcctgttctctatactggaaccattggtactgatgatggtaaagagaagaaagtgacgattgattcgagccntttaaacccgattaatgcntcgttgtattgtgttgacaataagttccacancgagcctttgaatgaacntttg

SEQ ID NO: 1718 - DNA, 511 bp, Arabidopsis thaliana
  unsure at all n locations
  Clone ID: LIB22-082-Q1-E2-H11
tggttccctggcctaccggtccggaatcccggntcgacccacgcgtccggangtgccaagtgaacactgaggcccgtagtttatctctgcagaagcaactccagagatattctccagtcaccctcgaagccaagttgacagaactttctgaagcagatcagaaagcgttgggtctaattgtgaaggctgcaaaaattatggacgatatattctatgagcaggtttggaacagcaatccagccctaagagattggctgaaggatcatgccaatgcatcaaaactggacaaactaaaatgggattacttcacgatcaacaaaagtccatgggtcgtctcttgatgaaaatgaagcattcttgagtactgcggattcagctgtaaagttgcttccctggagcaacaaaagccataactggctgggaagggtccttgatatagagcaacctttccaatgactaaaccaactggtggcnaatttcaacctcccgatatggataaaatggagttcac

SEQ ID NO: 1719 - DNA, 525 bp, Arabidopsis thaliana
  unsure at all n locations
  Clone ID: LIB22-082-Q1-E2-H12
gttcgcctgggctancctggncggaaatgtcgggacgtcccgggnntccgacnacgcgnctgcnctcntcgtcttccctcccgagaaagctcaacggagccctagactggttttatcactctcgccaacaccaaccacgctttttctctctttacctccatttttgtattcgtcaccggagtagatggatacgagagaaatcaacggttttgcctccgccgcgagatcgatatctcttcctacgcagcctaattacagtagcaagcctgttcaggaggcgttgaaacatttggcatctataaacctcagagaattatgtaatgaggcaaaagttgagcgatgtcgtgcaacaagagacttagctagctgtggaagatttgtgaactatgtgttgaatccatgtggtcatgcctccttgtgcacaaagtgttgtcagaagtgtgatgtttgtcctanctgtagaagtaccctaccaaaanttggagaatagacntaagnctcgtctccaatatgaatgtgttgaac

SEQ ID NO: 1720 - DNA, 501 bp, Arabidopsis thaliana
  unsure at all n locations
  Clone ID: LIB22-082-Q1-E2-H4
ctggttaactgttcgcctggcccgtagaatccggaattcccggagnnatcnagccaacgcgtcagccgaaancgtaaccaatannnnctttggtttggnancaaccgctcnccncaataacaaaaattcagatctgaagcacacacaagcttcggattccagatcaaatccggcgattcaagccgctttcccaaattcaccgtcgatctggagccgttacaggatccgccgcagaccacggcgtcctccggtaccggcaacggcaacggtaagatacgctaccgttcgccttcttccactgagctcctggagtctgggtaaccattctcctacatccgactctgttgacggaggtaagatgacggcgaancgtgggattgggacggcacgaatctcttgctgacaagatcaacgccatccgtnggaatatacntggnaattccggtccaantgtgttgattcggtcccggtcctccngcnaatgcctgggaaatncaattt

SEQ ID NO: 1721 - DNA, 453 bp, Arabidopsis thaliana
  unsure at all n locations
  Clone ID: LIB22-082-Q1-E2-G1
acgcgtccgggagggttgcacacgacacggttacatgagaatcaatccacagagcgtttcttttgatactccaaatctgctttccctagcctactctgatttagttgctgaggactatccgttggttaatatgaaaagtttattcaaggctcgaatcatccttggagtagatgacgatcaaatcgcccgaatgcgagccccaactaactatttgtcagaggatgatgttgttcgccgatttggcaatgtggtgaagctcatgaagggcatacaaaatgttcagcaacttcacttgcattctgatacactcgaggtgctttcaatgtgctgtgaatcgatgccggtgttcaacaacgtcaaaacgttaggcattaagagtgactacgacagaggatggcaagcantgcctgctcctccaanggaattgtccacatctaaaaancctgacctttg

SEQ ID NO: 1722 - DNA, 528 bp, Arabidopsis thaliana
  unsure at all n locations
  Clone ID: LIB22-082-Q1-E2-E12
ntggttcgcctgggcctaccgggtccggaaatcccgggacgacccacgcgtccgcaggaactctttcatcaagtattggaaatttaacaaatcttcaaactgtgttattgcagaacaattacataacaggaaacatccctcatgagattgggaaattgatgaaactcaaaacacttgatctctctaccaataacttcactggtcaaatcccattcactctttcttactccaaaaatcttcagtacttgagggttaataataacagcctgacaggaacaattcctagctcattggcaaacatgacccaactcacttttttggatttgtcgtataataacttgagtggaccagttccaagatcacttgccaaaacattcaatgttatgggcaattctcaagatttgtccaacaggaactgagaaagactgtaatgggactcagcctaagccaatgtcaatcacttgaacagttctcaaaataaatcatcctgatggaggaactaaaaaaccgggaaatccccggtaatcc

SEQ ID NO: 1723 - DNA, 475 bp, Arabidopsis thaliana
  Clone ID: LIB22-082-Q1-E2-E2
acgcgtccgctacaactgatttctacacatcccatgaagtgtttgcttctgccttatgaacagtcccttacaaggttggattcaacttctggtctctactatgattgttctgcacacatggtctggtgcggagagcgtaccagacaattggatggcgctcatgtcgagtttctcagggggattgctaatcctctgggcattaaggtgagcaacaaaatggatccctttgagctggttaagctaagtagaaatcctgaatcctaataacaagcctggaagaatcactgtaattgtgagaatgggtgccgagaacatgagagttaagcttccccacctgatcagagcagtccgcagatcaggccagattgtgacatgggtctgcgattcaatgcatgggaaacaccatcaaagcaccttgcggtcttaaaacacgtgcctttgactcaatactggctgaagtccgagcatcccttga

SEQ ID NO: 1724 - DNA, 498 bp, Arabidopsis thaliana
  unsure at all n locations
  Clone ID: LIB22-082-Q1-E2-E3
ggaattcccangtcgacccacgcctccgaggacacattnagaacctaccgtttctgaagcagcagtatggactgaacaaaatcacaaacgaggccatcattgtgatngaggcttacaggacactacgtgatcgaggtccttaccctgtggacaaagttgttagagatttccatggaaagtttgcgtttatactcttcgatagcgtcaagaaaactgtctttgctgctgctgacgccgatgggagtgtgccgttcttctggggaaccgatgctgaagggcaccttgtgttttctgataacaccgagatggtgaagaaaggttgcgccaaatcttatggtcctttccctaaaggttgtttctttacgtcgtcgggtggattgaggagctttgagcacccaaagaacgaattgaagccantngccgagagtgggcaactcaangtgacctgtttggtgcaaaccttcaaaggntgaccgctgagactaaagagaagaaggg

SEQ ID NO: 1725 - DNA, 476 bp, Arabidopsis thaliana
  unsure at all n locations
  Clone ID: LIB22-082-Q1-E2-E6
acgcgtccgcttcttatgattttcaacttattacaacaacaacaacaacaaaataatcttgcaaagtttcagtctcaggtggttcacagttaatgctacttgcaatgatgaatccatcccaatttcgataacctctactgaggcatccaaatgttgaacggaaaagaagagcctaagcagaagaaaggttggtcaagagtcgctgctagaatttcggtcagggtttggggaaaagatgaaagttgtgtcgaanaaacgttggaaatctcttggtcctcttcatctgaaaagcagatcagttgcacggttttgcttcttttcgaanttgaagtcaaacaaccatggtccangccgtgcaccagtgtanctcantgtttatgactttgactccctattaacngatatatctantggggcaggccttggtatattcactctgnntgtanaaagttcatggaantagagtatgcctttgg

SEQ ID NO: 1726 - DNA, 524 bp, Arabidopsis thaliana
  unsure at all n locations
  Clone ID: LIB22-082-Q1-E2-E8
aactggttcgcctggccgtaccnagtccggaaattcncggggtcgacccacgcgtccgctacaactgatttctacacatcccatgagtgtttgcttctgccttatgaacagtcccttacaaggttggattcaacttctggtctctactatgattgttctgcacacatggtctggtgcggagagcgtaccatacaattggatggcgctcatgtcgagtttctcanggggattgctaatcctctgggcattaaggtgagcaacaaaatggatccctttgagctggttaanctagtagaaatcctgaatcctaataacaagcctggaagaatcactgtaattgtgagaatgggtgccgagaacatgagagttaagcttccccacctgatcagagcantcngcagatcangccatattgtgacatgggtctgcgattcantgcatggaaacaccaatcannngcaaccntgcngtcttaaaacacgtngcctttgganccaanaactggctgaagtccgancattcct

SEQ ID NO: 1727 - DNA, 470 bp, Arabidopsis thaliana
  unsure at all n locations
  Clone ID: LIB22-082-Q1-E2-E9
acgcgtccggaattttttttctttttcttatctgaatgctttcattctaattaaagattttaatatatgaatattcgcacgtggatatttgtataagatatgcattaatctccgaggctatgtatagttcagaatttgaagtgaagtttaggagaggaagagagatggaggtatttagacttggagagctgagacacctactggtgacggttttcttgtcggggctcgccgaatacttgataaggccagtgatgactgacgtcaccgtagccgcggtttgctccggcctagacgattcatgttctttggccgtctatctcaccggagtacaacaagtgacggtaggaatggggacaatggtaatgatgccagtgatcggcaatctatcggacangatatggaatcaaagcaatgctcactcctcccaatgttgcctcctccggtcctnctccaacaataataagggtaca

SEQ ID NO: 1728 - DNA, 493 bp, Arabidopsis thaliana
  unsure at all n locations
  Clone ID: LIB22-082-Q1-E2-F1
ntggtagcctttcgtacgccccggaatccaagtcgacccacgcntccgaaaaaaactgaaacatcccaaatggatcatcatcttcaaccataacaacacgaaacccttcttctccaaaatccccaaaaccttgaaacaaagtctcaaaatttcacttcgtggatccgaatgtctcagaacccatcactcttcttcctcttatgtctagggttaggtttttgcgttgacctgggtcaatccctgaaagttcctttcagcgttaacgatgttcttccgatgctacctcgtcaagtctcatggcctgttttgaacagtttccacaacgctgtggatttgttgccggtttttattgggtcagttactcctaataatgtatctattgagtggaaaggtgcttgctttaatggtaatgaagctcgtcttgatatcaccggtagtgatcgtgacgtcccctgggactggtggtggtgttcctcatctcaaaacatccang

SEQ ID NO: 1729 - DNA, 471 bp, Arabidopsis thaliana
  unsure at all n locations
  Clone ID: LIB22-082-Q1-E2-F11
acgcgtccgcttcaaacaacaatctttgcttctctctgagtgatcatctttcttgttcaatggctggtcaaaagatactttctttactggttatagctcttgttgttacttttgcagctgcggctcggcttcttgatgaagaaaatgcattctcagctaccacaaccacccttggctcaggttcaggttccaccggaattggttttggtgcaggaacagggtcaagtggttcaggttccacgggattcggttttggtgcaggatcagggtcatctggttcaggttctactggaagcggtctcggtgcaggtacagggtcaataccatcaagtggttcaagtcctgggtcttctaccaactgccaattctgttcctggttctttagcgggtggtggttcaaggttccttgcctaccactggttcaaccactggtgcangtgcaaggtaccggttcaaactccttgganggtg

SEQ ID NO: 1730 - DNA, 495 bp, Arabidopsis thaliana
  unsure at all n locations
  Clone ID: LIB22-082-Q1-E2-F12
acgcgtccgcccacgcgtccgagctaaaatactgtgttctttgtttcttccatcgaaatcgaaaaaagctaagatctttgcgttttgaaacgatggcggaagaacataagcatgatgaatctgtgatcgctcctgagccagctgttgaggttgtggagagagaatcgttgatggataagatatcggagaagatccatcacggtggtgattcttcttcgtcttcttcatcttctnnnnnnnnnnnnnnnnnnnnnnnnnnnnnnnnnccctcttctccttcgtcttctatgaaatcgaaagtttaccgcttgttcggacgagagcagcctgttcataagggtcctcgggcggtggaaagccggctgatatatcatgtgggaaagaacaagaanatgtccgggtggggtnacttggtgggtgccaacaaccnccttggggttgngttttgaaattgaatggaantaccatccttcccaatccngctttgccacgtga

SEQ ID NO: 1731 - DNA, 477 bp, Arabidopsis thaliana
  unsure at all n locations
  Clone ID: LIB22-082-Q1-E2-F2
acgcgtccgcaaacattaagtagcactctttttcctctctatatctctcactcacactttttctctatatcttctcctcaacttggatatgggtgaagccgtagaggtcatgttcggaaatgggttcccggagattcacaaagccacatcacccactcaaaccctccactctaaccagcaagactgccattggtatgaagaaaccatcgatgatgatctcaagtggtcttttgccctcaacagtgttctccatcaaggaactagtgagtaccaagatattgctctgttggacaccaaacgttttggaaaggtgcttgtgattgatgggaaaatgcaaagtgctgagagagatgagtttatctaccatgaatgtttgattcatcccgctctccttttccatcccaaacccaaagactgtgtttataatgggaaggaaggtgaagntctgctgcaagangaaattctaaaacacacgnc

SEQ ID NO: 1732 - DNA, 531 bp, Arabidopsis thaliana
  unsure at all n locations
  Clone ID: LIB22-082-Q1-E2-F3
ttccctgttccgtacggcctccggaattcccnangtcgacccacgcntccgcttgtctcctccggccaaccttaacccttaagcgaacggtgttcctttgcggattgcgatcgttccgtcgatcccttcatcgcccgatctaaatctctaatcgtgtcggagattaaaagcagaggttttgtggtgaatcatgtctgatgtcccttcttgttctagcggtaatgatacanacaacaatgattcgagtaacttcgaatgtaacatctgcttagacttggctcaagatcctattgtcactctctgtggtcacttgttctgttggccttgtttatacaaatggctccatctncnantctcaantcctannngactgtcctgtttgcaaaagccgttgatnnaagnaagacaanattgggttcctttgtacngtagaggtaaatcgtctgctgaacctccggtccaaagttcaatccggggtccccgaaagntgccctaaccgntccatcgggacagaagacccgaaanctgcac

SEQ ID NO: 1733 - DNA, 481 bp, Arabidopsis thaliana
  unsure at all n locations
  Clone ID: LIB22-082-Q1-E2-F6
ttcaagaaacaaaaacaagataagatctcttcagattcctacactccaacaaatataagtttcattagattctttcttagctagagaatgaaactgattgagaagacgatgagcatgaaccagtttaggactatggaggaggagaagcaagacggtggtgagcttttccataccatcgaggtagctaaagttgaccggaacaacgtgtctcagccgccgccggctgctactgcagcactgctagaagttcccggtgatgaacttaacctaattccaccgttgaacttttcgatggtcgataatggtatattccggtctggattcccggactcggcgaacttctccntcaagcaaagaactcctgggncctnggtcantcananctttggtgtccagaggccatatcctgagaacaacatgcagnttcctcaaatccantggaattagnctttttcangtttggcattgaaggcctangtca

SEQ ID NO: 1734 - DNA, 449 bp, Arabidopsis thaliana
  unsure at all n locations
  Clone ID: LIB22-082-Q1-E2-F9
acgcgtccgtttntttattctcatcgggcaaaatatatatccccaaaattttatcatatttctcgatagagaaaaatcattaactaaatatccattcccactcaaaaccctaaaaaagagagcctcaaaatctttgagtgttttgcgtcgtcggttttaaacaaaaaggttcaataactttttctctcctttgtttcttttttgtttattatctcctctcatcccattttcccaacacgacgtcgttacagattcctccgatggacttcccggacgatcacccttaaccaccttacaaaacgacnacggaggaagaaaaggaaccggtacagccggagcggttagggttaaaccgtggttcacttggagatcaagatccgaatcggacttcaatcgntttcggttaaccagagagtctttcaatctccgtcctggatctggganggtga

SEQ ID NO: 1735 - DNA, 467 bp, Arabidopsis thaliana
  Clone ID: LIB22-082-Q1-E2-D9
acgcgtccgctcgattatacagttttcctctctttcactctctccgtagtctgagactcgccggaaaagcttgtattggcttctcttcgatttctggcggaagtaaggatatcacgtgagctatgaagttcctcatgcaatccatttctgggaggaatcgatctctggttcgagctctagttagtcggcgttacttcgcttcatcgccggaggaaatcgcaaagagaaattacgccaacgatctgtcggaatacaacaccgctgtcaactccgtcacagctcagcgcaggcactatttgctgagggatgtttatgatgatatgaagcttgatggtgtgcagcctacagctgatatcttccattcatttgtcgtgggaacgatgaagggtgctcggttaagcgatgcgttctttttccgggaagaaatgaaagccatgggggattgctccaagatgtgaacttgtaca

SEQ ID NO: 1736 - DNA, 463 bp, Arabidopsis thaliana
  unsure at all n locations
  Clone ID: LIB22-082-Q1-E1-A4
aacttctacgctnttcggtnncggtccanaaattcncgggacctttanactcacaancctcctctcatcttcaccataaccgaaaaaccaaacaaaaaatccttagataatcagatcttgatattatggatcatatcatcggctttatgggcacaacaaacatgtcacataacacaaaccttatgatngctgccgcagccactaccactacgacctcttcgtcttcctcttcgtcctccggangngncngggactaaccagctngcangtgtcagaatcncnanagaaaagattgggncacattttgacagtatctacgcaatcaccgtccaccacattctctctcccgttgcaatggngctcatgttcttgaaatcctcaaggtnctcgaccaatttggcaagactaaaggtcacacacacctatgtccgttcttcggacaaccaaaaccaacagnaacatg

SEQ ID NO: 1737 - DNA, 465 bp, Arabidopsis thaliana
  unsure at all n locations
  Clone ID: LIB22-082-Q1-E1-A5
aattccttgctatatcgnggnctgtcctccagtctaacgaggtcccagggtcgacgtncgnatgttttnaaanaatnctncgatnntaaagaaggctacgcagagcagctgttgaggctagtgaaggacgaaccgaactaattgataaggtgggagctgggtatcttgatcatttgattgtggaaagaaaatatgctgaagcggcatctttatgccccaaattgttacgaggatctgcttcagcctgggagaggtgggttttccattttgctcaactacgccagctgcctgttcttgtcccatatatgcctacggataacccaaggcttaaggatactgtgtatgaggttgctctagttgcactancaaccaatccctcataccacaaggagcttttgtcancggttaaatcttggccacgttctgtatattctgctttgactgttatctcagcaatanaacctc

SEQ ID NO: 1738 - DNA, 401 bp, Arabidopsis thaliana
  unsure at all n locations
  Clone ID: LIB22-082-Q1-E1-A6
naaccatntcccanatctgaatctcaacctaaacctcagattcatcatgcatggcttcttcttctaactacgatggaatccgtctcggtangggtaaccnactcctcgatanctctgccgtcgtcgacgacgantttctcaccaaatacgacatcaagttgaagantgngattctcgcgggagacgaacatttgcccatgtnngatgagatgagtagcaagttcaatgttgaatacattgccggaggtgctactcagnactcanncaaagtggctcagtggatgcttcaaattcctggggcaaccanttacatgggatccattggaaaggacaaatatgganaggccatgaagaangatgctacantgctggattcgtcctcacagtatcgcctgaatcca

SEQ ID NO: 1739 - DNA, 401 bp, Arabidopsis thaliana
  unsure at all n locations
  Clone ID: LIB22-082-Q1-E1-A8
attccttgatagaaacaaaatggaagacaataaaagaaaagtattagatgaagaagcgaaagcttctctagacatatggaagtatgtctttgggtttgcagatatagcagctgcaaagtgtgccattgatcttaaaataccagaagccattgaaaaccatccttcttcacagcccgtaacactagccgaactctcctccgccgtctccgcctctccctcgcatcnccgccgtataatgangtttcttgtacaccaaggaatctttaaagaaatccccacaaaagatggtttagctacaggctacgttaatacgccactctctcgccgtttgatgatcacaagacgtgatggaaaatcgctggctccttttgttctcttcgaaacaactcccgagatgctcg

SEQ ID NO: 1740 - DNA, 412 bp, Arabidopsis thaliana
  unsure at all n locations
  Clone ID: LIB22-082-Q1-E1-A9
ngggccaagagtgtattggnagattttgatttacgtacgccaacactctttgacaacaagtattatgtgaacctcaaggagaacaaaggacttatccagagcgaccaagagttattctctagccctgatgcttcagacactcttcctttagtccgagaatacgctgatggtcaagggaaatttttcgatgcgttcgcgaaggcaatgataaggatgagtagtctttcacctttaacagggaaacaaggagaaataagattgaactgtanagtggtgaattcgaaatctaaaatcatggatgtggtagaagatgctcttgaatttgcaagctcaatggtgaggaaatgtttttctttaacaataaataaattatcaatgtttgtcaaagaagttaaccttttttcctaactcc

SEQ ID NO: 1741 - DNA, 451 bp, Arabidopsis thaliana
  Clone ID: LIB22-082-Q1-E1-B7
gttaactctccgcgttcggtacaaagtctgaaattcccgggccgacccacgcgtccatgacgttcatcatctccgggccgataccagtgtgcgtttggatcgggttgacatgagcctcgacagggtgattcagcaagtgggttccatgaaaattgggggaggtggcttgatatcagaggccatgaagagagccgaggctatggagattgagaccaacgacgattcggagaaatttggggttggattggaattgggaaaggttaaggttaagaagatgatgttcgaatctcaaggaggggtttttgggatcagtggaatgggcggtgttggtaaaaccactcttgccaaagaacttcaacgggaccatgaagtccaatgtcactttgagaaccggattttgtttctgactgtatcacaatctccgcttcttgaggagctgagggaacttata

SEQ ID NO: 1742 - DNA, 438 bp, Arabidopsis thaliana
  unsure at all n locations
  Clone ID: LIB22-082-Q1-E1-B9
ggggncgacgcacgcgtccanagaaaactcatccatggcgattcttaagttacatctcagcaacatcaaccacaccaccaattcctcaaggatcaatctcccaattctcgtctaccaaccaaaatcattctacccaataagaaacctgagaaatggtccaccggagttgctcccggagagtacggtggtcctccgactaccaccaagctccgaaagtactggggaggtgaaaaagaagatcccattacttccacagacttaatctggaacagagattttatggatcaaatgaagaaattgtttgatgatcctaatgattcttctctcgacncatctccttcaaaggaaaagtcttctgggtttctgagctttagcagagttatgagtcttgacaagtatggatgttgatttaaagtnaagaacctgcatcntcctcca

SEQ ID NO: 1743 - DNA, 409 bp, Arabidopsis thaliana
  unsure at all n locations
  Clone ID: LIB22-082-Q1-E1-C11
ccatttaaannnnnnnnnnnnnnnnnnnnnnnnnnnnnnnnnnnnnnnnnnnnnnnnnnnnnnnnnnnnnnnnnnnnnnnnnnnnnnnnnnnnnnnnnnnnnnnnnnnnnnnnnnnnnnnnnnnnnnnnnnnnnnnnnnnnnnnnnnnnnnnnnnnnnnnnnnnnnnnnnnnnnnnnnnnnnnnnnnnnnnngaggatccacatcgtgtggtactgctggagctctatacgcgttgatagccgtagtaactggttgtgcatgtatatactcatgtttctatcgtggaaagatgagagctcaatataatattaaaggagatgattgtactgattgccttaaacatttctgctgtganctttgttcctttgacccaacaataacggtgaactcaancaccgcggttacaat

SEQ ID NO: 1744 - DNA, 469 bp, Arabidopsis thaliana
  unsure at all n locations
  Clone ID: LIB22-082-Q1-E1-C2
aancttgccagtgccggtccaaanattaangggtccgacgcccgccgtccgntctgtnctatcgcagaacatttttgttnaaatggcatanataataatcaataacacccttgtccagggatttttgattctctctttgggttttctcgggaaaaaatgtctgcgatactccaagggagctgganctgcaacggctctctcgccgttnaantctatcgattccaacaaactcgttgctccttctcgctcttctctttcagtgaggagcaagagatacattgttgccggatctgataataaaagctttggttctagcctcggtanctcgtcgctctgagcccttgataccaaatgctgttacnacgaatgcggacactgctgcgagctctacttcatcaaagcctggacatgagctattacntttcgaggctcctcaagaangtctagaaagaagagatggacagagatt

SEQ ID NO: 1745 - DNA, 403 bp, Arabidopsis thaliana
  unsure at all n locations
  Clone ID: LIB22-082-Q1-E1-C6
tctggtatctaacaatcatgaggcgtactcaagttgtctacctaaatgtgtcaaaatattagaacgccttgctaggaaccaggatgttcctcaggagtacacatactatggcatcccatctccttggctccaggttaaggcaatgagggctcttcaatattttccaaccattgangatcccagtaccaagaaaagctctctttgaggtccttcagcgaatattgatgggcacagatgttgtgaaaaatgtgaataaaaacaatgcgtctcatgccgtgctgtttgaagctctctccctggtcatgcatcttgatgctgagaaggaaatgatgtcacagtgtgttgctcttcttggcaagtttatttctgtccgtgagcccaacatcaagatatctangcttgg

SEQ ID NO: 1746 - DNA, 364 bp, Arabidopsis thaliana
  unsure at all n locations
  Clone ID: LIB22-082-Q1-E1-C8
cgcgcgacacatagagtgtagagacgctttcacgagcgtttccgacgtcggactttcagctcatcatctccacatctttaacggtaaagattaatcatgcctgaaattcatttgggtgctcatacaataagatcccatggagtaacagtcgcgaggttccacatgcatgactggctcattcttctgctgctaatantcattgaaattgttcttaatgtcatcganccctttcatcgttttgttggngaanatatgctcactgatctcagataccctctgcaggnnnancacanttcctttctgggctgtcccgttgatagctgttgtgctacnttttgctgtcatttgtgtttancacttcatt

SEQ ID NO: 1747 - DNA, 460 bp, Arabidopsis thaliana
  unsure at all n locations
  Clone ID: LIB22-082-Q1-E1-C9
acctnccagtgccggtcaagaattaacgggtcgacccacgcgtccaaagaaaatctgtttttttattgagatttttttgtttctatagattctatcgaaatgccgatgtttcaagccgttaaagagagatgggttaatangatttgaaggtggtggtgatgggcaagtcttagatctggatactgcagtgaaannnnnnnnnnnnnnnnnnnnnnnnnnnnnnnnnnnnnnnnnnnnnnnnnagaaattggatctgaagaagatgataaaggagctagatttacaagatataccttctgttttcatttgtcctatctccttagagccgatgcaaggatcctgtgactttgtgtactggtcaaacctatgaaaggttaaacattcacaaatggtttaacctaggtcacttgacttgtcctactacaatgcaagaacttttggggatgatacngtaactccc

SEQ ID NO: 1748 - DNA, 465 bp, Arabidopsis thaliana
  unsure at all n locations
  Clone ID: LIB22-082-Q1-E1-D11
ttcacgcttccaggtnccggtcaaagaattancgggncgacncacgcgtccnaccgtccccttgttatacacatttaatggagtttacactagggacagtgaaatgagttcttcattgactttgacttgcactgacggtgctcctgccttaaaacaaagaaccatcggtctcgctaacacccacttgtcgattccctcgcagctcatctccatgtaccagcttcctcataagatagctctttgtttgccttccaccgaacgaagtcagtctcataatggtgacctttggatcggtaaaggggaatattattatctgccttacgataaagatgtctctaagatctttgcctccacgcctctgatcggtaatggcaagtccggcgagtacttaatcgatgtgaagtccatccaaatcggtgcanaagaccgttccctataccctanggagccacaaaggattancaa

SEQ ID NO: 1749 - DNA, 407 bp, Arabidopsis thaliana
  unsure at all n locations
  Clone ID: LIB22-082-Q1-E1-A2
agatactataactaactccttncnaaaagcaaattttaattggtggccatttgccggtagaaaggttcgccttcttgataanctttcnctttgcagcacaatatgagcgtgtctacgctggtagctttcacaaggacgttcagatacattggggtgatggccgtggaaaaattctcgacaatgtcggaaatcttctttctctctcgctcgacaaattctctggttccggttttcagtcccatcaagagtttctttatggcaaagtagaggttcaaatgaaacttgtacctggtaactctgctggaacagtgacaacattctatctaaaatctcctggaactacatgggatgaaatagattttgagttcttgggaaacataagtggtcatccatatactcttcatact

SEQ ID NO: 1750 - DNA, 455 bp, Arabidopsis thaliana
  unsure at all n locations
  Clone ID: LIB22-082-Q1-E1-D2
ttcccggtgccgtcnaaaattcaangggtcgacncacgcgtccgnttgttacaggttcaaagattcttagccttccggggagttttgggtaagaaaaagacggagtcacagccaccgtcacccctgagtacaaggnactatcagaatggtgctgctaataccccaaaggttcgtcaatcaagaccttcaccagtagctatgaagaagacgccagttccagaagcgaacaaatctttacactctttatcgtctgatggaatctctattgacctcaacggtcagaatgattcttttaaccataagcaggagaagccatcgcgaactgttcctctatccccaaacagcatggctgatcgtgggaaacccttatcaccacgacctcaagggcatgaacacagtggcaagaatnacacagccaagtgaagattagtttgtttaatgttgtaagccctcca

SEQ ID NO: 1751 - DNA, 421 bp, Arabidopsis thaliana
  unsure at all n locations
  Clone ID: LIB22-081-Q1-E2-E5
acgcgtccgcggacgcgtgggcggacgcgtgggggaagaggctaggaggatgatggataannatcaacaaggccgcggataaatccgaagtagtcnatataagtgagcttatgttgaccttcacgaactcggttgtgtgtagacaagcgttcgggaagaagtacaatgaagatggataangagatgaagaggttcatcaagattctttatgggactcaaagcgttttggggaagatcnttttctctgattttttcccatattgtggctttcttgatgatttancaggcctcacagcttatatgaaagagtgtttcgaaagacaagacacttanattcacngaggttgtcaatgagacgcttgatcctaagagagtcaagcccgnaaaccgatagnatgattgatctcgtgaatggggatcn

SEQ ID NO: 1752 - DNA, 164 bp, Arabidopsis thaliana
  unsure at all n locations
  Clone ID: LIB22-081-Q1-E2-E6
tttttctaaacctannnnnnnnnnnnnnnnnnnnnnnnnnnnnnnnnnnnnnnnnnnnnnnnnnnnnnnnnnnnnnnnnnnnnnnnnnnnnnnnnnnnnnnnnnnnnaaagtaatctcaaaaactgaattttagctgggtnnnnnnnnnnnnnnnnnnnnnngg

SEQ ID NO: 1753 - DNA, 416 bp, Arabidopsis thaliana
  Clone ID: LIB22-081-Q1-E2-E7
ctctccccctctcttgaactttccgattttgtatcaaacacgaacctaatactgcttccttgactggtaatgtaagtatttgggttgttaactccatggaaaaatcaggcccggtgcagaaagccgttgttctccagccatttgtcaagttggtgaggcttgtagcgagggctttctatgatgattatactacgaaaagcgataatcagcagaaatctgctagaagtgacaacagagggattgccgctgtggtgctagacgcgctggcaaggcggcaatgggttagagaagaagacttggcaaaagatttgcagttgcacgccaagcaacttcgaaaaataataagactctttgaagaagaaaagttgattatgcgtgaccaccggaaagagactgcaaagggtgcaaaagatgta

SEQ ID NO: 1754 - DNA, 382 bp, Arabidopsis thaliana
  unsure at all n locations
  Clone ID: LIB22-081-Q1-E2-E9
cnagtgaatcatccgccggagaaggtgggagttcatcaatgacgacggtgattaaagaagaagctgccggagttgacgagcttttggttgttttaggttacaaagttcgatcatccgacatggctgacgtggcacacaagcttgaacagttagagatggttcttggtgatggaatctcgaatctttctgatgaaactgttcattacaatccttctgatctctctggttgggtcgaaagcatgctctcggatcttgacccgacccggattcangaaaancctgactcanagtacgatcttagagctattcctggctctgcagtgtatccacntgacgagcacgtgactcntcggancaagangaatagaattgaatcngagtt

SEQ ID NO: 1755 - DNA, 396 bp, Arabidopsis thaliana
  unsure at all n locations
  Clone ID: LIB22-081-Q1-E2-F10
aaatcacgtttccaaacgtggattttgcaagcccagcaaaactgaagcggcagattttacgtcaggaaaggagaggtcaacgaactttagagctgatccgacaagaaaaggaaactgatgagcagatgcaagaagcagccattcagaagtcaatgagctttgaaaactcagtcatagggaaatacagtatatggaggagagactatgagagcccaaatgctgatgctatcttgaagcttatgagagaccagatcataatggcaaaagcatatgcaaatattgccaaatcaaaaaatgtaaccaatctgtacgttttcttgatgcagcagtgtggagaaaataaacgtgttatangtaaagcaacctctgatgctgaccttccttccagcnctcctg

SEQ ID NO: 1756 - DNA, 419 bp, Arabidopsis thaliana
  unsure at all n locations
  Clone ID: LIB22-081-Q1-E2-F5
aaagggaaaattaccangacaagagtnnnnnnnnnnnnnnnnnnnnnnnnnnnnnnnnnnnnnnnnnnnnnnnnnnnnnnnnnnngaaaatctagaagaagagaaagctacaaaaatctcaacatcgaggtaagagttttggctacagagcaaccatgctaacttgcgccttctcccaaaatcttatccactaatctcggtaaggaaagtgatgttggcaaaatggtgaagaaaggaagttggttttctgctatcaaaagggtttttactccacattccnnnnnnnnnnnnnnnnnnnnnnnnnnnnnnnnnnnnnnnnnnnnnnnnnnnnnnnnnnnnnnttttgggaagctaaggcatggcgaagaccaattcatttcttcccatcttcagagagcctagtagtatcgaaaagatct

SEQ ID NO: 1757 - DNA, 416 bp, Arabidopsis thaliana
  Clone ID: LIB22-081-Q1-E2-F6
caagatgacctaaagcgtgcaactggagaattcaccaaggacgagaacgatgctaacaaacttaaccgcattcttcaactcacaggattcagtgacccagtctatgctgaagcacatgtgacggtacaccattatgatattgctcttgaagttacagtaatcaaccgaaccaaggaaacccttcagaacttgtgcttggagttagcaaccatgggtgatctcaaacttgttgagcgtcctcagaactacagtctggcacctgaaagaagcatgcagattaaagcaaacatcaaggtgtcgtccacagagacgggagtcatattcgggaacatcgtctatgagacatcaaatgtaatggagcgaaacgtcgttgttcttaatgacatacacattgatatcatgggactatatctccc

SEQ ID NO: 1758 - DNA, 402 bp, Arabidopsis thaliana
  unsure at all n locations
  Clone ID: LIB22-081-Q1-E2-F7
gcgacnccacaaacacactcatgatnagtgcaggatatcatggggacttaaaggtttgggatttcaaaaagcggganttaaagtcccagtgggatgtcngatgttcgttggntaaaattgtcnagcaccgtgtaaatggtcttttggctacagtggcggatgattttgttatccgtttatatgatgttgtgacactaaagatggttcgtgaatttagangtcatacagaccgtataacggatttgtncntnangtgaggatggcaaatgggtcanctcanctagcatgganggaagtcttagaatatgggatgtcanattggctaagcanantgatggtgtgcatgtcgatgtgccaataacagcattgtcgttatcancaantatggacgttttggcacct

SEQ ID NO: 1759 - DNA, 408 bp, Arabidopsis thaliana
  Clone ID: LIB22-081-Q1-E2-F8
agattgtgagagatatgatccctcgtattaaccgcactagcagatcggatattattctccggcaccgccacatcatcaaaaacctcaaacttcaactccggcaacatctcctccttcctcatctcacaaatgttatgcaacacacaacaagctccaagcacgtacggcagatcctgaagcttcacctccgtccgtttctgcaaacaagcccaccgtcctttgagcctctcaaacgcagccgtcgcaatcccctgaatctctccgatactctcgttaaacgcgtgctgcgtccacgtcagattctgtctcgtgtacggtacaagaagataatcagtcaacggaaacccagagtttccaactatccagctgtcacgtaacatcccacgcgccgctctttgccgtgaaagc

SEQ ID NO: 1760 - DNA, 460 bp, Arabidopsis thaliana
  unsure at all n locations
  Clone ID: LIB22-081-Q1-E2-G11
tcanccgccggcacaggtccaagaactcgcgggtcgacncangcntcnngntanagncctttcatcaccattcccaattttccgttcttgtttctgattgaatcnagatattgattaagctatggatgtcaatcggaaagctcacccggattgtcgatattcttcaaatcctttccatgaatgtgcttcagattgtttagagaagatctctcaaggcngtggaaataagaattcaaagaagcaaggtactttctctgttctcacactatgtttgatccgttacnctatgagtatgcttctgttgtgatggatatttctgtcnttgtccntctttangtantgcttcaaggataattcttgnaggggttgtctgttatgacngntatagtttgatcaaggcggttttanctttcgatggatctgcaaagttgtttcctgtccttttcccattgggaatttg

SEQ ID NO: 1761 - DNA, 407 bp, Arabidopsis thaliana
  unsure at all n locations
  Clone ID: LIB22-081-Q1-E2-G9
cctttgaagaagaagaatcgcgatttcgagctctatggtgtccgtaaaccctagacctaagggttttccagttttcgattcctcgaatatgagtttaccaagctccgatggatttggttcgattccggccacgggacggaccagtacggtgtcgttttctgaggatccgacgacgaagattcggaagccgtacacaatcaagaagtcgagagagaattggacagatcaagagcacgataaatttctagaagctcttcacttattcgatagggattggaagaaaatagaagcctttgttggatcaaaaacagtagttcaagatacgaagccacgctcaagaaatactttctcaaagttcagaagaatggtgctaacgaacatcttccaactnctcgaactaaaaggaa

SEQ ID NO: 1762 - DNA, 462 bp, Arabidopsis thaliana
  unsure at all n locations
  Clone ID: LIB22-081-Q1-E2-H2
aantgttcccggcgccggtccaaagattaacgggtcgacncacgcgtccgngattaccggatgagtttcttgacgagttaaagaacggtcttaagtctatccttgaagggaatgtagcgcanagtgttgatgagttcatgttcttgcagaaggttgttcagagtagaactgatttgagctctgtaacacttgttagagctcatcgggtgcagcttgagatacttgtagcgataaataccgggattcaggcgtttttgcatccgaatattactctgtctcagccgtctcttatcgagatttttgtatacaagagatgtacaaacatagcttgccaaaatcaactacctgctgatgattgctactgtgatatatgtactaataggaaagggttttgtaacctttgtatgtgtacgatctgtaacaagtttgatttttcggttaatactgccgctggatcngatg

SEQ ID NO: 1763 - DNA, 475 bp, Arabidopsis thaliana
  unsure at all n locations
  Clone ID: LIB22-081-Q1-E2-H3
cgttaccttgcaggnccggtccagnattaacgggtcganncacgcgtccggatgaaatcaaaccaaccattaaggaacttgtaatggcggcgccagacaacccatcaaacgccgtggaatgggccattgcggagatgataaacaaaccggagatcctccacaaagctatggaagagatcgatagagtcgtcggaaaagaaagattcgtccaagaatccgatataccaaaacttaactatgttaaagctattatccgagaagctttccgtcttcatcccgtcgccgccttcaacctcccacacgtggcactctctgatacgaccgtcgcaggttaccatattcctaaaggaagtcaagttttacttagccgttacggtcttggtcgtaaccccaaggtttggtctgatccacttagcttcaaaccagaaaggcatctcaatgagtgttcggaagtgacttttgacggagaatgatc

SEQ ID NO: 1764 - DNA, 418 bp, Arabidopsis thaliana
  unsure at all n locations
  Clone ID: LIB22-081-Q1-E2-H6
aaattggggattagagattcgaagagttgtcgtagcgagatcgagtttttggaagaacagattgtgaatcatgatggtgatttggagccaacgggatcggttattaatggttttgtggcgattacaagatactgtaggttcttgttgtttggatttgaacgaanatggaatggagtggtggattgagaataatccgaagaagcctcgaaaagggttcgttgcacaggagattggagacacgtttataactgtgccaaaggattttgtttgtccaatctctcttgatttgatgacagatcctgtgattatttccactgggcagacttatgatcggaactctatagctaggtggattgaacaagggcattggtacttgtccgaaaacaggacaaatgctaatggattccgaggattgttc

SEQ ID NO: 1765 - DNA, 421 bp, Arabidopsis thaliana
  unsure at all n locations
  Clone ID: LIB22-081-Q1-E2-H7
acgcgtccgcccacgcgtccgcggacgcgtgggcttaaaggtggagctttcttcgaatttctccgatcagctcaagaggcaattgtgttaccaccatttgttgctttagctgtgagaccaagacctggagtttgggaatacgtaagagttaacctccatgatcttgtcgttgaggagcttcaagcttctgaatatcttcaattcaaggaagagctcgtcgatggaattaagaatggaaacttcactcttgaacttgactttgaaccattcaacgcggcattccctcgtcctacgctcaacaagtacattggagatggcgttgagttcctcaaccggccatctctcgggctaagctcttcnatgacaaaggagagcttgcatccgctgctcaagttcctccgcctccattcccaacgaaggg

SEQ ID NO: 1766 - DNA, 472 bp, Arabidopsis thaliana
  unsure at all n locations
  Clone ID: LIB22-081-Q1-E2-E3
acgcttgccggtgccggtccaaggattaacgggtcganncacgcgtccgcaacaancgccgccgtctctagaaatatccatccacctacttcggctttgtttatcaggttcgatatatctatcaccaccgccttcttatctcaatttctgtgtttgatttttgctttgttggtgtttgattttaccgcagattttgatgaaaccagatcgggtcttcctctagatccgttctaggttttctatttcnnnnnnnnnnnnnnnnnnnnnnnnnnnnnnnnnnnnnnnnnnnnnnnnnnnnnnnnnnnnnnnnnnnnnnnnnnnnnnagacatgtctctgtttctgaaagacgattcgattcaaattcgcgaagtctggaacgataaccttcaagaagaaatggatctgatccgagatgtcgtcgacgacttcccttacgtcgccatggacactgaagttccccggcatncgtcg

SEQ ID NO: 1767 - DNA, 428 bp, Arabidopsis thaliana
  unsure at all n locations
  Clone ID: LIB22-081-Q1-E2-B7
acnccctatagtgacgtcgtattattatttaccatctaagtttttggtcattaactgcaggcttaaagatgaaggtacctaggtacaataaggtgagtcacagcttgatataatcttctctgcttcatcactttgtatcataaatgtcgaacgaaaacagaggaacctgttcttaactcctcgatatatattcttatttggctgcagtctgcctatagtgggagaggtgacagagccgattcatcaacatggcctgaagttgaaggacctctatcggttattctctttgagggatggatgcttggttttaagcctcttccanctgacgttgttaaagcagttgacccacagctggaggttgtgaataaganccttgaagcgtantacgacgcatgggacaangtacatcgatnccttggggtcgtcat

SEQ ID NO: 1768 - DNA, 467 bp, Arabidopsis thaliana
  unsure at all n locations
  Clone ID: LIB22-081-Q1-E2-C1
tccagggnccggtccagaattanacgggtcgagncncgcgtccgggaatntggggattagcttgggaaacttcgccggagattcatacgtcgtcgtcgtctttagtatctgtatcgtcaatggcgttgctgaagtctttcatcnatgttggctcagactcgcacttccctatccagaatctcccttatggtgtcttcaaaccggaatcgaactcaactcctcgtcctgccgtcgctatcggcgatttggttctggacctctccgctatctctgaagctgggcttttcgatggtctgatccttaaggacgcanattgctttcttcagcctaatttgaataagttcttggccatgggacggcctgcgtggaangaagcgcgttctacgctgcaaanaatcttgtcatctaatgaacctatcttgcnagacnantgatgtttttgaggangaaaatcantccaatccaga

SEQ ID NO: 1769 - DNA, 441 bp, Arabidopsis thaliana
  unsure at all n locations
  Clone ID: LIB22-081-Q1-E2-C12
aaggtccngggtccacccaancgtccgaccacgcgtccgctacttcaaaacttttgataatcttctttaaactttcttcttcgatctctctttgttaactttctttcgttacgtctctctcgttctcgttatttcttattctcagatcttggattcacgaccatctcgatcgttgaccgtcgaatttgggttcggctaaaaatccaatcttttttttccggtgagaagctcgagagagtatataatttaataaagggtacgtacgattttggttgagtgttntgatgatgttgacccaatttgttggggtgtgaagtatacntatggaactgattgtcacaatacaagaagancaacatcancaacanncaatgaataagaagnangacactttaagattggtcgtnaagctnccaanccaagggaaaaaaaatttggccn

SEQ ID NO: 1770 - DNA, 480 bp, Arabidopsis thaliana
  unsure at all n locations
  Clone ID: LIB22-081-Q1-E2-C2
ntgttacgtttgccggggccgggtccaaagataacgggtcgaggcacgcgtcgttctactnctctttctcacntacttanccaataaagccatcaaatcccaaaanacaccatttacaaatgggntcttctancttcttcttcatccttatcttcctctccgtcgtctccgccgtcaaactacctctctctcccttctctcactccgaccaatcaccaaaagacccttacctctctctccgtcgtctcgctgaatcctcaatcgctagagctcataaactcaaacacggcacctcaataaaacccgacgaanatgctctctcctccaccaccaccgcatccgccaccgtcgtgaaatctcctctctctgctaaaagctacggcggatactcagtctctctcagcttcggcacaccgtcgcaaacaatcccattcgttttcgataccggaaagcagtctcgtttggctaccttgtacctca

SEQ ID NO: 1771 - DNA, 474 bp, Arabidopsis thaliana
  unsure at all n locations
  Clone ID: LIB22-081-Q1-E2-C4
ctgttacgttgccgggccnggtccaagaantaacgggtcgacgcacgcgtccngggaattgtntcgttcctcacacacgcctctcatctcttatccattcttgtccttttttcagctcaacaagaatggataantgtactggagaaaatcccatggcttctcagttgaacattctccgatgcccgttcttgaggaacatcaatgagcccactaacctctctttctcntcanccttgccttttcccatccctgcaagagctgggaaaggacctatatttgaagatggtcccaattttgatacggcgtttangcttttccatggccaanatggagttgtccctcgctctgacaccgctcnaactgaagcccanaagcctgtgcctgtattccatccacttgctgctaatgcggncactattagtctctcancntttggatctggagggcttttggatttgatgcaatttttcngac

SEQ ID NO: 1772 - DNA, 405 bp, Arabidopsis thaliana
  unsure at all n locations
  Clone ID: LIB22-081-Q1-E2-C5
ntggacgaagcaattgattacctaaagttgctgaaacgagacttaatctccacagaggttaagaaccaaagctccaccactcacaagtcaccaatcttgttgcttaaagagacaacatggggaacaagaaatctgcagacagataaggcgtgaaagattctgacgagttaaaacgtgtgaagtgggtttttgggtacgtatcctctgcaccagctttttagctgtatatagtggactacttttaagtattatatatgctactgcaaatttcaaaaagttaaagaagaaaagaggtcactttcttcttctctctgtgtggaatgaaaagccaaagtcgtcatggtcattgatggacaatgattatcttttttggctgagtgtggatggtgaaatcaaaaaggcaaa

SEQ ID NO: 1773 - DNA, 393 bp, Arabidopsis thaliana
  Clone ID: LIB22-081-Q1-E2-C6
tgttaactcagatgatacaatacgaaggataagggaatggagacaatctggaggaatgcagccaagtatgcgcaatgctgctcaagtggttcacgatacattgccaagcccttctgtttcagcttctatgaagacgcacaaaccaaaccagccaattccttctcaaccattcgctagttcttcaccttcttttcatcctcaagctgatcccactcacccgtttgcttcatcgacagctaaacgaggacctgttcctattgtcaagggcaaaaaaacacaaaccagtttttcctggctcgtcttccacaaaacatgccccataccatccttcagatcaacctccacgaggacaagtcatgaacagattaccatctgttcctgccagttcaagtg

SEQ ID NO: 1774 - DNA, 386 bp, Arabidopsis thaliana
  unsure at all n locations
  Clone ID: LIB22-081-Q1-E2-D10
tgattttggaatctccattacgatggaaggtgcggctgatcaaactacgaaagcgttatctgaattagccatggattcttctaccaccttgaatgctgctgagtctagcgctggtgatggagctggacctcggagtaaaaatgctttgaagaaggaacagaaaatgaagcagaaagaggaagagaagagacgaaaggacgaagagaaagctgaaaaggctaaacaagcacctaaagcaagctcccagaaggcagtggcagcagatgatgaagagatggatgcancgcaatactatgagaacagattgaaatatcttgcggctgagaangctaaaggggagaatccatatcctcacaagttcgctgtgtcaatgtcgantccctaaa

SEQ ID NO: 1775 - DNA, 471 bp, Arabidopsis thaliana
  unsure at all n locations
  Clone ID: LIB22-081-Q1-E2-D3
ngttaccttgccgggccggtcnaagaatanccgggncacccacgcgtcnnnnnnnnnnnnnnnnnnnnnnnnnnnnnnnnnnnnnnnnnnnnntancccacgggaaacgatttcttcgccgattcaaagacttttcttcctaagctttttaacagatccggtgaaaatttcaaaatccgaagaattctctaaagctagggtttcttaattcacgagacggaggtgatataattcccccccgtcgtagctatgatgatttcgagaggtttgtttggttggtctccgccgcatatacaaccgttaactcctgtttctgaagtttccgagcctcctgagtctccatctccttaccttgatcctggtgctgagcacggtggtacaggaacagcggcgcaagcggatgatgaggaggaaatggaggagccggaggagatggagcctcctcctgctgctgttcctttctctcagcta

SEQ ID NO: 1776 - DNA, 347 bp, Arabidopsis thaliana
  unsure at all n locations
  Clone ID: LIB22-081-Q1-E2-D5
aagctgtgcgggtctatctttcccggaaatgaatgttatgtcactccagtaccaccctgaagcctcccctggacctcacgactctgataacgcatttagagagttcatagagcttatgaagagatcgaaacaaagctcctgatcaatgagaagtactctttgtttttgtacgttgctgtttttaatcatggcacttaaattaaaaccaactgttttgttagtgataatggattggcattattgtttctttgctttgactgtattgagcaaccatccaacctnnnnnnnnnnnnnnnnnnnnnnnnnnnnnnnnnnnnnnnnnnnnnnnnnnnnnnnnnnnnnnnngg

SEQ ID NO: 1777 - DNA, 415 bp, Arabidopsis thaliana
  Clone ID: LIB22-081-Q1-E2-D7
ttgcatatcttcatcttcttcttgagatgaagttgaagttgtcatcaatctccatgaatcataagaatgtgcttctcatcaagctcatctccgctattctgatatcttttttcgcgttccgtctcttcattctccactccagcgagttttctccaatctttgcgtcggtcaccggaaaattcgaagctcggtttctgccgccggagattatcgtaccggaaaatgaagatctgattcctcaagatattgaagtagagaagtgtgatcttttcgccggaaaatggatcccagattcagtaggaccaatctacacaaacaaatcatgcggatcactcattgacggtcaccaaaattgtatcaccaatggccggcctgacttagattttctctactggaaatgggaaactcatgactg

SEQ ID NO: 1778 - DNA, 415 bp, Arabidopsis thaliana
  unsure at all n locations
  Clone ID: LIB22-081-Q1-E2-D8
atncaatacaatgtctactcttgttttattcctccaacttttttccatcctaccattagcacttgggttgaaccacccaaattgtgacctgaccaagactcaagaccaaggctctaccctaagaatcttccacatagacagcccttgctcccccttcaaatcatcatccccactctcatgggaagcgcgtgtgctccagacgctggctcaagaccaggcccgtctccagtacctgagcagcctcgtcgccgggagatctgtagtccccattgcctcagggcgtcaaatgttgcaaagcactacatacattgtcaaggctttgatcggtactccggctcaagccgctgctcctagccatggacacgaagcagtgacgtggcttggattccttgctccggctgcgtttggctgtcct

SEQ ID NO: 1779 - DNA, 406 bp, Arabidopsis thaliana
  unsure at all n locations
  Clone ID: LIB22-081-Q1-E2-D9
cccgactaaagaaatgggatcgtctgcggatacagagacggcgatgataatcgccacaccggcgtcgaaccataataatccggcaaccaacggcggagatgcgaatcagaatcatacttctggtgcgatactcgctctcacgaattcagaatcggatgcttcgaagaagagaagaatgggggtgcttccgctcgaggttggtactcgcgtgatgtgtcaatggagagacggaaaataccatccggtgaaggttatcgagcgccgaaagaattataatggtggtcacaatgattacgagtactacgttcattacacagagtttaatagaagattggatgaatggattaagcttgaacagcttgaccttgattcagtagagtgtgctttagattaaaanctttaagac

SEQ ID NO: 1780 - DNA, 449 bp, Arabidopsis thaliana
  unsure at all n locations
  Clone ID: LIB22-081-Q1-E2-E1
ttgccggngcccggtccaggattaacgggtcnangcncgcgtccggaacantcttgcggnacgagcgacctacagttccaggagagaactccatcaatggcttcaagggaactgcttcagctaagagaaagacaaactgtctctggcttaagggaanggttccataacgggagggaaaatattgtccatgaaaatactagcaacactgataatgataatagcaatacttccacaaatgctcttgcaattgcnatcactgctgggaattctcagcgtgtaaccgatgagagttcancttcttccagacaagggaatgatagtcccattttgcctganaactcagaaagcaacctagcaaatgcggatagagactgggaagaggataccaatcaaagaaagatctggcaggaaaatgtcccangtagatgagaaggcaaattttggagcan

SEQ ID NO: 1781 - DNA, 413 bp, Arabidopsis thaliana
  unsure at all n locations
  Clone ID: LIB22-081-Q1-E2-B6
ctctgcttttgtctcccccaaacaaaaggataaagaaagttgcagaaaacaatctctctgttctttgagctttccctttgagctctcacacgagcggcttcttttgtcatctcaccttttccttcattctttcttccttcaaattctggtttttttcacagatcgttttctcagattttgactctttttggtgttgttgttgttcttctccttcgtgaagtggaagaagaatataacaaaactgggttttttatatctggaattctgaagaaattcttcacggatttgatctgtttaaactataaaagtcttgatttttataaatcagctaaaaataagacacggtttagggtttatggtttgactagaaacaacaatactgaaatgggttgtgaggtttcaaagttangtgc

SEQ ID NO: 1782 - DNA, 391 bp, Arabidopsis thaliana
  unsure at all n locations
  Clone ID: LIB22-081-Q1-E2-E12
acgcgtccgaaaacacacaaatggaaggaagagtcaacgctctgtcaaacataaacgatctcgaacttcacaatttcttggtcgatccaaacttcgatcagttcataaacctcataagaggagatcatcaaaccattgacgaaaacccagttcttgatttcgatcttggtccattacaaaacagcccctgtttcatagacgagaaccagttcatcccaacacctgtcgatgacctcttcgacgaattgcctgacttagactccaacgttgctgaatcattccgtagcttcgacggtgatagtgttagagccggtggtgaanaagatgaagaagattacaacgacggtgatgantcttcaaccactactacgaataatgatggggacccgtt

SEQ ID NO: 1783 - DNA, 437 bp, Arabidopsis thaliana
  unsure at all n locations
  Clone ID: LIB22-080-Q1-E2-B11
ttaacgggtcgangcacgcgtccgatcgtcacttttctttctccacactttccgcaagattgttctgttcttcaaacgattctaagatgaatggagaagaagtgaaaacgagtcaacctcagaagaagcttcagaaccctactccacgtttaaacgagaggattctctcatctttgtctaagagatcggttgctgcacatccatggcatgatcttgaaatcggacctggagctccagtgattttcaatgtggttattgagatctcaaaggggagcaaagtcaaatatgaacttgacaaaaaaacaggtctcatcaaggttgataggattctttattcttcggttgtgttcctcacaactacggggtttgtcccacgcacacatgtgaagacaatgaccctattngatgttttanttaccaagccaggnacctgggcc

SEQ ID NO: 1784 - DNA, 376 bp, Arabidopsis thaliana
  unsure at all n locations
  Clone ID: LIB22-080-Q1-E2-B3
aacccattttctctgatcgattaggccacgacgtttcctgaggtgcagggcacgagtcgctcaatctctctcttcttcttcttcttttcacgaattttctccgaaacttggtttttattcctcaaacccataaattagggttcagtttttaagcctccgtcttcttcttcttccgtcgtcgtagtcgaaaggtggttttagctatatggatatcttctactgcaaatactcttcaaaacggatgctttgaagccttgatactaatttcatgcgttctatatatgtgcatcgtaaggaagtaatgggagagaatcgtcagattaaattacgttcctgggaataaaatggcaaactaaaagatgcattncaaatggca

SEQ ID NO: 1785 - DNA, 470 bp, Arabidopsis thaliana
  unsure at all n locations
  Clone ID: LIB22-080-Q1-E2-B4
ctgttacgcttgccagtaccggtcaagaattnccgggtcgacccacgcgtccncggacgcgtgggcggacgcgtgggggatcttcttccggaggtgactcgtcgccgggatcaagtccgacgacttctggatctcctccgaggcagctacatcatcatcaacatcagatgaagaagcttcctccgttgtatcctaggagtcaagggtcttttggtaatttgacttcgtctcagtcgtcgttgggtttttgtgcctggagatcgttttcggtggctgattttccgaggtgttttccggcgacggcgagtgggattgggtttaatgactcgtaggaaatgatgataacaattgttttgttaaatttttatattttgaaagttagtaacaaccacatccgggagaatgtatgttgtanaaaaanannttcaaaacctttggaatgggttaancaaaatcttttttttccaaaa

SEQ ID NO: 1786 - DNA, 373 bp, Arabidopsis thaliana
  unsure at all n locations
  Clone ID: LIB22-080-Q1-E2-B5
gggaccgaattggatccgactttgacatatccttacatgtatagagctgtcacacgaatgtcgaaacaaaatgctaaggctgctcttgaagaaatcaatcggatcttggggtttaaacttgctttagaatgcttagaaattcggttttgtctttatcttggtatggatgactatgaagcggctcttcgtgatattcaggctgctcttacgctgtgtcctgattatagaatgttcgatgggaaagtagctgggaggcagctccagacgcttgtgtatgagcatgtcgagaattggacaaccgcagattgttggatgcagctatatgagaaatggtctaatgttgatgatatangttccccttccnggtaaccaa

SEQ ID NO: 1787 - DNA, 431 bp, Arabidopsis thaliana
  unsure at all n locations
  Clone ID: LIB22-080-Q1-E2-B9
cgcagccgtccanaaactcnagggtcgacncacgcntcnnnngacaanngcggnnatagagtcgctggataaaatgcgggaaggaagtaagaaagcaacactgcagctggttgacatggagtgcagttacctcactgttgatttcttcaggaaacttccccaggatgttgagaagggtggtaaccccacacactccattttcgaccgctacaacgattcctatctcagacgaatcggatccaatgttttgtcttacgtgaacatggtctgtgctggcctgcggaattcaatccccaagtccatcgtatactgccaagtccgagaagcgaagcgcagtctcctcgaccatttctttgcggagctcggtaccatggatatgaagaggctctcgtcgctattgaacgaagatncaacaatcatggagaaaccan

SEQ ID NO: 1788 - DNA, 406 bp, Arabidopsis thaliana
  unsure at all n locations
  Clone ID: LIB22-080-Q1-E2-C2
acgcgtccggacaaagaaggtgtgaagaagttgggaaaacaaaattaacgcttgaagaatctaaaggtttagcttttttctcaatccgatcattcaccgagaaatattctattttatatatttatgtgaagctcttcaattgaagaaagaagaagaaaagacaatcgtcaaatgcttgactttggtttcagttcttcttcacgacagctcaaggaagatcggctctttgatgggatgggacaccaagaaatcaccatgggtttatgatgctatcaattactagtagtacgtgttatcttctgaatatatatcatggcatcctctggactgggaaatggagtangcacttcgagatntgccaaagggttaaagaacccctccanntccggtcaattgggtngaccaa

SEQ ID NO: 1789 - DNA, 459 bp, Arabidopsis thaliana
  unsure at all n locations
  Clone ID: LIB22-080-Q1-E2-C3
actgttacgcttccagtgccggtccaagaattaacgggtcganncacgcgtccggaacacgcaggtctatcagtatgtgatgtggttcatcaagattccgagcagaaactagagaatactgctcacgaggcaaaaaacacaatggctagcactgatttcctggcacagctttcaacttctcttttcgaagaagacatggaaccgttcatggaagtagatggcaaagaagttgacaagtcatattatgatggtcttagctcactgttggtgaactctacaaatgatacaaaccgcgaggcttttcctaaccccaccgagcaagaaccttccattgcaccaactcatccaggagaggcaaccctggatgatcatgtgatgcttgagctagatggtacaatcgctttanattctcaacctgaaaatggtggggggggttanccggccggttaattaancgaa

SEQ ID NO: 1790 - DNA, 465 bp, Arabidopsis thaliana
  unsure at all n locations
  Clone ID: LIB22-080-Q1-E2-D1
ntgttaagcttgcaggtgccggtcaagaattaacgggtcgacncacgcgtccgcacacactgctcccaagtcctctcacttcttcttcttcctccgacaccgttgcttaacggttttccatttttgtcccttcaagatgatctcatggcacgacctctacacggtcctcaccgccgtgattcctctctacgtggccatgatcctcgcttacggctctgtccggtggtggaaaatcttctcacccgaccaatgctccggaatcaaccgttttgtcgccatcttcgccgtccctctcctctcttttcacttcatctccaccaacaatccttacgcaatgaatctccggttcatcgccgccgacactctccaaaaaatcatcatgttgtcacttttagtcctaagggctaatttcantcgctccgggtaacccccaattgnncnaccaaaatccttttcctcnccaaa

SEQ ID NO: 1791 - DNA, 443 bp, Arabidopsis thaliana
  unsure at all n locations
  Clone ID: LIB22-080-Q1-E2-D11
ttacgctnccggtggcccgtctagaattcangggtcgacgcacgcgtccnaattccaccatcatctccnctcctacttctcatcttcatcancaccgtctaaagattcaaccttttgtaactgcttccaatggcgttagctcnnnnnnnnnnnnnnnnnnnnnnnnnnnnnnnnnnnnnnnnnnnnnnnnnnnnnnnnnnnnnnnntaatttcagaacaactcatctgaatttcggttctcaaaggaggatttacacaatcaatcctctccttagatcctttaaatgccttcaatcatcttcaagagacgtaaatgcgtcacctnnnnnnnnnnnnnnnnnnnnnnnnnnnnnnnnnnnnnnnnnnnnnnnnnnnnnnnnnnnnnnnnnnnnnnnnnnnnnnnnnnnnnnnnnnnnnnnnccttgacagagcaattgattgan

SEQ ID NO: 1792 - DNA, 406 bp, Arabidopsis thaliana
  unsure at all n locations
  Clone ID: LIB22-080-Q1-E2-D3
tactggtaaaaattggtggtctcttctttgtctccgagtatggagaaaatgagagggaagcgaatcagaccaagagattccggcgagttagtcgaagatgggagatctgaaagcgagcgtaagacgaggaagaaagagaatgatgttgtgagcaaaggaagaatcggaagaggaagaggaagaggagaggtttcgaagcgatctattgaaatagacatttctaatcccgagaaggatattaagcctgacggaagcagaaagtgtttgggttcgacgtgtcatcattgtaagatcttgacgagtgagagtgatcttatcttccgttcaaagtgtaacaaagaaatgttaatgcctttgaccggcatccagnaattcgtatcnagaaggaaccccatgaggaatttag

SEQ ID NO: 1793 - DNA, 377 bp, Arabidopsis thaliana
  unsure at all n locations
  Clone ID: LIB22-080-Q1-E2-D5
gggcggacgcgtgggctaagtcgtcgagttattatgttgcagtaggcaacgtatacctgaatgaagtgaaggcgacgattgacattcaagttgagggggtattgtatgatactacaaatgcttattacaattgctctttccctaacgacaagtgcactctaagtgttccattatttggaactaatgctgctgtactaacctcaccaggtccaaagctgaacaattctaagaatgagttctgcgcaaaactctcatatgaaccaaggtggattgcatacatagtttgcatgggtgtagtgacagcactcttgttaattgtctcgagtctcttcaataaacgacaaccaatcactgaagatgaaacccgttgatgnaaa

SEQ ID NO: 1794 - DNA, 400 bp, Arabidopsis thaliana
  unsure at all n locations
  Clone ID: LIB22-080-Q1-E2-D7
nnnnnnnnnnnnnnnnnnnnnnnnnnnnnnnnnnnnnnnnnnnnnnnnnnnnnnnncatggatctacgatcatgtggtccttcttgaagttttttgatctcttcttcttacgggtttttacttcgtttgattttcctgttgtttgttgttcaaggatcgagatttcgtggagctctctattcgcagcttggagattggacttgtttgaattggctcttttgtgatggaggatactcggtcagttgcttcactcatggactctacatcatccaagattcagcagcttcagaaggcgtttgctgaacttgaaagtcagcgtgctgtaacacttaatctgaagtggaaggaacttgangancantttcaaggggctnaaaagncctttgaaaaaaaggttcat

SEQ ID NO: 1795 - DNA, 410 bp, Arabidopsis thaliana
  unsure at all n locations
  Clone ID: LIB22-080-Q1-E2-D9
nanggaaaaaagttcatgtcttatccggttgcggaagggatgaattattgaagattatggacttcacatccctgccacatttctgtagaagtggaagctctgggtcatctcaccacactcagagcgcaaattgtttttctatcaatcatcccttccatcaacagctatacaactatgtgaagcaccattatgaaacccaaggacaagcagaacctgcaaagcaaggatcattccacgtgggttttcctgagcctgaagctgaacgttgtgatagccaaaaccatagaatcggagctgcacaagtttgagaaccgcaacggtctggccgtgtccattgatgacagaaaatccagtcatgaaacactggcaaatggtgacctctgaatgcctctgaaggaaatcccttangt

SEQ ID NO: 1796 - DNA, 398 bp, Arabidopsis thaliana
  unsure at all n locations
  Clone ID: LIB22-080-Q1-E2-B1
ggtaanggtcaaggggtcgnnggcacgcgtccgccacgatcttcttccaatctcaaatctcccattttctagtgtttcattttgatccttcttccttcctctggagatttctcaaatctcttcaactattttgatttgccgccatgtatcgacgcgccacttccggcgtgcgttctgcctccgcaaggctttcttcttccctctccaggatcgcctctagcgagacagcttcggtttcggctccatctgcgtcgtcgcttcgcaatcagacgaaccgatctaagagtttctcctcggctctccgctcctttcgagtttgctctgcttccacgcggtggagccatggtgggaagctggggatngcctgcnanccttcggggtcaagccaggggaantcc

SEQ ID NO: 1797 - DNA, 394 bp, Arabidopsis thaliana
  unsure at all n locations
  Clone ID: LIB22-080-Q1-E2-E1
acgcgtccgcccacgcgtccgcacacatcaaacacgtgaattgctctctttctggttcactcacctaccattactataagtctgaaagagtgattgaaacccacctcgaaaaatctatccttttttttgttttccttctccggcgaatccccggggagattggtaatcggtaatcacggctatttacgggataaagccacggcctttgagcttcatgtccaacgaaagggttgtttaatcataactaatcctttgcctcacggaggacgtggagctctgccgtctgaaggcggcagtccctccgatctcctcttcctcgccggaggcggttccacaaatagccactaaccctaaacccttttccaaatangggttttaagtcctaaaagtccng

SEQ ID NO: 1798 - DNA, 340 bp, Arabidopsis thaliana
  unsure at all n locations
  Clone ID: LIB22-080-Q1-E1-B9
acgcgtccngtgacaaatgcggcgatanagtcgctggataaaatgcgggaaggaagtaagaaagcaacactgcagctggttgacatggagtgcagttacctcactgttgatttcttcaggaaacttccccaggatgttgagaagggtggtaaccccacacactccattttcgaccgctacaacgattcctatctcagacgaatcggatccaatgttttgtcttacgtgaacatggtctgtgctggcctgcggaattcaatccccaagtcnatcgtatactgccaagtccgagaagcgaagccgcantctcctcgaccatttctttgcngagctcggtacc

SEQ ID NO: 1799 - DNA, 368 bp, Arabidopsis thaliana
  unsure at all n locations
  Clone ID: LIB22-080-Q1-E1-C2
aaagaaggtgtgaagaagttgggaaaacaaaattaacgcttgaagaatctaaaggtttagcttttttctcaatccgatcattcaccgagaaatattctattttatatatttatgtgaagctcttcaattgaagaaagaagaagaaaagacaatcgtcaaatgcttgactttggtttcagttcttcttcacgacagctcaaggaagatcggctctttgatgggatgggacaccaagaaatcaccatgggtttatgatgctatcaattactaagtagtacgtgttatcttctgaatatatatcatggcatcctctggactgggaaatggagtaggcacttccgaagatctgccaaanggttaaaagagct

SEQ ID NO: 1800 - DNA, 412 bp, Arabidopsis thaliana
  unsure at all n locations
  Clone ID: LIB22-080-Q1-E1-D3
atactggtaaaaattggtggtctcttctttgtctccgagtatggagaaaatgagagggaagcgaatcagaccaagagattccggcgagttagtcgaagatgggagatctgaaagcgagcgtaagacgaggaagaaagagaatgatgttgtgagcaaaggaagaatcggaagaggaagaggaagaggagaggtttcgaagcgatctattgaaatagacatttctaatcccgagaaggatattaagcctgacggaaagcagaaagtgtttgggttcgacgtgtcatcattgtaagatcttgacgagtgaanagtgatcttatcttctgttcaaagtgtaacaangaagtgttattgctttgactgcatcaagagatcgtattcaggaaagaacacatgaggaagttangagctg

SEQ ID NO: 1801 - DNA, 402 bp, Arabidopsis thaliana
  unsure at all n locations
  Clone ID: LIB22-080-Q1-E1-E1
acgcgtccgcccacgcgtccgcacacatcaaacacgtgaattgctctctttctggttcactcacctaccattactataagtctgaaagagtgattgaaacccacctcgaaaaatctatccttttttttgttttccttctccggcgaatccccggggagattggtaatcggtaatcacggctatttacgggataaagccacggcctttgagcttcatgtccaacgaaagggttgtttaatcataactaatcctttgcctcacggaggacgtggagctctgccgtctgaaggcggcagtccctccgatctcctcttcctccgccgggangcggttccacaaatagccactaacccctaacccttttttcnaattanggtttttaagttccttagaagtcccggt

SEQ ID NO: 1802 - DNA, 371 bp, Arabidopsis thaliana
  unsure at all n locations
  Clone ID: LIB22-080-Q1-E1-F10
aattctgctttacggacctcctggatccgggaagactcttattgctcgtgctgtggntaatgaaaccggagcattcttcttctgtatcaatggaccggaaatcatgtcaaaactagctggtgagagtgagagcaacctcangaaagcatttgaggaggctganaagaatgccccgtctatcatattcattgatgagattgactctattgcaccaannagagagaagacgaatggtgaggttgatgaggaggattgtctctcagctccttacgcttatggatggactanaatcacgtgcccatgttattgttatgggagcaacatatcgtcccaacagtattgatccggctttgagaaggtttgggaangat

SEQ ID NO: 1803 - DNA, 382 bp, Arabidopsis thaliana
  unsure at all n locations
  Clone ID: LIB22-080-Q1-E1-F9
tccccaaaaacaaaggaaacaaaaaatcagtcggcgaaacgggaagagatctatcggaaatcttacggcggcggaagtcatggcgaacatagaatcagaagcagtcgatttcgagccanaggaggatgaccttatggacnaagaangtacagctattgacggagctgatgtttctccacgcgcgggacatccgaggcttaagtcggctattgccgggagctaatggcgaatcagcaaacaagaccaaaggccgtgggtttcccgaggagaaagattccgatctcagcgtcgtctttcctcacgcnatttcgaatcacntggttcanatggccgtcctggtcccgcaagagattncntttgaaaggattggattatcctgggg

SEQ ID NO: 1804 - DNA, 376 bp, Arabidopsis thaliana
  unsure at all n locations
  Clone ID: LIB22-080-Q1-E1-G10
atctgaaatttctacgtatccccttggacacgtctacgangagaggggacttcagatggagttgcatctcaaagaattaccatgttcaagaatattagtggccaccagggattttttctttctggctcaaggccggggtggtgtatgttgttcagagagcgactacgatttcattcacagctgtgcgacggatcaattgcggcctttantgttcttcacaatgtgaaattgcaatcacggggttcatatatgtcacagcacangggagttttgaagatttgccaattaccttcagcatcaatctatgataattanttggccaagtgcagaagattccctctaaaggccacacctcaccaagttacgtaccaacgcg

SEQ ID NO: 1805 - DNA, 371 bp, Arabidopsis thaliana
  unsure at all n locations
  Clone ID: LIB22-080-Q1-E1-H10
acgcgtccgctcgccaagaagtttcctttcctttgattgcacaactaatctcaaactaaaagatcttctctttaggcatacccangatctttctctctctaaagtctccacctttcacggttttttgcttctcacctgaatccaatcaatctcgccggagtgaattcaccttcctccggttgactcgtcggacttagtccgacctttcaattcgtagattctgtttacaattcactgatcgtttgattagaaatgggttacttgttcttctaagtctctctttagctgaaagtttgttgctttacganncttcgatttacccttacttgttcaagttcgtcatcaaattcgtaagtatgggcataagnagc

SEQ ID NO: 1806 - DNA, 333 bp, Arabidopsis thaliana
  unsure at all n locations
  Clone ID: LIB22-080-Q1-E1-H11
atctggttcaggttctactggaagcggtctcggtgcangtacagggtcaataccatcaagtggttcangtcctggtcttctaccaantgccagttctgttcctggttctttagcgggtggtggttcaggttccttgcctaccactggttcagccacnnnnnnnnnnnnnnnnnnnnnnnnnnnnnnnnnnnnnnnnnnnnnnnnnnnnnnnnnnnnnnnnnnnnnnnnnnnnnnnnnnnnnnnnnnnnnnnnnnnnnnnnnnnnnnnnnnnnnnnnnnnnnnnnnnnnnnnnnnnnnnnnnnnnnnnnnnnnnnnnnnnnnnccangtgctgg

SEQ ID NO: 1807 - DNA, 421 bp, Arabidopsis thaliana
  unsure at all n locations
  Clone ID: LIB22-080-Q1-E1-H4
acgcgtccgcccacgcgtccgcggcgaacaacgagtacgagtttctgagtgagattgggctgacttctcacaacttgggatcttacgttgctggcaaatggcaagccaacggacctcttgtttcaactctcaatcctgctaacaatcagccaattgctcaagttgtggaaagcttctctagaggattacgagcaaggtttgaaagcttgcgaggaagcagctaaaatatggatgcaggttacggctcctaagagaggtgatatcgtcaagacagattggggatgcactaagatccaaacttgactatcttggtcgtcttctttctcttgaaatgggaaagatncttgctgaaaggtattgggngaaattcaagnnagttaantgncatgttgtgaattttgccgtttgggtttnggcccca

SEQ ID NO: 1808 - DNA, 364 bp, Arabidopsis thaliana
  unsure at all n locations
  Clone ID: LIB22-080-Q1-E2-A1
acgcgtgggcggacgcgtgggcattaatcatcatcttttcttcacagagaggaaaaaaaaaaaatggcgacagattctcaaccaaaccaaaagctaacgcttccgttaaaaacaagaatcgctctcaccgttatctccaccatgaccgataacgctcaacgtcctgacggaactatcaaccgccgtttcctccgcctcttcgatttccgtgctcctcccaatcctaaacccgtcaacatcgtctccacctccgatttcgtcgtggatcaatcccgtgatctctggttccgattgtacactccacatgtctccggcgataaaatccccgtcgttgttttcttccaagggggggggttcncttccc

SEQ ID NO: 1809 - DNA, 418 bp, Arabidopsis thaliana
  unsure at all n locations
  Clone ID: LIB22-080-Q1-E2-A2
cgttacgctgnccggtaccggtcanagaattnncgggncgacccacgcgtccncaacgggacccttgaaaccgtgtagccatcttgcttaatgattagagtcttaaagctgtgctctttcttcatcgatttgagcaagtgatcttggaaggctcttgagttctgaattccttgtaagcaatcatggcagggaaaagagaaaactttgtgagggtggatgatttggactctaggttaccatcatcatctgtagccttccaacagaactacgcctccaatttcagtggacaacttcatcctattcatgcaagcaatgaaacttctagatccttcaagaaaggtatccagaagggttccaaagggcttaagtcgatcggacgttcacttggtttcngtgtttancgaacaatgttcccaaa

SEQ ID NO: 1810 - DNA, 409 bp, Arabidopsis thaliana
  unsure at all n locations
  Clone ID: LIB22-080-Q1-E2-A4
ggaactattgtatttacgagcattctacttatacgtggactttgggccggagtagcatacatgcaagagagccgcaacaataggatcaatgaactcgctgatgatcctcgtgcatggaacgggatgcaaccagtttcctgatgaattcgctttacacttgtagaaatcagaattctgacttttgggagagccataattgtttaggttcttccaaggcaataaaaccacagctgagttcagaatcagaaagcagttacagtggatgttcattggcaatgtctgatgatttagtaagtaaaaaaagtgtaatattgtagcattcaccaagtcagctatgcngggtgtgtnacncaaccggggaactnannnctcccccaanggggaccaggttttctaagttccaaaanaa

SEQ ID NO: 1811 - DNA, 387 bp, Arabidopsis thaliana
  unsure at all n locations
  Clone ID: LIB22-080-Q1-E2-A5
taagtcncgggccgacccangcgtcaacggacgcgtggggtccatcttgcctcctccgattatccaaggtcacaattcgtcttctccttcttcagattcctctctaaaccctagctctgagcatggcaacaannnnnnnnnnnnnnnnnnnnnnnnnnnnnnnnnnnnnnnnnnnnnnnnnnnnnnnnnnnnnnnnnnnnnnnnnnnnggacattctgaatcctctcacaatttctccggtggctctagggaaccgagtgttgcagctgaggagggacatagccgtggatcttccaaagagatgacacaaaatgggagcagggaagganagtttttccccaagctaatgcagataangcgtgancattttccgatatgattgggccn

SEQ ID NO: 1812 - DNA, 405 bp, Arabidopsis thaliana
  unsure at all n locations
  Clone ID: LIB22-080-Q1-E2-A7
ttcacaaaactcaccttgaagagaggattaagaagattgtgccggagtttccaagaacagcttctagcaagctactgagaagagtcttgagagatcagattaagcaagaactactatccttacgaagtcgaatataaagccttgatcttaagtttaactagaataaaataagatctgctgagtagtagttgatctacacatgattgggtactgctcggnnnnnnnnnnnnnnnnnnnnnnnnnnnnnnnnnnnnnnnnnnnnnnnnnnnnnnnnnnnnnnnnnnnnnnnnnnnnnnnnnnnnnnnnnnnnnnnnnnnnnnnnnnntttggtgtatatatttcatatcaagattaaaatcctaaatttnccncaaaaaaannnnaaaaaaaaaggggcggccgctc

SEQ ID NO: 1813 - DNA, 401 bp, Arabidopsis thaliana
  unsure at all n locations
  Clone ID: LIB22-080-Q1-E1-B8
tagggtttttcgcctctttctcaactctcttctcgaaaacctagcaggtcgtctctttctcagttctccatgggaaagtctaaatccgccaccaaagttgttgcagagattaaggccactaagcctttgaagaaaggcaagagagagcctgaagatgatattgacaccaaagtgagtcttaagaagcagaagaaagacgtgattgctgctgtccagaaggaaaaagctgtgaagaaggttcctaanaaggttgagagctctgatgattcangattctgaatctgaggaagaggagaaggctaagaaagtcccatccaagaaggctgcttcaagcagtgattgagtcatcctgatgantcntcttcanangntgaannctgnacgcaaaggnaagggccgtt

SEQ ID NO: 1814 - DNA, 414 bp, Arabidopsis thaliana
  Clone ID: LIB22-080-Q1-E2-A9
cggcgaaacagccgatgaagtctcgcctgaatcttctgtacctttcaccggcgattgacttcacttcagaatcgagagagaagaaatcgatggaaaactaaaaatagaaagagtttcaaattctcgctctctcttcaaaaccgcaaatcaagggaacgagagacgagagagagagatgagtaaacggaatccgaagattctgaagatttttctgtatatgttacttctcaactctctctttctcatcatctacttcgtttttcactcatcgtcgttttcaccggagcagtcacagcctcctcatatataccacgtttcagtgaataaccaatcggcgattcagaaaccgtgggccgatcttaccttcttacctcccaagggacgccgccgcaaagggaatccaacaactgggtc

SEQ ID NO: 1815 - DNA, 418 bp, Arabidopsis thaliana
  unsure at all n locations
  Clone ID: LIB22-079-Q1-E1-G4
gaaacaaagccgtacaacgagggctcttcctgggcaacaaaaccaccattttcgttttatctcaatcttcgtctctttcgaaagatctaaccacaacaactccttaagatggataagtatcaacgagtggtgaagccgaaagcggatacgccgattgatgcgaatgagattcgtatcactagtcaaggcagggcacgaaactacatcacctatgcgatgactcttcttcaggataaagggtcaactgaagttgtattcaaggcaatgggaagagctatcaacaagactgtgaccattgtagagctgattaagagaaggatccctgatcttcatcagaacacatctattggattcacaagacatcacagacacatgggaancaacagaggaaaggcntcctaactttggggactacaan

SEQ ID NO: 1816 - DNA, 449 bp, Arabidopsis thaliana
  unsure at all n locations
  Clone ID: LIB22-079-Q1-E1-G8
ccgggtcgacccacgcgtccnatttaatcctcaaactgggctacaagaccacactgctccatttaatcatcaaactggctacaagacctcactgctccatttaatcctcaaactgggctacaagacctcactgctccatttaatcctcaaactgggctacatgacctcacttctccatttaatcctcaaactgggctacaagacctcactgctccattaaatcctcaaactgggaatcgcaatgacccgagaagctcctcctttctgtataatcaaggccattttgacttctctggtggtaatgatgatgatccttatggcttttctgcttccatgagacatagaccacaagtgtanangaaagaagaaaganaagagaagcaggatttacaaatccaacagatgcaaatcagaccggaatataaaggaggagcaangcaccttttgtt

SEQ ID NO: 1817 - DNA, 485 bp, Arabidopsis thaliana
  unsure at all n locations
  Clone ID: LIB22-079-Q1-E1-H1
aactgtttacgcttgccaggnccggtccagaattnccgggtcgacccacgcgtccgcaaagctaaggataaagaaaataaatagtaaatggaagggtttcttcgctttcttgtagcgaaagccatcttattggctttagcatcttcatttgtatcttgttacgacccaagtcctcttcaggacttttgtgttgccgtcgatgacgctagtggtgttttcgtgaatggaaaattctgcaaagacccaaaatacgtgaaagctgaagacttttttacttccggactaaacatcgccggaaacacaataaaccgcgttggctccaacgttacaaacgttaacgttgacaaaatccctgggactcaacaccctcggagtgtctcttgtccgaattgactttgccccgggangtcaaaacccgccacacacgcaaccacgagccactgagattccccctgggtgtncaaaggaaantcctaaaccggttt

SEQ ID NO: 1818 - DNA, 442 bp, Arabidopsis thaliana
  unsure at all n locations
  Clone ID: LIB22-079-Q1-E1-H11
ttcccnaggccttttctcaaccttgattcttanccatggagttctggggaattgaagttaaatcaggaaagccagttacagtgactcctgaagaaggcattcttatccacgtttctcaggcatcgcttggagaatgtaaaaacaagaanggagagtttgtgcctttacatgtaaaggttgggaaccagaacttggttctgggaactctatcgactgagaacatccctcagcttttctgtgatttggtattcgacaaggagtttgagctttctcacacttggggaaaaggaagtgtttactttgttggatacaaaactcccaacattgagccacaaggctattctnaggaagaanaggaanaagaggaagaagttcctgctgggaatgctgccaaggctgtagctaaaccaaaggctaancctgcagaagtgaagccagctgt

SEQ ID NO: 1819 - DNA, 480 bp, Arabidopsis thaliana
  unsure at all n locations
  Clone ID: LIB22-079-Q1-E1-H3
cttctacgctgnncggtaccggtcaanaattcccggggcaaatttcccccggcnacgacatggacgtatgtgaatgaatctcgctatcaaaccctaattcaaccatcgccatgaaggtgctcggagaagcttcttcatatccttacagatcctgtatcatcgtcgtatttctctccgtttctctcttctggctccgtcccagcacttaccatccccagcaacaaaatctcaatccagagaacgtaactcgtttggagtctgagaatgaaacgaagactaactatataatccgatttaagcagtataagccggcgaaagatcatcgaatttacctcgaatcgaaggtccgatccggtggttggggttggatcgagaggattaacccggcgacgaagtatccgactgacttcggtgttcnatggattcaagaaagccggaaanaaggcnttggttgganaaaatnaaaaggctgaaaatggt

SEQ ID NO: 1820 - DNA, 481 bp, Arabidopsis thaliana
  unsure at all n locations
  Clone ID: LIB22-079-Q1-E1-H4
tgttacgttcccggccggtcaagaattacgggtcgacccacgcgtccgcaaagacataatttcttcggtgacttccatggctccgcctgtctctgatgattccctacagcctcgagatgtttgtgttgtgggagtggcgcgaacgcctataggggacttccttggctccctctcgtctttgactgctacaagacttgggtccatagccatccaagccgcacttaagagagcacatgttgatccggcccttgtggaagaggtcttctttggcaatgtcttaactgccaatcttgggcaagcaccagcaagacaggctgcacttggtgctgggattccctattctgtgatctgcaccactatcaacaaagtttgtgctgcangaatgaaatctgtaatgctaancgtctcaaagtatccaactcggctttgaatgatattgttgttgcctgggtggggatgggagaancaatgtcaaacgtta

SEQ ID NO: 1821 - DNA, 375 bp, Arabidopsis thaliana
  unsure at all n locations
  Clone ID: LIB22-079-Q1-E1-H5
aaaagtcttcttctttttttacaagtctgagaattttctacagaaacaaaaatctgattgtttttcccactttgcatctgttttgaggatgccagctacggattttcaaggatcatttggaaggtcgttgctaagtttacggcgagaccaagttgactcatcaacagtcgtctccggaagtagtagccaccacgagccaagcaccatggaggttgagctagattcgtttcaaagacaagtcgctgagaaattcatcgatctcaacgcttcttcaaacgaccttctctctctcgaatggatcggaaagcttcttgattctttcctctgttgtcaagaagagtttcgagctatcgtattcaaccaccgatntcaaga

SEQ ID NO: 1822 - DNA, 421 bp, Arabidopsis thaliana
  unsure at all n locations
  Clone ID: LIB22-079-Q1-E1-H6
tttgtatgctttgttcaggggttagggcacagctaagccctgacatttatgctaaatcgtgccccaatctagttcaaattgtccgtaaacaagttgccatcgccctgaaggccgagatacggatggctgcttctctcattcgtcttcatttccacgactgctttgttaatgggtgtgatgcgtcgttattgttggatggagctgacagcgagaaactcgcgatcccaaacattaactctgctangaggatttgaagtaattgatacaatcaaagccgctgtggaaaacgcatgtcctggtgttgtttcttgtgctgatatcctcactttgggccgctcgtgactccgttgtattgantggaaggcctgggtggaanagtggcattaagaaagaaaanatnggtttggtgggaaatccagac

SEQ ID NO: 1823 - DNA, 391 bp, Arabidopsis thaliana
  unsure at all n locations
  Clone ID: LIB22-080-Q1-E1-A1
gggcggacgcgtgggcattaatcatcatcttttcttcacagagaggaaaaaaaaaaaatggcgacagattctcaaccaaaccaaaagctaacgcttccgttaaaaacaagaatcgctctcaccgttatctccaccatgaccgataacgctcaacgtcctgacggaactatcaaccgccgtttcctccgcctcttcgatttccgtgctcctcccaatcctaaacccgtcaacatcgtctccacctccgatttcgtcgtggatcaatcccgtgatctctgggttcccgattgtacantcnacatgtctccgggngataaaatcccccgtcgttgttttcttccacggcgggtggtttcgcttttccntcagtccgaantggcgttagccttta

SEQ ID NO: 1824 - DNA, 415 bp, Arabidopsis thaliana
  unsure at all n locations
  Clone ID: LIB22-080-Q1-E1-A2
cgggacccttgaaaccgtgtagccatcttgcttaatgattanagtcttaaagctgtgctctttcttcatcgatttgagcaagtgatcttggaaggctcttgagttctgaattccttgtaagcaatcatggcagggaaaagagaaaactttgtgagggtggatgatttggactctaggttaccatcatcatctgtagccttccaacagaactacgcctccaatttcagtggacaacttcatcctattcatgcaagcaatgaaacttctaaatncttnaanaaaggtatccacaagggttccaaaagggcttaaagtccatnggacgttcacttgggttccngtggttaaccaagcaatgttnccaaaaagaccttaaaagtatcngaaangaagatatttgattcctcaaggatna

SEQ ID NO: 1825 - DNA, 413 bp, Arabidopsis thaliana
  unsure at all n locations
  Clone ID: LIB22-080-Q1-E1-A4
ggaactattgtatttacgacgcattctacttatacgtggactttgggccggagtagcatacatgcaagagagccgcaacaataggatcaatgaactcgctgatgatcctcgtgcatggaacgggatgcaaccagtttcctgatgaattcgctttacacttgtagaaatcagaattctgacttttgggagagccataattgtttaggttcttccaaggcaataaaaccacagctgagttcagaatcagaaagcagttacangtggatgttcaatgggcaatgtctgatgatttagtangtaaaaaaagtgtaatattgttncattcaccaagtcaagctaatgnctggtgtgtagctcaaactggggaactaagtcctccgccaannggnggaccaatggttttcntaagtttc

SEQ ID NO: 1826 - DNA, 391 bp, Arabidopsis thaliana
  unsure at all n locations
  Clone ID: LIB22-080-Q1-E1-A8
tctctcgctctcctccccctttccgccgatcgtcctttccccaccgtcnagtttttccctatccatctccgggctttacgttgcacaccagatgtctgttgatctctgcaagaagaatccatcttttctttggtgtgactgtggttatatgagcagggggaggttgtggtgttttcagattatcctcttcangcactggacttgacttgtcntcaattcctcgacnnnnnnnnnnnnnnnnnnnnnnnnnnnnnnnnnnnnnnnnnnnnnnnnnnnnnnnnnnnnnnnnnngatcaaagggtattcgtttctgcggctcctgtttacngtgaacttgaagactaagttttctttgcnaaactctcacttacgggtgaaagagttacaggna

SEQ ID NO: 1827 - DNA, 461 bp, Arabidopsis thaliana
  unsure at all n locations
  Clone ID: LIB22-080-Q1-E1-B1
ttacgcctgtcngtacgcgtccgnaaattccanggtcgacgnacncgtccgccacnatcttcttccaatctcaaatctcccattttctagtgtttcattttgatccttcttccttcctctggagatttctcaaatctcttcaacnattttgatttgccgccatgtatcgacgcgccacttccggcgtgcgttctgcctccgcaaggctttcttcttccctctccaggatcgcctctagcgagacagcttcggtttcggctccanctgcgtcgtcgcttcgcaatcagacgaaccgatctaagagtttctcctcggctctcngctcctttcgagtttgctctgcttccacgcggtgganccatggtgggagctggggatcgcctgctagccttcgcgctcaagctaggaattccactccggttatggagaaatttgaacggggaatacgcaaaccaaggggt

SEQ ID NO: 1828 - DNA, 426 bp, Arabidopsis thaliana
  unsure at all n locations
  Clone ID: LIB22-079-Q1-E1-G2
tacgaccgtggccttatcggagccactcatgattggtgtgaagcctttgacacatacccacgaacgtttgatcttatccacgcatggaacaccttcacagaaacccaagcacgtggatgcagctttgaagatctgcttatcgagatggatcggatactacgcccagaaggatttgtcataattcgtgacacaactgacaatattagctatatcaagaagtatctgacattattgaaatgggataaatggtccacagagacaactccaaaaggtgatcctctgtcgaccaaagacgagatagttttgatcgccagaaagaaactttggagcttgcccgccatttcaagtgtcctgaaatctaacagtcaacaggcgaatgaatgagatttacaagcatcaagaaggcgcgtanctgaaggaaaatac

SEQ ID NO: 1829 - DNA, 359 bp, Arabidopsis thaliana
  unsure at all n locations
  Clone ID: LIB22-080-Q1-E1-B11
gtcacttttctttctccacactttccgcaagattgttctgttcttcaaacgattctaagatgaatggagaagaagtgaaaacgagtcaacctcagaagaagcttcagaaccctactccacgtttaaacgagaggattctctcatctttgtcnaagagatcggttgctgcacatccatggcatgatcttgaaatcggacctggagctccagtgattttcaatgtggttattgagatctcaaaggggagcaaagtcaaatatgaacttgacaaaaaaacaggtctcatcaaggttgatangattctttattcttcggttgtgtanccctcacaantaacggggtttgtcccacggcacacn

SEQ ID NO: 1830 - DNA, 449 bp, Arabidopsis thaliana
  unsure at all n locations
  Clone ID: LIB22-078-Q1-E1-D12
gtccgaggctctccacggnaattccgactttggccaaagcnccaaattncggtggngctttncccggngcnacnagcttcccncaggtcancacnaccgcagcttctttcaaccantcncnatgggaagagatcggacgggtggtgtctgatgaggcaagagctatgtacaatggtggcgtggccggtctgacatattggagtccgaatgtgaatatcttgagggacccgcggtggggccgaggccaagaaactcccggagaagatcctatcgttgccgcaaaatatgcccgccaagctacgtccgggggaattcaaggtactgctgccggtaaccgccttaaagtcnccgcatgttgcaaacattacactgcttaangatcctgataantggaaaggggtcaaccgtttccaacttnaacgctaaaggtcacccaacaagatttagag

SEQ ID NO: 1831 - DNA, 458 bp, Arabidopsis thaliana
  Clone ID: LIB22-078-Q1-E1-D3
acgcgtccgctctctcacacacacccaatttgcatttctttcgtcatcatcatctactctttctgcgtttttcccagctgaataatctaaacaaggaaaagtaaaacagagtaccaatctcagattcatcagctccacttgaatttaaagtagccataactgttcgatcataggatggaagaagcaactcaagtaacgagttctgaggtccctgtagtgaaaggtgatgttgatgaccttaagacagctgatatttccgtcaaggctgtgaatggagaagtgccaaaggaggagaaagaagaggaagatggggaattcataaaagttgagaaggaagcttttgatgccaaaggatgatgcggagaaagcagatcatgttcctgttgaagagcaaaaggaagttattgaaagaagctcgagtggttcacaagagagaactacatgaatcacaagaaaaa

SEQ ID NO: 1832 - DNA, 454 bp, Arabidopsis thaliana
  unsure at all n locations
  Clone ID: LIB22-078-Q1-E1-D4
acgcgtccgctttgttaatcagcaaaaaccctagaatatcttagagcttcgcttcactttcaagctcgagactttgagaaagatgcctccgaaagccaaagctaaagatgcaggtcccgtagagaggcctattcttggccgtttctcttctcacctcaagatcggaattgttgggttaccaaatgttggaaaatctactcttttcaacactcttacaaagctttcaattccagctgagaatttccccttttgtaccattgagcctaatgaggcacgtgtgaatatccccgatgagaggttcgattggctttgccaaacttacaagcctaagagtgagattccagctttcttgggaaattcatgacattgctgggcttgttagaggagctcatgaaaggacaaggtcttgggaaacaacttccttgtcccaataattccgtgcaagtttgatggn

SEQ ID NO: 1833 - DNA, 519 bp, Arabidopsis thaliana
  unsure at all n locations
  Clone ID: LIB22-078-Q1-E1-D5
ctggtnacctgttctatggcccggaattcccgnaatcgacccacgcgtccgtgaattttcacngncgacctctctctctcatctactaagctctcctccgagtattgttggcttcagaccaaatcttctccggcgctgtagcgtttcccccgtttcccctttttaacctttgcaaacaatgantgggcgattttctcggtcaatctatgttggtaacttgcccggtgacattagggaacatgagattgaagatatcttttacaagtatggccgcattgtcnatattgaattgaaggttccacctcggcctccatgttattgctttgttgagtttgagcattctcgggatgctgaagatgccatcaagggccctgatggctataatttggatggctgtcgcttgaggggtgaagcttgccacatgggtggtccgangacaagtccntcnaagtgattcgtccctgngtgggctaactggttggtgggtggcaagcngctaatggntgggtggaaggtggg

SEQ ID NO: 1834 - DNA, 474 bp, Arabidopsis thaliana
  unsure at all n locations
  Clone ID: LIB22-078-Q1-E1-D7
acgcgtccgtgaattttcacggccgacctctctctctcatctactaagctctcctccgagtattgttggcttcagaccaaatcttctccggcgctgtancgtttcccccgtttcccctttttaacctttgcaaacaatgagtgggcgattttctcggtcaatctatgttggtaacttgcccggtgacattagggaacatgagattgaagatatcttttacaagtatggccgcattgtcgatattgaattgaaggttccacctcggcctccatgttttgctttgttgaagtttgagcantctcgggatgctgaagatgccaatcaaagggccgtgatggctataaatttgngatggctgtcgcttgaggnttgagccttgcacaatggggggtccnangacaagtcctcaaggtnnttcgtccnntggtgggcctacnnntngttngtggcaagccggctaatggttggtggang

SEQ ID NO: 1835 - DNA, 499 bp, Arabidopsis thaliana
  unsure at all n locations
  Clone ID: LIB22-078-Q1-E1-E11
ctggtttgcctggncctaccggtcccggaaatcccgggntcgacccacgcgtccgatctnaccaaagtctgtgataatttttccgacagaagtttcatctgagaaaagatggctacatttgcacttcccttctgcgaaattcccgaggatctccagctccgaatcttatccctcctcacaccagcggagatctccagcttcgcctgcacatcgaaacgcttcgcctcgctatgtcaagaagacggcaaaatctggcacgttatgtgcgatcangagatgggggaagaaaactaagatccagaaatgggcaaacggtcaaatcccttataggacacctttacaagactctaaagggattgggngaatctnantggcttctgggcgtctctgcggcagancnaatcccgcccgcttcatcgccgcccgcttgttttcttcgaatgggggtcctccntttaaaattgggattcnacanntttaacccaccgggaagaagatn

SEQ ID NO: 1836 - DNA, 470 bp, Arabidopsis thaliana
  unsure at all n locations
  Clone ID: LIB22-078-Q1-E1-E12
acgcgtccgcaaaagttggaatcgtgcacgcctctcganttatctcnggcnccnaanctctctccnggtgagnttctgtagaagaaaaaatttcaatctttgttggattttctgggaaaaactcagatgggtttgctctgaatcgattggaaaatcaaaccggtgtggactctgcaaagttggttgatatgaacagtcttgtgagaagaaaacaanttgattctgttcatcttatcaaaaacgatggacctcatcagcttgccaagaaactatccgccgttgatcttgttgctattggagttgggacaacaattggagcaagagtgtatattcntgtgggaacggtagctagagagcacacangacctgctcctgctgtatcattcctcattgctggagtactgctggntctctctgcctggttgttacgctgagcttgcttcncgttgtcaacctgcctggggaagtgc

SEQ ID NO: 1837 - DNA, 419 bp, Arabidopsis thaliana
  unsure at all n locations
  Clone ID: LIB22-078-Q1-E1-E2
tctaccctatacttatgaagaagggctcaacaaccgtggctctctatggtttaggaaacatcagggatgaacgtctcaatagaatgtttcagaccccacatgctgtccaatggatgaggcctgaagttcaagaaggatgtgatgtttctgactggttcaacattctggtgcttcatcaaaatagggtgaaatcaaaccccaaaaatgcaataagtgagcactttcttccacgtttcctcgacttcattgtgtggggccatgagcatgaatgcctaatcgacccccangaaggtatctgggaatggggctccacatcacacaaccaggatcttcctgtggcaacatcacttatttgatggggaatcgaagccaaaacaatgttcctccccttaaaaatcaaaggggaaatcaataaccgt

SEQ ID NO: 1838 - DNA, 465 bp, Arabidopsis thaliana
  unsure at all n locations
  Clone ID: LIB22-078-Q1-E1-E4
acgcgtccggtanntccttttttctctatctcgctttctctgtttcaccacagtcatggcgagtcggcgaatcttatcatcgcttctccgttcttcttcgagtagatctacttctaaatcctccttgatcgggagccgaaacccgaggcttttatcccccggtcccgcgcatggagccgctccatgtgggactctccttggccgagtcgccgagtattcgacttcttctccggctaattcggctgcaccatcttctgctcctgctaaagatgagggaaagaagacctatgattacggtggcaaaggcgcgatcgggcgtgtgtgtcaggttaattggtgcaattgttgatgttgagattcnaagattaaggaggggattgccccgattnatgacatctcctcgaaggtaacaggttaatccaacaaagggttggnccttnganggtgtccncaatcaacttgggt

SEQ ID NO: 1839 - DNA, 465 bp, Arabidopsis thaliana
  unsure at all n locations
  Clone ID: LIB22-078-Q1-E1-E5
acgcgtccggggtttttctcatccacatcggattttagaataccgtctagtagctcgatgaatcanactttacctcggtgtcatctttgtaacgagaagtatgagcaagaagtcaccgcctttgctaagtcggggtcgatgatcgatgatcagtgttcggagaagttaccttcttggttacgaaatgtggagcatgaacacgagaaaggaaatctcggtaaggttaaaagatgatccaaacgtattancctctcggattcccgctctgcagaagaaatgggacgacatttgtcaaagaatccatcaaactccggcgtttcctaaactcagttttcagcccgtnanaccgcaagttcccgcttcagcttggntcttctagccangaccaagatgagtcttgggagcccaactgagaaaattgttttgcactaggacctctgaaaagcttttaaggggatgggggct

SEQ ID NO: 1840 - DNA, 459 bp, Arabidopsis thaliana
  unsure at all n locations
  Clone ID: LIB22-078-Q1-E1-E6
acgcgtccgcttttaactctcggtcaagtatganaaagtaccanagcgaagaagatgaagatatctctgaacagaaacctcgggcaaaagatanagcagccagtgggcaacaatctgttgggcaagcatttcttctcggngctcccaagctagaangcttcaacccaacaggggacatgtcttcttctattactccgcggagtgcagcatcggttccaanancatcaggtaaagtttcagacacctcttctgggaggcgaagatcagacnagtcgctcgcacaatctgttccaaatttttctgaacttataanggnaaacacgaaaccatcttctttaagctgtcaaaactactatgcgatnacangtgaaaagtnntggtcgcaccaagaatatcnagggnagattcacttctccnaagacctccgattattnagggaaagctcctctggggaanata

SEQ ID NO: 1841 - DNA, 466 bp, Arabidopsis thaliana
  unsure at all n locations
  Clone ID: LIB22-078-Q1-E1-E7
acgcgtccgattcncttcttctccaccgaatatatctttgtctttgccctttcccccttccttcgatgtgatacctaatcaaccactctcaacaccatccaaccaccacctccagagcaaagaannnnnnnnnnnnnnnnnnnnnnnnnnnnnnnnnnnnnnnnnnnnnnnnnnnnnnnnnnnnnnnnnnnnnnnattctgttggttttgcaatggtttggaggttcgttaatggcgtcatagactcgggagattaagggagaacaagtactctgcatcttctggatttctcactatttctccttctctagaggaataggcgagaaattgagattaataaaaaggggtgttttttgggttcccctccgtttgtataaaagcctgccgcttcttaagggttctttggnaattcccaaagtgatgggaggaaaaatcctggttacttcgcatgaanctaattaacgaa

SEQ ID NO: 1842 - DNA, 462 bp, Arabidopsis thaliana
  unsure at all n locations
  Clone ID: LIB22-078-Q1-E1-F10
acgcgtccgcttcnttctacaaatgggtttccaaagatctatctcttcttcttctgcattaaaatggcttggatttgtaacagcggtttgggttcaatccatctccggcaacaactacactttttcaaactactccggtgctcttaagtctctcatgaatctcaaccagctcgagctcaacaacctctctgtcgctaaagacgtcggaaaagcctttgggatcctggctggccttgcctctgaccgtcttcccactccggtcatcctccttattggttgctttgaaggtcttcttggttatggtgtacaatggctcgttgttagccgcaccatccaaccaatcccttattggcagatgtgtatattcctctgtatgggagggaacagcacaacgtggatgaacacggcggttctagtgacttgcatacgcaattttcgacgaaaccgtggtccggtctccgg

SEQ ID NO: 1843 - DNA, 452 bp, Arabidopsis thaliana
  unsure at all n locations
  Clone ID: LIB22-078-Q1-E1-D11
tccggagctctagattcagataagaacaatggcgattccgatgcctactcgccagctattcatcgacggcgaatggagagaacccatcttgaagaagcgaatcccgatcgttaatccagctactgaagaggtcattggtgatattcctgcagctacaacggaggacgtggatgttgctgtcaacgctgctcgaagagcattatcaaggaataaagggaaagattgggccaaagcacctggnagctgttcgtgctaagtatttacgtgctattgctgctaaggtaaatgaaagaaagacggatctggcaaaanctcgaggcgcttgattgtggtaaaccatttggattgaagcagtatgggatatggatgttttgcnggatgttttggaatttaagctgaccttcctgaaggattagatnctaagcagaaangcaccagtccccgctttccaa

SEQ ID NO: 1844 - DNA, 473 bp, Arabidopsis thaliana
  unsure at all n locations
  Clone ID: LIB22-078-Q1-E1-A11
acgcgtccggtttgataaatcaccattggtggataaanatgtgtttgtggctccgagtgcttctgttattggtgatgttcagatcggaaaaggctcgtcgatttggtatggctgtgttcttcgaggtgatgtgaataacatcagtgttggatctgggacgaatatccaagataatacgcttgtacatgttgcaaanaccaacataagtggcaaggttctacctactctgattggggacaatgtaacagtaggtcacagtgctgtcattcatgggtgtactgttgaggatgatgcttttgttggtatgggagcaacactacttgatggtgtggtggttgagaaacatgccatggttgctgctggttctcttgtgaaacanaacacgcgaatcccttctggagangtgtggggaagaaatccaacaangttcatganaaagttaacagatgaaagagatagtatacatctcacan

SEQ ID NO: 1845 - DNA, 427 bp, Arabidopsis thaliana
  unsure at all n locations
  Clone ID: LIB22-078-Q1-E1-A2
tctctttgcttcgattcccaaaacgactatttccaaaagggtttaaagaagttatgaacactaatccagtgactaatgggtttgttaaacctgttcctactgaagaagaacaagcaaagattgaggaagtgaggaagctattaggtccattaccggagaagctttcgagtttttgttccnatgatgcagttttaaggtatctaagggcaaggaattggcatgtcangaaagctactaanatgcttaangaaactttgaaatggagagttcaatacaaacctgaggagatttgttgggaggaantagctggtgaaccancngacagggaagatatatagatcgantttgtgtcgaataaacttggaccgacctgttctcattatganaccgantgttngagaattctaaaatccgggtgaacaangcc

SEQ ID NO: 1846 - DNA, 444 bp, Arabidopsis thaliana
  Clone ID: LIB22-078-Q1-E1-B1
atcttaacaccaatcccaaatcagaaaaatcaaaactttttattttattttatcaaaatggcgcttatgaatggaagcatgaatctatcatcggtcaaatcatcgatgatcaaccaccgtcaaccaaacttctcctccgccgtctccagacccacttctttccggatctccgccgtgcaaaccgacccaaaaacaccagctgcttcatcggcgtcggcggcgacgacgactccggcaacgttgacgaagcccgttggagttaatgtgggtaaaggaaaatgggcaccagagagttggaggacgaagaaagctttacagcaaccggactatccagatttagctgcgcttgaagctgtgctagagacgatcgaagcttttcctccgatcgtgttcgccggagaagctagattgcttgaggaacgattaggacaagcagcgatgggt

SEQ ID NO: 1847 - DNA, 467 bp, Arabidopsis thaliana
  unsure at all n locations
  Clone ID: LIB22-078-Q1-E1-B10
acgcgtccgcctgtctgttcactggaggtgaattttgatttttttggccgatcggatttgagtttttgaatctctgattgctgacgaaaatgccggcgttttacggangaaagcttacgaccttcgaggacgatgagaangagagcnagtatggttacgttcgtaaggtttcaggtcctgttgttgttgccnatggtatggccggtgctgctatgtatgatttagtgcgtgttggtcatgataatttgattggngaaatcatccgtcttgaagganattctgccaccatccaagtttacnaggaaacagctggattgacagttaatgatnccgttcttcgaacacacaagccactttctgtggagctcgggccaaggaatattgggaaatatctttgatggaattcagaggcctttgaagactattgcaagaatatccggtgatgtgtacattcctncgggtgttgt

SEQ ID NO: 1848 - DNA, 481 bp, Arabidopsis thaliana
  unsure at all n locations
  Clone ID: LIB22-078-Q1-E1-B6
acgcgtccgctttnaatcatttcttcgagagaggtagcgagaaagggatcgccttttctcactctctgcggattctcaattttgggcaagaaggcaagaacagtttttatcgcaattgagtcttgaagaccacaaggatttgatcacattggtgcttctgcctgtttatctgagtttgaggacaagaacttctggggcgtttataatttgccatggctagtaatgagaatctaccacccaatgttatcaagcagcttgccaaggagctgaaanagtcttgacgaatcccctccaagatggcatcaaggttgtggtaaatgaccaagatttctcacaaatatgtgctgataattgaanggaccanttgggtactccctaatgaaaaacgggcctttcccgtaangaaagtttggccttgtcaacatnaatttccaacaattccgcccccccaaaagggctactttcaatgacnaaagaattt

SEQ ID NO: 1849 - DNA, 467 bp, Arabidopsis thaliana
  unsure at all n locations
  Clone ID: LIB22-078-Q1-E1-B7
acgcgtccgaatgccttctccaagtcagtttctttcctcattcaacagtttctcttcttcttcctctgcttaaacgaaaccctcaaagaaataaaaaaaagctctcaagaatggcgaacaaaccaagaaccagatgggttcttccttacaagaccaaaaacgttgaagacaattactttcttggtcaagtccttggacaaggccaattcggaaccactttcctctgtacccataaacagacaggtcaaaagcttgcctgcaaatccatacccaaaaggaagctcctttgtcaagaagattacgacgacgttctgagagagatccaagataatgcatcacttgtctgaataccccaacgttgtccgtataanagagtgcgtacgaggacaccaaaaacgtgcatccttgtgatggagctttgtgaaaggangtgagttgtttgataagaantgtgaaagagaagtcat

SEQ ID NO: 1850 - DNA, 486 bp, Arabidopsis thaliana
  unsure at all n locations
  Clone ID: LIB22-078-Q1-E1-C12
ggccnggaattcccggatcgacccacgcgtccgcccaagcgtccggagaaatctaccgtcgagaaggagcttcagtctattatcagtagctccggtaatggttcgcttaaccgtgangcttttcgaaaagctgttgtcaatactctcgagcggcgtttgttctatatcccttcgtttaagatctacagtggcgtcnctggactttttgattanggncctcctggctgtgctattaaatccaatgttctcagcttttggcgtcaacatttcattcttgangagaacatgctagaagttgattgtccatgtgtgacaccanaggttgttctcaaggcatctgggcatgtagataagttcactgatcttatgggttaagcgatgagaaaactggcacatgttaccgtcctgaccacttgctcaaaggattatttgtaccgagaagctgggggaaagatnttanatctcctgccgaaaaaactgccaaan

SEQ ID NO: 1851 - DNA, 440 bp, Arabidopsis thaliana
  Clone ID: LIB22-078-Q1-E1-C2
gcccacattttaaacccattttagccttttctgtttccgccgccgactgatcggaataatcgatcaaagagagaacaactgaatcttcgccggatactacgccgatgacgattgcggcagcgccagcacgccagacagatcgatcagccactggtttcaaccctgcttacgtcacgacggcgaaggcggtgagcgttccggttcaagttcctccggcgactgtggtttccgaaggattaggtaaagatgcgttgatctcatggttcagaggagaattcgctgcggcaaacgcgataatcgacgcgatgtgctcgcatctaaggatagctgaagaagcggtatctgggatcggagtacgaagctgtattcgcggcgatccatcgccgtcgtcctgaattggatccctgttcttcagatgcagaagtatcattcatcgctga

SEQ ID NO: 1852 - DNA, 463 bp, Arabidopsis thaliana
  unsure at all n locations
  Clone ID: LIB22-078-Q1-E1-C3
acgcgtccgttcnagttatacccaaaaatgatcagaatccagcgtcaggttttgtattcagcaacaaaaataaggttctcgataacagtcatacacctgtggggacttggggtaaccaactcacctatcagccggttatggccctaacccagagtcagcttgatgaagccatgaaacccgtatctcatctttcatgtgtttctgttgagaatggtgccaaccgaattagcgagtcaaattcgacatcaacgtctgttgtgccaaagaacaatactttttcaagcagcacaagtccaataaattcattgcttgctgagggcaaaattcaatttgttacatcttccactgttatccctccctgtggtggggcgtacagaggaaaggatantctttatattttgaaanaagataacaaacatcgaaaatcaatcaaccaactgggcatagaagatttgtgaagcan

SEQ ID NO: 1853 - DNA, 505 bp, Arabidopsis thaliana
  unsure at all n locations
  Clone ID: LIB22-078-Q1-E1-C4
tggttccctggcctaccggtccggaattcccgggtcgacccacgcgtccgcccacgcgtccgcctaaacccggaacccttagacacgcggtgatccaagacgagccactatggatnatcttcgcgcgtgacatggtcataaaactaaaagaagagctgattatgaactctttcangactatanacggccgtggagcgagcgtccacattgctggtggcgcgtgtatcaccgtccagtacgtgaccaacatcatcatccacggtgttaacatccatgactgtaaaagaaaggggaatgcttacgttagagactctccgtcgcattatgggtggaggacagcgtctgacggtgacgccgtctcgatttttggtggctcccacgttgtgggtagaccattgctcgttgtccaactgcgctgacggtctgatacacgccaattcatgggatcaacgggccaattactatcctctaataactaatttgngtcaccacaaataangtcatg

SEQ ID NO: 1854 - DNA, 437 bp, Arabidopsis thaliana
  unsure at all n locations
  Clone ID: LIB22-078-Q1-E1-C5
acaacaaatctcaggcggctcaacactatcctcttctacattttccaacgatggcctcaaacgcactctcgtctttcaccgccgctaatcccgctctgtctcctaagccactactccctcacgggntctgcttctccgtcggtttctctcggcttctccangaaagttggcggcggcagagcagtggtcgttgcagcggctacgagtggncacaaacaacatgccgatgaccggagtcgtgttccagcctttcgaagangtgaacaanagccgatctggccattccaatcacatctcatgcctctctcgctcgccaaaggtttgccgacgctancgaanggcagttcattaatgagcanatcaaatggtgggaatacaaccgtcnccctaatgtgttaccaantcaantggtacngcattacctttggccaggagan

SEQ ID NO: 1855 - DNA, 508 bp, Arabidopsis thaliana
  unsure at all n locations
  Clone ID: LIB22-078-Q1-E1-C6
gttngcctgttcgtaccggcccggaattcccgngtcgacccacgcgtccgcccacgcgtccgctatggaatcccaaacaacgtttaagtatgaaagtcttgcgttcacaaagttgtctcactgtcaatggactgattacttcctctctgttcccatcgatgaatcggaactagatgttattacaagagagattgacatactcaagccggaagttatggagctcctatcttcccagggtgacgatgagacatcgaagaggaaagtgcttttgattcaattgcttcttaantcttggncncgcatttcattttgaaaatgagatcaanantatactagaacatgcttttcgaaagatagatganatanctgggtgatgaaaanggacntgtctacaatctccatcatgttccgttgtccttaagaacatacgggncacaatttaccatcaaagttaagacaattgtttaatccggtggcaacaantctaagaatgtnttaacatttattt

SEQ ID NO: 1856 - DNA, 506 bp, Arabidopsis thaliana
  unsure at all n locations
  Clone ID: LIB22-078-Q1-E1-D10
cggtccggaaatcccggatcgacccacgcgtccgctccncgtcttcnctgttcgtctgccatatgagtccttcccaagcccaacttttctgaaattgaatcttttgggacagagatggcattaattcagaaaccagtggtgtgcanagacactaataagatcttcatgaagcaaatacttgcgtttactgaacaggtgaccattacacagaacagtaagctctcgccacgcacatggcacaaggaagtgataaacggactaacttgtagtctctttccccctgtcaagaattagcaaatcatccttcttttacatgttctgaancacatctaagatagaattgaggcacanangtcnacggatgtgtcccatgancaacangaaaaaaaaganacttcccantgaatctgntaaacnaaagtcgcaaagcaaactctgttcacnanggaggagatngnggccacgccacctatgggaagacatggaatctggggctaaaatttcnc

SEQ ID NO: 1857 - DNA, 464 bp, Arabidopsis thaliana
  unsure at all n locations
  Clone ID: LIB22-078-Q1-E1-A10
gggttcattttgacgttttctttagatctgttaataatcccatccatggcttggtctantcactagtggtgttatctctctgtgtggaataaaaagcaaggttttttaatcacttggattgttttaagatatggcaactttgaacccttttgatttgttggatgatgatgctgaggatccaagccagctcgctgttgccatcgagaagattgataagtccaagaaatctgggacaggtttcgagcttgcctgctaagtcagctcctaagcttccatcgaagccacttcctcctgctcaagccgtgagaaaagcaaaggagtgatgcctccacgtggtggtgganggccttngaggatttaaaccgttggtcnttggtgggttacaaaccgtgatgattggtaacaatggntantcaaggggggatacaactaaaaccctcaaggtgaaaggagaatgtttcaaa

SEQ ID NO: 1858 - DNA, 461 bp, Arabidopsis thaliana
  unsure at all n locations
  Clone ID: LIB22-077-Q1-E1-A2
acgcgtccgatcgaatcgtttattttggttttcgtttagtttctcttcttcgagctggtgtttctcaactagttagagagtttctcgattggtcagagctgcttttattgaattttctttggatttcgtgcttatagatctttgaaaagtctgagaatcctgttttggagttactgcttcaagttattggaagaaattagggtttcgatccaattttagaattgactcaaggaattccgatattggggttttgttgtagttctgattctcagtgaataagatagaaagataatcacgggaatcgaaggtggaaacgatgttcaagattttgggattcctgagctcttgcaancttccccgggtttgtcctcctgtaaccacctaaaagaaaaanccctcaataattggctggaacnaactccttctnccanttggcntttcaacttcccggaaaactggnc

SEQ ID NO: 1859 - DNA, 488 bp, Arabidopsis thaliana
  unsure at all n locations
  Clone ID: LIB22-077-Q1-E1-A3
accctgccggtancggtccaaaattcncgggtcgacncacgcgtccgcttatttcctctgtcttccttcgcttccctcttctctcaccacaatccnnnnnnnnnnnnnnnnnnnnnnnnnnnnnnnnnnnnnnnnnnnnnnnnnnnnnnnnnnnnnnagctctttatcaccattgtctcctttcttctctatgctccattgttcttatcttcaccagttcctgaccctgaatctgtcgttgaagaagttcacaagagcattaatgcgtcggttgcaggaagaaggaagttaggttacctctcatgtacgaccggtaacccaatcgacgactgttggcgttgtgaccctcactgggagcaacaccgtcaacgtctcgctgactgcgccattggattcggcaaaaacgccatcggtgggccgtgacggtcgggattcacgtggtcacccgactcaaggaaaacgacaaccccaagttaagccccaaagcc

SEQ ID NO: 1860 - DNA, 461 bp, Arabidopsis thaliana
  unsure at all n locations
  Clone ID: LIB22-077-Q1-E1-B10
tttgatctgtgtggttggattgttgcaagaactaaaccagacccacctttcaaaactttgtccctaacgaacaacattaatcattcattctcctgtgtgagctcttcctcttcttctgtttaaggttctttctccttcttcntttgagggggtttaaagcttcagtggacgaaaagagtttgttttttgggtgacaatgggaggagtggtgcatcttagcacggcgaagttagctagaggtttcntaagtgtgtttatgtctttggggtttttttcncgctatcatacgccgcaaggtccggcgtatcaaagcagaagtttgaantgnaacaaacatttgancagggctgaancaaanctgctgtcaaaaagcattcanagttcagatggtgatgntgagntgacngngttccaatctcaannncaaccaaccnntttgatcancccgtttcctcaaaaga

SEQ ID NO: 1861 - DNA, 416 bp, Arabidopsis thaliana
  unsure at all n locations
  Clone ID: LIB22-077-Q1-E1-B12
gtgttgtgggtttcaagctaacgggaaagttaagagatggaatgacagctactgatttggtcttaacagtgactcanatgttgaggaaacatggagtagttggaaagtttgttgaattccacggggaagggatgagagaattgtctttagctgaccgtgctacaattgccaatatgtctcctgagtacggtgcgaccatgggattcttcccagtcgatcatgtcactttgcagtatctaangttgacangcangancgatgacactgtctccatgatagaggcgtatttaccaacaaancacgatgttttgtgggattacagttgagccggngaagtacgacaanttaattcctcangtctggganttaatctccnaaggttnttggaacctngtgtttcctgggccccaagangg

SEQ ID NO: 1862 - DNA, 503 bp, Arabidopsis thaliana
  unsure at all n locations
  Clone ID: LIB22-077-Q1-E1-B4
gttacgcctgccggtaccggtccaaaattcacggganacattcaccaccaagnccgtgatggcctgatctgcttcctcctcctccttacttcttgtttccatcttggtttcaaatttcttcaaagattccgatcatcttcacgtcggagtacacaatctgaaaccgatcatcatcatcatcaattggggtttttaatccctagaatcagtagaaaatatcgatcattgagcttcgattctggtctccgtttgattgtttcggacaatcagagctttgagtctccgaaaaggttggttatgtcatcttctgttccaaactcggaacggaaagattgttactggtcccgccggttaatttcctttgaagacgttcctcaattctcccgacgactttccctgatcatccctanaatatccaaatccattaacaaaggacaatgcaagccttaactcnggnttgttaaagcaagtaattttggtcnatgaaggatggacacnggttc

SEQ ID NO: 1863 - DNA, 430 bp, Arabidopsis thaliana
  unsure at all n locations
  Clone ID: LIB22-077-Q1-E1-B7
gatcctgtacaagaacatttccctcaggttcagatcgcctgaagttaaacaaaaaaatgctccggtcacttcttctccgacgctccgtcggccattctctcggaaccctatctcctcttcatccaccatccgttcctcattttcgcctcatcgtactctctgcaccaccggtcaaacattgacaccaccaccgccgccaccgccacgtcctccacctccgcctccggccaccgcctcagaagctcaattccgtaaatacgccggatacgcagcactcgctatcttctctggagttgctacctatttctcatttccattccctgagaatgctnaacacaagaagggtcaaatcntccggttacgctcctttacctgaaagatcntcanacngtctctanttggantgggtactcatgagggtanagaccaa

SEQ ID NO: 1864 - DNA, 438 bp, Arabidopsis thaliana
  Clone ID: LIB22-077-Q1-E1-C4
acgcgtccgggcagcaatgcttggtcagcccatgagcatggtgttacctggcgtggtcgggtttaagttggatggaaagttgaaggaaggggttactgctactgatttagttctcactgtgacccaaatattgaggaagcatggtgttgtcggcaagtttgttgaattttatggtgaggggatgagtgaactttcactggctgatagagccacaattgcaaatatgtctcccgagtatggagcaactatgggtttcttcccagtggatcatgttacactggagtacctgaagttgacaggaagaagcgatgaaactgtgtcaatgatagaatcatatttgcgcgcaaacaatatgtttgttgactacaacgagcctcagcaagaaagacatacacatcttatctcagttagatttgggacatgttgaaccatgtattt

SEQ ID NO: 1865 - DNA, 441 bp, Arabidopsis thaliana
  unsure at all n locations
  Clone ID: LIB22-077-Q1-E1-D9
ctaaataaaaacaaaaagctaactgaataagaagaagtagtgatgcatatcacaaaaccacacgccgccatgttttccagtcccggaatgggccatgtcatcccggtgatcgagcttggaaagcgtctctccgctaacaacggcttccacgtcaccgtcttcgtcctcgaaaccgacgcagcctccgctcaatccaagttcctaaactcaaccggcgtcgacatcgtcaaacttccatcgccggacatttatggtttagtggaccccgacgaccatgtagtgaccangatcggagtcattacgcgtgcagcagttccagccctccgatccaangatcgctgccaaggcatcagaaagccagcggctctgatcgntnncttgtttggcncagatgcgttaggtctccncaaaaggnattnagcatgttgagttatgtgttta

SEQ ID NO: 1866 - DNA, 422 bp, Arabidopsis thaliana
  unsure at all n locations
  Clone ID: LIB22-077-Q1-E1-E2
cgacctaaacaacaacaacgactccggcgagtgtatgtatctttcactttctcactaaccaaccagacgacaaaagaaaattattcatcttagctaagctcgattagtttctggcggaaacggttttgtggntaattgttagcatattccgatcttgccctcccccgagagagagagtcnnnnnnnnnnnnnnnnnnnnnntctcttacgaagctacgtgtgacctaacattctccagattgttgtttanagcctcttcttagatttacganttgtggagcttgtgaagatttcttggtagaattagngntctccgttcganatnnagatgaatantaataancntnatagnnggnagattttccacccgggggattgggtggnggcggggtncctggtccccgggtccgaacgtttcagnc

SEQ ID NO: 1867 - DNA, 492 bp, Arabidopsis thaliana
  unsure at all n locations
  Clone ID: LIB22-077-Q1-E1-E4
gttacgcctgcnggtaccggtcnanaattcacgggtcgacccacgcgtccgctccgggcgacaaaaacacagcgagcgactgacgaaaattaaacacttcgccgtcacagacactctctctatatatataatctccggcgatggagagtttcgctcttcactctctctccaccaccgccacttccaccttactctcncatcatcatcatcaccatccctcacgtctctctcttctccgtcgtacctcttcgagatctccgccttcaacaatctccctccgatctctctccgttcaacctctctccttccctcttctcaaaccaattcctcgattctccacacgaatcgccgccgcaccgcanagacaacggnnnnnnnnnnnnnnnnnnnnnnnnnnnnnnnnnnnnnnnnnnnnnaangaggggaaactcatccctctgattctctcaatctccgtcgggctaatcctncggntttcgctggttcctgtaa

SEQ ID NO: 1868 - DNA, 401 bp, Arabidopsis thaliana
  unsure at all n locations
  Clone ID: LIB22-077-Q1-E1-E7
ctctctgtctgaaaacgactnnnnnnnnnnnnnnnnnnnnnnnnnnnnnnnnnnnnnnnnnnnnnnnnnnnnnnnnnnnnnnnnnnngatgcttcattgattcacgagaagacaattccatttctgatattatttgtttcctttctcgatcgattctttgcgtaaaaacctgtttctgttctgtttcagaatctgtctctcttattactctgttctgttttgtctgtcttaataaagtttctttctctctttaaagacaaattcatagttccagtttccgaacttctcagcnctcntgtcggattctctgatgaagtcannagatctctgtttggaactatcnaatttctcanccgctcttaantttcnttnttagnttcaagttcacccggagatctcna

SEQ ID NO: 1869 - DNA, 432 bp, Arabidopsis thaliana
  unsure at all n locations
  Clone ID: LIB22-077-Q1-E1-F5
ctcccacacactcttttaaatcaaaacaaaatatctctttcctgttanagacaatggacggattgatcagaggtttggtcgacgtggctatcggaggaaaccaacgccgcggngganacgatggtggtgatgatgaangcanctcgagggacnagagatccagatcnacttgggctaatgtggtttccggtgaggaagaggatcagaatcgcgcgggaggatcgtcncacggccgtcgccananttcagaggagaatcaatgggagaagaanggcgaaaggcttcccacaaggcattcacaatcacatgacgaggancannaagagaatncatatgcnngctaaagtgagcgagaanncaagacntctcggagagccancacgaggannatgatggttggggaaaactgtgggcaaaaacgaaaacctgcac

SEQ ID NO: 1870 - DNA, 414 bp, Arabidopsis thaliana
  unsure at all n locations
  Clone ID: LIB22-077-Q1-E1-G6
aaatttaataatcaaaataaannnnnnnnnnnnnnnnnnnnnnnnnnnnnnnnnnnnnnnnnnnnnnnnnnnncaaaagccattttaaatctctctctttctcactcaatctctctgtagctatcagatcttctcttatgttgatccccaacananaattaagagaaatgaatcggagacagcaagtgaaacgtagagtaggtaaatatgaagttggaagaacaattggagaaggaacgtttgctaaagttaagtttgctaggaaactctganactggagaanctgttgctctcaagattcttgataaagagaaagttctcaagcataaaatggctgaacagattagaaggagagatagctactangaagttgananaacatcnanntgttgtgcaattatatgacggganggg

SEQ ID NO: 1871 - DNA, 516 bp, Arabidopsis thaliana
  unsure at all n locations
  Clone ID: LIB22-077-Q1-E1-G9
aactggttccctgggacgtaanggtccggaattcccgggtcgacccacgcgtccggccaatctttcgatgaggaaaagatttgaaggtactggtcattctatgcaagacctatttggcggaacaccaatgccgtttctacccaatatgaaaatccctcctatggatccacctgtcttcaaccaacaagagaaggacttaccgcctttgggtttggatcagtttccatcagctctttcatctatcccagagaaccatcgaaaggtgctggagaatataatgctaagaactggctctggaattgggcacgtacagaanaagaaaacaagagtaggatgcatggtccgaggatgaactagattctctctggattgggattcgcagacatgggtatggaaactgggagacaattctcagagatccaagggtcanattttcgaaatttannacancanagnacttgggangctagagtgggaagangagcancgtnaattcttgggaaantcccttcatcc

SEQ ID NO: 1872 - DNA, 417 bp, Arabidopsis thaliana
  unsure at all n locations
  Clone ID: LIB22-076-Q1-E1-G9
atatagtactaagtgtgatttgcccaacttgtcatcattatctctatctaataaatggcgttacaaaggcaactcctgaagagagctacttccgatatctatcaccgccgtgcgatctctctcctccgtactgatttctctacttctccttcgattgctgatgctccgccgcacattccgccgttcgttcaccaagccacggccgtataaaggtccttccgccgatgaggttttacaagaaacggaagaagtttctcggaccttctcttttccactactaccaagaagcctcttaacatcgttgaagggaaagatgcaatacttgtatgatgangagtggtangcgatatctggatgcctttgctggaaaantcactggtgtcgtgcgggtcaactggccaaccgggatnattccta

SEQ ID NO: 1873 - DNA, 412 bp, Arabidopsis thaliana
  unsure at all n locations
  Clone ID: LIB22-074-Q1-E1-F6
ttattgaagaggcaggacaaccgaagaatgctggctcgactgctgcgactgcttttcttataggtgataagttgattgttgctaacgttggtgattctagagttgtagcgtcaagaaatggttcagctgttccactctctgatgatcataaacctgatagatcagatgagcgacaacggattgaagatgctggtggctttattatttgggctggaacatggcgagttggtggaattcttgcggtctctcgggcttttggagataagcaacttaagccatatgtgattgcggagccagaaattcaggaggaggatataagcacattggagtttattgttgttgctantgatggactgtggaatgtgttgtcaaacaaggatgccgtggcaagtagtacgagacatttcanaat

SEQ ID NO: 1874 - DNA, 419 bp, Arabidopsis thaliana
  unsure at all n locations
  Clone ID: LIB22-074-Q1-E1-G2
gaanccatggatcgtgctttaactccgcgttttgatactccagctactctctcccctttccgataccgatatgggagctctctggccatcactcgacgattcgcgccggcgattgtttgcgcgaaacgatctccgatcgatggagtgagcgacgagctgaatctgattgcttcacagaacttanatcaagctcccgcacgaagactagcccgttccgcttttgttgacttgcagcttcagctggatcactgcttgttcaagaaagctccgagtgggatcagaacagaggagtggtatgagagaaattcgaaaggggaagatattttctgcaagagttggttgccgaaatccggcgacgaaatcaaagctgctgtatgtttcctgtcatggctattggaagcacttgcactttccttctt

SEQ ID NO: 1875 - DNA, 400 bp, Arabidopsis thaliana
  unsure at all n locations
  Clone ID: LIB22-074-Q1-E1-G7
aatttggatattgatggtaatgttggannnnnnnnnnnnnnnnnnnnnnnnnnnnnnnnnnnnnnnnnnnnnnnnnnnnnnnnnnnnnnnnnnnnnnnnnnnnnnnactacnaataaaaagagtttggaccgatattgaaatttgaagaggtcatgaaggagactgaagctagangagctactcttccatctgatatgttggaagctgctaanaactatgggatccgcaaantgcttctccttangtacttggatttgcaganctcagcagggcttcttgggtttgcnataagatcatgggctatgccttncgtaacanaatgtttggctgatccatctttcctcttcaaaatccggggctnannacagtncantnaagtccttgccggtnccaccggtt

SEQ ID NO: 1876 - DNA, 424 bp, Arabidopsis thaliana
  unsure at all n locations
  Clone ID: LIB22-074-Q1-E1-G8
anncgtccngttgatgaacccgttcttgcatttggtgatgacgcaaaagcaaggatggctactatcacaatttttaccattgcaaacaaatatggagattatatacgtacgggttggaggaacatattggactgtatcttacggctacataaacttggacttctgccagctcgtgtagccagtgatgcagctgatgaatcanaacattcatctgagcaagggcaaggaaagcccctcgcgaattccctatcttcagctcatctacagtcaatgggaactccgaggagatcttccggattgatgggaagatttantcagcttctttcacttgntacagaagagccaagatcacaagcctactgagcaacagcttgcatgctcatcaacgaacacttcanacaattcagaantgtcacatttgaca

SEQ ID NO: 1877 - DNA, 438 bp, Arabidopsis thaliana
  unsure at all n locations
  Clone ID: LIB22-074-Q1-E1-H10
ccgggccgacccacgngtccngtcccannnnnnnnnnnnnnnnnnnnnnnnnnnnnnnnnnnnnnntgtttttccacatagtattggagcggaacatgcagttgcatcctcgtttctttggtcgtngcctaaaagaaaacctcgtatctaagctcatgaaagatgtcgaaggcacttgcagtggccgacatggatttgtagtggcgataactggaatagatacaataggaaagggtttgatcagagatgggactggttttgtcacctttccagttaaataccaatgcgtcnttttcagacctttcaaaggcgaagattttggaagctgttgtcactttggtcaataagatgggattcttcgctgaatctggcctgttcagatttttgtgtctaagcatttgattccaagatgatatggctttcangctggaggacatg

SEQ ID NO: 1878 - DNA, 416 bp, Arabidopsis thaliana
  unsure at all n locations
  Clone ID: LIB22-074-Q1-E1-H2
cgatttccacgtccatggatctcagtcaatgttccttaatctctcttttcgattagtccaatctccactaatctctgacctcagatcgcttccgacgccgctgaactgtgtccgtcttgatctgtgtttaggagaaagcttctagggtttttgttttggttgctgagtagaatttgttggatctgaaacggaaatcaaaatgggctttttcagtacgatactaggattttgtggatttggagttgggatttcattgggacttgttattggttacgttctcttcgtctacttgctccccaacgacgtcaaggatcctgaaattcgttcaatagctgaccaagattccaaagctatgctacggatgcttccangagatacctctatgggtcaaaaatccggatttcgatcgtgttgac

SEQ ID NO: 1879 - DNA, 418 bp, Arabidopsis thaliana
  unsure at all n locations
  Clone ID: LIB22-074-Q1-E1-H3
cgagtgaagccgcgactgtgaaatcatgagaggagtaaaacgcgccgccatctccgaatcgaatgactctccctttaagaatgcaaaaccagtggaaggaatcttttttggtactcagaagaatgtggtaccgatgcagcagagttcagtaacatcagcatcattggataaacagagggctgagttagctaggaagcatgtgagagctcttaataaccaatttgtaagttgggtgcagttacagctgaagaatcatcctgatgaactttgggaagatgggatgaatgactacattacgcatgcttcaaacattctggaaaagtttaaggatgtggtcagctggcttaaagaaaataagggaaagggggagaatttatcccctgaatcccgtggagcagaaaataaanttagtgggctg

SEQ ID NO: 1880 - DNA, 415 bp, Arabidopsis thaliana
  unsure at all n locations
  Clone ID: LIB22-074-Q1-E1-H6
gaatcaaccaaaaacatctccgactccgccgccacactggatgcggtatccaccaacggtgataatccctcatcagatgatgtacgcgccgccgccgttcccaccttatcatcagtatccgaatcaccaccaccttcaccatcaatctcgtggtaataagcatcaaaacgcttttaatggtgagaataaaaccatatgggttggtgatttgcatcactggatggatgaggcttatcttaattcttcttttgcttccggcgacgagagagagattgtttcggtgaaggtgattcgtaataagaacaatggtttatcaagaaggatatggatttgtggagtttgagtcccatgatgtanctgataaggttttgcgggagtttaacggggaanactatgccaantactggaccaaacc

SEQ ID NO: 1881 - DNA, 442 bp, Arabidopsis thaliana
  unsure at all n locations
  Clone ID: LIB22-074-Q1-E1-H8
attcccgggtcgacccacgcgtccncttctgcctccaaactctctctttctctctcgagaaccttaagaaaacgttacaaatggctgttgaagcaagacacatgaatctcttctcttctcaatacattaccaacagagaatgtgttaaatctcaaacgaatatgaacaacggacaacaaatcgccggcggtggttttccggtaacaatcggtgatcggaatttacagtacatagatccgattaacagcttcaacaaatcagaaagcgagctcacaagctatttcaaaacgtcagaagagattcaacgtttgattcagacgctttaatcgcatctcangaaacgcagangcaatccgcgttttctccggcgtcattaatcgacgcagagttagtttcacaggatncaacagcnaaaacncangaaatcgaattggaatncgta

SEQ ID NO: 1882 - DNA, 404 bp, Arabidopsis thaliana
  unsure at all n locations
  Clone ID: LIB22-075-Q1-E1-A4
gaaagctggagttggnatcagtaccatttgatatccgttcaatattggatgatgtcctttctctattctctgaggagtcaaggaacaaaagcattgagctcgcggttttcgtttcagacaaagtaccaagagatagtcaaaggagattcagggagatttagacagataatcataaaccttgttggaaattcggttaaattcacagagaaaggacatatctttgttaaagtccatcttgcggaacaatcaaaagatgaatctgaaccgaaaaatgcattgaatggtggagtgtctgaagaaatgatcgttgtttccaaacaagtcaagttacaacacattgagcggttacaagctgctgatggtcggaatagctgggattcattcaagcatttgggtctctgang

SEQ ID NO: 1883 - DNA, 401 bp, Arabidopsis thaliana
  unsure at all n locations
  Clone ID: LIB22-075-Q1-E1-B5
tgataaagagaaagttctgaaaaataagatgatcgctcagatcaagcgtgagatttcgacgatgaaattgatcaagcacccgaatgtcattcgtatgtttgaggtgatggctagcaaaactaagatctacttcgttttggaattcgtcactggtggggagcttttcgataaaatttcaagcaatgggagattgaaggaagatgaggcgaggaagtatttccaacagctgattaatgcggttgattattgtcatagcaggggagtttatcatanagaccttaagccagaaaatttgcttttggatgctaatggtgctttgaaagtgtctgactttggattgagcgctctacctcagcaagttcgagaggatgggttacttcacacaacctgtggaacaaccc

SEQ ID NO: 1884 - DNA, 393 bp, Arabidopsis thaliana
  unsure at all n locations
  Clone ID: LIB22-075-Q1-E1-B7
gtgttgtgggtttcaagctaacgggaaagttaagagatggaatgacagctactgatttggtcttaacagtgactcagatgttgaggaaacatggagtagttggaaagtttgttgaattccacggggaagggatgagagaattgtctttagctgaccgtgctacaattgccaatatgtctcctgagtacggtgcgaccatgggattcttcccagtcgatcatgtcactttgcagtatctaaggttgacaggcaggagcgatgacactgtctccatgatagaggcgtatttacgaagcaaacaagatgtttgtggattacagtgagccggagagtaagacagtttattcctcatgtctgggaattgaatctcgangatgtggaaccttgtgtttc

SEQ ID NO: 1885 - DNA, 417 bp, Arabidopsis thaliana
  unsure at all n locations
  Clone ID: LIB22-074-Q1-E1-F3
agatctgaaaccttatctgaattacatttccccgattcgacgttgtgcgaattgatgcagcagagaggacgatccgtcaaccgcagatcacgaagcttctctagatccagactcgccgtcgaaggccactgaattactctctcccctctcttggcagatcttcttcttcgttttttcccgacaaacgacatttccgaaatggctgcatcgtacgaagaagagcgtgatattcagaagaattactggatagagcattccgctgatctgactgttgaagctatgatgcttgactcgagagcttctgatctcgacaaggaagaacgtcctgaggtactctctttgctccctccatatgaaggnaaatcagtgttgggaacttggagctggtaattggncgtttcaactgggtggaattan

SEQ ID NO: 1886 - DNA, 429 bp, Arabidopsis thaliana
  unsure at all n locations
  Clone ID: LIB22-075-Q1-E1-C1
ctttactcacacaagaaaacaaaatcatgtctcgatttgctatcttagtaaccttggcacttgccattgccactgtttcggtggttatagctcaagtccctccggagaaacaattcagagtcgtcaacgaaggagaattcggtgaatacatcactgagtacgacncaagttacagattcatcgaatcatcaaaccangagcttcttcacatcaccattccagctcttgttttacaacactacccctagcgcctacatcttagctctccgagtcggactcaaggcgtgacgagtctaccatgcgttggatatggggacgcgaatcgcaacaaacccgtctggggaaaacgctacactctcactccngcccgtaacgggaanctccgtcctccgctgaagcctgncggacgagtcnaatggggagactaac

SEQ ID NO: 1887 - DNA, 421 bp, Arabidopsis thaliana
  unsure at all n locations
  Clone ID: LIB22-075-Q1-E1-C3
acggcttcacttctaactggtgcggtcctaatgtttgtaactacacaggcgtgttttgtgcaccggctctagataacccttatgtcttaaccgtcgctggtatagacttgaaccatgctaatatcgccggttatctccctttagagcttggtctcttaaccgatcttgccttgttccatatcaattccaaccgttttcaaggtcaacttcccaaaactctaaaatgtctccatcttctccatgagcttgacgtcagcaacaataaactctccggcgaagtttccttccgtaatcttctctttgccttccttgaagtttctcnacattanggttcaatgagttccaagggtgatgttcctagccaactctttgacctaaacctcgaagctctcttcantaacgacaacaaattccangttta

SEQ ID NO: 1888 - DNA, 403 bp, Arabidopsis thaliana
  unsure at all n locations
  Clone ID: LIB22-074-Q1-E1-B6
acncgtccgcccacgcgtccgcggacgcgtgggggagtctcttatgttgggtgaagaacgcagacgcggaaactacaccagagacgtagacgcggacgcagatgaaggtgttaactctccctcttcttttccaaactcccctgatgattcggaccgtcgcagttcttcttcttcttcaaggagaggattgtcgaaacattacaaaggtaaatcacaatcgttcacaacgttggcagaagcgctaactgtggaagatctcgcgaagcctgagaatccattcaacgcaaagctgaagcagcgacgaagagagccctcactgtcgtagattatcaggatgcggcggcgcatcgagcgaaatttaagtgttcaacgacnttttttctcgctgggggaacgatngaac

SEQ ID NO: 1889 - DNA, 406 bp, Arabidopsis thaliana
  unsure at all n locations
  Clone ID: LIB22-074-Q1-E1-B8
tcagtgaacaaatttggctatggctttttctgcaccatcactttccaaattctctcttttggttgccatttcagcatcagctctcctctgttgtgcttttgcccgtgatttctccattgttggatacacgccggagcatttgacaaacactgacaagcttctagagctcttcgagtcatggatgtcagaacacagcaaggcttacaaaagcgtggaggagaaggtgcacaggtttgaggttttcagagagaatctgatgcatatagaccagaggaacaatgagatcaacagttactggctcggtttgaacgagtttgcggatttgacccatgaagagttcaaaggaagatatctaggacttgcaaagccacaattctctagaaagagacagncctcagctaacttc

SEQ ID NO: 1890 - DNA, 456 bp, Arabidopsis thaliana
  unsure at all n locations
  Clone ID: LIB22-074-Q1-E1-B9
ctgccaggtcatatcaagaagcccgggtcgacccacnagtccggagagcttctcacagtgaagcaaacaatggagtcttttcggcgattctccttgctatccttcattgccctacttgcctacttcgctttcctcgcttctgctgaannatcacgtccatcaattcgtgatcacaccgacaccagtgaagaggctgtgcagaactcaccaaagcatcactgtgaatggtcagtaccctggtccaacgcttgtggtcaggaacggtgactctctcgcaatcactgtcatcaacagagcccgttacaacattagtattcattggcatggaatcagacagctgcggaatccgtgggccgatggtcnagagtatataacacaatgtccgatccgtccaggacaaacctacacttacagattcannatcgangatcaagagggtacgctttggtggcaccc

SEQ ID NO: 1891 - DNA, 414 bp, Arabidopsis thaliana
  unsure at all n locations
  Clone ID: LIB22-074-Q1-E1-C3
acgcgtccgaattgcttttagtggagctgaagatgttgcattgattgaatatgcacgtttaactggaaagccatttagggtttttagtttagatacagggagattaaaccctgaaacgtacaggctctttgacgcagtcgagaagcagtacgggattcgaattgagtacatgtttcctgatgcagttgaggttcaagctttagtgaggaacaagggtttgttctcattctatgaagatggtcatcaagagtgttgccgtgtgaggaaagttagacctttgcgtcgtgctcttaagggtcttaaagcttggattacaggacagaggaaagaccaatcctccgggtacgaaatctgagatccctattgttcaagttgatccagtgtttgaanggttaagatggcngtgttgggaaa

SEQ ID NO: 1892 - DNA, 397 bp, Arabidopsis thaliana
  unsure at all n locations
  Clone ID: LIB22-074-Q1-E1-C5
agatccttaaatctccaaatttcctcctcagtcttatcattatagacaaaacccttttctttgtaaattttttcccaatctatggaagtgcctagtgaaaccacgaatttagccgatctccggcgaccattggtggttccggttgtctcggagcgtaaacctccggcagacgtcggactcggactagagagtgttttaacggagcgtagccttccgtaccggaggcgcgtgtacttaggggcatgcatagagatgaagctacttttccggttggcacttccggcgatacttgtctatttaagtcaacagcggaatgggtatttccgctcggatcttcgccggacatctcggtaaaaatgagctcgccgccgcgtccatcggaaacagctggctcant

SEQ ID NO: 1893 - DNA, 407 bp, Arabidopsis thaliana
  unsure at all n locations
  Clone ID: LIB22-074-Q1-E1-C7
caactagttttgtttttcctctttcaaaaatgcatttctcttcgtcttcaacatcgtccacttggacaatcttaatcacattgggatgtcttatgcttcatgcatctttgtccgctgctcaactcacccctaccttctacgataggtcatgtcctaatgtcactaacatcgtacgagaaaccattgtaaatgagttaaggtcggaccctcgtatcgctgcgagcatccttcgtcttcacttccacgactgctttgttaatggttgtgacgcatccatcttgttagacaacacgacatcatttcgaacagagaaagatgcgtttggaaacgcaaattcggctcggggatttccagtgattganagaatgaaagctgcggtggagaaggcatggccaagaaacgttttn

SEQ ID NO: 1894 - DNA, 332 bp, Arabidopsis thaliana
  unsure at all n locations
  Clone ID: LIB22-074-Q1-E1-C8
agatgaacatgcatcgtgataacattagatggttacaatatcctcaccaacttggaagtgacacaaattatacattactactagttagtactagtagatctgaatctctctctctttcttcttctctaatgccgtaaattgtaagctaactcttcccacatantgcctcgattctcgcttttgctctctctctctttcctccgacaatgaataggaatctcagagaatctcttgccggtgggaggaatattccggcgatctctcaagtttcgtagaggcaataacaacaacagcaacaanatctctcaaaatggcttctctagaagattccn

SEQ ID NO: 1895 - DNA, 441 bp, Arabidopsis thaliana
  unsure at all n locations
  Clone ID: LIB22-074-Q1-E1-C9
cgccangtaatatcaagaagtcccgggtcgacccacgnntccgcccacgcgtccgcaccaccaacaacaacaactccactaaaaaattcatagctctacaagagtcacctcatagagaagtgaagagacagagatagttgtgacagagagattcatggcggaagcttgcggagtgagaaggatgaagctgggaagccaaggccttgaggtatctgcgcaaggccttggttgcatgggcctctccgctttctacggtgctcccaagccggaaaatgaagccatcgctctcatccaccacgctattcactccggcgttactctccttgacacctccgatatctacggccctgagaccaatgaagttctcctcgggaaaggctctcaaggatggggtgagagaaaaagtggaacttgcgaccaaatttggnatcaagttatcag

SEQ ID NO: 1896 - DNA, 390 bp, Arabidopsis thaliana
  unsure at all n locations
  Clone ID: LIB22-074-Q1-E1-D5
ctttaatggaaggaccttgacacttctctctctctttctctttgctattcatcttctacagtttcttaaaaattatacnnnnnnnnnnnnnnnnnnnnnnnnnnnnnnnnnnnnnnnnnnnnnnnnnnnnnnnnnnnnnnnnnnnnnnnnnnnnnnncaggatttgttttttccgtttgaggtaaagcagctttgcagttaaagaaaccttgagtatccaatgtccccggaagaggagctacagagcaatgtatcggtggctaagttcttcacctactagcaattgcatctccaggaacactctaggaggacttaaagagcataactacttgggtctctctgattgttcttctgttggaagctctactcgctctccccttgctgaagatg

SEQ ID NO: 1897 - DNA, 395 bp, Arabidopsis thaliana
  unsure at all n locations
  Clone ID: LIB22-074-Q1-E1-E1
aaacaaanaaaaaaaaagatcagacaaaataaatcattgtcaatcgacgattcanaagcttaatcgtctagaatcaacataattcttcgattgtacactctgattggctacttgttagatctaagaagaggccaagtattatttcgtactaacattatcatggaggagacttctattgaagcanacactgtggagaagtcccaaaccatataaaaggcttcacgtcagcaagatcggtgaatgatattcgtgccgccatcgtctcaagaataaactgactattttctaaaaaggttatcgccaanattaagtatttacgaattanaattgataaggaangtcactaggaaggagctgtggaaaaganaattgtggatttgggcanaaatctgggg

SEQ ID NO: 1898 - DNA, 449 bp, Arabidopsis thaliana
  unsure at all n locations
  Clone ID: LIB22-074-Q1-E1-E10
caagaatgcccgggncgacncacgantccgcccacgcgtccgcaaagcctggatcaatcatcatcttcatcaatttccagattcagattccaaatctccgaagcttaacgaaaacaatggcggcagaacctaacngntaagaatttccctgtcctctcttatgtcttggctcgtctcccttctttcaccgccaannnnnnnnnnnnnnnnnnnnnnnnnnnnnnnnnnnnnnnnnnnnnnnnnnnnnnnnnnnnnnnnnnnnnnnnnnnnnnnnnnnnnnnnnnnnnnnnnnnnnnnnnnnngatgttctcgcttcaatgacaagtgcgatctctgacgtcgccgagactcgatctatccntcgaaccctaggacctagaccagatnacgantcagtcgataaggctcgtgctaannctcncggaaatcgaatcggtcgtatctgaaat

SEQ ID NO: 1899 - DNA, 444 bp, Arabidopsis thaliana
  unsure at all n locations
  Clone ID: LIB22-074-Q1-E1-E11
caagaatncccgggtcgacccacgaatccggatgttctgtgcagtgataaaacaggtactctcacgctcaacaagctttctgtggataagaatctgatcgaggtttttaagaggggcatcgacagagatatggcngtgcttatggctgcaagagctgcacgtttagagaaccaagatgctattgatactgcaattgtttcgatgttgtcagacccgaaagaggcacgtgccgggattaaagaactccattttcttccattcagtccagctaatagaagaactgcactaacgtacctagacggacgaaggcaaaatgcaccgagtgagcaaaggcgcgcctgaagagattttggatatggcccacaacaaattagaaatcaaggagaaagtacatgctacaatncgacaaatttgcagaacgtggcctaagatcgcttgggttgg

SEQ ID NO: 1900 - DNA, 473 bp, Arabidopsis thaliana
  unsure at all n locations
  Clone ID: LIB22-074-Q1-E1-E3
ctgtttacgccttccagtagcctccgaaattccanggtcnacccacgcgtccgcggacgcgtgggatttangttttcatattacttgacaaacctgatgagctactcgacaagcaagtctcagagcatattatgtcgcttcattctgcaagtggagaaacatcacctgcactaaagaagtttaaaccaacatcacagaatgctgggtatgcaaacatgcatgcagaagggaattctctactttcaagactgcggttggactctgagaaagatgacgacttttctccggttcctggccaattgcttaggaaatatatttcctatgcacggaattttgtcaatcctaagatgtcaaaggatgctggagaagatcatacagaagttttacttgaagctgagagaccataacacatctgctgattccacaccaataacagcaagacaactggaaagtttggttaggcttgctcaaac

SEQ ID NO: 1901 - DNA, 414 bp, Arabidopsis thaliana
  unsure at all n locations
  Clone ID: LIB22-074-Q1-E1-E4
caggaatcaaaggattcttgccttgaggttgtttaccggatgtactggctgtgttatcatatccacacatacaagaagacgcaggtgtctctggttaatggaatatcgatgggtggaggtgcagcattgatggtccctatgaagttttcagttgtgacagagaaaactgtttttgcgactccagaagcaagtttcgggtttcacactgattgcgggttctcctacatccattcacgtcttcctggtcatttangagagttcttggctttaactggggcaagattgaacggcaaagaacttgtagcaattggaatggcaacacattttgtaccttctggtaaattgatggatctggaggcacggcttgtgagtttaagactcaagagangcggatgtatccaatccacaattgaa

SEQ ID NO: 1902 - DNA, 411 bp, Arabidopsis thaliana
  unsure at all n locations
  Clone ID: LIB22-074-Q1-E1-F1
gaancaacctttggatgtgtttgttcgagtttcgaggtttgtggctagtccgaggaggaaagcggttgagttgttgctgagaggaggaggtgttggaggattgatcgatgaggcggttgaagaagagatcaagattgtctctaagtatccagctgatgcttctttaccggatataaacgaaggggtttatggaagtgatgagtttaggatgtatagctttaaggttaagccatgttctagggcttattctcatgattggaccgagtgtgcttttgttcatccgggagaaaatgcgangaggagagatccgaggaagtatccttacacttgtgtcccctgtcccgagttcccgtaaaaggatcatgccccaaaaggagaattcctggcgantatgcctcacngggttttcca

SEQ ID NO: 1903 - DNA, 399 bp, Arabidopsis thaliana
  unsure at all n locations
  Clone ID: LIB22-074-Q1-E1-B5
taaatgaaataatacaaagggatctttatgtaaaggcgtcaccaattagtggaaataatggagcaagccactacactcttcatattgctttccactctcctcctcgccgtctccgttgagtctcctcagccaccgctatttcccgatgaagctctccccactaaatctggctacctcccggttaaacccgcacccggctcgtccatgttctatgccttctacgaagcccaagagccaaccacacctcttcctgacactccgctcctcgtttggctccaaggtgggccaggctgctcttcaatgattggcaacttttacgagctcggtccctggcgtgtagtttcacgcgccacagacctcgaagcgcaaacccggcgcatggaaacgtctaatcggacn

SEQ ID NO: 1904 - DNA, 445 bp, Arabidopsis thaliana
  unsure at all n locations
  Clone ID: LIB22-073-Q1-E1-F1
cgttacgccgccgttaccggtgccanaattcccgggacgacccacgcgtccggttcctctaatgtggactaaacacttgttgcagccatccctcctttacccgtgaatcanaagcttatccaggacaatgcactaggtgtgaggaatgctgcacaaagaaagcttctcgatgagcttggtattgtagctgaagatgtaccagtcgatgagttcactcccttgggacgtatgctgtacaaggctccttctgatggcaaatggggagagcatgaacttgattacttgctcttcatcgtgcgagacgtgaaggttcaaccaaacccagatgaagtagctgagatcaacgtatgtgaagccgggaanagctgaangagctggtgaagaaagcacatgcangtgangaacggttgaaactgtcaccaatnggtcaaaaatnggggggggg

SEQ ID NO: 1905 - DNA, 392 bp, Arabidopsis thaliana
  unsure at all n locations
  Clone ID: LIB22-073-Q1-E1-F3
acgcgtccgtatctatgcagatgccgatgtgcgtctagcgagaangataaaacgcgatactgttgagaagggcagagatattgccactgttcttgaccagtactcaaagtttgtgaagccagcatttgaggatttcatactcccaacaaagaaatacgcagatataataattccccgaggtggtgataaccatgttgctattgatttgattgtgcaacacatccatacgaagctcggtcaacatgatctctgtaaaatttatccaaatctttatgttattcaatcaacttttcagatacgtggtatgcacactctaatccgcgactctaaaacaacaaagcatgancnttancttccantccnatngantgaaacctttggggcccttnaca

SEQ ID NO: 1906 - DNA, 368 bp, Arabidopsis thaliana
  unsure at all n locations
  Clone ID: LIB22-073-Q1-E1-F5
acgcgtgggcggacgcgtgggtcttaagaggtgatcctcctcatggtcaagataagtttgttcaggttgaaggtggttttgattgtgctttggatcttgttaatcacattcgtagcaagtatggtgattactttggtatcactgtcgctggttatcctgaggcgcatcctgatgttattggtgagaatggtcttgcgtctaatgaagcttatcagagtgatcttgagtatctgaagaaaaagattgatgctggagctgatctgattgttactcagcttttctatgatactgatatattcctcaagtttgtgaatgattgtcggcaaattgggattanttgtcccattgttcctggaagtaagcccnaa

SEQ ID NO: 1907 - DNA, 444 bp, Arabidopsis thaliana
  unsure at all n locations
  Clone ID: LIB22-073-Q1-E1-H4
agattaccgcggtccgacgcatgcagnaaatttcatgttcntcttcctcntccgattcatagttttttttttttccggtaacttgtcatcaattagatctcgtccgaagttgaatctttagttcgcgagcttttggacaacttcgaggtcttagctttgcaatgaaattgtacgaacacgatggagttgatttagaagatgggaagacagtanaatccggaggagataaaccaattccaagaaagatacataaccgggctttgttatccggtttagcttattgcatttcatcatgcagtatgatacttgtcaacaagtttgttctctccaagctacaacttcaatgctggggatnttccttangttataaccanaactttgncnccggggatcaattggnggttggggttcangtttaaaaggggccaaaaacccaanggaacc

SEQ ID NO: 1908 - DNA, 399 bp, Arabidopsis thaliana
  unsure at all n locations
  Clone ID: LIB22-073-Q1-E1-H6
ggtaccggtcataaattcccgggncgacccacgcgtcnaagtgactcttctctctctgtatattactcttccttcactatctctctctctttactgggtcttcttcagcttctgagtcttctcctctctctctatctctcaagtgggctttgctttgctgtttttgtcttccttcgacgactcacttttgcagattctcataaattcttcaaagctttgagtcttttttcagattcgagggtcggttttatatatgcttcaaatctcttacccaaatcaggtatgganactctgcatccattctctcacctacctatctctgaccaccggttcgttgttcaaganatggtgagcttacacaagctcnagtancggtaagtggactaaagaagagaacaa

SEQ ID NO: 1909 - DNA, 472 bp, Arabidopsis thaliana
  unsure at all n locations
  Clone ID: LIB22-073-Q1-E1-H8
acgcctgccatgttntcggtgcnnagttccgggnaagaattcacgggtcgacncangcgtcnncacaaagtcatctccttcttctttcttgatctagctagcggaaaatttgacaatggcaagaatcggaagctttctcattattctttacctcatttacgctcttactctctgcatctgcgacgacgacgagagtaactatggcggcgacaaagggaacctcttcccaggtttctacagaagctcgtgccctagagccgaggagatcgtgaggtcagttgtagccaaagctgttgcaagggagactcgtatggctgcttctctcatgaggctccatttccacgattgtttcgttcagggttgtgatggatcgttgcttctanacaccantgggagtatagttactgngaagaactctnaaccgaacaacnaatttnggtncccccggntttgaaattnttacccaaattta

SEQ ID NO: 1910 - DNA, 469 bp, Arabidopsis thaliana
  unsure at all n locations
  Clone ID: LIB22-074-Q1-E1-A11
ctgcaccgnccaggtaatatcaagaagncccgggtcgacccacaantccggcttttttgtaccgtacatcttcttcccagaaacatggctgaggcttctgatttgttggaatggcctaagaaggataaccgtcgttttctccatgttgtctaccgcgttggtgatcttgatcgcaccattgagttttacactgaggtctttggtatgaagctgttgaggaaaagagatatccctgaggagaagtattcnaatgcttttcttggttttggacctgaaacatcnaactttgttgtgcagctcacatatnacnatggtgttanctcatatganattggaactggctttgggcattttgccaatttcannncaagatgtttcnaanaccggtttgacaacctccgttccannggtcgaaaatnngacttaggggaacctggctccangtcaagcgtggaaggccagtnttcat

SEQ ID NO: 1911 - DNA, 427 bp, Arabidopsis thaliana
  unsure at all n locations
  Clone ID: LIB22-074-Q1-E1-A12
ggtcgacccacgnatccggaacaacacagagcagagaaaaaaaagaggtagcnnnnnnnnnnnnnnnnnnnnnnnnnnnnnnnnnnnnnnnnnnnnnnnnnnnnnnnnnnnnnnnnnnncaaggtctcaactttgcttacaacaatggctttaatccaccgacggacttatccatccaagggatcacaaccgtcacacccaacggtctcttgaagctaaccaacacaaccgttcagaaaaccggtcacgccttctataccaaaccgatccggtttaaagattctccaaacggcaccgtttcatccttctcgacatcgttcgtcttcgctattcactctcagatcgcgattctcagcggtcatggcatagctttcgtcgtcgctcctaacgcaagccttccttacggcaacccaagtcaanacatagg

SEQ ID NO: 1912 - DNA, 408 bp, Arabidopsis thaliana
  unsure at all n locations
  Clone ID: LIB22-074-Q1-E1-A3
acgcgtccgcaccaccaacaacaacaactccactaaaaaattcatagctctacaagagtcacctcatagagaagtgaagagacagagatagttgtgacagagagattcatggcggaagcttgcggagtgagaaggatgaagctgggaagccaaggccttgaggtatctgcgcaaggccttggttgcatgggcctctccgctttctacggtgctcccaagccggaaaatgaagccatcgctctcatccaccacgctattcactccggcgttactctccttgacacctccgatatctacggccctgagaccaatgaagttctcctcggaaaggctctcaaggatggggtgagagaaaaagtggnacttgcgaccaaaanttgggaatcagttatcanaaggggaaaaagg

SEQ ID NO: 1913 - DNA, 372 bp, Arabidopsis thaliana
  unsure at all n locations
  Clone ID: LIB22-074-Q1-E1-A7
cttcttcttctccgttcgtgctctggactcgctcgaaatcgatccgatgataatttatgcagctcgaaacttaatttagaatcatacctttttctggatttggctgacgaatccgttttcaattgcacgagttgcttcgccaggtttatcaacttaagaatgtctaattatcaaggggatgatgctgagtacatggaagatgtggatgatgaaatggatgaggatgatttagatgaggattttcgtggggatgatatggntgcctctgattccgatgtcgatgagtttgactactctaataataagaatagctgacacttcagctgaccaagcccggaaagggaaagacatccaggggattccttgggacan

SEQ ID NO: 1914 - DNA, 464 bp, Arabidopsis thaliana
  unsure at all n locations
  Clone ID: LIB22-074-Q1-E1-B10
tcttgncccgccaggtacanatcaagaatncccgggncgacccacgaatccgcccacgcgtccggaaagacagagataatgacgagagttggccagaagagattccccggcnanagaagaaccnccgccggcaactaaaaaacgatttttgnctccgggaanattcgtgacaatcttgtgtancattaacttgataanttacnttgatcgaggagtgatcgcgagtaatggtgttaatggaagctcaaaagtatgtgatgccaaaggggtttgctctgcaggaactggaattcagggagagtttaacttaactaactttgaagatggtcttttgtcatctgcgtttatggttggacttcttgtggcttctccaatattcgctggattgtcaaaaagattcaacccttttaaactaatcggtgttggattaactgtttggactattgctggttaatcggttggcg

SEQ ID NO: 1915 - DNA, 403 bp, Arabidopsis thaliana
  unsure at all n locations
  Clone ID: LIB22-074-Q1-E1-B11
gggctcactactctctttcatttcctcttttcgttgacttactaaagtactcttgtttcaatcttcattctagagagattctgtttcatggatgnnattttgccagtacccgttgatgggttcagattcgacaccggttctggatcttgttgcaaaccgaggaacaatcttgaatctgggacgaccaatcgtttcacttgtttcaacgaatctgaatctcangagcaacccttctccgaccgagtctaaggtatgttcagattaccttcctgtctttaagtacatcaatgacatgttgatggaanaagatcttgaaggtcagtcttgtatgttggaagacagtttggctttacaaagccgcagagagatctttcttcgaagtgctcaagatcaaactccaatc

SEQ ID NO: 1916 - DNA, 435 bp, Arabidopsis thaliana
  unsure at all n locations
  Clone ID: LIB22-074-Q1-E1-B12
aatncccgggtcgacccacgnatccgcggacgcgtgggctaagttgctgtcacacttgtgctttatgcaaaagggaaatacaaggatggaaattttagccctgatcaatcctatctctatcttaccatcanngatacaatatcatacactgtagctctgtacgcgctggtcctcttttatgtggcatgcaaagatctgcttcagccattcaatccagtcccaaaatttgtgattataangtctgttgtctttctaacctattggcagggtgttctagttttcctttttgctaaatctggatttataanggatgaagaataagcagccctcttccaaaatttnataatatgtgtngaaatgcttattgctgcanctgctcatttctatgcatttccgtacaaangaatntgcacaaggccaatgttgggagganct

SEQ ID NO: 1917 - DNA, 383 bp, Arabidopsis thaliana
  unsure at all n locations
  Clone ID: LIB22-074-Q1-E1-B2
taagacgcccaatgctcctgccaaaaccaaaaccggtgcaggcatgccatgttctctctgtcctcatcccacatgccaacactctgtcagaaaccaaggagtctgcgcttgtccagagtgtgaaggcacgctcgtcttggacccggttagcttccccaagtggaaactcaactgcaacttgtgtagttgtatcgttttgcttccggaaggtgctcatcgcatcaccaccactagtaaccgctgtcccgagtgtgattcaagccatcatagagatcgatttcaacaagaaaactactcctctggagaacggagccactctgcatcaaggatgtgttctatgtgacgagttgcttctcctcactttgtagaaantgaaacattgg

SEQ ID NO: 1918 - DNA, 361 bp, Arabidopsis thaliana
  unsure at all n locations
  Clone ID: LIB22-073-Q1-E1-E5
acgcgtccgcccacgcgtccgcccaaatctgacgcttctctctctctttctggtatctgcgtttgattcggagaagaaaaaaaaaaaaaaggcaaagagagagcttcaatggagttagcttctttccttggtagagctctgtttgtttccgtatttcttctctccgcatggcaagagttcaatgattttggtgaagatggtggccgatcagctaaatctttgaaaccaaaattcaatgcctttgtaaaccatgtgacaactcacactggccagcaattgccaccagtcgatatgaaggattcttgttgctgctgctaaagccttgaagggtactgggggaatattgtttgtctttggnaag

SEQ ID NO: 1919 - DNA, 372 bp, Arabidopsis thaliana
  unsure at all n locations
  Clone ID: LIB22-074-Q1-E1-B3
gttcataacttcatcaaaaccagtcgttgagattctgttgataacatcagtcggattttatatggctctcgatggagtcaatcttcttggtcatgatgctcgtaaatatctgaacaacattgtcttctatgtgtttagtccttcgcttattggaagccgtttagctgatagtgttacatacgaaagcttggtcaaaatgtggttcatgccggtgaatgttctgcttacattcatcattggttcattacttggctggattgttattgtcatcactaagcctccttcacaccttcgtggtctcattcntgggtgttgtgctgctgggaaattggggaatatgccactgattaataatcccagctgtttggtana

SEQ ID NO: 1920 - DNA, 470 bp, Arabidopsis thaliana
  unsure at all n locations
  Clone ID: LIB22-070-Q1-E1-C4
cgntacgccaccggtcatcgnancccgggtccgacccacgcgtccngccactgccacagcatcagtaggtgtagctgttagtgataatggagtaagcacgaatgtggtgcagcatgaagctacggcagactctgaggatacagatgctggttcgcccaaaagaacagatgagagtgaggcaatgagtgaagatgtgaacaaaacacccctaagggctgactcggatggtgaagatgatgaatcagatgcagaacatcccgggaaagtctccattggtaagaagctttggactttcttgacgacgtagcccaatctttgatcagagaatgtagctaatcttcttctgttgacaatattagtgttttgcttcttgatctttagtagctacttaggagggcttgtgttaatttcgtttggatattttttcaccacaatgtaatgttttccttccaaccttccaacacttaant

SEQ ID NO: 1921 - DNA, 459 bp, Arabidopsis thaliana
  unsure at all n locations
  Clone ID: LIB22-070-Q1-E1-C7
ntcggtaccgaacacgaattcncgggncgacccacgcgtccncggacgcgtgggcggacgcgtgggctcgagagactggattgttgctttaacaatccagagatccgtctctatttccccaaatgcttcaaactgaatcaagaagccagagatctcatcatgcacacttgtatagatgcgatgtttccangtacacaagtgcctgcctgcttcattcatcgagctacttctggggattccttgaaaatcaagttgaacgagtcgcctcttcctacaaccttgagatttaaggcttgtatcatgcttgttaaggttaatgaagaactgatgagttatgatcagacaccgatgatcgttgacattgtcatcagggacgaacataatgatctcaaanaaaagatatatccaagcatatatccaagcatatatccacttttaacagagcatatatacacattt

SEQ ID NO: 1922 - DNA, 432 bp, Arabidopsis thaliana
  unsure at all n locations
  Clone ID: LIB22-070-Q1-E1-C8
acgcgtccaaaactgctgggggaaaagctagcgccaacagctctactgccaaaaatcaaaagaaggatcaacccatcaccaagaagggtcaaggaagagggaagggaaaagcttcttcaaagaaaagtttttcatcgtatatgatggttgactccaacattctatggtctgacattcaggaatttgccaaagcgaaatatgagtttgagttgcccgagctatcaagaactaccgctaaaaaagtatctgttcttcgtaatctttgccaaaaggttcgtgtcagtattgctgctcgcaaatacgacttcagtgcaaacacgccttttgagacgtcagatattttggatcttcggcccgtaattaagcactccgtccctgtatgctctgangctaaagatcttgttgagatggggaaagtccaactggctgaag

SEQ ID NO: 1923 - DNA, 414 bp, Arabidopsis thaliana
  unsure at all n locations
  Clone ID: LIB22-070-Q1-E1-D11
gtattgttgagcaagtccgtgatggcagcaccattcgggtttatcttcttccggaatttcagtttgttcaagtatttgttgctggactccaggctccatcgatgggaaggagacaatcaacacaagaagctgtcgttgatcctgatgttacagcaacttcgaatggagatgcttctgctgagacgcgtggccctctaacaacagctcagagacttgctgcctcagcagcatcgtctgttgaggtttcctctgatccgtttgcaatggaagccaagtactttactgagcttcgtgtgcttaatagagatgttcgtattgttcttgaaggcgttgacaagttcaacaatctgattgggtcagtatactattccgatggggatacagttaaagacttgggtttgganctggtttaaa

SEQ ID NO: 1924 - DNA, 428 bp, Arabidopsis thaliana
  unsure at all n locations
  Clone ID: LIB22-070-Q1-E1-D3
acgcgtccanggacgcgtgggtcggaatcttcttattcgccatggatgctctttctcaggcgatcagttccgggatctccgttccttacaagaacaattcttcttctctcgttccttctcacggactcacctccttaatcctccggaaatcgagatctccggtgaatccctcatcacgatctcgcgtctcggtgcgagcttcggagattcaacacagcaaaacctcagcttcatcgatcgatctcagcgattcagattggaaattaaagtatgagaaagatttcgagcaacgattcagcatacctcacatcactgatgtcttacctgatgctgaagccattcgttcaacgttttgtcttaagatgaggtctccgacggaagattttgttggtggttaccttctgaatgaagaatgggatggattcatt

SEQ ID NO: 1925 - DNA, 423 bp, Arabidopsis thaliana
  unsure at all n locations
  Clone ID: LIB22-070-Q1-E1-D6
tccatggatgatctaccaacccatgtaacagcaccaactatactaaggtcagtatctacacgaataggtcttttcatgatantcctatccactgaagcagtcaccaaaatcatcgatctcgcactgctgtcaccaccacaatgctgtttcagtaaaagcacacataacaaagttatattcaaatactcaggatgcaaacaaataagaaggcaagagccaaaaacaagaaccttgaaggagatggttccagcaagagcgtcaagatcttcaaccaaatttaccagtacgaantctcattccaagggattcctatattgttctcgaagaacaaaatcagaagaaaacttatagagaattgacgttcggcttcgagacggagatttagccgtcaattttgactgagaagcgtcgtctccggtagga

SEQ ID NO: 1926 - DNA, 466 bp, Arabidopsis thaliana
  unsure at all n locations
  Clone ID: LIB22-070-Q1-E1-D7
ccgntcggtaccgaacacanattcncgggncgacccacgcgtccngtacaaactggcacaagttctgaggatgacttgaggatcaagtttgaggagctcaaaggaaagttttatggattggctgaacagaatgaaatgctggagcagtccttgatggaaaggaatactttggttcagagatgggaaaaactcctggaaaatattgatatccctccacagctacactccatggaagtggaaaacaagattgaatggcttgcaagtacaattacagaggctacacatgaccgggataatctccaacagaagattgataaccttgaagtctattgtcaatcagtaactactgatttggaagtctcacaaaagcaagtangtgatgtcgagggaaatcttcaatcatgtgttagtgagagggtgaatctttctgaaaggctgggaaaagtttgattggtgatcatgaaaa

SEQ ID NO: 1927 - DNA, 460 bp, Arabidopsis thaliana
  unsure at all n locations
  Clone ID: LIB22-070-Q1-E1-D9
acgctgccagtgccngtcaaaattaagggtcgacncacgcgtccgcagagatttttatagtttggtttctttgaccggagaatctcgattaggttacgatggtgtttctctcgattccaaacgggaagactttatcgatcgacgtgaaccctaattcaaccaccatctccgccttcgaacaattggcccaccaacgtagtgatgttccacaatctttccttcgttactctctccgtatgcgaaaccctagccgcgtgtttgtagattcaaaggattccgattcgatcttattgtccgatctcggtgtttctcgtttctctactgtgattatccatgtcctgcttttgggtggtatgcaagcggctccgccgaagcctcgtcttgatttcctcaattctaagcctccgtcaaattatgtagcgggtttgggtcgtggtgctactgggtttactactccatc

SEQ ID NO: 1928 - DNA, 422 bp, Arabidopsis thaliana
  unsure at all n locations
  Clone ID: LIB22-070-Q1-E1-E1
ntattttccagggacctgcagagaacaaactctgttgctgttaccgtgaacaatcttctccagatgtgatgatagtttgtgtnaaatatactaagcacttccatttcaaccttaggtatagattaatgattggggacatatccttatccgtaagttttacacaccacccaacattccaagcttcacccgctgtagatataaggcactgtgtatcactttttgctatatagaagaagaggctctagtgtatagcttctgttcattgctctcttgcgaaaataagttcggatatttacataaggtgatgatgccctgggtggtctgggagatatcttgttgcagtctgaccttggctccaatctcgaagggagagtaaccactctttgcaacctgctcntttggctgctggccacctctcctgt

SEQ ID NO: 1929 - DNA, 506 bp, Arabidopsis thaliana
  unsure at all n locations
  Clone ID: LIB22-070-Q1-E1-E12
ctgtttaagttgnccggtgcccggtccanaaattaacggggtccgaggcccgcgttccgatacacctngattcngttagcaancctgggccnaaanngnactnagcttnggcctnanttncnaatggatggttgatcctncgcgtttnagttttggggcaagccaagaagaatttggattccgttcagggatggggagcctttgcgttgggtcacaaacaacctaagcaaatggatatatctgcaagccaacaagagaagacaagctggcgggtgggattagacacgctcaccctgaacagtctatatgacgatggagccttgagagcagcccaacagcctgcctatggcgtcccagcttccaatccgtttgaggtccaagacctgtttgcattttcagacagtgtttcaccgccttcagccgtnaacaacccattcggtctctaagagccaacctatcatcaacaagagcaagcaagccacaagctacangttgcacccaaccct

SEQ ID NO: 1930 - DNA, 418 bp, Arabidopsis thaliana
  unsure at all n locations
  Clone ID: LIB22-070-Q1-E1-E3
cttataaagtccaaatcttgaagtgcgtgcacggtgcaccacgaatccacgatccagtgagcagcagcaactccatctccggagctctagattcagataagaacaatggcgattccgatgcctactcgccagctattcatcgacggcgaatggagagaacccatcttgaagaagcgaatcccgatcgttaatccagctactgaagangtcattggtgatattcctgcagctacaacggaggacgtggatgttgctgtcaacgctgctcgaagagcattatcaaggaataaagggaaagattgggccaaagcacctggagctgttcgtgctaagtatttacgtgctattgctgctaaagtaaatgaaagaaagacgatctgggaaaactcgaagcgcttgattgttggtaaaccattgg

SEQ ID NO: 1931 - DNA, 441 bp, Arabidopsis thaliana
  unsure at all n locations
  Clone ID: LIB22-070-Q1-E1-E4
tcccgggncgacccacgcgtccnaaacactttatcaagagattcacttagctcttcaggcgatgatgcttcaagcttcaatggttcaatggtctcttctagcttcgcttcgccttcagacaaaccgaagcataagtcaatctctccttacaaattcatatcttctcttatcatgaattctcctctgaggaaatggagaggaagtgagactaagaacaagcccaaacctcagcctctaattcaatgcttcacttacaacgagatttcaaaggccacaaatgattttcaccaagggaatatagtaggcataggaggctactctgaagtgtacagaggagatttatgggatggaagaagaatagcagtgaagaagattagccaaggagaatggtgacatgaacaanggagaaagagtttcctacgggacttnggatcataagtc

SEQ ID NO: 1932 - DNA, 424 bp, Arabidopsis thaliana
  unsure at all n locations
  Clone ID: LIB22-070-Q1-E1-E5
aaaagcaaagatcaaatgtcacatttgtggcaatctttgaatcacagtcatcattgtcatcatcaagctcaggggaggtatattcagatggcacctcttcgtggacttctaattataacagcgcggaggaggagcatgacaacgacttggactctgtataaattcaaaggcccccataattgtctatgggtaccagagcggacgcgtgggatattcctcaagtttgtgaatgattgtcggcaaattgggattagttgtcccattgttcctggaattatgcctattaataactacagaggctttttgcgtatgactgggttccgcaagactaaagatacanttgaaggtgatggctgccttgggagccctatcaagggataaccaaagaanctgttgaaaagcctaatgggaattcacctttgga

SEQ ID NO: 1933 - DNA, 433 bp, Arabidopsis thaliana
  unsure at all n locations
  Clone ID: LIB22-070-Q1-E1-E6
accgaggcacanattcgccggncgacccacgcgtccngcttgatccagattcggttctgattggagctgccatggaacgcatcatcggcggnaagtaaaagctcggacggaagatcggcggtggttcgttcggagagatttttcnanctacgcacgtcaataccttcganatcgtagctgttaanatcganaacagtaanaacaaagcatcctcaacttctctatgangctaacctatatagaattcttgaaggaggaagtggaattccgcgcataaaatggtttggagttgatgggaacaganaatgctttagngatggatttgctcggtccaagtctcgaatatcttttcgtcnactgtgggaggaaattctcaccaaagacatcttaaggttggctgatcaaatgcnaacaagaatnaaatttgtacatt

SEQ ID NO: 1934 - DNA, 456 bp, Arabidopsis thaliana
  unsure at all n locations
  Clone ID: LIB22-070-Q1-E1-C12
cggtgccggtcaaaaattcangggtcgacncacgcgtccgnccacgcgtccgaattgatgaacgcaaagataatgctgatatgacaagtgatcttacgggaacaattgaatctgctgattcagcaatcccaaatagtcccactgaagatgctgctccaggtgaagttgaaccgttggatcataatgctctttttgatccaacttctgatattaccaactttattgatttcagtggtgtatcatcttggtcaggaaatatacaagaccttaaaaccgaaaccgggaatgtatctttgaaagaggataagaaagttactgacatggcagaggacgttgtcacagcagatatagaaactgaatcgaatgaagcccgtgttggtgttggggcagaatctccagctgctgcaactgattgttcaaaagagacttctgatgcaactttgggatctgaagaaa

SEQ ID NO: 1935 - DNA, 413 bp, Arabidopsis thaliana
  unsure at all n locations
  Clone ID: LIB22-069-Q1-E1-H12
acgcgtccgaacaagagaaaatcgctcgtcgtcggtattcaagcgtctgtgactccgataaagcctnnnnnnnnnnnnnnnnnnnnnnnnnnnnnnnnnnnnctttggagttgtcgtatctctaaatcggaggcaatttgagtgagataaagacaaaggaaggaatcaagtggactaccgaagcgagttttgagctttttcagagacggatttggagatttcttgttgatatcgtctgcttagaggcttatttggtaccagatgaaacagatctgagcttcggaaggtatggcgagttcggaggtttcaatgaaaggtaatcgtgggaggagataacttctcctcctctgggttttaagtgaccctaaaggagactagaaatgtctcccgtcgccggcgaagggggcaaaaaa

SEQ ID NO: 1936 - DNA, 419 bp, Arabidopsis thaliana
  unsure at all n locations
  Clone ID: LIB22-070-Q1-E1-A1
gacaaagcctttttctctatatatatatatatatctctctatctttcgccattttggtttttgcttctctctgtgtgtgagtgattatgatgatgggattatctttctaaagctttttgttttcctgaaaaattaaaaaagaaaacttttatggttcttcntctcttctgtgttggagttgagagaccaataaatgctgttagtaatggttagttgagatgagaggtaaaaagatcccgtagtccgaggagtgtttggtttcttgcaaaaggatagtgaggcaaaacatgggtttggtttctcttgtctcctttcattcatcccttttccattaatggtctctccctcttccaacaccaacctcttcttttattaactaacaaacattttctgcctttttctcctcctctcactctcct

SEQ ID NO: 1937 - DNA, 430 bp, Arabidopsis thaliana
  unsure at all n locations
  Clone ID: LIB22-070-Q1-E1-A11
cgcgtccgntgctgaattcttcacgattttccaactgggaccgctccacttagacggaaacacttccaaagctgcagacaaatgggtgtctatagacgagtatttggatggctacttggtggaaaggaagaacagatatgggaaaaacatggaagtgatcgatgtcggaatgcaagagataaaaacttacttcaggctcttcttgttgtcttcagtacttctgatgttcatgttctgttccaggatagcgaagagcaagtatagtagaaactccatgcctgtcttgccatgaaactaatggaggaagctctcatttaattaacccttgtaagttagtaattcttttggttgcgaaacttgtattcctcattttagaaatgttgtgtctcatgaaaaagacaacataattccttggatttgtgaaanaatc

SEQ ID NO: 1938 - DNA, 477 bp, Arabidopsis thaliana
  unsure at all n locations
  Clone ID: LIB22-070-Q1-E1-A3
cgccaggggtcnaacaatcccgnggncgacccacgcgtccgaggcntcatcgactaatgaagtcatcaaagaaacgtgctcacggcgttaagcttcaagaaaccaaccatggtccctccaaccaacaacaagaaccatctccaacacgcaactatcactcccccctggacttcaacctacaaaaaccaagctctctctaaaaagacaggttgttgttaagacaagagtccaanagtataagatttggtccaaatctaagtaagaagtcaagagttagtcggtttgaagaagaacaagaaaggattcaagatttgggcactgagtagaagtacaggaaactctccaaaagttgatctttcagataagaactcttctagtgatttggatgtccttgatggtttggatttcgctttccaatangcgcaacacgttcggtttgagaancggtttttgatcaaaatcctccggtaattaaaa

SEQ ID NO: 1939 - DNA, 443 bp, Arabidopsis thaliana
  unsure at all n locations
  Clone ID: LIB22-070-Q1-E1-A5
aaacagtggccggccgacgcacgcgnccncagacacactcgcgaaaatggcggctcactcttcttgcaactttgctttgacgaatccgatcatctcacaaatcgattctttctctaagaagaaactatctgttccattatacttcttctctacaagaaaagcattgacgaatccttggttaggcgttgttgattcatccctctctctcacttctccagtctccgctctacaaactaatcgcccaagaagaatccataaatccgccatctccagcttacccaccgcgaatccagatttagtggtttctgangcganaaagcccaaatggtcatggagggcaattanatcatttgcaatggganagcttgaagctaggaagctcangtatccaantactggaactgaaagcacntctcaangggtattttggattgaaggaacna

SEQ ID NO: 1940 - DNA, 418 bp, Arabidopsis thaliana
  unsure at all n locations
  Clone ID: LIB22-070-Q1-E1-A6
ggtttaactcgaaatttcattttatggattcttttgtcatctctcttcacggcgattcaactaacgtcgtctcaacgcaacactccaccaccacgctctaaagacgccgatctctgcaacggcgtgttcgtttcctacacttacttaaccggtaccaagattaaaccaaacgacacgaagaaccagccgtaccggttcgaatcagagatcacggtcctaaacaacggccgcgacgagcttaaatcgtggcaagtctttgttaaattcgcccaccgcgagattcttgtttcagcgaccaacgctgttctctctgacggttctagcctcccggctagcgttgagaacgggacaatcttcgccggggtttccatcggcggatttgaagacggcgatnatgacggncggcgacgttactcaa

SEQ ID NO: 1941 - DNA, 466 bp, Arabidopsis thaliana
  unsure at all n locations
  Clone ID: LIB22-070-Q1-E1-A9
agntcgtgctaacggttcanagggtcgagnggcgcgtccgcccacgcntccgcggacgcgtggggatcagtttgacgtagtccctccagagaatgcttctgtaagttcatatgggaagaagtctgttgtagaggaacgtgtcaagaagaagccccaacctgtgaagattagtccttggactctagctcgtctcaatgcagaagaagtttcaaaagcagcagcagaagcaagaaagaaatccaaaataatccagcctgtggcgagacgggaaaatccatttgttggcttagaagcaagcagcagcttcggaagcagtggccgtagaatgttcccaacaaaatatgaaggtgttaataataacgggaagcagcgaaggcaatcaaagcgcatacggttaccagcaagaactacctctagaaccgctgatgaatgttcaagacaaaagcaacaatgggggactcaacta

SEQ ID NO: 1942 - DNA, 466 bp, Arabidopsis thaliana
  unsure at all n locations
  Clone ID: LIB22-070-Q1-E1-B10
tacgcttccngtgccggtccaaaattcaangggtcgacncacgcgtccggcgacggcaacgaagacggcgaagaatacggcgggacacgaggattcccaacgatcagattctttgacattccacggcggcttagatatcagcttctccgatccgctctctctgtttgtgtaaatcatggtgatcgcggctgcttcctctttttccctcggtccatctcattgccatcaatcttacacggatgagttctcttcctccataccttacaaaagaaccagcaatgcaagaaatcgtgtgtttgatggatgtggctctgctaatctctctgttttaagttccagatgcaagattcctttttttggatcagcatttcatgtatcatccggtggacatgatctcggcctcacgaaagtttcggttgctgctgattattctgattcggttcctgattcatctttctatggataa

SEQ ID NO: 1943 - DNA, 419 bp, Arabidopsis thaliana
  unsure at all n locations
  Clone ID: LIB22-070-Q1-E1-B3
ngtcattagctatattctagtttaatggttatcatcaagaaaatctgaaatcaaatttttggattgtaatccatggctgctcttggtaaaggacataaaacagctttcatctcttgaatggcttcgtctcttttgcaatttttgagttagccaagtgctcaagggagatacataatacctgaagatgtccaaggcaagtgatgccgtcagagaaccattggtggacaagaatatggctggatnaaaaccaagaccagccgtggatggtttatctcagcacattcgttgcggtctgtggttcttttgcgtncggttcttgtgcgggatactcttcacctgctcangctgcaattangaatgacctttcattgactaatagctgagttttcactctttgggtccttactaacttttggcgc

SEQ ID NO: 1944 - DNA, 422 bp, Arabidopsis thaliana
  unsure at all n locations
  Clone ID: LIB22-070-Q1-E1-B4
ttctctctcttatctcgtctacttgatctctctactctctttcctctctagctacttctctcccttacgtctccaaggagatagattgacaaattctgttcacaaaggaaaaaagttcctctgcatacgtctctctctctatgttcttcatttatatgacttgaataacaagtaaaggatgaggcagaatctgaaaaaagtagcacagatcaaagtagacgaatctaagaagctatttccttatgtcttccgggttaaaacttcttgtgggaattgcgctaagagatcgaagcctaagcttatctatcttcttatcttctctcttatctcaagttgctttgtctttgctcctcagctcctctgtttcccttaaccctctgctccggtttctcatcgaatcctcaanttaagagaattgaaat

SEQ ID NO: 1945 - DNA, 469 bp, Arabidopsis thaliana
  unsure at all n locations
  Clone ID: LIB22-070-Q1-E1-B6
ttctangccgtcggtaccgaacanaaattcncgggncgacccacgcgtccgntcgtcctctaaattgtcnaaaatgctggctangctcgctgcgaagcgtcttctcgagatccgtcaagttttccgtcaaccaacctctcaggtgactcgtagcttatcgacggccttaaactaccatctggattctcctgataacaaacccgatcttccatgggagttttcagaggctaaccaatctaaggttaaggagattctctcttactatccatccaattacaagcagtccgcagttattcctctcctagatcttgcacaacagcagaatggaggctggctccctgtttcagcaatgaatgcggttgctaaagttatagaagttgcccctatccgtgtttatgaggttgcaacattttacncaatgttcaacagagcaaagggttggaaaatatcaaccttcnagtttgtggca

SEQ ID NO: 1946 - DNA, 447 bp, Arabidopsis thaliana
  unsure at all n locations
  Clone ID: LIB22-070-Q1-E1-B7
ttgccgncggtaccgaacacnaattcncgggncgacccacgcgtccngaanaaactaaaaacaaaaatggcattgcaaaagtttcctctcatggggctgcttttgctcctaaccatcctcgtctctgtgacaacagcggttgatgatcctgtttgcccggcgacttccaagctaagccgagcaagtttccctaatgggtttttgtttggcacggctactgctgcgtttcaggtcgaaggtgcaattaatgaaacttgtcgtggaccggctctatgggatatctactgtagaagaaatccagagagatgtantggcgaccacgccgatgtggccgttgatttcttccatcgttataangaagatattcaagctaatgaagaatctaagacacagatgcattcagactctcaatcgcatggtcaagaatatttcctcatgggagaaang

SEQ ID NO: 1947 - DNA, 448 bp, Arabidopsis thaliana
  unsure at all n locations
  Clone ID: LIB22-070-Q1-E1-B9
atagggtcgacgnacgcgtccnacccgannaagctgttctacacctccaacatgccaatcattctccagtctgctctcgtctcaaacctctacttcatctctcagcttctctacaggaaattcagtggaaatttctttgtgaacctattgggacagtggaaagaatcagagtncagtggacaatctataccanttagtggtcttgcatatttgatcacagctccggcaagttttgccgatatggnangctcatccattccatgctctgttctatatcgtcttcatgctcactgcttgtgccctattctcaaaaacatggattgaagtctccgggtcttctgctagagatgtagctaancangctaaaggaacaacaaatggtgatgccgggacacangagagtccaacttacaaaaagggagctgnaccnggtacatcccaaaaagcg

SEQ ID NO: 1948 - DNA, 417 bp, Arabidopsis thaliana
  unsure at all n locations
  Clone ID: LIB22-070-Q1-E1-C1
aatcgtgaggcctataatttcccttcatctccaaaatcatttctcctcaaatttcttctttagaagattaaaaatcttctctctaatctctccactctttcataaatattttcctaattcttctaccttggtgtctgattctagcaccaaaccattttctcctaccaaaatctgggtttcgatcaattttaggtcttttgattcctacttgtctaatcgtcttgcaatttcaaagatgacagttgttggagatgttgctccaattccaaggaggaacagttctacttgctctaatgatatcgctgctccgttattaccaagagtgtcatggagatgaagttgctcatgatgaattcaatggagcttcntttagtggcgccggttttaacctcggccacgactataantgggtggctg

SEQ ID NO: 1949 - DNA, 613 bp, Arabidopsis thaliana
  unsure at all n locations
  Clone ID: LIB22-069-Q1-E1-H1
cgttacttgccnggcccggtccanaattaacgggtcgacgcacgcgtccggaaaaaacacacacacatcttagagagatgaaagagactaattttggcgaagaaaacgcgcgttctggtagttggtgggacgggatcattggggaggaggattgtaaagtgcgtgtttggctgagggacacgagacttatgttctccaagcggccggagattggagtggacatcgagaaggtgcagctacttctttctttcaaaagactcggcgcacatcttgtggaaggctcattctccgatcaccaaagccttgtctctgccgtaaagcaagtcgacgtggttgtctccgccatgtccggtgtccacttccgcacccacaacatccccgttcagctcaagctcgtcgcagccatcaaagaggccggtaacgtcaagcgtttcttaccatcagaatttggaaggtctactaggaatcatccacagaantaaacatttgtnaaaaatggaatacaaatgcaattaaggccnccgggatttnccganaaatactcctccgtgccttgttttgccccaanacttcgggnggnaaatttaccncaaaatggggaaactttggtncc

SEQ ID NO: 1950 - DNA, 444 bp, Arabidopsis thaliana
  unsure at all n locations
  Clone ID: LIB22-069-Q1-E1-F12
accggtcanagaattcccgggccgacccacgcgtcagaaagcccaaaacccagaagaacaaaaaatctctcttttgaaaattctccttttgcaaatcattcaagtgaagcacaannnnnnnnnnnnnnnnnnnnnnnnnnnnnnnnnnnnnnnagactttttgcgtttacctgaaaaactgttttgatcttttctgataactcttctcagatgagaagnnnnnnnnnnnnnnnnnnnnnnnnnnnnnnnnnnnnnnnnnnnnnnnnnnnnnnnnnngagtatcaagttgatggagcatttgttggnacatatgggataaattatggaaggatagctgacaacataccatctccggagaaagtagttttacttctaaagcaagctaaaattcggaatgtgcgtatatacgatgtagatnacactgttccntgaagcttttaagtg

SEQ ID NO: 1951 - DNA, 620 bp, Arabidopsis thaliana
  unsure at all n locations
  Clone ID: LIB22-069-Q1-E1-F5
tacaagtccangaaattcccgggtcgacccacngcgtccgaaaaaattgacaaacaaatataaaatccctatgaacaactctagagaagaccagtggttacaacactatgagcaacaaaatattcaagagattactccgtgcttcaacgccattaacatcgcgtcatcgtcgggatcttcccttggagacggtggtgccgcggcacatgaagctgctggaaggagatctagggcttcgaggagagccataccaacaaccctcctaaacgcaaaccctagcaatttccgagccctagttcagaaatttaccggacgttctgccggaggtgaatccaaccgcagaaaaggtccagtgactttggatttcgggtctcccactacaatctccaaagaagctatctttccaagtctcaagcgatcgaagtaataacaatcttgatcatgtgcacaaactgantacgacacgtcactgacttggcangtacaagaatcaatgatgtcgtatcaatttaggcnaaggaaactaactcnggcgggttaaaagcaaccgggttacnatgattcaagatttttccgangggaatacncccggggaataagtaacctatgatgaaaagttt

SEQ ID NO: 1952 - DNA, 605 bp, Arabidopsis thaliana
  unsure at all n locations
  Clone ID: LIB22-069-Q1-E1-F6
ggcgncggtacaaatcatgaaattcccgggtcgacccacggcgtccgaacgaaactagccagagagatgacgagcaagattctagttatcggagctacaggtctcatcggaaaagtcctcgtagaggaaagcgccaagtctggccacgcccactttcgctctggttagagaagcctctctctccgatcccgttaaggcccaactcgttgagagattcaaagatctcggcgttaccatactctacggaagtttaagtgataaagagagcttagtgaaggcgattaaacaagtcgatgtcgtgatatcagctgttggtcggtttcaaactgaaattcttaatcaaaccaatatcatcgatgccatcaaagaatctggaaatgttaagagattcttaccgtcggaatttggtaatgacgtggatcgtacggtagccattgagccaacgccntaannacacaaagccaataagggtgcattaanctgcaagatacttaactatgtcgtccaaggttgcttgcaaggcctttggtcncttgtttgggtcaatgccaanttgggaanccanattnnccccccnaananacaaaggtttcaaacccaatnga

SEQ ID NO: 1953 - DNA, 626 bp, Arabidopsis thaliana
  unsure at all n locations
  Clone ID: LIB22-069-Q1-E1-G1
gaactgtttacgttgcccgggntcggtccaaaattaacgggtcgacgcncgcgtccgnnnnnnnnnnnnnnnnnnnnnnnnnnnnnnnnnnnnnnnnnnnnngaattcgagaaccagatctactaattacctgagagaaaaaagatctgctctgtttgtcttgaaacagacagaagtcaacaaatctttcatttgttttttagcaaatcaaagaaatggccggagggttcgtcagtcaaacgccgggtgttcggaactacaattacaaactgacaccgaaagtgtttgtgacatgtttcatcggtgcttttggtggtctcatcttcggatacgatctcgggatctcaggaggggtaacctcaatggagccattcttggaagagttcttcccttacgtctacaagaagatgaagagcgcacatgagaacgaagtactgtcgatttgatagtcagcttctatcctcactctcctcaagtggcgcttgggtctcctcttgctccaacattacaaagttttcggaaggaaatggtcnatgttccgcggtggnttcaccttcctcaaccggttccggctttcaaagggntttgcccaaaanaatcgcnaaggccttcccaattgggcccgt

SEQ ID NO: 1954 - DNA, 463 bp, Arabidopsis thaliana
  unsure at all n locations
  Clone ID: LIB22-069-Q1-E1-G10
ctttncgcgggcaggtaccggtcanagaattcccgggncgacccacgcgtcnancccacgcgtccgannnnnnnnnnnnnnnnnnnnnnnnnnnnnnnnnnnnnnnnnnnnnnnnnnnnnnnnnnnnnnnnnnnnnnnnnnnnnnnnnnnnnnnnnnnnnnnnnnnnnnaccaaatatgggaacctgcttctccagctcaactaaatccacggctgagatctctccctttgacctcgtcgtcaaacctcctcctccttccgccgccgccaccgnaccancaacccaacgaatccccaccgcgaaaacagaaacatcgacggtgagcttcaccgcaacagtgagattatacggaccacctaacagtctagtgacgtcgtatctccgtttcgctcttctccacaagaaagttccgctccgtttcgttccatcgggaggaacaaaaaccgaagaattcaaggtcgg

SEQ ID NO: 1955 - DNA, 442 bp, Arabidopsis thaliana
  unsure at all n locations
  Clone ID: LIB22-069-Q1-E1-G12
anaagtcaagaattcccgggccgacccacgcgtccggttcgttctctggcggccgatcccgtcgctcgctaccttttaagatattttttttatctaatgaacctgaaattgtaattaggcatataattggggattatttgctgaaattctcatttctagatcgaaaaaagcgaataattcgttttcatttgattcttgcctaatcttagggtgtctttatttatctaccaaaagaatgtctaattatcgaggagatgatgctgagtacatggaagacgtagatgatgagatggaagatgttgaagatgatatggatgaggagtttcgtggtgatgatcttggtgcttcagattctgacgttgaagaatttgactattcgaacaataaagtagctgataccacggctgagcaagctcggaaagggaaaagatatccaagggga

SEQ ID NO: 1956 - DNA, 630 bp, Arabidopsis thaliana
  unsure at all n locations
  Clone ID: LIB22-069-Q1-E1-G3
ntgtttaccttgcccgtgccggtccnaaaattnacgggtcgacgcacgcgtcccggtgattctacctcaaaattaatacacacattcattaaagaaaaacaccaggacgagattacttttggcgaaaagtccaaattaggacgagggggtatgactgcaaaaagttaaagctgctgttaatgcagcttatggtggcgttcctgttatcataaccagtggatatgcagctgagaatataagtaagtccttagaggactgcgtgttggtaccctgttccatcaagatgctcatttatgggctccggtcgtagatactacttctcgtgacatggcagttgctgcaagggaaagctcaagaaagcttcaggccttatcttcagaagataggaaacaaattctacacgacattgccaatgcccttgaagtaaatgagaaaacaattaaagctgagaatgatttaatttgcgcacacagantggtatgaaatcttggtancccnctaatttatgaaacccggggaaaatttccaagcccttgcaancttcccgtttngccagctancccnaaattggaaganttcaaatanggcccttttttttaaancaaaanctccagggttgccagntggttc

SEQ ID NO: 1957 - DNA, 621 bp, Arabidopsis thaliana
  unsure at all n locations
  Clone ID: LIB22-069-Q1-E1-G4
tacgttgcccggnccggtccaaaataangggncgaggcacgcgtccggnccacgcgtccgnnnnnnnnnnnnnnnnnnnnnnnnnnnnnnnnnnnnnnnnnnnnnnnnnnnnnnnnnnnnnnnnnnnactgtaataaatctaaggaaacaaaaaaacgttacgaaagaaaaagcattaaaaagaaaagctttagagagaaaaaaaacacagctcacaacctcttttcaattattcaatttagcttttttccgatcctggtcatcacacngcactgcgtcttctttgccaagttcttcttcatctttcgtcgttttcttagtgccacccaaagatcttcgtgcaggttcattggcgtttgtagtacataaattttccctgacacacagaaaaagaggatttgactgttatacaatgtcaacaaaagtgttggatcctgcatttcaaggagctgggcagaacaggacgaacgggaatganatttggggantcccgtacaaaagtccggagcatggaaagttcaaangggaagatacttacattgggcttgcagacaacacaagaattaaanggggggtgcntaaattggnttgganataaaantttccgggattngggaaaag

SEQ ID NO: 1958 - DNA, 542 bp, Arabidopsis thaliana
  unsure at all n locations
  Clone ID: LIB22-069-Q1-E1-G5
acgcgtccganactatcgagtaatacccagtagtcaattatctggtttttgatcgattccatcaaaatttgatcttttttcttctctgaagcgaaagctctcgcctttaacattttcgccaattgtgcaaatttactgttccacaagttttcaaaatgaaggcgatcttcaaccgtagagttgtcgtcgactcatcttcgcgtctcaccaagctgctcgcgaatccaactactcattctcacctgaatcgtcaaactttcacttctctctataaaccaaaccagagccgccattttcgaacacactatcttccttcaagcccgtcgtctcctcccgtgagccgctttgacccttctcaagctatggcgatcggagaaaattcgtgggtttttcgcgagcgctttagggacaagctgtaattggaatccgtggaaccaaattgggtcatgggtcccanttcccaaaaaggggttcgaattccaagaggntttccgggggtttcaaaaggcttggtgggaaacattgggcttcaaagggttanc

SEQ ID NO: 1959 - DNA, 594 bp, Arabidopsis thaliana
  unsure at all n locations
  Clone ID: LIB22-069-Q1-E1-G6
nggcccggtccaaaattaacgggnccaggcccacgcacgccntccgnggacgcgtgggcggacgcgtggggtagaggtagctcctcagttccagaaccaggagatgaagttcatgagactgaccaaaaggaacactatcctcttcttccctgattcagttcaagaggtcatgaatttcaggacagtcaatgggtcatgtgaaggaattgaagatcccgatcatcccttcagtagtgaaaggcctcgattcggcctcatcccggcaggttcaactgatgcaatagttatgtgcaccacaggagctcgtgatcctgtaacatcagcgctgcatatcattctaggtagaaagctcttccttgatgcaatgcaggttgtgcggtggaaaacagcatcaacctcgacgattgaaccttatattcgttatgcagcctcattcgctggatacggnttagggatgcattcaaagtgaaatacggggatggtccaaacgcctatgactagttggaactaagataatcctgaagcacaagnttagacaagcaaaggtaaagtttngaagaanctggatccagnnaatttcnaaagctttcccta

SEQ ID NO: 1960 - DNA, 556 bp, Arabidopsis thaliana
  unsure at all n locations
  Clone ID: LIB22-069-Q1-E1-G8
aattcccgggtcgacccacgacgtccggaggaaagccaaagagagagagagagaaacaaaaatggcgtcacagagttgctacaatggaatccatcgtataaaaagggttcatcctctgattcactctctcacatttcatcgattctcctcatcttctcttccattcaaatctcacattccctcttcacaacaacagcttcgtattcgctcatcttcttcgctttctgatcttggaaatcgcaggcattgttcgtctactcgaggatttcaattttggtcatacaagagaagcgaagcagcgtcgccgttcaagacgaggtacagagaaaacgaagaaagaagaagatatgacgattaaaccggcggttcgtatttccgacgggaatctaatcatcaaaaaccggacgattctaaccggtgtaccagatntgtacacactcagacgaactggccggtaaaggatcttcgtcggagctgtattttacaaggaagagagtaacacatcgtaccgatttggtnagccttcgcaatttcccggtttaagtctggnttccgg

SEQ ID NO: 1961 - DNA, 444 bp, Arabidopsis thaliana
  unsure at all n locations
  Clone ID: LIB22-069-Q1-E1-F10
aggtaccngtcaaagaattcccgggccgacccacgcgtccgtgaaagctttgttttgagttattttcaaagctaataaaaggagtgcttttatatttgatctaagtattcaaatctttaaagttgtggctaaacttcagtttgtgtttgcttttgtttatcaagattgttcttagactttttcgagttaaaaaacttgtgtgttggagtcatcatcgtgatcaatggaaaataaagttgagaaggagattacttgggtgattaaaaatttctcttctctgcaatctgcaacaatatattctgatatattcgttgttggtggctgcagatggcgttgtcaggccttccccaagggatataataaggctgattatctttctctgtatctcgacgttcctgataaagaatctttacctattggatgaagaagccacacaaaantttc

SEQ ID NO: 1962 - DNA, 460 bp, Arabidopsis thaliana
  unsure at all n locations
  Clone ID: LIB22-067-Q1-E1-G1
caagaattcangggtcgacccacgcgtccnaataaatggcgttacaaaggcaactcctgaagagagctacttccgatatctatcaccgccgtgcgatctctctcctccgtactgatttctctacttctccttcgattgctgatgctccgccgcacattccgccgttcgttcaccagccacggccgtataaaggtccttccgccgatgaggttttacagaaacggaagaagtttctcggaccttctcttttccactactaccagaagcctcttaacatcgttgaagggaagatgcagtacttgtatgatgagagtggtanggcgatatctggatgcctttgctggaatagtcactgtgtcgtgcggtcactgccatccgggatattcctaatgcgattacgggaacagagcaagctacttcaacacgcgactactaattacctgcatcatgccaatggggg

SEQ ID NO: 1963 - DNA, 401 bp, Arabidopsis thaliana
  unsure at all n locations
  Clone ID: LIB22-067-Q1-E1-G11
acgcgtccgcccacgcntcngcggacgcgtggggagagatcatgaggtcaccggtgcaactccaacacggctcanacgccannaacggtttccacacgctgcagcctcangatcagaccgatggtccgatcaanagagtgtgtctcacgcgcggtatgcatgtccctgaacacgttgcgatgcaccacacncacgacgttggtccggaccagtgttgctcctcggtggtgcagatgatccangcgccgcctgantccgtgtgggctcttgtgcggcgtttcgataatccgaangtttacaagaacttcancagacagtgccgtatcgtccaaggcgatggactanacgtcggcgatctccgggangtcatggtggtcccctgggactcccnggggtctcaa

SEQ ID NO: 1964 - DNA, 483 bp, Arabidopsis thaliana
  unsure at all n locations
  Clone ID: LIB22-067-Q1-E1-G3
cggtgccgtcaaagaattcangggtcgacccacgcgtccnggagaaaatcgctcgtcgtcggtattcaagcntctgtgactccgataaagcctanactancnaggacngcgagagagaganananagagctttggagttgtcgtatctctaaatcggaggcaatttgagtgagataaagacaaacgaaggaatcaagtggactaccgaagcgagttttgagctttttcaganacggatttggngatttcctgttgatatcgtctgcttagaggcttatttggtaccagatgaaacanatctgagcttcggaaggtatggcgaattcgganggttcaatgaaangtaatcnttggcggagataacttctcctcctcctgggtttagtgaaccctaanggngactanaaaatgtcccccgtcgccggncgaaggggcaanaaaaattaattctacccgatttcggctgccngctgaaacgttgct

SEQ ID NO: 1965 - DNA, 454 bp, Arabidopsis thaliana
  unsure at all n locations
  Clone ID: LIB22-067-Q1-E1-G4
ggtcaaagggncgacgcacgcgtccacccacgcgtccggggcgctaaatgataaatcttctacatcaaacttgaaaattgaagctcttgtcttcaccaaattagtcttggnatcacatgcncctcctgtttttcacccttacattaangctctttcaagtcctgttttagctgctgttggtgaacgctattataaggtgactgctgatgcattaagggtttgtggggaacttgtcagagtantacgcccaagtactgcgggaatgggctttgattttaaaccgtttgttcatccaatctacaatgcgataatgtcccgcttgacaaatcaagatcaggaccaaggaggtcaaggagtgtgctatcacctgcatgggtcntgtgatttcaacatttggtgatcaactgagggcaaaagttaccttcaatgccttcctgtgcttgttgatcgaaag

SEQ ID NO: 1966 - DNA, 482 bp, Arabidopsis thaliana
  unsure at all n locations
  Clone ID: LIB22-067-Q1-E1-G5
aactcccagcgnaccgtaacggtcacaaattcccgggncgacccacgcgtccncgatttgcttcngctttcttcgatttgcttctgctttcancgcggttcaggtcactcttttcncagccatggcgantcctttcanggaaaccgtcgtgggttttatgatagtgatgtacatttttgagacgtanttggatctgacgcaactcactgctctcaagcttccaactcncccgaaaaccttggntggtgtaattagccaagagaagtttgatgaaatcacgagcatacagtcntgacaaaagctantttcactttgttcatganntttgtaactatacttatgggactctgcaattttgttctttgngatcnngccttggttttgggaanaatgtctggaactgttttaccganggttgggccntgatccagagaatgaaatactgcataacnctttcaatcntggangggtgttaaagacat

SEQ ID NO: 1967 - DNA, 479 bp, Arabidopsis thaliana
  unsure at all n locations
  Clone ID: LIB22-067-Q1-E1-H1
ttacccnccaggtagcggtcaagaattcacggggacaaatctttctttctctttattttatcctaaaatttcctatctgatttcttcctcttgagctaaatttgttaccttctgggtattcaaaaagatctcattttttcttctagctctaaattttcagggagtttctttcttcttcttttgaagaccctttgtcatgagctaatttttatcctctgtgtgttgagaaagatctcattttttagctttaggattgagggagtttcgatttttacttagcacttttccttggaagtgatttggtggaactcatggtgattggtttcttcctaagggttattagagattgagttctggatttttcacgcgccttgggatttgatctaatgtactcncctttttcangtcntaatccggntnaaaattttaaatttggagatcntttggtaaaaaaggtgcaaagttccgganttttgtaa

SEQ ID NO: 1968 - DNA, 407 bp, Arabidopsis thaliana
  unsure at all n locations
  Clone ID: LIB22-067-Q1-E1-H2
acgcgtccggtggtttgtttgggaagcttgtggactagtcggtgtattttttacatatttcacagttttcacagtacagtttggctttatnagaattgggatatgggaagaacttctacaaggatcaatatggggttatattcatccttttaatattctccttcaatgtatttatgatcattgcaagtcatttaaaatgtatgacaaccgagcctggagtcctcccacgaagattatgacgagttggatagttagaaattaccaccgggaactaagtttagctcttaactaaattcaaaattctttactttaagaggaggatgattcgaatacttaataaaatcaaagttaagatatatctgttganacatangcttccagccaatatggaaataatattaangagc

SEQ ID NO: 1969 - DNA, 502 bp, Arabidopsis thaliana
  unsure at all n locations
  Clone ID: LIB22-067-Q1-E1-H3
aactgtttacgccgnccggtnccggtccaaagaattcacggggtcgacccacgccgtcccgactttttganggataatccggcccaaaccaaaacattaggcaantaatnactgagggngaacaagaacctcatacatcaagttgggtcaaaagagggggaggctgacaatggacgaggaggatgaacaaccaacacagaagatcanattggggcatgccagcaacacaatggatcagcatttacagtgctcacagaccaatgaaacaacgatatcattataatgttactgatacaaggcttgcacaacacattgaaaaangaaatgangatgggttatttatcagcagtgtggcttcttgcacggatctctgggctttgatcatggatgcaagaagtggctttacggatcaagtttancaagtttatcaccaagcctttctccacaanggaatgggattatggaacaatggggaaaaagaattactatattacagcagtgg

SEQ ID NO: 1970 - DNA, 434 bp, Arabidopsis thaliana
  unsure at all n locations
  Clone ID: LIB22-067-Q1-E1-H4
canaacctgtatcatgttgatggagtcccttagcatactgttatctggtctggaccgcaactgccttgctgttgttctctcacaaaatgttaagcatagagccaaaactattgcacaaggatggaatccactgctggaatctcttgacatggatgcttgcaatggtaattctttggaggctcatgcattcctgcaactgctggccacttttgctattgttgctgattttaaagaagatgaactcttaaagctgatccccatgggttcacgtcgccgtcangcagctgagctctgcccgttcacttggattaatctgaaaaaatgcctgggtgtgattgaaggttcctcgtgaacagtggaaaacagatttgatgccggttaacnttggcatttgcgtttgaactcacagaacagttctcaacctgtccccatta

SEQ ID NO: 1971 - DNA, 480 bp, Arabidopsis thaliana
  unsure at all n locations
  Clone ID: LIB22-067-Q1-E1-H5
ancggtcaaagaattcccgggncgacccacgcgtccnaaccgatccaaattccgagaaagacaaccaaattttccttttcctctgcaaaaatgtttattgagagcttcaaagttgagagcccgaacgtgaagtacacagagaatgagattcactctgtgtacgattacgagacgacggaggttgttcatgagaagaccgtcaatggcacttaccaatggattgtgaagccaaagactgtcaaatacgatttcaaaaccgatattcgtgtccccaaattaggggttatgccntgtgggtttgggaagaaacaatgggtnaactcctcaaccgcctgggtggtgattgcnaaccaaagaagggatccccgttgggcaacgaaaggacaaaantgcaacaagcgaaattacttccgggtcactaaactcaaagcttcaacnnattcgtgtccggatcttttaacggtgaaaaagatncaatgc

SEQ ID NO: 1972 - DNA, 413 bp, Arabidopsis thaliana
  Clone ID: LIB22-068-Q1-E1-A3
aagattgggtgtacccagcctcgtagggttgctgcaatgtctgttgccaagagagtagctgaggagtttggttgtcgtttaggagaggaggtagggtatgcgattcggtttgaagattgtactggaccggatacagtgatcaagtacatgactgatggtatgcttctcagggaaattctgatagatgaaaacctctctcagtactctgtaatcatgcttgatgaagctcacgagcggacaatccacactgatgtgctgtttggtcttctaaagaagctgatgaaacgtagactcgaccttcgtctgatagtcacgtctgccacattggatgcagagaagttctctgggtacttctttaactgcaacatttttaccattcctggaagaacatttcctgttgagatactatatac

SEQ ID NO: 1973 - DNA, 411 bp, Arabidopsis thaliana
  Clone ID: LIB22-068-Q1-E1-A6
aaagtgaatgggctaaacaaagctcgggctattctcaccacggccaggaagaagaatcctgggggggctgagctatggttagctgctattcgcgctgaactgaggcatgacaacaagagagaagcagagcacttgatgtcaaaggctctgcaagactgtcccaagagtggtatcctctgggctgcggacattgagatggcgccacgtcctcgacggaaaacaaagagtattgatgctatgaagaagtgtgatcgcgaccctcatgtcaccatagctgttgccaagctcttttggcaagacaagaaggtggagaaagccaagagcatggtttgaacgtgctgttaccgttggcccagatattggcgatttctgggcgttgttctacaaatttgaacttcaacatggctctga

SEQ ID NO: 1974 - DNA, 416 bp, Arabidopsis thaliana
  Clone ID: LIB22-068-Q1-E1-B1
ccatggctattgggtctcacaggttgtctcagcaaggtgccatcaccaagcgtatgactgccattgaagagatggcaggaatggatgtcctgtgcagtgacaaaaccgggacactaaccctcaacaaattgagtgtggacaaaaacttggtcgaggttttctgcaagggtgtggagaaagatcaagtcctattatttgcagctatggcttccagggttgagaaccaggatgccattgatgcagccatggttgggatgcttgctgatccaaaggaggctagagctggaatcagggaagttcacttccttccattcaaccctgtggataagagaactgctttgacttacattgacggcagtggtaactggcacaagagtcagtaaaggtgctcctgagcaaattctccgaacttgcca

SEQ ID NO: 1975 - DNA, 409 bp, Arabidopsis thaliana
  Clone ID: LIB22-068-Q1-E1-B10
gtggcgagatcttggatcatcttcgcttggccgcttgggcggtggtcgtcggcatcgtcactaattaattattgtgattaagaaaaaatgctaaattgagtttcgtcgtcttctgcttctgcttaagcttcttcatcatttagctccagaggcggagctttcttctctctctgtggacgaccatggcggcggacgacggcgaccccactaaattcgctgcaatctacgactcatcctctccgtcacaccctcttctctctaaaccctccacgtccgctctcgattctccgcgtcgaagtgatcccgaatccgacccaactcagtttcttcagatctcctacaattttggcccaagaactttcaaggacatccctttcctacttctcttcgatcttctcgtactctccaa

SEQ ID NO: 1976 - DNA, 419 bp, Arabidopsis thaliana
  unsure at all n locations
  Clone ID: LIB22-067-Q1-E1-F8
aggctgatcatttggttcagcagattgatgaagtcgatgcncaggaactggatttcccaggaggcaaagtcggttacacatcggagatgaaattcataccggaatcatcttcaaggaggattccatgttaccgggttcttgacgaagacggacgaatcatccccgatagcgattttattccggtgagtgagaaactcgctgttagaatgtacgaacaaatggcgacgctacaagtaatggatcacatcttctacgaagctcaacgtcaaggaagaatatctttttatcttacttccgtcggagaagaagccattaacatcgcttcagcagctgctcctcagtcctgacgacgtcgttttacctcangtaccgagaacctggagttcttttgtggcgtggcttcacgttggaggagtttg

SEQ ID NO: 1977 - DNA, 437 bp, Arabidopsis thaliana
  unsure at all n locations
  Clone ID: LIB22-067-Q1-E1-C3
gcgtcnacggacacgtggggcctgagtttcaatccagatggaaagactgtgctttgtggattgcaagaaagtctcaagattttctcatgggagccaattagatgtcatgatggagtggatgttggatggtcaagattgtcagatatgaatgttcacgagggaaagcttcttggttgctcatacaatcagagttgtgtaggcgtgtgggttgtagatctctcgcgtactgagccatgtatggctggagacactgcgcaatcaaatggtcatccagagaaacgatcttgctcaggaagagatccagtagttctcaatgataataactcaaagacagttctcgggaagctgtccgtttcccaaaatgtagatccttttattgaaggaaacaaagtctccaaggaagattatcngttcccaanaactcctgattctttcga

SEQ ID NO: 1978 - DNA, 437 bp, Arabidopsis thaliana
  unsure at all n locations
  Clone ID: LIB22-067-Q1-E1-C9
ggggggacgttgncgcctgagcccaanggtaagcctcncgggccgacccacgcgtcaaggacaatgcaagagaagagaacacacaaggaatagtgaacatggttctccgttgctgtgcaaacgccttacttggtgcccttgactatctcaacaagttcaccatcaactttgctgcaataacaggggaagcgtattgcacctctgcgaaaatgacttactagctgttaatacgcaacctactgtcagctgtatttgtcgaaacggtttccaccagaatcctaaccgggaatagtctttgtcctgtcagccgcatatgcattcgcnacatgggctgttctgaggaggagtgagcagcctgngtanagattcgtacgtggtggctgtactggggttgggtgttactgattgggatattggctttcctttgtacatgttcn

SEQ ID NO: 1979 - DNA, 458 bp, Arabidopsis thaliana
  unsure at all n locations
  Clone ID: LIB22-067-Q1-E1-D11
cgttgacatgcntcgcgctccgaagcggtctcaaantcccgggcccgacccacgcgtcaacagagatttttatagtttggtttctttgaccggagaatctcgattaggttacgatggtgtttctctcgattccaaacgggaagactttatcgatcgacgtgaaccctaattcaaccaccatctccgccttcgaacanttggcccaccaacgtagtgatgttccacaatctttccttcgttactctctccgtatgcgaaaccctagccgcgtgtttgtagattcaaaggattccgattcgatcttattgtccgatctcggtgtttctcgtttctctactgtgattatccatgtcctgcttttgggtggtatgcaagcggctccgccgaagcctcgtcttgatttcctcaattctaagcctccgtcaaattatgtagncgggtttggggtcctgggggna

SEQ ID NO: 1980 - DNA, 440 bp, Arabidopsis thaliana
  unsure at all n locations
  Clone ID: LIB22-067-Q1-E1-D12
tcccggcccgacccacgcgtcaaagtgagaagctcgctgttactcatcgtcgagcctctcgatcttcaattcccttttgaattgaagaagcagatctcttgctctctctatttgacgaacaagaccgacantaatgttgcctttaangttaagacgacgagtccgaaaaagtattgtgttaggcctaatactggagttgttctcccgaggtctacttgcgaagttcttgtgancatgcaagctcaaaaggaagctccttccgatatgcagtgcaaggacaagtttctgcttcaaggtgtgatagctagtcctggtgtcacagccaaggaagttactcctgagatgtttagcanagacgctgggacatcgagttgaggaaannaaaactganaagttactangttggctccaacaannncgaacattnaccgggtttacaa

SEQ ID NO: 1981 - DNA, 442 bp, Arabidopsis thaliana
  unsure at all n locations
  Clone ID: LIB22-067-Q1-E1-D4
acgcacgcgtccnaaagctcttctcttgtctgatttcttctgaatttcccctctaagtcccnccanttcntctcaattagctanaaagtcaattcctttacaancgttctgaanaatttggtcaaangttttggctttnagtacccaatttttaatcctggcgataaactgaattgaaaacggttccaaaagttacatcacctgaaaacaacagtgcttttgantgtgttggtggtttggagtgcttgataagtttaatcacggnccttgaaanggggtcctgcttatcatcatctggaggtggangaagcacgagattatctccatggctctcctcatgttcctgggtcctgggaagacgangaagcctcccanataagagacctggggtcctggtagttcttcgttnganaacaccgatgaaccacntcatcataagatc

SEQ ID NO: 1982 - DNA, 473 bp, Arabidopsis thaliana
  unsure at all n locations
  Clone ID: LIB22-067-Q1-E1-D5
aaactctcagcgntccgtaacggtcaccaaattcccgggccgacccangcgtcnaataaaatcatnaattacaaacaaaaatggttttgcaaaagcttcctctcattgggctgcttttgctcctgaccatcgtcgcctctccagcaaatgcngatggacctgtttgcccgccgtcgaacaaactaagccgggcaagtttccctgaanggtttttatttggcacggggtactgcggcataccaggtcnaaggtgcgattaatgaaacttgtcgtggaccaaccttatgggacatctactgtagaagatatcnaagagaggtgcaataacnataacgggggatgtnnccgttganttcctccatccgttataagggaagatatccaactaaatgangaatctaaacacagacncctttanaatgtcaancgcatgggcaannaatatttcctccatgggaaaanaggaaaaaagg

SEQ ID NO: 1983 - DNA, 478 bp, Arabidopsis thaliana
  unsure at all n locations
  Clone ID: LIB22-067-Q1-E1-E1
ttacgcantcggtggccgtcanagaattaaagggtcgacgcacgcgtccncccacgngtccgcttcattgcctcttaagccccaattatgacaacaaacctcacgcgtactgtcttcttcgtcttgttcttcttcatctaccatgaaagctcttctctttcttcttacccttttcctcatcctcccaaacccaatctcagccattgatttcatcttcaacggcttcaatgactcatcatctaatgtctccctcttcgggatcgcaacaatcgaatcaaaaatcctaactttaacaaaccaaacatcgtttgcaactggtcgtgctctatacaacaagaaccatccgtacaaaagatccaatcacatcctctgttttacctttctctangttctttcatcttcaanatggntcccntacaaagaaaacacntcctgggtcacgggaatcgtcntcctctttggancatcactgggatca

SEQ ID NO: 1984 - DNA, 466 bp, Arabidopsis thaliana
  unsure at all n locations
  Clone ID: LIB22-067-Q1-E1-E3
gtgcccgtcanagaattcaangggncgacgcacgcgtccaagcgtctctccggactcacacctcatcgaaatttggccatctcatctggcttcttcccctccggcgttggntaaccatcantanttctcgcgccggcttcgantggaacaatatggatcctcgtcaattcnaacacaccgttgttgctgataatganattcacagcattgttatgtcatatcttctgcacaactgcttcaacgaaactgcggactcacttgcttcttccactggagttaagcancctgcaattgatcgtgataacatggagagaagaanacaaataatacattttatactgganaggaaggcgttgaacggttttgaactaactgaacaactagcacaagacttgcttgagaaaaacaaggatttgcaattcgattttcnatgccttcattttgtggagctaatctgtgctgggaa

SEQ ID NO: 1985 - DNA, 472 bp, Arabidopsis thaliana
  unsure at all n locations
  Clone ID: LIB22-067-Q1-E1-E5
cagcgnccagtaacggtcanagaattcccgggnaaagacaaactcacnagagtaaacatacgcaacctgtcgtgtaagtaaaaacaatttgatagtgatctctctatgtttggtggaggaagagggcctatgggtggcggcggaggtatgttacgcgccgccggtcgtgcgatgacgaggaccggtgtagccaacggtggtattcaagatccctttgcttcttcatcatcatcgtccacgtcgtctccggctggaaacgcctctgtttcgcatgtccagaaacagagatcttcttcttctgggtcgaataatctgacgtattccgcggcttctgggttgttgttgaatcttccggtggctgcaacctccgggatggagcggcggcggtcctttttcctttgttaattctggangttatgatgattttgagtgggtttctgangaaagaagatgattcccctgtttggctccg

SEQ ID NO: 1986 - DNA, 454 bp, Arabidopsis thaliana
  unsure at all n locations
  Clone ID: LIB22-067-Q1-E1-E6
agtaacggtcanagaattcccgggncgacccacgcgtcnncggacgcgtgggcggacgcgtgggctgacncntgggcggacgcntgggccatgcttggagctcttatgaaaagtangcatgggggaaagatgagcttcagcctcggacaaaagatggcactgatagctttggtggccttggagcaactatggtagattctttanatacactctatataatgggtctagatgagcagtttcaaaaagccagagagtgggttgcaagctcattggatttcgacaacgattatgacgccagtatgtntgagacaaccataagagttgtaagctgacttcntaagtgcgtatgatcnttctggggacaaaaatgttcccttgaaaaggctaangatatttgcatncaggattattgcctgcatggaatactccaacgggtataccttacaatantatc

SEQ ID NO: 1987 - DNA, 447 bp, Arabidopsis thaliana
  unsure at all n locations
  Clone ID: LIB22-067-Q1-E1-E9
aggnaccggtcaaagaattcccgggncgacccacgcgtccnaaaattctcggcgaanaagtgaagtttccggcgatcagaggtgatatggataaggagaaggatcatgaagtggagtggcttgaagctcagaagatagaaataagcgttgacttattagctgcagcgaaacaacaccttttgttccttgaaactgttgataggaatcgatggctctacnatggtcctgcgcttgaaaaagccatctacaggtacaatgcttgttggcttcctttgcttgttaaatactctgagtcatcatcggttagtgaagggtctttggtccctcctcttgattgtgaatggatttggcattgtcacaggcttaatccggtgaggtataattctgactgtgagcaattttacgggaaaattctcgacaattcctggagttccttcctccggttna

SEQ ID NO: 1988 - DNA, 410 bp, Arabidopsis thaliana
  unsure at all n locations
  Clone ID: LIB22-067-Q1-E1-F10
gtttcgagctatcgtattcaaccaccgatctcagatctctaaatctccgatggaccgtttgatttcagattacttcgaacggagcatcaaagctctagatgtcngtaacgccatccgcgacggtatcgaacagatccgtcaatgggagaaacttgccgatattgtgatctctgctttagatagtcaccgtccgatcggagaaggtcagctccggcgagctaagaaagctctgattgatttagcaatcggaatgcttgacganaaagatcatccttctggaaccantctagctcatcgtaaccgttcattcggaagagtcaaagacagtcaccaccgttcgattggtcatttcaagatctctttcttggagtgtttcaaagatnaagggtcagcttctaagcaatttacaa

SEQ ID NO: 1989 - DNA, 462 bp, Arabidopsis thaliana
  unsure at all n locations
  Clone ID: LIB22-067-Q1-E1-F2
ngccgtcacaaattcacgggccgacccacgcgtcnaanagatggtnaatggntcnatttcctttccaagcantgganatgtganttctggaggaacttcntgggcctttaagcanccatctttggaaattgggaactanaaagaggaaaangaagtacagacaggcnagcccaagggagtcttgccattgtcctttttcgaggatgagaaatcgganacctctgacactttggttcatgaacatagttttgttttagccagcgattttcctgtgagagagaaaactaaggctccaagtccaactgtgtccatcagtgacttaatatccagattatacagtcaggtggaangagaanaatgctgttaatattttacaaaactctgcaactgcttctaatgaaattaatggngangatgattcatgggaanttcagggccccaaaatgcccataacagattcat

SEQ ID NO: 1990 - DNA, 471 bp, Arabidopsis thaliana
  unsure at all n locations
  Clone ID: LIB22-067-Q1-E1-C2
cggtgccggtcaaagaattaacgggncgacccacgcgtccngcttagatgctttgacatggggaaattgactctcagccttcanggctctgatcattgccaattcttaacgacggtaccatcatgacaatctcaaangacagagttnagccatctcccacacctgatagctggnaacttaaagaaatttttgctactggagtcgttctaggangctaccaggccatcatgactgttattttcntctgggcggcgcacaagactgactttttctcggacacattcggtgtgaggtccattangggacaataaccacgagctaatgggttgcggtgtacttacaagttagtatcattagtcaagctctgatcttcgncacaanatcaacgagttgggtcntttgttgaacgtcctggaagcattgctgatgaatgnttcccncattggcacaactgatttgctantttgattg

SEQ ID NO: 1991 - DNA, 464 bp, Arabidopsis thaliana
  unsure at all n locations
  Clone ID: LIB22-067-Q1-E1-F4
tgcgnccgtcataaattcaagggccgacgcacgcgtcnactcagcaatgattgggangagcatttggctgtgaagcatttctctgttgaaggacagcttgagttcaaagctatcctctttgttcccaagagagctccttttgatctctttgacactaatgaagaagcncaacaacatcanngctctatgtccgtcgtgtcttcatcatggacaantgtgaagacatcatccctgagtacctcggatttgtgaaaggtattgtcgactctgaagatcttcctctcaacatctcgaganagacattgcagcagaacaagatcctcanggtcatccgcangaaccttgtgaagaagtgccttgagctcttctttgagattgctgagaacaaggaagactacnacaagttctactaggctttctctaagaancctgaagctcggtatccatgaaggactcccaaaaca

SEQ ID NO: 1992 - DNA, 443 bp, Arabidopsis thaliana
  unsure at all n locations
  Clone ID: LIB22-066-Q1-E1-H12
tcccgggtcgacccgacgcactcntccgcgctgtcaacgctgggcgtgagtgagatctaacaatcggtagcgaattttgtaaattttgttccggttttgaagtctcaatctcggggttccggttttagcaactacttcttctgacatttcagctgttctagttgatctttatatactttatatgatctgggattttgaagagtttttagggaggaaccaaaatttctgagagagaaaaatgaagttatcgaactgcgttttgatcttccttctaagtaacacattctcctcgatttctgctttccgtctgagtcggagtcaaccaactgaagccaatttcaagnaatgctggtgatgtgttggaagatgatccgtgggaaagactggaaaagtccttggttaagaaccttccaaagttaaantccaccaagaagaatacttca

SEQ ID NO: 1993 - DNA, 424 bp, Arabidopsis thaliana
  unsure at all n locations
  Clone ID: LIB22-066-Q1-E1-H2
ttatcatcgtatatncaacgttatggtagagttgaagaagatatcgccaagagatttatgaagcaaattggngctggtttggaaattattcatgataatcacattatccatagagacttgaaacctgagaatattttaattgacggatctggtgatgatttggtgttgaagattgccgattttagtcttgcaagaaaactacatccgggcaagtatcttgaaacagtgtgtggttctccgttttacatggctccngaagttcttcagtttcagagatacaatganaaggctgatatntggantgtacgagcaatccttttcgagctacttcacgggtatccaccantccgtggtaataacantgttcaaggtccaaaggacaatcacatccaagtacaactcctccaantcctctcgggcttaa

SEQ ID NO: 1994 - DNA, 438 bp, Arabidopsis thaliana
  unsure at all n locations
  Clone ID: LIB22-067-Q1-E1-A10
gcgttcggnaccggtctcanattcccgggccgacccacgcgtcaactccnctgcacatttctgggttcttctcttcttatgcnctgtttcttttaagacacagaanaaacagtacagagttgagattttcttaaacaaaagtgaaaagagaagaaacaagtgacagctcaaacggacaaaaaccactcttgggtctttcttgcttctgattctttctcttctctaactanaagaaaacatctagaagctaaaaaaatgtcggaaggagtagaagcgatagnatcaaatgacaacggaacagatcaggtaaacggaaaccgtacngggaaagataacgaagaacacganggntccaccggttctaacctaagcaatttcctatggcacggtggctctgtctgggaagcttggttcanctgcgcatctaaccaanttggt

SEQ ID NO: 1995 - DNA, 468 bp, Arabidopsis thaliana
  unsure at all n locations
  Clone ID: LIB22-067-Q1-E1-A2
gtgccggtcanaaattcacggggncgacncacgcgtccncactttcttcttctttgatcatatcatatttatcttcactacaaaaaaaacaagtaaaataaagccaatcttcttaaatatctccagaagatctatcagcatttacgtattcaggtcctccaatttcttctcacaaagaaaaaggaagaaaaaaaagaagttgtgagagcaaaaaaaaaatggcagtggataaagtgattgtgaagcagaggaacattatattggttggaattccaattgatgaaagtggcgtagaggttttaaaatgggcacttgaagaagttgcaaaacatggagattgtgttgttgttgtccatgtttgttttacttattaccgtgccttgaaaagcaagtcatcgctggatcggtacttaaaaccatacattgaattctgctcaacaaagaagattgagctcaaaggagaagtgt

SEQ ID NO: 1996 - DNA, 465 bp, Arabidopsis thaliana
  unsure at all n locations
  Clone ID: LIB22-067-Q1-E1-A4
ggtgnccgtcatgaattaacgggccgacgcacgcgtccaagtaaanttacaggtaatgtatttatgtacatatagaatttttagataagctcaaaaagctggtttgtttagtgaatagggaaagttttgggtcgtcgatgaatgtgtcattttctcttatcccaaatttgctcgatcatacccaataattggatggctttctttcaacaatcggtttttccttctatttccccacatgtattatatatatatctcatatatttctttaataattataatgtttagttggaaattctatccagattctgtccacatatatgattcgaatattatccgaaattaggaacaagtagaatataaatatattatgcataatcattaacccactgtannnnnnnnnnnnnnnnnnnnnnnnnnnnnnnnnnnnnnnnnnnnnnnnnnnnnnnnnnnnnnnnnnnnnncnaa

SEQ ID NO: 1997 - DNA, 427 bp, Arabidopsis thaliana
  unsure at all n locations
  Clone ID: LIB22-067-Q1-E1-A7
cacgcgtccgcngacgcgtggggttanctgcanatgtanggaaagaatcaacaaanatataatttatnaattggtggagaaataccaagtagcatcaaatggnctcacgtcttttaaagacacttcctcaatattcaccattagtaatgattcttatctctagtcttagcataatgatggtgtggcaggtatatcggcaaaatcttcatancganctaggcgcactaaagttgatggtcaaaataatcagaaanacagaaaaagttcanaaacagaaaganttggatggattataaaancaaattccctaagaattancatgatntggattctcatttaccanattccaatanangtaatgataattaatagagaaatcctangatgttaagttatcaaagagacggtaaataanccggttcagcat

SEQ ID NO: 1998 - DNA, 465 bp, Arabidopsis thaliana
  unsure at all n locations
  Clone ID: LIB22-067-Q1-E1-A8
aanggtcacagaattcccgggncgacccacgcgnnnnnnnnnnnnnnnnnnnnnnnnnnnnnnnnnnnnnnnnnnnnggagaattaaacagagaaattttttggtctcaggtttatatcaaagatgcaaaacgttcctgaagaccaaaacaaaatggtcatagatgataaacttcctccattttcatgggaaanaaagttgaacagtcaagcaaagactccttctgagttcaaattgagtnaaacgagatcacatgcatctgtttccaantaggctacagattgtggcgtcacagcaaagacgaagccgccaaaagaaagaacttcgatnttcgatatcttcagaaaaacaacatattacgggagatnacggtgtccctttaagaggaantggttcaagaagcattggaangagttacaaagggtgagtttcagcagttcaagctgttcccaaaaatttgtgagg

SEQ ID NO: 1999 - DNA, 438 bp, Arabidopsis thaliana
  unsure at all n locations
  Clone ID: LIB22-067-Q1-E1-A9
ggcctccgggccgacccacgcgtcnncccacgcgtccgatggtaaccccgtcgctatcctcagcgatattgagatttataagcatccaaaggaagaaaggatagctagaacatggggtacgacggctccaggtttgccttacgtagacgaggcgataactaatgctggaaactggctcattgggggtgatcttgaggttcttgagccagtgaagtacaatgatgggcttgatcgtttcaggctttcgcctgctgagttacgtaaagagttggagaagcgtaatgcggatgcggtgtttgctttccagctgaggaatcctgttcataatggtcatgctcttcttatgactgatactcgtaggagacttcttgagatgggttacaaaaaccctattcttttgcttcatccgttangtgggtttaaaanggcggatgattt

SEQ ID NO: 2000 - DNA, 383 bp, Arabidopsis thaliana
  unsure at all n locations
  Clone ID: LIB22-067-Q1-E1-B11
nacgcgtcaaacccgatcangctgttctacacctccaacatgccaatcattctccagtctgctctcgtctcaaacctctacttcatctctcagcttctctacaggaaattcagtgggnatttctttgtgaacctattgggacagtggaaagaatcagagtacagtggacaatctataccagttagtggtcttgcatatttgatcacagctccggcaagttttgccgatatggcagctcatccattccatgctctgttctatatcgtcttcatgctcactgcttgtgccctattctcaaaaacatggattgaagtctccgggtcttctgctagagatgtngctangcagctaaaggnacaacangtggtgatgcccgggacana

SEQ ID NO: 2001 - DNA, 477 bp, Arabidopsis thaliana
  unsure at all n locations
  Clone ID: LIB22-067-Q1-E1-B12
gagggaaagttgaaacgcctacgcgtgtnnganancggtctgcaggantcccgggcccgacccacgcgtcaagcgacggcaacgaagacggcgaagaatacggcggacacgaggattcccaacgatcagattctttgacattccacggcggcttagatatcagcttctccgatccgctctctctgtttgtgtaaatcatggtgatcgcggntgcttcctctttttccctcggtccatctcattgccatcaatcttacacggatgagttctcttcctccataccttacaaaagaaccaagcaatgcaagaaatcgtgtgtttgatggatgtggctctgctaatctctctgttttaagttccaagatgcaagattcctttttttggatcagcatttcatgtatcatccgggtggacatgatctcggcctcacgaaaagtttcggttgctgctgattaatccgaatcggntcctggatca

SEQ ID NO: 2002 - DNA, 475 bp, Arabidopsis thaliana
  unsure at all n locations
  Clone ID: LIB22-067-Q1-E1-B2
gtgnccgtcaaagaattaacgggncgacgcacgcgtccnagtcaccaacagactggggantaaaacatgttaaagggatgcttcnttttgggacctcctggtactggnaaaanccttatggcacggcaaattggnaagatgcttaatggaaaggatccaaagatcgttaatgggcctgangtgctgagcaagtttgttggtgagacagaaaagaatgtaagagacttatttgctgatgctgagcaagaccagaggacccttggtgatgctaagtgagttgcatgtcattatttttgatgaagattgatgctatttgcaagtcangaagttcaaccaagagatggcacangtgtccatgataatattgtaaaccagcttttgacaaaagatagatggtgtggangccttaaacaatgttttgccgaattggaatgacaaacagaaaggatttgccttgatgaagcncctttaaagg

SEQ ID NO: 2003 - DNA, 463 bp, Arabidopsis thaliana
  unsure at all n locations
  Clone ID: LIB22-067-Q1-E1-B3
gttctacgngcgctgtgctcgtcannaattacagggncgacgnacgcgtccaagttcttataattaaccttttgcaatttgtcttgtgtttctcacaacacananacttgtaaaagtgttaaaaaatcaagatctgaaaaatcttatcaccgcttctaggtttttcagttttttttcttccttttcctgatcnaaattaacttatatttcttagggtttcacttcttgaaacatttaatcagaatnaattaacctctcnagggctttcatggcgaatccatggtggacaggacaagtgaacctatccggcctcgaaacnacgccgcctggttcctctcagttaaagaannnnnnnnnnnnnnnnnnnnnnnnnnnnnnnnnnnnnnnnnnnnnnnnnnnnnnnnnnnnnnnnnnagaagtcgataacancaacaacgacgacgatagagacaacntgagttgg

SEQ ID NO: 2004 - DNA, 447 bp, Arabidopsis thaliana
  unsure at all n locations
  Clone ID: LIB22-067-Q1-E1-B7
tcccgggncgacccacgcgtccgcccacgcgtccgtgagtttctacaggtcagattccacccgcatcattcagaaatagttgcgagtggaagtttagatctcgaggtccgcttatggaataccacaacttctgaatgcattaagatctcatctattctatcggcctattgcttctatcgctttccatgctgagggtgaactacttgctgttgcttctggtcataagctgcacatgtggcactacaataggagaggagagggatcatcaccaactgttgtattgaagacgaggcgatctttgagagctgtacactttcancctcatggggctccattacttttgaccgcagagtggcaagtgaatgagattgattcattanattcctcaatgtctagagcaacatctatgggctacntgaggtatccgccccctggctaatttgttca

SEQ ID NO: 2005 - DNA, 461 bp, Arabidopsis thaliana
  unsure at all n locations
  Clone ID: LIB22-067-Q1-E1-C1
ggtgccgtcaagaattcaagggncgacgcacgcgtccnattcgaacaaaaaacaaaagaaatggttatggagcaagctggaacgacatcgtattcggtcgtgtcagagtttgaaggaacaatactgaagaacgcagattcattctcttacttcatgctcgtagccttcgaagcagctggtctaattcgtttcgctatcttgttgtttctatggcccgtaatcacactccttgacgttttcagctacaaaaacgcagctctcaagctcaagatttttgtagccactgttggtctacgtgaaccggagatcgaatcagtggctagagccgttctgccaaaattctacatggacgacgtaagcatggacacgtggagggttttcagctcgtgtaagaagaaggtcgtggtcacgaaaaagcctccagttatggtggagaaggtttgctaanggagcatcttaaa

SEQ ID NO: 2006 - DNA, 427 bp, Arabidopsis thaliana
  unsure at all n locations
  Clone ID: LIB22-066-Q1-E1-H10
ncangctcnccttacacgagccatctctcacaatggctctgaaaactgcgtctctataccagctttctctgctctcaaatccacttctccacgcaccagtggcaccatctcttcccgtcgacgaaacgcctccacgatcagtcactctctccgccctctggttcgtgcagccgccgtagaggcaatcgtgacaagttctgattcgtccctggttgataagtcggtgaacacgatcaggtttctggcaatagatgcggttgagaaggcgaaatcaggtcatccaggtcttcctatgggctgtgctccgatgtctcacattttgtacgatgaagtcatgaagtataaccccaagaatccttactggtttaaccgtgatcgtttccgttctctcctgctgggaaatggatgcaatggttgcaaataacnc

SEQ ID NO: 2007 - DNA, 411 bp, Arabidopsis thaliana
  Clone ID: LIB22-065-Q1-E1-D7
acgcgtccggtttcttaagcgagaacattgtgaaaccgccatattcgtcttctaaatcttgtggagtgtcccaatggaaaacagtcacaagatttagaagacgaatatggcggtttcttaagcgagaacattgtgaaagatttccgagaatatgcagattatgttttcactgaatacggtggaaaagtgaaaaactggatcactttcaacgagccatgggtcttcgctcatgcaggttacgacgtaggcaagaaggcgccaggacgttgttctcgctaccttaaaggttgtgaagaccgagatggacgatcaggttatgaggcttatctaagttaagtcacaacctcctcaacgctcatgcagaagctgttgaagttttccgccaaaaggttaaaggtgggaaaattggaa

SEQ ID NO: 2008 - DNA, 385 bp, Arabidopsis thaliana
  Clone ID: LIB22-065-Q1-E1-E10
ctctctctgttgtttgtttgttgacaaatctctcaaaaccatttgttttgcaatcgcagatccgtttttcttcgggtctcatcacaatgaatggcttctctgatcttaatccttctgagaggtacgctttgtctgatcatcaatgatgcttataataatctcatttatacatgatcttgcctctatatatttgttcatcttagtaatcttcggtctcagcttccattttcgtctcccactatgtttctaggattttgtgttacttttgttagaaaactgcgatttttgtgctagtgtttgtttctccaagatcaatggaactcgttgcctaaaattcctgattatagttacataaacatcaaatggttctaattggtctttgatc

SEQ ID NO: 2009 - DNA, 393 bp, Arabidopsis thaliana
  unsure at all n locations
  Clone ID: LIB22-065-Q1-E1-E11
tggtgatggaaccactgtggctgaagctgctgattcacataccatggctcgtgctttcccgcataccttaggccagcctttggctcacttcctcagggaaactgctcaagttcctgatgcgcacatcattaccgagcttccttcagttagagttggaattgtgttttgtggaaggcaagctccaggtggacataatgtgatctggggtcttttcgaggctctcaaggtgcacaacgcaaaaagcactttgctaggatttttgggtggttccganggtctatttgcacaaaaagactccaagagattacagatgatataacttcagacttacaaaaaccaaggtgggttatgatttgctcggaagaactaaggatcagatnaaaacaactgagc

SEQ ID NO: 2010 - DNA, 412 bp, Arabidopsis thaliana
  Clone ID: LIB22-065-Q1-E1-E3
acgcgtccgttcgctcttcaatttatattttaccaaatcatcttctctctttctctatctctcaaaacaaaaagtaaccatgatcaagacaaagacgacgtcccttctctgtttccttctcacagccgttatactaatgaacccatcttcctcctcccccactgacaattacatatacgccgtttgttctccggctaaattctcccctagctccggctacgagacaaatcttaactccctcctctcttccttcgtcacctcaaccgcccaaacccgctacgccaacttcacagttcccaccgggaaaccggaaccaaccgttaccgtatacggtatttaccaagtgccgcggcgacctagacccaaccgcctgctcgacgtgcgtatcaagcgccgtcgcacaagtcgggag

SEQ ID NO: 2011 - DNA, 462 bp, Arabidopsis thaliana
  unsure at all n locations
  Clone ID: LIB22-065-Q1-E1-E4
attgttccgccgctaccggtcaagaattcccggggncgacccacgcgtccgatcaatgatgaagcaaatcgaagagaagcatcatgacactgcagcatcagtgttctgttgtctgtacagaaaggctccacctccacggtctctgtttctgtcacagaaaggaatgtttggcgttgtagcgcttctaggttcagttgcctccacgtcgctaagcagggttttgtctgaatatttggggaaagacacaatgctttctttggtgtgcaaatcatcacagtttggacccaaaagcgatgagtatcgcaagtttcaatctgaagcagctagcctcggacgatctatcaccaatcggtttcttgttatttgtcttgatgcaactagaccttgggaggaacggacttgtgaggaatgatcctcagaagagattagccatggataacccttacctgccgaatggagatc

SEQ ID NO: 2012 - DNA, 407 bp, Arabidopsis thaliana
  Clone ID: LIB22-065-Q1-E1-E5
agatgaagttttctcatttcacactcaaattcaattccctttgttcgtgaggttgaatttcggttgcaaacatttgggtttgttgtaaattaaggttccgtttgtaaaagagattcctttttatttggggaaatcgaggagttcgtgtacggagctgagtttttgcctttttgatggttgcagataaggtctaaaatcttgaaggattcaaaaatttccgatgaatacacgttattccaatcagccggagttatcttctagtaatatcacgatcactatttcatcgtctgctttgttaagctcctcaccgcgaggcgataacagtcatgttgctgctgctaatggtcaagagaggtctccatcttcgttttatataaggctggctatgaaggtatctagagctagat

SEQ ID NO: 2013 - DNA, 445 bp, Arabidopsis thaliana
  unsure at all n locations
  Clone ID: LIB22-065-Q1-E1-F1
agtagncaaaaatcccgggcngncccacgcgtcnngcactagagccggtaaaattctttctctttctttgtttttctcttttttcggcacatccatgatttttcttccaacggaatcaattctagttttctagatctaaatatttaaagcttaaatctcctcctcctttggtttttgatgttttgcttttttgtctccgccattctcagcatcatatctggttgtatctttcttggtaggtagaagcagtcttcaatcggttcttctctgcctcagattaagaaatttcgccatcgtaaatctagatcttcttcctttcttcaagagacgttctttgagtctctatttttttggatgcgtttcaccgcctctgtgacttctcgagagtattataaagaagggtcacacgacactttcatttgggttttaacttgttaaaaagaaa

SEQ ID NO: 2014 - DNA, 389 bp, Arabidopsis thaliana
  Clone ID: LIB22-065-Q1-E1-F10
gagcaaagagtttttgtgtggctagtggcatcaatggagctctcgatctcacaatcaccgcgtgttcggttctcgtctctggcgcctcgtttcttagcagcttctcatcatcatcgtccttctgtgcatttagctgggaagtttataagcctccctcgagatgttcgcttcacgagcttatcaacttcaagaatgcggtccaaatttgtttcaaccaattatagaaaaatctcaatccgggcatgttctcaggttggtgctgctgagtctgatgatccagtgctggatagaattgcccggttccaaaatgcttgctggagatttcttagaccccatacaatccgcggaacagctttaggattcactgccttggtgacaaaaagctttga

SEQ ID NO: 2015 - DNA, 390 bp, Arabidopsis thaliana
  Clone ID: LIB22-065-Q1-E1-F12
aattcactgcaaagtaagggaaagcttggcttggaaatgggagttgaacaagccatcgattcgggctaatgtgtatagtttgattcgtctggggagcttttgagagatagcaatttagttttccgcttacgaatgatctttttctgatgcgtcattttgattaagtgtgtacttctgcaatggaggcttctctagctgttatacagaggcctcaagctggagcttcgaatacggtttataagagtggccctctcttcatatcatcaaaaggactaggctggacatcctggaagaagcgttggtttatccttacccgaacttctttggtctttttcaaaaatgatccaagtgcattaccacaaaagggaagtgaaagtaaatttgaccctg

SEQ ID NO: 2016 - DNA, 452 bp, Arabidopsis thaliana
  unsure at all n locations
  Clone ID: LIB22-065-Q1-E1-F2
tccgccgctaccggtcaagattcccggatttttggcgtctccangcacgatttaacgcatcgaagctctctgcacgcttcctgaaagagagagagaagagagagatcgcagatcgatttctcttaaatctctcgtgaatcccatttgccttctctctgctagattctctcttcttctcttcacccatttctcgctttctcctttgttctctcatctgggttcttctcaaagcctcttcctttttatgccatggtgggtgcgtcttcctcttacgcatctccgttatgtacctggtttgttgctgcttgcatgtccgtctctcacggtggaggagatagccgtcaggctgttgctcttcaatctggtgggcggagtcggcgaaggaggcagcttagcaaatgctctgtcgcttctggatccgctagcattcangctctcgtcacttcttgttt

SEQ ID NO: 2017 - DNA, 448 bp, Arabidopsis thaliana
  unsure at all n locations
  Clone ID: LIB22-065-Q1-E1-F3
tacggtcaaaaattccngggcngncccacgcgtccncaaagatccgtctttttctttacttcatgtcgaagcaaacgtacaaagtgtgtttctgctttcgccggaggtttcgttacactgcatcggaggcaccgcgtgagatcaagaccattttcgaaaagtactcagagaatggagttatgaccgttgatcatctccacaggtttctgatcgatgttcagaaacaagataaagccaccagagaagatgcacagtcaattatcaattctgcatcttctcttcttcatcgtaatggtctccatcttgatgctttcttcaagtacctctttggtgataataaccctcctcttgctctccataaggtgcatcatgacatggatgctcctatatcgcattatttcatattcactggtcataattcttatctgactggtaatcagctgagcag

SEQ ID NO: 2018 - DNA, 409 bp, Arabidopsis thaliana
  Clone ID: LIB22-065-Q1-E1-F5
tgatgtactcctctgcaatattcaagtcagaaaatgaggatcctagaactgcacagatgagaaaaatatctcttttaattgaaaaggcgaggatagagaagaaccatgaggtcttagagatgggatgcggatggggaacttttgccatagaagttgtgaaaagaactggatgcaaatacactggcattactctttctattgaacagcttaaatatgcaaaagcaaaagtgaaagaagctggacttcagggtcggattacgtttatgctctgcgattatcgccaactatctgatgctcgcaaatatgacagaattatagcttgtgagatgatagaagcggttggccacgaagtttatggataagtttttcagttgttgtgaagatgcgcttgcagaaaacggcatttttg

SEQ ID NO: 2019 - DNA, 398 bp, Arabidopsis thaliana
  Clone ID: LIB22-065-Q1-E1-F6
gggcggacgcgtgggcgattcttcctccgccgctaccgaattaacgattccggcttctactgaagtaagatcgatcaataacaaccgtagatccgtgattagacgccggagatccggtcgtcgtccgtcctttaatccggtcatcgtacttcaaggaggcgccggcgagagagaagagggagaagaaggagatgcggctagagatcgacgcgcttttgagttttattacgatgacggatccggatcgggtcttagaccgcttccggattctgtatctgagatcttgatgggatctggattcgagcggttacttgaacaagctaagccaaatcgaagcgtcggctactggaattggtagatctggaaaccctccggcgtctaaatcggcgattgagtct

SEQ ID NO: 2020 - DNA, 401 bp, Arabidopsis thaliana
  unsure at all n locations
  Clone ID: LIB22-065-Q1-E1-F8
ttttatgtcaaaaaaaatgttttccttttcccttaacaaaaaatctacaaagtctgaaactctcagcaatcagataaaaagattacaagaagttcttttaattaaccttttgcaatttgtcttgtgtttctcacaacacaaaaacttgtaaaagtgttaaaaaatcaagatctgaaaaatcttatcaccgcttctaggtttttcagttttttttcttccttttcctgatctaaattaacttatatttcttagggtttcacttcttgaaacatttaatcagaattaattaacctctctagggctttcatggcgaatccatggtggacaggacaagtgaacctatccggcctcgaaacgacgccgcctgggttcctctcagtgaaaganaccaagatctccac

SEQ ID NO: 2021 - DNA, 393 bp, Arabidopsis thaliana
  unsure at all n locations
  Clone ID: LIB22-065-Q1-E1-F9
cgagccaaactcggcactcctccacagctaatgttcatggtcctagacacaagtaacgacgccgtttggctcccttgctccggctgctccggttgttccaacgcctcaacttctttcaatacaaactcctcatccacttactcaaccgtctcttgctccaccgcacaatgcacccaagcacgtggcctcacgtgcccatcctcctcaccacaaccgtccgtctgctccttcaaccaatcctacggcggagattcatccttctctgccagtctcgtccaagacacgctaacgttagcccctgacgtcatcccaaatttctccttcggctgcatcaactccgcctcaggcaattctctaccaccgcaagggactaatgggcctangacgccgggc

SEQ ID NO: 2022 - DNA, 407 bp, Arabidopsis thaliana
  unsure at all n locations
  Clone ID: LIB22-065-Q1-E1-D6
ccatcgccattgccatggctaagctctcnnnnnnnnnnnnnnnnnnnnnnnnnnnnnnnnnnnnnnnnnnnnnnnnnnnnnnnnnnnnnnnnnnggatggcttagaatcctacatcgtccatgtgcagagatctcataagccttccctcttctcctcccacaacaactggcacgtctctctccttcgctctctcccttcttctccccaaccagcaacgctgctctactcttattcacgcgccgttcatggcttctccgctcgtctctcccctatccaaaccgccgccctccgccgtcatccttcagtcatctccgttatacctgatcaagcgcgtgagatccacacaactcacacgcctgccttcctcggtttctcccaaaactctggactctgggagcaactcaaa

SEQ ID NO: 2023 - DNA, 431 bp, Arabidopsis thaliana
  unsure at all n locations
  Clone ID: LIB22-065-Q1-E1-A7
ggncgacccacgcgtccgttcggcaacttccaaaaagccacacctgaagaaagaaaccttagatttggtgtcagggaacatggtatgggagctatctgcaacggcattgcccttcacagccccggttttatcccttactgcgcaactttctttgtgtttactgactatatgagagctgcaatgagaatctcggctttgtctgaagctggtgttatatacgttatgacccatgactccattggtcttggagaagatggaccaacccaccaacccatcgaacacttatccagtttccgtgccatgcccaatattatgatgttccgtccagctgatgggaacgaaacagccggtgcatacaaaatcgctgtcacaaaacgtaagacaccttctgtcttagccttatctaagacaaaagctgcctcaacttccag

SEQ ID NO: 2024 - DNA, 412 bp, Arabidopsis thaliana
  Clone ID: LIB22-065-Q1-E1-B1
ccacacacccactcatggcgtctcgaagagttttatcatctcttctccgttcatcttccggtagatctgccgccaaattagtcaaccgaaaccccaggcttccttctccttcacccgcgcgtcacgccgctccatgtagctacctcctcggccgcgtcgccgagtatgcgacctcttcaccggcaagctctgctgcgccatcctctgctcctgctaaggatgaggggaaaaagacctatgattacggtggcaaaggtgcgatcgggcgtgtttgtcaggtcatcggtgccattgtcgatgtgagattcgaggatcaggaaggattgcctccgatcatgacatctcttgaggttcaggatcatcccacaaggctggtgcttgaggtgtctcatcatttgggtcaaaatgtcgt

SEQ ID NO: 2025 - DNA, 389 bp, Arabidopsis thaliana
  unsure at all n locations
  Clone ID: LIB22-065-Q1-E1-B10
caacatattttctgctgacgcttctttaatgaagtagcacgaagaagtaaacaggacgacttttggccaccggaaaatttctctgttataaaaacgaaagtctgtgtcctcttaaacatttttgggatcatcaatcggtttttggtcaaccatgaatatgaatcaagttgcagagtatgtggaaactgatccaactggtcgctatggacgttttgcagaaattcttggaaggggagcgatgaagacagtgtacaaagcaatcgacgagaagctgggaatagaagtagcatggagccaggtgaagcttaaggaggttctgcgttcctctgttgatctacagaggctttactccgaagttcatctcctcaacactcctcaancaacaaatc

SEQ ID NO: 2026 - DNA, 408 bp, Arabidopsis thaliana
  Clone ID: LIB22-065-Q1-E1-B4
aagtatcagggacaggataagcttccagttacagtttggatgatggctcaggcctcccaaggtgatatatcagtaggcttgtactcgtgggctcacaacttgttaccggtggtcagtagcaagagttgcaatcctcagtcaagggatctcattcttcagttggttgagaggatcttgtccaacccgaaggcccggaccatacttgtaaatggggctgttaggaagggagagcgattgattccacctccttcgtttgagatcttggttcgacttacattctctgcatcttccgcaagagtgaaggctacagagaggtttgaggcaatatatcccttgctgaaggaggtgtctcttgctggtgctcctgggagtaaggcaatgaagcaagtcacacagcaaatattcact

SEQ ID NO: 2027 - DNA, 411 bp, Arabidopsis thaliana
  Clone ID: LIB22-065-Q1-E1-B5
aaatatctctttcctgttagagacaatggacggattgatcagaggtttggtcgacgtggctatcggaggaaaccaacgccgcggcggagacgatggtggtgatgatgaaggcaactcgagggacgagagatccagatctacttgggctaatgtggtttccggtgaggaagaggatcagaatcgcgcgggaggatcgtcgcacggccgtcgccagaattcagaggagaatcaatgggagaagaagggcgaaaggcttcccacaaggcattcacaatcacatgaggaggaccaggaagagaatacatatgcggctaaagtgagcgagaaacaagacttctcggagagccagcaagaggaaaatgatggttgggaaactgtgggcaaaaagaaacctgcaaggcaatcacataa

SEQ ID NO: 2028 - DNA, 409 bp, Arabidopsis thaliana
  Clone ID: LIB22-065-Q1-E1-B7
tttcttctatccaaaacaccatttttgagatcagagcttctagcagcgtaaaaaatgcagacgaggtatatggagaggactaatagtatgagagagaagagaaaattggaggaagatgataatcagcagcagcagcaacagcctgagcgtaaaaggccagctcttgcaagtgtaattgtggaagccttgaagatggatagtttacagaggctttgttcttctttggaaccgattcttcgccgagtggtaagtgaagaggtggagcgggcattggcaaagcttggccctgcaagacttagtgaaaggtcgtctccaaaacgaattgaaggtatcggtggaaggaatttgcagctacaattcaggtctagattgtctgttcctttgtttactggagggaagatagaagggg

SEQ ID NO: 2029 - DNA, 200 bp, Arabidopsis thaliana
  unsure at all n locations
  Clone ID: LIB22-065-Q1-E1-C10
tgatgacgcatcgaggaagaagatggatttgacagcagaggagttgaaggaagagaaggacctcgcttactcatgcctctcttaaaccggtcttttctcagctggtttaatcagtgaaagctttgtttcgaataaagaagttttgttnnnnnnnnnnnnnnnnnnnnnnnnnnnnnnnnnnnnnnnnnnnnnnnnnnngg

SEQ ID NO: 2030 - DNA, 391 bp, Arabidopsis thaliana
  Clone ID: LIB22-065-Q1-E1-C11
atttccatttttctctcttccataaaacccaaaagaaactaggaagaggagtaaataatatttgttttaaagaaatgattctccacaaaatggcgttcttggccgttattctcttcttcttgataagcagcagcagcgtttgcgttcatagccgtgaaacgtttgcttgcgatacaaaggacgcagcaacagctacactgagattctgccagctttcagttcctataccggagagagtcagagatttgatcggacggttgacattggccgagaaagtgagcttgttagggaacactgcggcggcgataccacgtctaggaatcaaagggtacgagtggtggtcggaggctttacacggcgtttcaaatgtgggacccggtactaagttcgg

SEQ ID NO: 2031 - DNA, 462 bp, Arabidopsis thaliana
  unsure at all n locations
  Clone ID: LIB22-065-Q1-E1-C2
tttgccgncgcctaccggtccaagaattccggggtcgacccacgcgtccnctcatcttctcttccattcaaatctcacattccctcttcacaacaacagcttcgtattcgctcatcttcttcgctttctgatcttggaaatcgcaggcattgttcgtctactcgaggatttcaattttggtcatnnnnnnnnnnnnnnnnnnnnnnnnnnnnnnnnnnnnnnnnnnnnnnnnnnnnnnnnnnnnnnnnnnnnnnnnnnnnaccggcggttcgtatttccgacgggaatctaatcatcaaaaaccggacgattctaaccggtgtaccagataatgtcatcacgacgtcagcatcggaagctgaccggtagaaggagtcttcgtcggagctgtatttaacaaggaagagagtaaacacatcgtaccgatcggtacgcttcgcaattcccggtttatgtcttgtt

SEQ ID NO: 2032 - DNA, 449 bp, Arabidopsis thaliana
  unsure at all n locations
  Clone ID: LIB22-065-Q1-E1-C4
cctacggtcaaaattccggggtcgacncacgcgtccgcactctcagccctaagagagaagaaataggctctgctctgcgccttttctacaagaaattcaccaaaaaagcttgaatatttatcggaatcaaagcttgggtttttaatcctggtaaagccatgtcacatatggtgtttcagagcgttgtcgctcccaaacccttatctcctctcaaaccctgtttacctatccctcgtccactcgttactctgccttgtaagctccgtcgtggcttcgttagagcttcttcgtcctcgtttcttgtcgangantcaagtttcaggactccgagcgttgcttacagttaccttctggagttgaggttaggcncatcttcctctggctctttctctgcaagtacncagatgtgtcctgtgatgaaaggcaaatttgggttcggtaganccggt

SEQ ID NO: 2033 - DNA, 409 bp, Arabidopsis thaliana
  Clone ID: LIB22-065-Q1-E1-C7
gcggtgaggagagcttcgttgtcttccccattgcaattagggttttcaaaacgggtaatcgaattcggtggtgctcggctttgaaattgaggatgagatcctttccacttccttctacctgctgacaatgggcaactgcggtactagagacgaggctgccgtcttcactcctcaagctcaagcccaacagctccagaagaagcactcccgatccgtctcagatctgagcgatccatccactcctcgcttccgagacgactctcgcactcctatttcgtatgcccaagtcatcccctttactttgtttgagcttgagaccatcaccaagagcttccgcccagattatatactcggagaaggtggtttcggtaccgtctacaaggggttacattgatgacaatctccgcgt

SEQ ID NO: 2034 - DNA, 406 bp, Arabidopsis thaliana
  Clone ID: LIB22-065-Q1-E1-C8
gatgattactatcaccaagcctgtcttgctaagaaatctgcaggtgcaaaactgaagcatcatttctgtccaaatcatttgagggaccttcaacagcgtgcacggtcgaacaacgagccccatgcttttcttcaggttgaggctcttggtagggttcctttctcttcaatccgcaggcctcgtcctctgcttgaagtggaccctccaaattcagctaaatttggtaatgcagagcataaacctacggataagccccttgatcaagagccgatgcttgcagctagagtgtacattgaggatggtctttgtctcctccttgaagttgatgatatagatcgtttcttggagtttaaccaactccaggacggaggacaccagttgaaacaaagacgacaagcattgttgc

SEQ ID NO: 2035 - DNA, 391 bp, Arabidopsis thaliana
  Clone ID: LIB22-065-Q1-E1-C9
ggattgattttgctttggatctcacatctgagatcagattaatctctctgtgaagtcgaagaacgaaaccctagttcccatggatctctcttcacgcttctcatcgatccttatccttctcttgatctccatctccatagcttcggctgagattcgtaaatcagagatccgatccgatgatcgtccaatcatccctttagacgaattcggtttcactcacagcggtcgtcttgagcttgacgcttccaagatctggctttccaacagcaatcccgatctcgatctctccaaagtgggcttctttctctgcactagagacgcttgggttcatgtgatccaacagcttgaagaagaagagatcacgtgcgctctacaatcagatctcgttaag

SEQ ID NO: 2036 - DNA, 435 bp, Arabidopsis thaliana
  unsure at all n locations
  Clone ID: LIB22-065-Q1-E1-D1
tcccgggncgacccacgcgtccnaaaaaacctctcttctctctcctcactgtaacaaatttttagatctagatctgcttttctcggtgcctttgatcttcatctctttggctttgctttgaaatttcaggggtgaacaagatgccttctccgttggcagtggtgtggtttttctctccttcgatgtagttgtggatccgatgtgttggaagtagagagttgctacgattcccttcggttgtggacgccggttggtgtagcgatttcttctcgtggctcagccgtcgtgtcggcctctgcaactacggcggaagtcgatcgagagaaggtgggtaagtgccaattcgccatggaggttaacggtggatcttcctaaatttgttggctgtcgcggattcagtgtgtttgggtgtttcgcttgagccttgggcctcaa

SEQ ID NO: 2037 - DNA, 410 bp, Arabidopsis thaliana
  unsure at all n locations
  Clone ID: LIB22-065-Q1-E1-A3
aaataaataatccccaaattgaatttcaaatttcgaagcttcaagaaaccctaatttttctcaatctaagctgaggtttgggatctcgtacattgcacgcgatgggagatttcaatctcgctctcgtgattgttgcgatcgtagtttgcgtcattgttttcatctccagtatctacctcctcgtcaactatcagcatccagatgatgcaaaccaggcttatttccccaaattcgttgttgtttttggtttatccattgctatgatctctattctcatgttaccggcggatgtggctaaccggcatgcttgtcgacattcgatttacaacggcgcttgtaatctcaccttacctatgaaggatctttggcttgccgtttacattgttgacgctgtgcttgtcttcntcatc

SEQ ID NO: 2038 - DNA, 410 bp, Arabidopsis thaliana
  Clone ID: LIB22-065-Q1-E1-D4
aacgaaagccaaattcgaatcggtccacaaaataccaaacgtcgtcggatcaatctacaccacacatattccgatcatcgctccgaaagtccacgtggcggcgtattttaacaagagacacacggagaggaatcagaagacgtcgtactcgataacagtacaaggagtggtcaacgccgacgggatcttcaccgacgtttgtatcggaaacccaggatctctcaccgacgatcagatcctggagaaatcttcgctttcacggcaaagagcggcgcgtgggatgttacgtgacagctggatagttggaaactctgggtttccgttgactgattatcttcttgtaccgtacacgaagacagaatctgacgtggacgcagcacgcgtttaacgagagtatcggagagattcaa

SEQ ID NO: 2039 - DNA, 413 bp, Arabidopsis thaliana
  unsure at all n locations
  Clone ID: LIB22-064-Q1-E1-F5
acgcgtccgcaacttctttgtcttcttctagatctttggttacagatcttccatcaccatgtctgaaacccaacaacaattcccattcaaacagaagagcaaaagtgtgtgcttcacttgcagagaagggtgaatattattcaaacagaccaccaactccattacttgacactattaactacccaatccacatgaaaaatctttctgtcaaggaactgaaacaactttctgatgagctgagatcagacgtgatctttaatgtgtcgaaaaccggtggacatttggggtcaagtcctggtgttgtggagcttactggggctcttcattacattttcaatactccacaagacaaagattcctttgggatgttgggcatcagtcntaaccccataaagaatcctaacggggaagaa

SEQ ID NO: 2040 - DNA, 407 bp, Arabidopsis thaliana
  unsure at all n locations
  Clone ID: LIB22-064-Q1-E1-F7
gaattangattttgattttattttttactctttgtttgttttaatgctaatgggtttttaaaagggttatcgaaaaaatgagtgagtttgtgttgaggttgtctctgtaaagtgttaatggtggtgattttcggaagttagggttttctcggatctgaagagatcaaatcaagattcgaaatttagcattgttgtttgaaatggagtcgagttatgtggtgtttatcttactttcactgatcttacttccgaatcattcactgtggcttgcttctgctaatttggaaggtgatgctttgcatactttgagggttactccaagttgatccaaacaatgtcttgcagagctgggatnctacgctagtgaaaccttgcacaagggtccangtcaacttgcaanaacaaga

SEQ ID NO: 2041 - DNA, 419 bp, Arabidopsis thaliana
  unsure at all n locations
  Clone ID: LIB22-064-Q1-E1-G1
gatggtggttttgttttattatttagagtaagcttcttcatttttttaaaaacttctattattttgaccttnnnnnnnnnnnnnnnnnnnnnnnnnnnnnnnnnnnnnnnnnnnnnnnnnnnnnnnnnnnnnnnnnnnttcggatttgttttttcaataaattgactaattgagtactcgtttaaaggaagtgaagagcggttttttggtagtggtggtcgagaaaagagagagtttgtctctgtgactcagagtgaaatcaatagagcgggaaaagattgttgcttttttttgccatgggagttgatgagctgtctcacctcaaattctctcttctgctagaatcatcagcctgcaatgatttgtccngttttaaatcnccaagttngaaagaaaaaaggccctgaaaancattggat

SEQ ID NO: 2042 - DNA, 392 bp, Arabidopsis thaliana
  unsure at all n locations
  Clone ID: LIB22-064-Q1-E1-G11
gaagaaagatagagaaaaaaaatgggaggcaaaggtgtgatgatggtggcgatactttgcctttgggcactctctgcaacatctgaagcantaacagaggctgagccangtttgatgatgaacttctacaaggacacgtgtccncaggccgaanacatcgtcngtnaacaagtcaaactcctctacaaacgccacaagaacaccgctttctcttggctccgtaacatcttccatgactgcgccgttgagtcatgtgatgcgtcgcttttgctggattcnacaagaagagagctaggagagaaagaacacgacangagcttcggacttaagaaactttaagtacatcnagganatnaaggaaactctcganaaggantgtcctgatgttgtct

SEQ ID NO: 2043 - DNA, 395 bp, Arabidopsis thaliana
  unsure at all n locations
  Clone ID: LIB22-064-Q1-E1-G12
gtttgttgaggatctagctcctttggcggagttgaagcttgtgtctcttgatctgtatgagtgtcctgtgactaggcttaaggattatcgatctagggtttttgggttgattaaaactttgaagtatttagataagactgatgctgaagggaatgagaggcctgagtctnnnnnnnnnnnnnnnnnnnnnnnnnnnnnnnnnnnnnnnnnnnnnnnnnnnnnnnnnnnnnnnnnnnnnnnnnnnnnnnnnnnnnnnnnnnnnnnnnnnnnnnnggctcctcggatgagtaatggccatagtgaaagggtagatggtgttgttgatgttgatgaggatgaagagagtgatgctgaagatgatnagtcagagcangctactggaattgaacngggac

SEQ ID NO: 2044 - DNA, 409 bp, Arabidopsis thaliana
  unsure at all n locations
  Clone ID: LIB22-064-Q1-E1-G6
caattaatctcagatttagatcgagagagaccaaattgagagcaagatctttgcattgttcatctcttgctttgtaatgccgttgttcttcatcgtaaccgactcggtggacgcgatnaattgactcgttctcttttggatccttgttgactcggcgagcttggcttangagacatgggaggtgtgccttcaacgccgcgaaaaaccggtggtgatgatgtttcggtggccgagtacctcattgccacttttgttggggagaaatcgtttcctttagcgtctgatttctggaacangctacttgagcttccgttgagttctcgctggcctagtgatcgggtncaagcaagcctgtgaacntttcggacanngtaatnggntacgctangccccttgcaaaggcnaatgg

SEQ ID NO: 2045 - DNA, 411 bp, Arabidopsis thaliana
  unsure at all n locations
  Clone ID: LIB22-064-Q1-E1-G7
gaggtctctcacaatcatcttcctcgtctcacgagcagacaagatacttcaggagagttttctgctgcctcacctgaacgcctctctgtatcttctactatcgctgggggaaagcgccttccctattcatcagatgtcaatcaatcaccaaatagaaggattgtggatcctgttggactcgggaatgtagcttggaaggagagagttgatggctggaaaatgaagcaagagaagaatactggtcctgtcagcacgcaggctgcttctgaaagagtggagtagatattgatgccagcacagatatcctangcagatgaggctctgctgaatgacgaagcgaggcancctctgtcaagggaaagttcaattcccttcatcacggattaatccttacagaatgggttattatgc

SEQ ID NO: 2046 - DNA, 399 bp, Arabidopsis thaliana
  unsure at all n locations
  Clone ID: LIB22-064-Q1-E1-G8
atcataggagcgcagcattttgctgaagccgctaaagcanctggtgctttcaatccggatatcgactttgcttcaccaatggatggcgatggacatggaagtcacacagcagctattgcagctgggaacaatggtattccagtgaggatgcacngttatgagtttggaaaagcaagcgggatggntcctcgtgcaaggattgctgtttacaaagctctctaccgactttttggangctttgtagctgatgtggtggctgccattgatcaggctgttcatgatggagtanatattttgagtctctcggttgggtccaaacaantcctccagcctactacanganacnacattcttgaatccatttgatgcnacacttcntgggggctgttaaaaactggt

SEQ ID NO: 2047 - DNA, 392 bp, Arabidopsis thaliana
  unsure at all n locations
  Clone ID: LIB22-064-Q1-E1-G9
acagaaaaggagtcggagagggtttttcgcctagggttttagaattcgatcttactcattcaaatttctcccttcagatttattcatctgttgagtaaaaccacaagggtttctctctaatgttgcccagattagctcgagtcgtcactcaaacctcaaagcttcgatctttgaccactaatggatcgatgaaaaatctctcctttttctcccgatatgggtacgcgactgttgcgccggcggcagctgatcctccgtcgcagaaggatttccccagtaaatctccgataaacttggataagatgttttggtcaaagccatgttcattggctctgcctaaagactctcctctcagaattgatgaaccaagactatgtanggattcgtcgttt

SEQ ID NO: 2048 - DNA, 397 bp, Arabidopsis thaliana
  unsure at all n locations
  Clone ID: LIB22-064-Q1-E1-H12
agagaaagcaaaatcaaagttgtgatgaaatctctattgatgagaaccggttcgatgccggttcttcaaaaccggttaatttcaggtggttcatcgcggaagatgacgcctatctccaggaccaactccgtcgaatcattatccagctacggcgagagattcgccggcgggaagatttcgatcgaggttaaggctaatgtagggatgcggagggtgttatcggaaagtgatgtgattagatctgagagaatgttgaaaagagttggatctaagccttcgccggcgagaatcccggaggatgatgaagcgggggaggaagaaattaggtttgcagatggttgggggtctatgatctccggtggtttacctgtggaagagaaatgtttcacngggtggc

SEQ ID NO: 2049 - DNA, 403 bp, Arabidopsis thaliana
  unsure at all n locations
  Clone ID: LIB22-064-Q1-E1-H2
acataccaagaagaagaagaggcaaagaaaaagatgataacgggaaacgaattctacacggtgatgtgtgccatggcaccactctacttcgccatgttcgtggcttatggatcggtaaagtggtgcaagatcttcacgccggngcaatgttccggaatcaaccgttttgtctccgttttcgccgtcccagtcctctctttccacttcatctcacaanacaacccttacaaaatggacacaatgttcatcctcgccgacactttgtccaaaatcttcgtcttcgttttgctctctctatgggccgttttcttcaaagccggtggtctcgattggctcatcactctattctcaatcgctactctccctaacactcncgttatgggcatacctttgcntcaaggca

SEQ ID NO: 2050 - DNA, 463 bp, Arabidopsis thaliana
  unsure at all n locations
  Clone ID: LIB22-064-Q1-E1-H3
gggcccggtcacganatacccggggcccganccacgcgtccaagtacataccaaggaagaaagaananggaaangaaaaagatgataacgggaaacgaattctacacggtgatgtgtgccatggcaccantctacttcgccatgttcgtggcttanggatcggtaaagtggtgcaagatcttcacgccggcgcaatgttccggaatcaaccgttttgtctccgttttcgccgtcccagtcctctctttccacttcatctcacaaaacaacccttacaaaatggacacaatgttcatcctcnccgacactttgtccaaaatcttcgtcttcgttttgctctctctatgggccgttttcttcaaagccggtggtctcnattggctcatcantctattctcaantcggtactctccctaaacactcnccgttatgggcataactttgcntcaaggccaatgttatg

SEQ ID NO: 2051 - DNA, 462 bp, Arabidopsis thaliana
  unsure at all n locations
  Clone ID: LIB22-064-Q1-E1-H4
acctgccgcggccagtaaaggtcaangggncnanccacgcgtccgcggacgcgtgggttcgcgacaatcccagcggctttgcagctcgtgctagaaggaagatatattgttgcagtgattttatctgtgactcatcttgtgctaatggagtatggtgcttcagagattcaagatgacattcctgggtccaatgcttaccttactggactaagtattattggtggagtcactctgtttccttctgctctagagggagcgataatggggccgttgataacgacggtggtgattgctttgaaggatctgtatgcagagtttgttctgaatgagccaaagaagatcaattaagttgttattggtttctttaataggagcttcaagtgcttttgccgtggctgctttgtccttggnagaagattcatgtagattagtagagagaccaaagtgttgaattgaaatgtg

SEQ ID NO: 2052 - DNA, 381 bp, Arabidopsis thaliana
  unsure at all n locations
  Clone ID: LIB22-064-Q1-E1-H9
tcctccgcatgtcaacatattttattgtctaggcggaattacccttacttgttttttagtacaagtagctacgggatttgctatgactttttattaccgtccaaccgttactgaagcttttgcttctgttcaatatataatgactgaagctaactttggttggttaatccgatcagttcatcgatggtcggcaagtatgatggtcctaatgatgatcctgcacgtatttcgtgtatacctcaccggtggttttaaaaaacctcgcgaattaacttgggttactggtgtggttctgggtgtattgaccgcatcttttggtgtaacaggttattctttaccctgggatcaaaattggtnatngggcgggccaaaaattgtnac

SEQ ID NO: 2053 - DNA, 394 bp, Arabidopsis thaliana
  unsure at all n locations
  Clone ID: LIB22-065-Q1-E1-A10
acgcgtccgataacactcacacacacactttctcttctcttattttctcagttcttttaactcttttctctacatatattcaaatggccaccatcgaggttgaacaagtgactccagtagcagctgagaacatcgaggtgccaccaccaaaggctgtggagtcggaggaagtcaccancgtctccgagtctcttccaactccggtaacaagaatctcaagcgcctgtcgaagtaacaactaaagatttggncntggnaaagacaagagaaaccaatcgaagaaacanaggaaactcaagttnaaactcccgnggttntggggatttngaaagatnnaagaanctcccgntgaaantccccgtggngtttttnaggatgatgaacacnacagttg

SEQ ID NO: 2054 - DNA, 406 bp, Arabidopsis thaliana
  unsure at all n locations
  Clone ID: LIB22-064-Q1-E1-F2
atttcggacgaggatgatttggaaacaatagcaatcatgtttgaggttttcagactatatggacacaagatgccttgcgatgtgttcgagagattcaaaagcgaagatgggaagtttaaggaaagtttagttggggatgttagagggctgctacagctgtacgaagccgcgcatctaggagcaccatctgaagatataatggatgaagccttaagttttgcgcggtatcacttggaaccgttggcangcaccgaaacaagctctaatctttttaagcatgtagaaaacgttttgtataagagctcgatatcatagcatagnagatactagtagcacgacagtacatctctttctaagatcaagaagaagaccaagatgagacgctccctaaggtttcaaangctca

SEQ ID NO: 2055 - DNA, 517 bp, Arabidopsis thaliana
  unsure at all n locations
  Clone ID: LIB22-063-Q1-E1-C4
ntgttactttgccggcccggtccgaaanaaccggggtcaacccacgccgtccgtaaatttcganatctcactctctcccattttcnactttangaaatggcgaacaacgcagattcagctccgacganagaaaccaangaacaagtnanaaangcgttngaagcanaagaatggagctccgtggagaacgccaccaatccgcctgtctcccgtcaanggggaaatcagccgaaagtctttccgagcaaggatctgatgngagatgcangacaatgttggagaaagatgaagatcgagaaaggataanacggnggagttacttaaggagaaagatgagatctgaganagaaggaggaggaagctacaggaccagaggacgctgangcaagganaagctcaaaggtggagctgaagnaagcttcangaagaatgaagggaattcanaacctaacaatgactttttgccttggcgggtcaatccanctctcaaaacagggnctgaggccaagaaaaaggg

SEQ ID NO: 2056 - DNA, 414 bp, Arabidopsis thaliana
  Clone ID: LIB22-063-Q1-E1-C6
aagagcagtgaaagtgtaactcgaaagaagcttaaaactgatgatgttgttggcatgaatgtgtctcaaaagacaacgttgatcgtttgtccaccttctgtgatttcagcatggataacacagttagaggagcatactgtaccgggaatcttgaaggtgtatatgtatcatggtggcgaaaggacagacgatgttaatgagcttatgaagtatgacatagtgttgactacttacggcactttagctgttgaggaatcgtgggaagattctcctgtaaagaaaatggagtggctgagaataattcttgatgaggcacacaccattaagaatgcaaatgctcaacagagccgagtagtttgtaagttgaaggcttcccgcagatgggctgtcacaggaactcctattcaagaatgg

SEQ ID NO: 2057 - DNA, 385 bp, Arabidopsis thaliana
  unsure at all n locations
  Clone ID: LIB22-063-Q1-E1-C7
aagccaaacaaagttttatagagaccttccatttctccctctcgtgacaaacgcaatttnnnnnnnnnnnnnnnnnnnnnnnnnnnnnnnnnnnnnnnnntttgagattactttgtatcgatttagctattcgagaaactcttgccgtttgaaagttttaattgttaaagatgtcgagttctatggaatgttctgagttcgtcggtagccggagatttantgggaagaagcctagcttctcacagacgtgtaagtcgattgagtcagtatctaaangagaacggtagctttggagatctgagcttaggaatggcatgcaaacctgatgtcaanggaactttaggcaactcaacgtcagccgacaacaccnaggagtttattcccc

SEQ ID NO: 2058 - DNA, 411 bp, Arabidopsis thaliana
  Clone ID: LIB22-063-Q1-E1-C8
tggaggctatgttattcatcggaataaatgcagctataagtgtccgtgtatccaatgagcttggcctaggccgtccacgagcagctaagtactctgtctatgtcacggtcttccagtctctcctcattggtcttgtctttatggtggctatcatcatagccagagaccattttgctatcatcttcacaagcagtaaagtacttcagcgtgcagtgtctaagctagcttatcttcttggtataaccatggttctcaacagtgtgcagccggttgtttctggtgtggctgttggaggcggttggcaaggcttagtggcctatatcaacttgggctgttactacatttttggccttccctttggatatcttcttggttacattgcaaactttggagtgatggttagagaattta

SEQ ID NO: 2059 - DNA, 411 bp, Arabidopsis thaliana
  unsure at all n locations
  Clone ID: LIB22-063-Q1-E1-C9
cagcttcacctggtgtttcaattanagggagagtaagaaanatggcaaagtggaaaccagatagtgataatgaaagtgatttggagtctgaagctgactctgctgacgattctaatgattctgangatgagttccatgatatgtcagatatgcagtggggaagatgaaaggaagaagttgctccattgttctgaatgtgacaagctttttcatccggactgtgtggttcctccagttatagacttaccatctgaagcgtggatttgcttttcttgtaaggaaaagacagaggagtacattcaagcaagacgtctttacattgccgaattgcagaanangtatgaagcancgcttgaacgaanatcanagatcatagagatcatccgttctctgaatcgtccaaacaatccc

SEQ ID NO: 2060 - DNA, 415 bp, Arabidopsis thaliana
  unsure at all n locations
  Clone ID: LIB22-063-Q1-E1-D1
acgcgtgggttttaattttcctctctcttacacacacacatgataaaaagtgtttagagacagctcttctcttcttgttctcagtttgagagaaacaaaaccttccaatacaaccagagagtcgacgaagaagaaagaaaccatgtcccaannnnnnnnnnnnnnnnnnnnnnnnnnnnnnnnnnnnnnnnnnaaacccatttccgccactacanttattcaaaaattcaaagaagccccacagttttacaattctgcaggattgccccttaatcgatgactccgagtccgacgatgacgtggtcgccaaancaatcttctgctcacgtcgaagctgtccacgtgggcatgacactcgacgncgcctanattcgtggctcantcgccggctggttctcnccgtcctcccaagaat

SEQ ID NO: 2061 - DNA, 457 bp, Arabidopsis thaliana
  unsure at all n locations
  Clone ID: LIB22-063-Q1-E1-D3
caacccgggtcganccacgcgtccgcttaatccattttttcaaaccacttgcaaaattcgaatcagatcttctcttcaatcgaaaaaaaagaaaggatttgctctagattgttgaatcgaagatgtcgacaagggaagagaatgtttacatggcgaaattagccgaacaagctgaacgttacgaanaaatggttgaattcatggagaaagttgcgaaaactgttgatgttgangaactttcagttgaacagaggaatcttctctctgttgcntacaagaacgtgattggagcgaagaagagcttcgtgggagaatcatttcttcgattgagcacaatagaagagagcancgggaaccgaagatcatgttgccattatcanaggggttacangaggaaaggattgaatccgagcttatcaaaatcccgtgaatggggattttgaatngtccttgaaac

SEQ ID NO: 2062 - DNA, 400 bp, Arabidopsis thaliana
  unsure at all n locations
  Clone ID: LIB22-063-Q1-E1-D4
tttaggtaaatgatcacagcttattacagatggaagagaagctgactcaatttgtggtttagatttgtcaaagaggatcgtgtggaatctgaaagttttcaattttcactaaaaataggattagagttaaaaaggaggaagaagaaatggggaaacacaaatctttcagaagcaaagcagtgcactttgtcaccgatnnnnnnnnnnnnnnnnnnnnnnnnnnnnnnnnnnnnnnnnnnnnnnnnnnnnnnnnnnnnnnnnnnnnggatgaggaagatgagtctaagagaaatcagctagagtctacaactgcagagcagcctaaggatttggttgacgaaccaagacacttcttctttctctgcattccttggttcactgttatcttcagattccaang

SEQ ID NO: 2063 - DNA, 428 bp, Arabidopsis thaliana
  unsure at all n locations
  Clone ID: LIB22-063-Q1-E1-D5
tgcatcgatctctattatcagcatcgtgtcgatactcgtgtccctatcgaaatcactatgggagaactgaagaagctggttgaagagggtaaaataaagtacattggtttgtctgaagcctctgcctcaactatcagaagagcacatgctgttcacccaattactgccgtgcagatagaatggtccttgtggacgagagatgtggaagaagaaatcattccgacctgcagggaacttgggattgggattgttgcttacagtcctctaggacgaagtttcttcgcatctggacccaagcttgtttgagaanctanaanagggatgacttcagaaaggctctaccaaagatttccangagggaaaaccttagaccacaaacaagantgttttatgaaaaaattttgttgcaaattatcggagaaagaaaa

SEQ ID NO: 2064 - DNA, 473 bp, Arabidopsis thaliana
  unsure at all n locations
  Clone ID: LIB22-063-Q1-E1-D6
ttagttcgnccggccggtaccgntccaagaattcccgggcntcttcntcnaaagtttattttcttaaacttattacaaaaaacatgatcttcaaaagttgatttaatctctttttatccatcttcttcttcatttcncaatancaaacttttctttttttgtaagcttaacataaaccctaatattttcntgatttttttcangaaaataaaaacataaagatgcttgaagttagatcaatggatatgactccaaaatcaccagaacccgaatccganactccgacccggatccaaccagctaaaccaatctctttcagtaacggaatcatcatcacgccaccaccacnaccaccacaacaacancaaagtcacttacagagaatgtctcaagaancacgcggnggcgattggtggtcacgcgcttgacggttgcggcgaanttatgccgtctccttcgtcaacgacttcnga

SEQ ID NO: 2065 - DNA, 410 bp, Arabidopsis thaliana
  unsure at all n locations
  Clone ID: LIB22-063-Q1-E1-D9
acttcaaacacttgagaaaaaagcttttgatttcacatcttaatctaacaagtcaaacacttttcaaaccacaaaattcgtcaaagctctgaaacaaataaacattttttaatttctccctttttaatggaaatctcttctttcccatttccatacctacaagacgacgagtgttcccatttccttggtctatttcaagacatggactcttctccttctactttcggattagaaggttttaatagcaacgacaataatactaatcaaaagaaacgcccaagaaaagacgacgaaggcggtggtggtggcggcggaggaacagaagttctaggagctgttaatggtaataataaggctgcttttggagatatactcgcgacgcttctgttgttagacganggaagccaaac

SEQ ID NO: 2066 - DNA, 401 bp, Arabidopsis thaliana
  unsure at all n locations
  Clone ID: LIB22-063-Q1-E1-E1
ctctgcacatttctgggttcttctcttcttatgctctgtttcttttaagacacagaagaaacagtacagagttgagattttcttaaacaaaagtgaaaagagaagaaacaagtgacagctcaaacggacaaaaaccactcttgggtctttcttgcttctgattctttctcttctctaatagaagaaaacatctagaagctaaaaaaatgtcggaaggagtagaagcgatagtagcaaatgacaacggaacagatcaggtaaacggaaaccgtaccgggaaagataacgaagaacacgacggntccaccggttctaacctaagcaatttcctatggnacggtggctctgtctgggaagcttggggtcagctgcgcatctaaccaagtgggntcaaagttgtt

SEQ ID NO: 2067 - DNA, 411 bp, Arabidopsis thaliana
  unsure at all n locations
  Clone ID: LIB22-063-Q1-E1-E10
nctctgatttttttcaattccgatggaggcgggagagcggcgcaatggcgattcgatgagtcacaatcaccgcgcaccgaagaagccacgtctcgctgggttattaaccgagtcagatatcgactctgagttcgctcaccaccagaccggtgttgccagaatcaacaacggtagcttcgggtgctgtcctggctccgttctcgaggcgcaacgcgagtggcagcttcgttatctccgtcagcctgatgagttctacttcaacggtctccgtcgtggacttctcgcttctcgaactgtgatcagtgacctaatcaacgccgatgatgttgatgaggtctctctcgttgataacgccaccactgctgctgctantgttcttcagaaagttggaaaggtgtttctcgggaaggg

SEQ ID NO: 2068 - DNA, 461 bp, Arabidopsis thaliana
  unsure at all n locations
  Clone ID: LIB22-063-Q1-E1-E2
ttgcnggcccggtccagaatacccgggtcganccacgcgtccgtgaanggcttctttttcctaatctcattgttgattgggttctcaagctcttacaggaaaaggagatctttgaaattttgcagctgctactccccattgtgtatggtgttttagagagtattgttctctctcagacatatgtncagagtcttgtagctattgctgtccgtttcattcaggaacctgctcctggtggatctgatcttgttgataactctcgaagagcttatactcgatctgctctaattganatggttcgctacttggtacttgctgcacccgacacatttgttgcttcagatttctttcctcttcctccttccngtaagcagcatgtggacctaaggatgtgagctatacgtcaaaggcttatganaatctgngaanaagctnagaaantaactctgncggaagatttt

SEQ ID NO: 2069 - DNA, 395 bp, Arabidopsis thaliana
  unsure at all n locations
  Clone ID: LIB22-063-Q1-E1-C12
gttctctcaatttcattcttaaaccctagttcttcgattttttccgatctacgacaatggcggacgctgaaacctttgctttccaagctgagatcaaccagttgctttccctcatcatcaataccttttactctaacaaggagatcttcctccgtgaactcatcagtaactcttctgatgctttggacaagattagattcgagtccttgacggacaagagcaagctcgatggtcagcctgagctcttcattcacatcattcccgacaagactaacaacaccttgaccattattgatagtggtattggcatgaccaaggctgatttggtcaacaaccttggaacaattgcaagatctggaaccaangaattcatggaagcactggctgcnggagct

SEQ ID NO: 2070 - DNA, 421 bp, Arabidopsis thaliana
  unsure at all n locations
  Clone ID: LIB22-063-Q1-E1-E3
anaggcagcgtgctgcgcanagtttgatgaagaaagctattcaggagacgaggtataaggagagtgtgcgtgctgcgatttatcagaagagagcagctgcagagagtaagcggatggggattttggaagcggaaaggagaagagcgaatgcgagattgactccggtgtttggtgctgctagttctgtgcggagtcaaaaggaagctgagagaaggaaaatgaacgaccgtttagaagagcggcttcaaagggcaaagaagctgaaagcgcaatatatnaggcgaaggagaggtattggatagttgttcatcttcacgatnagaaacantgcgaaagaaccaagtgcatcttgttaagatgttagtaagatgcctgganngangatttgcgaaatgcaagaagtcctacnctttggtcttgg

SEQ ID NO: 2071 - DNA, 398 bp, Arabidopsis thaliana
  unsure at all n locations
  Clone ID: LIB22-062-Q1-E1-G12
cgacaactccttctctctcttaaaacaaattttttttttctctctacaaagctccgccgccgcctagggttaccggttccggtggctttttcagcaccggaaccggatttctttgttttagtgtctctagtttcgatttcttgtgggtttaatgtgatctgaatcctattttcttctaacggtttcttttctaaattctcagatctaaatctgtaaagtctaaatcttttcctcttccggttttgttgcttgtttgtctccttcgtctgcaagtttcaattctggccgttccaactatggcagaggcaggtttttttctaaccttcaacgcctcagatgcagatctctctccattgaagatctagatntccttcctttcctccttganaacttggtct

SEQ ID NO: 2072 - DNA, 440 bp, Arabidopsis thaliana
  unsure at all n locations
  Clone ID: LIB22-062-Q1-E1-G4
acgcgtccggggctttagggtttataagacccaaacaaaaaacattcatcagtctcaattcaaaatcctccatcaatggagaaatacgagaagctcgaaaaggtcggtgaaggaacctatggaaaagtctacaaagcaatggagaaaaccaccggaaaactcgtcgctctgaagaaaactaggctcgaaatggacgaagaaggtataccaccaacggctctccgtgagatctctcttctccaaatgctttctcaatcaatctacatcgttcgtctcctctgcgtcgaacatgttattcaatcgaaagattcgactgtttctcactctcccaaatccaatctctatctcgtttttgagtatctcgacactgatctcaagaaatttatagattcctcataagaaaaggggctcgaatcctanaccgcttgagggttctcttg

SEQ ID NO: 2073 - DNA, 379 bp, Arabidopsis thaliana
  unsure at all n locations
  Clone ID: LIB22-062-Q1-E1-H10
cgcgtccgcccacgcgtccgcccacgcgtccgcccacgcgtccgcggacgcgtgggtgcgaatctgaaggatctttacgaattccataatcttcagatcgaaaggtttctatcgattcgttggtcaagaggagattgtgcgtgtgattcgtgagcatgggctgttcgttttcaggattgaacgcactttacgacgccgtcaacggtggaggtgacgtatggatcaatgagaatcgattcaggatcgtgaggcagctcggcgaaggaggtttcgcattcgtctttttggtcaaggaaattgtcgccgacgcttcctccgccgcatccggtggtggtctaaccaaganagtcaaggatccggctcanctctccggctgacg

SEQ ID NO: 2074 - DNA, 397 bp, Arabidopsis thaliana
  unsure at all n locations
  Clone ID: LIB22-062-Q1-E1-H11
aaaacctaatcttcatcttcatcttctcccgccgtcggccgtaagaggtttcgaagaagcaaagtgagcaacaatggcgggaggcaagatcaggaaggagaagcccaaggcttcgaatagagcaccatcgaaccattaccaaggaggaatatcgttccacaaatcgaaagggcaacatatccttaagaaccctctgcttgtggattcgatcgttcagaaagctggtatcaagagtaccgatgtgattctcgagatcggtcccggtactgggaaacttgaccaaagaagcttctagaagctggcaaagaagttatcgccgtcgnaacttgactctccgtatggttctcgaaccttcaacgccgtttttcaagggaattcccttctccnaaccgccttg

SEQ ID NO: 2075 - DNA, 404 bp, Arabidopsis thaliana
  unsure at all n locations
  Clone ID: LIB22-062-Q1-E1-H12
cccttcccttttgggatattttcgccgcgtggattgatatgacgactctctttcgccggaagtcaatcggaatccgcgacaacttcttccttcaatccctttgatttttttttggctctacttatcccaaacccttcaaatcttcaggtccaatctcttcttctatttgttttttaattaaaaaaatccggcgaaaggtgaagctcttggattcgagtggtggctagtaatcgatttcggtagtttagaagtagtttataggttttatcaagctttcgatttgatggagccgcgagtcggaaacaagtttcggctcggaaggaagatcgggnggtggattattcggagagatctatcgtgggaccaanatccaaacngaatgaagaagtgggcgttaaacgttg

SEQ ID NO: 2076 - DNA, 445 bp, Arabidopsis thaliana
  unsure at all n locations
  Clone ID: LIB22-062-Q1-E1-H3
acgttatccagccgggcccggtccgaacanaacgggtcgagccacgcgtccgctcaaaaattcgatctttagggtttttcttttancctcttatcgctaatctggagctctatanagactataaagggtttttgattgattcgggagctcgagatttgacttcttttagctgattcggcaagtttgtatcnagaaaggatccattggtgaggtcaatagtggttggtgggttttagtaatggaagacggtgagcttgatttctccaatcangaagtgttttcgagttcggngatgggtgaattaccacctagcaattgttcganggatagtttctttgatgggcttttaagtggnnacgaatgctgcgtgtncccacacacacacctggtnnccccactgggagcaggncaanactcagactcacaccgtgcntccatggtccac

SEQ ID NO: 2077 - DNA, 420 bp, Arabidopsis thaliana
  unsure at all n locations
  Clone ID: LIB22-062-Q1-E1-H7
acaaacaacatcctcgttgtgcttccatctaaggaatctgtcactgaattgcaaccaagaatggatgatatattgaaatgcccctgtgatggcataattgtgacagctgctggttctacaggatcgtcctatgatttttacagtcggtactttgctcctaagttcggagttgatgaggaccctgtttgtggaagtgcacattgtgcattggcacattactggagcatcaagatgaataagtttgatgctccagtaatgtggnagtgcacattgtgcattggcacattactggagcatcaagatgaataagtttgatttcttagcctaccaagcttcgagtaggagtgggaacgataaggattcatctagacaaggataagcagagggttctcctgagaggcaaagccgttactgtgatgg

SEQ ID NO: 2078 - DNA, 451 bp, Arabidopsis thaliana
  unsure at all n locations
  Clone ID: LIB22-062-Q1-E1-H8
acgcgtccggttctaagatcggcgaagcggccacccnnnnnnnnnnnnnnnnnnnnnnnnnnnnnnnnnnnnnnngaacataaaaactatacctcgacgaaatacaatcctaattgagaaccaaaaaagccaacgacctctcaaatccaagaacggggcttttgtcttcaaaatgaaaagtttgcaagagaaaaagggggagagggagagagtctcagacaataccatattaacaccaaagaacgagtttttggaagcaaaagagaccaaccacacttactactggtcagggccaaaatcaaaaccccttacctggaaaaagtatatanccattttaggtatcaaatctaaaattggagtccnctccacaatcctaccctccgcnccaaaaaccaaccaacccntggatccctaacatgncataagccatgtcctctctcccnaaattggt

SEQ ID NO: 2079 - DNA, 452 bp, Arabidopsis thaliana
  unsure at all n locations
  Clone ID: LIB22-063-Q1-E1-A12
ggcccggcacantgtccaaannctcncgggtcgacncacgcntccncgatgnnnnnnnnnnnnnnnnnnnnnnnnnnnnnnnnnnnnnnnnnnnnnnnnnnnnnnnnnnnnnnnnnnnnnnnnnnnnctagaaatcgagagagattggtggaagatttttcaccagatttcatgggagaagaagagagtcgaattggagacgagctttcgattttggttctcacggcggagcgactccgtgtagctgtggatgaagctgaatcattcaaaacagagtgtggcgaggttggtaaacaagtagatcggcttgctcaaatgcttagaacacttgttcgattcgtctctagttcttctcaacaagtttatgatcggccgattcgtagagttatcgtcnatgtgaagaagaatctcgagcgtgggttttgctcntgttcggtaagtgtaggagacac

SEQ ID NO: 2080 - DNA, 416 bp, Arabidopsis thaliana
  Clone ID: LIB22-063-Q1-E1-A2
ctcaatacaccccagaaagtctttactaattagctttgttgagcttatcaaagtggcaaattataagacattgcatgatttggatatcagcttcatgttgtggctgaagacgaagggggttaataacttatgtctattgccacatcatctttctctttttctacaattacagttaccttccagagagaaaaatattagatggaatttcctttgtcgtaccggcaggaaaaagtgtggcaatcgttggtactagcgggagcggcaagtcaacaattcttaggatgctattcagattcttcgacacagattccggaaatataaggattgacgggcaagatataaaggaagtgagactaagatagcctccgaagctccataggagttgtgccgcaagatactgttctcttcaatgacac

SEQ ID NO: 2081 - DNA, 420 bp, Arabidopsis thaliana
  unsure at all n locations
  Clone ID: LIB22-063-Q1-E1-B1
acgcgtccgcccacgcgtccgcccacgcgtccgcccacgcgtccgcttgtgctatctttcaagcaagtttcgttgcagggttgatgatgttatctttatctactggtgcgttattgcttgaaccaagtggttgtggagttgaagattcgccgtgtaagcctcattcgacgtttaagacggttctgttttatctgtcggtgtatctaatcgcgttagggtatggtggttatcagccgaacatagctacttttggagctgatcagtttgatgcggaggattccgttgaaggacactcnaaaatcgcgtttttcaagttacttttacttggntctgaatcttggatcgctcttcncaaatactgtcttggggttacnttgaggatnaaagggaatgggccgccttggantttgggcggtccgc

SEQ ID NO: 2082 - DNA, 421 bp, Arabidopsis thaliana
  unsure at all n locations
  Clone ID: LIB22-063-Q1-E1-B4
agttcttggnttcttttcttgacattcccnatgagccanaacagatcccatatgagccacagaatcttacctcatgcaacaagatnaatgatgaatctnagagagganttaagattanagctcgacnagcacaagccccgggttgtgctgagcagtttgtaatgcanggcgatgcctcaagaaggctgcgtcttcaggttaaccttaacagccacaagtcagaaactgacagtacacaacttcaatttatcaanaaagangttaaggacacaacaacngaaactatgacnaaaggatgtggaaatttcacaatgatcaangagcaggnctagtttcanattcaagaaaattgcaaccatgggatgttcatacaganggcttttcagaagtcggtgtggtaaccggttgtgtgtgtgaatgt

SEQ ID NO: 2083 - DNA, 345 bp, Arabidopsis thaliana
  Clone ID: LIB22-063-Q1-E1-B7
aaattccgccggaaatgttcgatctttctaagcttgtgtgtgggacttatatagacagtaggttacttgtacttaggtgtgtaaatggttcagcattgttgttcacaaggtccagcttggaccataagtctatgtagccatttggctcaggttcttatgtatataacaaatgaatcattctttttgggactaaaccgttgtagtctctgtgtatgttgtggtaatgtatgcttttggcttttaggttgtaataagagctttttagtaaaagctttatactatggtattcttttcatgattataatagaaacacaatgatttgcaataaaaaaaaaaaaaaaaagg

SEQ ID NO: 2084 - DNA, 422 bp, Arabidopsis thaliana
  unsure at all n locations
  Clone ID: LIB22-062-Q1-E1-F6
acgcgtccgcagagcttttgagtcttctaaatctctatcgaatttttctagggttagggctcctgatcgatttcgcgagctctgcgattattttaagtattaggatccgaaattagaaatgggtggagagggagattcaagtcagccgcagagtggtgaaggagaagctgtggctgtgaacatcaggtgctctaatggcacgaaatttagtgtgaagacgagtctcgattcaacggtggagtctttcaaagagttggtggctcagagcagcgatgttccagctaatcaagcagcgcttgatttacaagggtcgtatcctcaaggacgatcaaactctcctcagctatggtttgcangctgatcacaccattcatatggttaaagggctctgcaccttcttcagcaccaacctccctgctccg

SEQ ID NO: 2085 - DNA, 436 bp, Arabidopsis thaliana
  unsure at all n locations
  Clone ID: LIB22-063-Q1-E1-C1
cgggtcgacncacgcgtccgatggcgttctcgagttccatcttctctgttantcagttttcttcttcgttagcttcgcgtccttcttctgcaatcagtaggcagactcgttttcccgctcaaattgcttctccagatctatcgcctgctttgntcgatgatcgccggaagttcgtcggaggtgtaatgtctctcttgacnaagagtattaaaaaccgtgtatatgcttcgattaacagcattgattcggccgctactccatcgtanccgaaatcgggnagacgatgacgacgttgttccaaacgccaanggttatgatacaccaaggatggctgaancccngaagctactattgtacaagcncagttttgggaaaccgtcgttggggctcctaattgacacaaanggngggcgntgaaaagatttggnggatttgg

SEQ ID NO: 2086 - DNA, 455 bp, Arabidopsis thaliana
  unsure at all n locations
  Clone ID: LIB22-063-Q1-E1-C11
tccgcagnccggcacaggtccananacncncgggtcgacncacgcctccnnnttncgtcantttngtgagagagaagagatctaaaaaaatccacaattttgttcaaatcttggagttaaatgctgaattttaggccttgttgcttanatttatggcttaaagtttcaaacttttcattggatatgtgagaagaaaatgtcaggatctgagacgggtttaatggcggcgaccagagaatcaatgcaatttacaatggctctccaccagcagcagcaacacagtcaagctcaacctcagcagtctcaagaacaggccattgtcattcggtggagacgacggaactgctctttacaagcagccgatgagatcagtatcaccaccgcagcagtaccaacccaactcagctggtgagaattctgtccntgaacatgaacttgcccggangtgagtccgg

SEQ ID NO: 2087 - DNA, 371 bp, Arabidopsis thaliana
  unsure at all n locations
  Clone ID: LIB22-062-Q1-E1-C12
ttanatcgatcaagctttgagtgatcagacggaggctgttattgtcaatgcattggagtgcttatccacattatgcaagagtagtttcttgcggaaganagctctcctccaaatgatatagtgtgtttatcctttgttgtgctatccatcncaatgggtaaggagggcagttgtcactttcattgccgcaagtnntgaatgcttaagtgcagtcgactcttatgcntttattgccccangtaatacgctcttancttagtaggactgnctgcgtcaattgcttctgaggaaagtctactttcatgtntgaatgccccctgtcacaaggggangtagtttancggttcccntgaganaaccaaggaacccag

SEQ ID NO: 2088 - DNA, 432 bp, Arabidopsis thaliana
  unsure at all n locations
  Clone ID: LIB22-062-Q1-E1-C2
acncgtccggttgatctaaaggaaccaaacagctggactgatgttgttgaagaacacgaaaaggatgtcttaagcatcagcttgtgctgtcaatgggaatcacctggtcgcatgctacatgagcgatgtaaagcatattctgcaaattagggacttgaaatctggttcattgcttcaccaattacctctanatattggttcagtatctgatgtttctgctcggcgcaaggacaatacctttttctttanctttactagctttctcactcctgggtgtgatttacaagtgtgacgtagccaatgaatctccanaagttaacgtattccgggaggttactgtacccggaatttgacangggaagcatttcaagnncattcatggtcnntctatcccaagtancngnttgggacaagatanacctaatgtttaag

SEQ ID NO: 2089 - DNA, 425 bp, Arabidopsis thaliana
  unsure at all n locations
  Clone ID: LIB22-062-Q1-E1-C4
taatcaaaaatggagtataggtttcatatctctcgcttttctcttcatcacttcctcttcagctgagttcatcattcaacaggtcacaaagggcagaggaatagagtacaacagttcttacagtctcgaggagaatcttggngtgacaagagagttgagagaagagcgaccatcgagtaagatagtgacaataacaagcttctcagtgattaaaggcagaggagaaccctatgaatcctctgtttttgaggctgctggttacaaatggagattggttttgtacgtgaatggtaataaaaacgacggtggaaatgatcatatttccctttacgcaaggatcgaagaagacnaactctcttccattaggttgggaagtgaaatgttgatctcaaaactcnttgtccataatggggaagctacacnaa

SEQ ID NO: 2090 - DNA, 426 bp, Arabidopsis thaliana
  unsure at all n locations
  Clone ID: LIB22-062-Q1-E1-C7
cttctcgcttcgaatcgctctcggtttcatcgatcggaactggatctaccaagaaatcatccgatactcggagaaaggtaaagagcatggctacgacaaatataggaaaggaggagaagaaaagagtcgagatttatgatctcgaagagaatttagtgattgatttggctaaattcacagcagatctctccgataagttttgtaaagagagaggcgctttcaccgtcgttgtctccggtggctctctcatcaaatcactccggaaattacgtagaatctccttacgttgattctatagattgggcaaggtggcattttttctgggttgacgnagagagttgttcccaagnaatcacgatgatagcanctatanactcgcttatgaatanttttctatcccanggtaccaattccgcctggaaatgt

SEQ ID NO: 2091 - DNA, 477 bp, Arabidopsis thaliana
  unsure at all n locations
  Clone ID: LIB22-062-Q1-E1-D3
ttancccgcccggtccgaantaaacgggtcganccacgcgtccgagtttnctctggttcaacttgtaaacaaggagaaatcgaagcggttgttatagccactggagttcacaccttctttggtaaagctgctcaccttgtggacagcactaaccaagttgggcacttccagaaagttcttacatccattggaaacttctgtatctgttctattgctattggtatagcgattgaaatactcgtcatgtaccctatccaacaccgaaagtacagagatggaattgacaatctcttggtcctcttgatcggtggtatccccattgctatgcccacggtcttgtctgtngactatggctatcgggtctcacaggttgtcncancaaggtgctatcaccaaggcgtatgacaggccattgaagaaatggcgggaaagggntgtcntttgcaagtgacaanancggggacactaaccctctan

SEQ ID NO: 2092 - DNA, 420 bp, Arabidopsis thaliana
  Clone ID: LIB22-062-Q1-E1-D5
atctgaaagactcgaatcacatcttctgaataagcaagaagaagaagcttcttccttcacttctggtcttcttctcagcacatccgtcgttgtcgctggatccttctgttatggctgcgccatgtcatattcgtcgcctgctcagtccaaaatcatggaagaactgggactttccgttgcagattattcgtttttcacttcggtaatgacattaggaggaatgattaccgccgtgttcagcggtaaaatctctgctctcgttggtcgtcgacagacaatgtggatctcagatgtttgctgtatttttggttggctcgctgtagcgtttgcacatgatattataatgcttaatactggacgactcttcttggggtttggggttggtctcattagttatgtggttcctgtgtatatagcaaa

SEQ ID NO: 2093 - DNA, 420 bp, Arabidopsis thaliana
  unsure at all n locations
  Clone ID: LIB22-062-Q1-E1-D6
atgcttaacttagccaatttggctgaggaggtgcagattgctcaccgtcgcaggatcaagaagctgaagaaaggtgatttcgttgatgagagttctgcaactactgaatccgatattgaagagacttttaagaggctcgtttcggatcttggtaagtctcctgaagagatctttgatgccttgaagaatcagactgtggatctggttttgactgctcatcctactcagtctgtgcgtagatcattgcttcagaagcatgggaggataagggactgtcttgctcaactctatgcaaaggacattactcctgatgacaagcaggagctagatgagtctctgcaaagagagattcaagctgcattccgaacaagatgagattaagaagaacacctccaancccacaagatgaaatgagaactg

SEQ ID NO: 2094 - DNA, 417 bp, Arabidopsis thaliana
  unsure at all n locations
  Clone ID: LIB22-062-Q1-E1-D8
tctctcgctctctatctctctcaaacactatggaatcccaaacaaagttcgattatgaaagtcttgcgttcacaaagttgtctcactctcaatggactgattacttcctctctgttcccatcgatgattcggagttagacgctattacaagagagattgacataatcaagcctgaagttaggaagctcctatcttccaaaggtgatgatgagacatcaaagaggaaagtgcttttgatccaatcgcttcttagccttggcctcgcatttcattttgaaaatgaaatcaangatatattanaagatgcttttcgaaggatagatgatataactggtgatgaaaatgacttgtctacaatctccatcatgttccgcgttttcagaanatacggacacantttncatcaagtgtattcaa

SEQ ID NO: 2095 - DNA, 429 bp, Arabidopsis thaliana
  unsure at all n locations
  Clone ID: LIB22-062-Q1-E1-E3
acacgtccgcccacgcgtccgattttgatttggttttgtagcctacgaattcgaatcatcancatcatcttcaacaccagcttaacgaaaatggagtataataagtggccacggactagtactctctcaccaacttccacctctccaagcaaaccctaaccctaaccaccaccatgtcgctacctctgctggtcttccgtcaaggatgggtggatcgatggcggagagagcaaggcangccancattcctccactaacgggacccctaaagtgtcctcgatgcgactccagcaacactaagttctgttactacaacaactataacctcactcagcctcgtcacttctgcaaaggttgccgttcnctactggacacaagcggggcgccctgagaaaacgtccctgtaggtggaggctgccggganggaat

SEQ ID NO: 2096 - DNA, 389 bp, Arabidopsis thaliana
  Clone ID: LIB22-062-Q1-E1-E6
gactctttttatgaaaacattcatcaaatcccgagaggagaatgaaaaacaagccgaggctgagaagaagaaactggagaaagaagcaattaaagagaagtcagcgacaaagaaagatggcgtcgataacgacaacgatcttatccagcagatccatagacatagaacatgaacaaacatcggtcttgaacggaagacccgaggttttcagatcgatcgataaaagctttgttttataggactcaatgttgcacatacggaacaagagcagagatctttcctaagatcttaagacaaagtagtcaacgtctatgatgtttagatggaagtgttttatctctgatcacttcattgatgtaaaatcagaggttcgtatttatgtcctagaa

SEQ ID NO: 2097 - DNA, 434 bp, Arabidopsis thaliana
  unsure at all n locations
  Clone ID: LIB22-062-Q1-E1-E7
acgcgtccgcccacgcgtccgtgttactatagatgaagaaattacggatgagaaacaagaagaggttactgtagttgaaaaagcagagtgttctgatgctaaagatgtagctgtggacagtgatgaacctgcggatagagaagatgatgaagggttggtagttgcagaaaatgttcatgttcaaagtgaaggtatagattgtgattctccagttagcggtggcagtaactctgattcaccacccgtaccagctccaccaccaaaaccttcttccactgtcaatcctggtagtaacagatcggttttgggaagttttggcgctttacgaattggaccaacacgaagagctgctgggcctcgctctcttgtttccagtaggagttcgccaactggatcacatccttcttctccaagatcacacagtgagaacgang

SEQ ID NO: 2098 - DNA, 418 bp, Arabidopsis thaliana
  Clone ID: LIB22-062-Q1-E1-E8
agagccggcgaagcttgccgtttccgccgttggaggagagtttttactgttgctgtcctgttgacattttgagacatgaaatgatcttgggttgatgtttgtatggtagcagaggaatagtagtcatgaagcttatttcacttgttagaaacgttcgttctcgccaatgtcaaccggaagtaatctggtctgtgcaagttcgtttcttgcagcaagactctgtctcgaaagctaaacccaagaaatacaaatacccgtcagtttatgatccgtatggtcctagaccccagccttcaagcaaaatcatggagctagctgagcgtatagctgctttatctccagaagaaagaaaacagattggtcctgcactcaatgaacacctgaggcttccaaaacaacagatgatttcatcgggcgg

SEQ ID NO: 2099 - DNA, 398 bp, Arabidopsis thaliana
  Clone ID: LIB22-062-Q1-E1-F10
tgctatatgggatgtgcgatgtgtcaaatgcaaaggatatagttgaagagttgttgcagtatcttagcacagcagaattttctatgcgggaggaattatcacttaaagctgctattcttgctgagaagtttgctcctgatctttcatggtatgtagatgtgatccttcagttgatcgacaaggctggggattttgttagcgatgacatttggtttcgtgtggttcagtttgtaacaaataatgaagacctgcagccttatgcggcatcaaaagcaagagaatatatggacaaaattgcaatccatgagaccatggtgaaggtcagtgcttatattttgggggagtatggtcaccttttagctaagacaacctggatgcagtgcaagtgaactctttag

SEQ ID NO: 2100 - DNA, 403 bp, Arabidopsis thaliana
  unsure at all n locations
  Clone ID: LIB22-062-Q1-E1-F12
ggattggatcacaacaatcacgtcgttaaccgcaggcgaatccgctttcaaggtcacgttcgattacgaaaccgatttcggttaccctggagcattcttgatcagaaacagccatttcagtgagtttcttctcaaaagtctcacacttgaagacgttccaggccatggcagagtccattacatctgtaattcttggatttaccctgctaaacactacactacagaccgagtcttcttctccaacaagacttatcttccacatgaaacaccaagcgacgctgctcaagtatagagaacgaagagctagtgagtttgagaggaaccggcgaaggagagcttaaggaatgggacagagtatatgactaangcttactacaatgatttaggggtcccaccaaaggaa

SEQ ID NO: 2101 - DNA, 457 bp, Arabidopsis thaliana
  unsure at all n locations
  Clone ID: LIB22-062-Q1-E1-C10
ctgttacgcctgccaggtaccgagtccagaattcccgggctcaaaacctgtgaagctgttgatctggagcttgagcatcaccgaaagatagattctttcaacagcggtacgaccgctctaaccattgtgagacagggtgatgttatttatatagcaaacgtcggggattcacgtgcggtattggccacagtttcagacgaaggaagcttggtcgcggttcagctcaccgtagatttcaagccaaacctgcctcaggaggaagagcggataatcggatgcaacgggagagtattttgccttcaagatgagccaggggtccaccgtgtatggcaaccaagtagatgaatctccggggctcgcaatgtcaagagcattcggagactattgtatcaaagattacggattggtctcagtgcctgaagtcactcagaggcatatatccattagngaccaattt

SEQ ID NO: 2102 - DNA, 466 bp, Arabidopsis thaliana
  unsure at all n locations
  Clone ID: LIB22-062-Q1-E1-F3
cggtccaanatacccgggcacagaaaaagccattcnttttgccccttgagtgctttcagctcttcccacaaggttacagaagtaatgtcacgtgtgtacgtcggaaatttggacccgcgagttactgagcgtgaacttgaggatgagttccgtgcctttggagttgtcaggagtgtttgggttgcccgtagaccacctggttacgcttttctagatttcgaagatcctagggatgcccgtgatgctatccgtgctttagatggcaagaatggctggagggttgaacagtctcacaatcgaggtgagcgtggtggcggcggtcgtggtggtgaccgtggaggtggtggcggcggccgtggtggtcgtggtggctctgatttgaaatgctatgaaatgccggtgagactggncatttcgcacgtgaatgcccgtaaccgttggtgggaactggaacgcgtcgcaacca

SEQ ID NO: 2103 - DNA, 464 bp, Arabidopsis thaliana
  unsure at all n locations
  Clone ID: LIB22-060-Q1-E1-G2
cccgccggtccagnataacgggtcgancacgcgtccggcagaacatagagaaaaacataacaatggaggttgagaagacagagaagaacattgcagaggatgatgagtctaagatcatctacagaggatggaaagtcatgcccttcatcattggaaatgagacatttgaaaaattggggattgttggaagttcatcgaatctggttatatacttaacgacggttttcaacatgaagagcatcacggctgcgaaagtcgtcaacatctacggtggcacaagcaactttggcaccatcgtcgctgctttcctctgtgactcctactttggccgctacaagaccctatctttcgccatgatcgcttgcnttctcggttcggtggcaatggatntaacgggctgtgatcaancccctgcanacagntcaatggncctanggaaattaggaaacgtntccaatggggca

SEQ ID NO: 2104 - DNA, 443 bp, Arabidopsis thaliana
  unsure at all n locations
  Clone ID: LIB22-060-Q1-E1-G3
acgcgtccgcatggctaagctctcnnnnnnnnnnnnnnnnnnnnnnnnnnnnnnnnnnnnnnnnnnnnnnnnnnnnnnnnnnnnnnnnnnggatggcttagaatcctacatcgtccatgtgcagagatctcataagccttccctcttctcctcccacaacaactggcacgtctctctccttcgctctctcccttcttctccccaaccagcaacgctgctctactcttattcacgcgccgttcatggcttctccgctcgtctctcccctatccaaaccgccgccctccgccgtcatccttcaagtcatctccgttatacctgatcaagcgcgtgagatcacacaactcacacgcctgccttcctcggtttctcccaaaactctgggactctggagcaactcaaantaaggggaaagacgtgattggtccggggttttaaaaaac

SEQ ID NO: 2105 - DNA, 499 bp, Arabidopsis thaliana
  unsure at all n locations
  Clone ID: LIB22-060-Q1-E1-G4
tgtactggtacccgnccggtaccggtctaaacgggtcgngccacgcgtccgatgaaacttcctattcagagaaccttagcttttgccttagctcgcgggaaaggcgaagctgaaagtttcagcagattggaagccacctttggtgataatacctccacagaatgtacctggagttttgactttccagattctaaagatgctatgtctcatctcaagtcagaagcagacctctctggaagcaatggggccaataatgtggctagtgttatcgaaaaactgaatgctcttcggtcacatctcttagcagcagagaaatggaatgcttctcaactacacttatgtgacaagtaagtatctgggaatgtgcaacanacttagttcattatatggctttgagatcnctggacaattgagcaactcaacaagtcatcctagcctccncttgggccggtcaagtttagnnaagnaacantcctgggatgttccccgcccaacctta

SEQ ID NO: 2106 - DNA, 477 bp, Arabidopsis thaliana
  unsure at all n locations
  Clone ID: LIB22-060-Q1-E1-H2
actgttgcccgtgcaggtacangtctagcgggtcgangcacgcgtccgtctttctctcacaatctaatcttcttcgtcttcaaactcaatctagggttctcttctcctctctgtaggtaggattttgaacacccaaatctctcatcgaatttttcttgctcaacgtatcatcgcacaattcgtctctcgttttccgtcacgtggataatcgaaatctcataatcccaaaggtaaaacaatcaattctgggattggaattttggatccataggatcgtcaattgaaacaatcccgatggcgttatctatgaagccattcagaagccgatgattccggtttccagtcaaacaatctttgggtcggtagcctaacgccggagacgacagagtcagatctgaccgaagttgtttgggaagatacggggatantgatangaatcacgggngtattcctcacgaaggcttggcgtttaaanac

SEQ ID NO: 2107 - DNA, 490 bp, Arabidopsis thaliana
  unsure at all n locations
  Clone ID: LIB22-060-Q1-E1-H3
ntgttacgnctgcagtaccggtccagaattcccgggtcgacccacgcgtccgcgacgcagacgcaagacgcatggaccgcactcgctggccttcagggtgatgcgactctgcaaaccgtctttccacgtcgatcctcccctccgcattgaccctttcgatcttctcgccggcgaggatttctccgacgatccctcttccgcctccttgttccgccgccacgtatcttctgccgacgctgtcgactccgatctcagctaccgaaatagattcctcctcaaccatcctaccgatccaatcggtctctctggtcttctgcttcttcctcagtccttcggagcgatctatctcggagaaacattctgtagctatatcaagcgtcaacaatagttccacttcagaagttcgggatgttaccattaaaggaagaaattcagacagagaaggcagaggantccaacttcnggatacatccaaagtcaacctggttgg

SEQ ID NO: 2108 - DNA, 488 bp, Arabidopsis thaliana
  unsure at all n locations
  Clone ID: LIB22-060-Q1-E1-H4
acgtttgcagtcccggtccgagtcnagnattctcgggtcnacccacgcgtcnntnangcngttatgtcttcctccagtgaagaaatttagaacctatcaaagaggcaggaattttggagggtcgcaatggtataaaggagacttgccttcagcatgcagccaggtatctcgcgaatcaagagtgggtaaaaactgactccctgaagacagttgaaaacacagctataccaattatcatgcttgttgtggaagtcccttgtgatctgatatgcagtatacagtcaccaaaagatggtccagactgtatcaccgttgaccaggatagcaatggtaacactgaaatggttggatttgaagactctgcagcagcaaactcttgccaacaaacactggaaacttggcaattgcaaaatcctgtccgtcttgacatcaagtttcaaaactccaatcccatacgggtcctcaaaacaacgccanttggtccaaaa

SEQ ID NO: 2109 - DNA, 394 bp, Arabidopsis thaliana
  unsure at all n locations
  Clone ID: LIB22-060-Q1-E1-H5
agaaagcgagacgaagaagcaaagatgttcagaaaccaatacgacacagatgttacgacatggagtccaacaggtcgtttattccaagtggaatacgccatggaagcagtgaagcaaggatctgcagcaattggactcagatctcgttctcatgtcgttctcgcttgtgttaacaaagctcaatcggagctttcttcgcatcagaggaagatctttaaagtcgatgaccatatcggtgttgcaatcgctggtctcacagccgacggtcgtgtattgtctcggtatatgagatcggaatcgattaatcactctttnacttatgagtctcctcttccctgttggtccgtctcgttgttcaaccttgcctgatnaagctcaagtcggtacccaacga

SEQ ID NO: 2110 - DNA, 456 bp, Arabidopsis thaliana
  unsure at all n locations
  Clone ID: LIB22-060-Q1-E1-H6
acgcgtccgccgagcctcgtcatgctcttatcactggcatagattcatggccaggcaagcagattcacagccacaattaccgtgttcctgaccaattcaaagatcaggtggtgatagtgatcggaagctctgcgagtggagttgatatatgcagagatatagcgcaggtcgcgaaagaagtccacgtatcatctaagatcaacttcaccggatacttacgagaagcttaccggttacgagaatctatggcttcactcaacgattcaaattgcccgcgaagacggttcggtggttttcgagaatggaaagacaatttacgcggatacatcatgcattgtaccggggtacaaggtattacttccccgtttccttgacaccgaaaanggtgaggtgactggttgacgataatccgtgtttggacccgttgtanaagcaaggtttttccctccaagctcc

SEQ ID NO: 2111 - DNA, 496 bp, Arabidopsis thaliana
  unsure at all n locations
  Clone ID: LIB22-060-Q1-E1-H8
ttacgttgcngtgccggtccggtctngnntctcgggtcgacccacgcgtccgtaaancctttacttctgagcaagacaagaaataagaagatattgagcgattatgattcgcgcagctgccaaattctccangagaagcagcggcaacgattcgtggccgcacgatctccgttagaggaaaccttattcgatactcgacgccattgagattgattcacggtgaaatcagcgttccaaacgcgaatcatgttgctattcagatggttaattacgctctttctcacgctaggtcacaaaaatcagatgaatcttatgctcaagggatgctagtgcttgagcagtgtcttgggaatcaacctaacgatgatcaggtttctcatgantctaaaagcaacagtcttgctttgccaatgtctgatcnttttatacgaaagtgggaatagtagttgagggcaattgaacgccttaagcaagtccatgaatcctggacacaact

SEQ ID NO: 2112 - DNA, 412 bp, Arabidopsis thaliana
  unsure at all n locations
  Clone ID: LIB22-060-Q1-E1-H9
aggaggatgtctcgttcggcgacttgacctctctctctctctctcttttaccttcattgttcactgtttccagacattgaaagaaagatcattagtttctgaggggataaccatttttttttcttcttaaaaagtttttttttttgtcaattggtcttcttcttcctcatccgctcgcttatatttaatttaataataataaaaatcggtgttcatttttatataaaagtataaattttgtgtttggttgatccatccgtagtcgtagtagatctacaagctctgaaattccacgcccacatctcctccgtcctcttgagatccttctcttcattcattttcttgctcaacttgagttgcttccaacatcttgcaagattgtcctttgangttcattcagggtcttgaaaaa

SEQ ID NO: 2113 - DNA, 445 bp, Arabidopsis thaliana
  unsure at all n locations
  Clone ID: LIB22-061-Q1-E2-A2
acgcgtccgattctatgggtgtaatgcaccgagacttgaagcccgaaaactttctctttcttagtaaagatgagaactcaccattgaaagctacagactttggtctctctgtcttcttcaagccaggtgataagtttaaggatcttgttggaagtgcatactatgttgccccagaagttctaaaacggaactatggaccagaggctgatatctggagtgctggtgtgattctatacatccttctcagtggtgttccgcctttctggggagaaaatgaaacggggatctttgatgccattcttcaagggcaacttgatttttcagctgatccatggccagcactatcagatgggtgccaaagatcttgtgagggaaaatgttaaaatatgancctaaagatcggcttacaagctgcgggaagtgctaaatcatcccgttggattag

SEQ ID NO: 2114 - DNA, 435 bp, Arabidopsis thaliana
  unsure at all n locations
  Clone ID: LIB22-061-Q1-E2-A3
agagaataatgatggaaactcgacaacaaaagtagagtgtacagtctcggccttcttaacagatgagatctacgctttgccgaaggcgaccaaaacagaacacttacttgctaagagatatgctacggttagtctaggatgggtaatccagacgagtaatagatctttcctggactccttggccttggcctgcaaagacagagaagattaccgcaatactactaacttggaaagaaagtgtacatgccggcagnatcactatatctgagacaagtttatgcaaactgtgggtncacctatgggttacacanggttanccatatgntttgaacngatgccanagatattgatgaatgtaaaagtcnaattccnagtncggnggaaagacagaaacntgngtgaaatttngaagganggctaatccctgccntgcgc

SEQ ID NO: 2115 - DNA, 490 bp, Arabidopsis thaliana
  unsure at all n locations
  Clone ID: LIB22-061-Q1-E2-A4
ctgttacgtttgccggncccggtccanaattaccgggtcgacccacgcgtccgggaaaaaaaggacgttcttaaggagaaagattctgggaaggaagaatctccgtcaccaccggcggattcttcggctccggcggcggagaagaaagctgaagacaccggtggagctgtccctgataatggcaaagttggtaaaaagagaaaaagaaagggcaaagtttggctactactaacaatcctaccgatggacctgcccgtactcaatcacttcctccgcccactgcaacagattatgaccgtccaattaatcagatcaacgaccaccatataacaaccactaataatccgccacgtcacgatctgtatccttatcctgcacaaggctattatgcgccgcaagtcatgtatggcgtaagttataacgttgctcaanctccgggtgagtgtagacgctgcgtcngtattaatacacctccaccaccgtattccgt

SEQ ID NO: 2116 - DNA, 426 bp, Arabidopsis thaliana
  unsure at all n locations
  Clone ID: LIB22-060-Q1-E1-F7
aaatcttcatcgacaaaattcgattcagctgctgcagctattcacttcgtccatagcacgtanatggcagaaaaggcctgtatanaacgtcttcaaaaggaatatanagcactttgcaaggaaccagtctcccatgttgttgctcgtccttccccaaatgacattctcgagtggcattatgtgctggaaggcagtgagggaacaccttttgcaggtggattttactatggaaagatcaagtttcctcncgagtatccttacaagccaccagggattacaatgactacaccaaatggtcgattcatgacacagaagaaaatttgtttatctatgantgattttcatccagaaagctggaatcccgatgtggtccgtatcaagcatacttacaggaactccnccaattaagnatgggtacaagtcccg

SEQ ID NO: 2117 - DNA, 428 bp, Arabidopsis thaliana
  unsure at all n locations
  Clone ID: LIB22-060-Q1-E1-C3
ggaagagctgaaagattcgcgacgaagcaaaacgacagtgttatctatcgccgccttgttgttctgtttaacaagtgtagaggaaccaaagttgaaaactttgaacttcccattgattttaatgttaattactgatcattcgaatctgaaattgaagcatatgagtgcttaatctgtgagtgttagaagaagtagaagaagatgcagagggttagggtttcatctcaaagagcagttgtgcataagcttggtgattctcagatgacattatctcccaaatttagagtagctgcatcgatacaatcgacattgttcgatagatcatcggaattagaactgtctcttagaggagagcccttgattcccggtttaccagacgatgttgcgcttaactggtcctttacggggttccaattcaaagncatgtt

SEQ ID NO: 2118 - DNA, 410 bp, Arabidopsis thaliana
  unsure at all n locations
  Clone ID: LIB22-060-Q1-E1-C9
acgcgtccgcccacgcgtccgaggttttcaaggctttgctccactacatatacaaggatgctctcattgaagatgcagagtcatcatcatcttccggttcatctgttggtccatctgcctcagacacattanctgcaaagctactaggagccgctgataaatacaagttgcctagattaagtctaatgtgcgagtcagtgctctgcaaggatatatcagtagattccgttgcaaatattttggcgcttgctgaccgttacaatgcttccgccttgaaatccgtttgtctgaaattcgcagcagaaaatctcatcgctgttatgaggtcagatgggtttgattatctaagggaacactgcccgtcacttcagtctgagcttctgaaaacagttgccgggttnccaaaaagg

SEQ ID NO: 2119 - DNA, 390 bp, Arabidopsis thaliana
  unsure at all n locations
  Clone ID: LIB22-060-Q1-E1-D10
gagtattctcgcattgtctgaagggagataaaagcggtggaggtataatggttctaggtcaaatcaagaggccagataccgtctatactcctcttgttccatcacagtgagttctcaatctttctattatacatttaaactcttatcacattacgtaaagagaagcacangtagattttggggtacttaacatcatgatgaatcagacttcaatgttagggtaggattcctanatttatttttgtataagacaaggaggtagatccagggtttaactgatgattatgaaagtcatttacacagatataaatgcnagagttgttacaatatctgctanatcattctgcttgtangaatcatatgatccangaantagacattttggaccct

SEQ ID NO: 2120 - DNA, 412 bp, Arabidopsis thaliana
  unsure at all n locations
  Clone ID: LIB22-060-Q1-E1-D9
ctattgcgtcctgtaaaggcttttttggagggagataaggctagaaactacttgacccaaaaaacaaaggaggagttactgcatggcagtgtcagtgaaattaccaggcggtattatgaattagctgctgatgttgttagcgtggcaagaaaaacacagtcatcgcttcagaaattgcgtcaaaatgcacagagacgaggaggtgcagcatcaggtgtttctgatcaaaatgtatctgaaacagacaagatgtgtatgcagttgttccttgatattcaggagtatggccgaaacgtttctgctttggggctgaaaccggcggatattccggagtactgttccttctggcaatgcgttgcacctgcngataggcaaaactcaattaagtgtttgangacgctcgcttccaaac

SEQ ID NO: 2121 - DNA, 432 bp, Arabidopsis thaliana
  unsure at all n locations
  Clone ID: LIB22-060-Q1-E1-E1
acgcgtgggttctcatctttctctctaagagattttgtaggtgacaatcaaaagtttgacaaaatggtgaagtttacagctgatgagcttcgaaggattatggactacaaacacaacatccgtaatatgtctgttattgctcatgtcgaccacgggaaatccactcttactgattctttggttgctgctgctggtatcattgcccaagaggttgctggtgatgttcgtatgactgataccanagctgatgangctgaacgtggtatcacnatcaagtccactggtanttctctctactangagatgactgatgaatccttgangagtttcactggagccanaagaccgaagacccagtaccccatcaatcttaantgatcacctgggccacgtngacttttctttctgaaggttactgcnggctcccccgta

SEQ ID NO: 2122 - DNA, 415 bp, Arabidopsis thaliana
  unsure at all n locations
  Clone ID: LIB22-060-Q1-E1-E11
ctccatctcatcggagctgatctcgaattgttctccgttcatttgttacggtggagatgacatcggatcaccgcgacgctcttttctctctggaactggaatcgcctgatccggacgaaggaggtgtagcagacggaggagaatctgataccgacgaggatttgcgcgacaacgatgatgttgttatgccgggaacgaacgaagctgaagctgaagacgacgatcccgaagaggaagatctcaattctccgtctacatcatcactccccatggtttctacgatctcagcgactgctgttgtttccgggaccccgacggcgacttcctctacaggcgccgtgaccgttgcacttccggctgggatncgccgtccctgtctccgtgattcccgtttgattccgattcgaaattggga

SEQ ID NO: 2123 - DNA, 427 bp, Arabidopsis thaliana
  unsure at all n locations
  Clone ID: LIB22-060-Q1-E1-E2
aaaaaggaaccatcaaagaggaagccaagaaaaaaaaacgtcggtgatgagaggaggggctttgttatgcggacaagtccaagatgagattgaacagctttcgagagagagtagtcattttagtctttctactggaattttaccttcacttggtgcaagaagtaatcgacgagttaagcttaggagattcgttgtatctccttatgatcacaaatacaggatatgggaggctttcctagtggttcttgtggtttacacagcttgggtttcgcctttcgagtttgggttcttgagaaagccaaggccaccactatctatcancgataacattgtgaacgcattcttcgccatcgatatcatcatgacattccttggtgggtanctccgatnaatcgacgttacctccaatggttgantgaaccgttaa

SEQ ID NO: 2124 - DNA, 414 bp, Arabidopsis thaliana
  Clone ID: LIB22-060-Q1-E1-E3
tctggctctctctcttcctaagtttcctctctctttagaactgtagagagagaaaagcctccatttttctcaaggcaatctctctctctctgcctcatctcataaacccattacaccaaaacctcatcgtagagagagaaacacaccaaccattgttacactctaagagaagagaagagagaaggaaaaatggacggtgtatcaccaaagtttgtgttgccggagacattcgacggcgtgaggatggagatcacaggccaactaggcatgatctgggagcttgtaaaagcaccagtgattgtccctcttcttcaattagctgtttacatctgtttgcttatgtctgtcatgcttttatgtgagaaggtttacatgggaatcgtcatcgtcctcgtcaaactcctcctggaaaaa

SEQ ID NO: 2125 - DNA, 435 bp, Arabidopsis thaliana
  unsure at all n locations
  Clone ID: LIB22-060-Q1-E1-E6
acgcgtccgcccacgcgtccgcccacgcgccgcccacgcgtccgcccacgcgtccgctccaacataattcatcatctatggcttcttcacatcaacaacagcaagaacaagaccagtcagctttagatctcataacccaacaccttcttactgatttcccttccttagacacctttgcctccaccatccaccactgcaccacctcaactctaagccaacgcaaaccacctcttgccactatagcagttcctactactgcaccggtggttcaagagaatgatcaaaggcattacagaggcgtcaggagaagaccatggggtaagtatgcggctgagatcagagacccaaacaagaaaggtgttccgtgtcngggtaggnactttggcaaaagncatgggaagctgnaaganggtttggccaagggaagcttttaaa

SEQ ID NO: 2126 - DNA, 452 bp, Arabidopsis thaliana
  unsure at all n locations
  Clone ID: LIB22-060-Q1-E1-E9
tnccggtccagaattcacgggtcgacccacgggtccggggaggtctactccaaggggtacacctagagtgtattctggtaggactccgcgtagaggtcatggtggaggagtagcgtttcagtggtttcgtagtagccggttggtttattggctgcttttgattacgctttggacgtatcttggattttatgttcagtctaggtgggcacatgataatgaaagcaaagttgagtttttacggtttggaggcagaccgagaaaggatgagttatatatggagaagattaaaggactggatgttgttgctaatgagaattctgaggctttggttaatattactggtaaagatgatctggttcgaataagaggacggatgttagtctgatcaagaaagatgatggggtttctcgacggagcttgagttccaagcagaagacgagaaaaactgtccg

SEQ ID NO: 2127 - DNA, 411 bp, Arabidopsis thaliana
  Clone ID: LIB22-060-Q1-E1-F10
tcatcaatcatcagccaccaacaattcttcgctctctctgctctgatctctctgctcgaatttactaacgatcccttctctgcaggctcatctttatctaatttcgtttactcattatatcttctaatccgtttcgtatactatcgctattcttgttttctgtttgtttgtattttgggattttctttgtgtttagtgataatggatgcaggtttgaatcggtgcccacttcaagaacactttcttcccagaaaaaattccaaggaaaatctggacaggttcataccgaatagatcagcgatgaattttgactatgctcactttgccctcactgaagaaagaaaaggtaaggatcaatctgcaacggtaagttcaccatccaaagaggcctacaggaagcaattgggtgaa

SEQ ID NO: 2128 - DNA, 403 bp, Arabidopsis thaliana
  Clone ID: LIB22-060-Q1-E1-F3
gggttggtcttctcgattcgtatcacaacgaagcgaacgccgatgatattttgactaaaatcgaagaaggaagagatgtttccggtttaaggaagattcaggtcggagtcaccggtatgacttgtgctgcttgttctaattccgttgaagcagctttgatgaacgttaatggcgtcttcaaagcctctgttgctttgttacagaatcgagccgatgtcgtcttcgaccctaatttagtcaaggaagaggatattaaagaagctatagaggatgctggatttgaggctgagatattggctgaagaacagacacaagctactttggtgggtcaatttacaattggaggtatgacttgtgcaacttgtgttaactccgttgaaaggaatccaagaaatctcccgga

SEQ ID NO: 2129 - DNA, 424 bp, Arabidopsis thaliana
  unsure at all n locations
  Clone ID: LIB22-060-Q1-E1-F4
ttatgtattttgtctgaaaatataatcaggggaaaaaaaaaacagaacaaaaacagaggaaggctatagagattgatggacaaactgtgtctagggtgcttcatcatctttgtttgtttgtaaaactcttgtcacacacactgttatgagtcattttctgctgtgtgtgttttgttttgtggtgatgtaagttaaaaacaagcgtgattctcatgtggcccatctcaatcaatggttggtgatttgtggggtttttaggcttttctattatcttatcttttggggataagataaaagcctaaaactgtatgtaactatgtatggttcttcgaatattttatcatttatctctaatgtcaaaaaaanaaaanaaaaagggcgggccgctcaaaaggttcaagcttacgtaccgtgcatgcnactc

SEQ ID NO: 2130 - DNA, 224 bp, Arabidopsis thaliana
  Clone ID: LIB22-060-Q1-E1-F5
acgcgtccggtttacttttgctcactgtaaccctaatatacataaaacactattcgactagagataattaatcactgatctgagcatttcttgtcgaatagtgttttatgtatattagggtttacttttgctcactgtaacctgttttttctttgtttcttggtctaagaaatgattcttgaacaaatcctaatcgtaactttatgcaaaaaaaaaaaaaaagg

SEQ ID NO: 2131 - DNA, 402 bp, Arabidopsis thaliana
  unsure at all n locations
  Clone ID: LIB22-060-Q1-E1-B8
aatcctcttctatatatgatgagatgctacccaggagtaccagaacaaaagctgagaagtcacttgggttctcttggggtaactggaaatcttgcactgcagcccatgtacactttatcaggtggtcagaaaagcagagttgcatttgcgaagataacattcaagaaaccacacttgctattgcttgatgagccgtccaatcatcttgatttggatgccgtggaagctttgattcaaggacttgtcttattccaaggcggtatttgcatggtgagtcacgacgagcatctgatatcgggaagcgtggacgagttttgggttgtgtcagacgggcaggattgcaccattccatggaacttccatgactanaagaaagctttctccagtcctccaactaagccg

SEQ ID NO: 2132 - DNA, 450 bp, Arabidopsis thaliana
  unsure at all n locations
  Clone ID: LIB22-060-Q1-E1-F6
acgcgtccggctatcacggnnganctggaanacatggcagaggataatacatcatctanagcgggaaacttggttgtaccaaatttgtcttcagaggtgagtgacgtgacatcgtcctctggaccggttaagctggcagacctgcaaagaattctgaacaacctctctggtggccctgtaggtattgctggagatcaagacgaaggtttagcattaggggatatcttgaaaccggagttgataatgccattgcttgaggcgttgccggtacaagaacgactatcttcgcatttacctgagggtcattctagggcaanaagatatactgggagttgttgcangagccctccttttcgtcaacaagtagatgcatttacctaatgttctccgcacaagaacnaatnnantttgactcaattttgggtanagaacccaagttaatccaanttc

SEQ ID NO: 2133 - DNA, 517 bp, Arabidopsis thaliana
  unsure at all n locations
  Clone ID: LIB22-059-Q1-E1-H3
ccccgggtccgggaataccggggtcgacccacgccgtccgcgaaaaaccctagaatcccaaaatagaatccctaaaagagaaagaaagcaaaaatggaggacacgaagccaccattgggaggtaacaacaatcctnnnnnnnnnnnnnnnnnnnnnnnnnnnnnnnnnnnnnnnnnnnnnnnnnnnnnnnnnnnnnnnnnnnnnnatgcttctattgcagcaattgcaaaaacaacaacagcaacaagcagcaatgtctagattcccgtcgaacatcgacgtgcatctccggccaccggggttgattcagaaccgacccattaatcctccgcctcagcagaatcctacccctaaccctaatttgggacagcaagacaccgaattttcannnnnnnnnnnnnnnnnnnnnnnnnnnnnnnnnnnnnnnnnnnnnnnnnnnnnnnnnnnnnnnnnnnnnnnnnattgatgagccattgaatcacatcgagcttcagtgcgcctatcagggacgcttggn

SEQ ID NO: 2134 - DNA, 504 bp, Arabidopsis thaliana
  unsure at all n locations
  Clone ID: LIB22-059-Q1-E1-H4
tccgggaattccggggccgaccnacgcgtcngtgcagaagcaacttggncgaaatgggtctatattgttggttttagatgatgtttgggctgangaagagtccttgctacaaaagtttctgattcagctacctgattacaagattttggtgacttctcggtttgagttcacaagttttggtcccacttttcatttgaaacccttgatagatgacgaggtcgaatgcagagatgagatagaagaaaatgaanagcttccagaggtgaatcctcctcttagcatgtgtggtggttgcaactctgcggttaaacatgaagaatctgtgaatattttgggtgttctttggcatcctggatgcttctgctgtcgttcttgtgacaaaccaattgctattcatgagctcgagaaccatgtttcaaactcaagaaggcaannttcacaaatcctgctatgaaccggtactgctangtctgcaaaagagannaagattgaaaacgttcanta

SEQ ID NO: 2135 - DNA, 475 bp, Arabidopsis thaliana
  unsure at all n locations
  Clone ID: LIB22-059-Q1-E1-H5
acgcgtccgcaactctgatccttctctcaaatgggttgtctgatttctcctgtaatgaaactccgtcgtctctcctcagccgactcgcggcgatttgcataccggaatctcgccgagaatatggaagatccagtcataagggtggtggtagggaaggagaagaaggagttcatggtcgaaccgtatgtactcgaagagtacccgttcagagtcttgataggttcagctaaggatcgtgccaagaaccggttaaaccggaccggtagagtggtgtggcttgatcatgtcgactcgatcttatttgagcacttgctgtggcttcttcggaacgatgcctctacgttttcggatttggatgttctcgagatcattgaattctatgctcaagattgttagggaaagaaatggattaacaagtgtgcttttacagttttacnttcagtgangatatgatcattcaagaaaacgttttact

SEQ ID NO: 2136 - DNA, 456 bp, Arabidopsis thaliana
  unsure at all n locations
  Clone ID: LIB22-059-Q1-E1-H6
acgcgtccgttcttttccgaggtttcaaattcgttcaatttctcgattgaagatacctgaaatcgcgttattctaggtccgccgctgttggatctgcaaattccccttcgaatttgaacatttgtgatttcaaattcttcgagaagatgagcgcgaaaaagcttgaaggttcgtcggctccggcgaatcgacgggatccgtacgaggtcctttgtgtatcaaaggacgctaatgatcaagaaatcaaatccgcttacagaaaattagctctcaagtatcatccggataagaatgcgaacaatcctgatgcttctgagcttttcaaggaagttgcattttcgtatagcattttgtctgatcctgaaaagagaaggcactatgacaatgcangatttgaggcactcgatgctgatggaatggatatggaaattgacttgtcaaacntcgggaccgtaa

SEQ ID NO: 2137 - DNA, 479 bp, Arabidopsis thaliana
  unsure at all n locations
  Clone ID: LIB22-059-Q1-E1-H7
acgcgtccgcgccttgttcgatctcatcatgaggttgctttcaaagagattcaaaacctcattgcatcagaccaacacacaaacatcattcggtggtatggtgtggagtatgatcaagattttgtatacctttctctagagcgttgcacctgcagtttagatgatctaatcaaatcctatttagagttttctatgacaaaagtattggaaaacaacgattctactgaaggagtggctgcttataagatccaacttgattctttggagggagttatcaaaggaaacaacttttggaaagtggggggtcacccgtcacctctcatgcttaaactaatgagggatatagtttgtggaatcgtccacttacacgaattgggaatagttcatcgggacntgaagccacagnatgtgtnaattagtaaagatatgactttgagtgcaannactgtccgnnatgggcatttagcnagcgtatgtcc

SEQ ID NO: 2138 - DNA, 498 bp, Arabidopsis thaliana
  unsure at all n locations
  Clone ID: LIB22-059-Q1-E1-H8
attcccgggtcgacccacgcgtccgcggacgcgtgggcgtggaagagccaaagcggcgagagaagaaacacgaggcggcggatttgccacgtgttgagctgacggcgattgacttgcaatggatgcatgtattaagcgaaggctgggcaagtccactcggaggtttcatgagagaatccgagttcctccaaactcttcattttaactcgctacgtcttgacgacggctccgtcgttaacatgtccgtgcctattgttctcgctattgacgatgaacaaaaagcacgtatcggcgagtctacacgtgtcgctcttttcaattccgatggtaaccccgtcgctatcctcagcgatattgagatttataagcatccaaaggaagaaaggatagctagaacatggggtacgacggctccaggtttgccttacgttagacganggcgatanctaatgctggaaactgggctcaattgggggtgattcttgagggtccttgagc

SEQ ID NO: 2139 - DNA, 460 bp, Arabidopsis thaliana
  Clone ID: LIB22-059-Q1-E1-H9
acgcgtccgcatgaattaagccaaaccaacaaaaaaaatcatttaattttcgcggagagatggagaaattctcgtacaactcttatccagattcaaccgactcgtcaccgagatctcgtgagatcgaattcgataacccgccgcctccatgggatgatcagaaccagaaccagcagcaacatagctacaaggtgaagtttatgtgcagctatggcggcaagattcagccacggcctcacgataatcagctcacttacgtaaacggagaaacgaagattctttccgttgatcgcgggattagattccctgttttaagcttccaaactctccaccgtatgcggcggcggtgatggcggcggaggagaagttacgtttaagtatcagcttccgggagaagacttagacgctttgatctcggttacgaacgatgatgatctgggagcatatgatgcacgaagta

SEQ ID NO: 2140 - DNA, 462 bp, Arabidopsis thaliana
  unsure at all n locations
  Clone ID: LIB22-060-Q1-E1-A12
tgtttacgcttgccggtgccggtccaaaattaacgggtcgacgcacgcgtccgcatgctctatggccctcctggttctgggaagacacttattgcccgtgctgttgctaatgagactggtgnnnnnnnnnnnnnnnnnnnnnnnnnnnnnnnnnnnnnnnnnnnnnnnnnnnnnnnnnnnnnnnnnnnnnnnnnnnnnnnnnnnnnnnnnnnnnnnnnnnnnnnnnnnnnnnnnnnnnnnnnnnnnnnnnnnnnnnnnnnnnnnnnnnnnnnnnnnnnnnnnnnnnnnnnnnnnnnnnnnnnnnnnnnnnnnnctcttgacacttatggatggtcttaaatccaagagcccatgtgattgttatgggaagctaccaaaccgtcccaacagcattgaccctgctttgagaagatttggacgttttggataggagaaattgatattgggtgttccnggatgaaa

SEQ ID NO: 2141 - DNA, 450 bp, Arabidopsis thaliana
  unsure at all n locations
  Clone ID: LIB22-060-Q1-E1-A2
acgcgtccgatcaaaaccgcctccatttctcattcnctctctctctaaaaaaccaaatccatgagtcagagaaaatctgtgatggctctttccaacgcctcctctctctccaccagatctatctacggcggtgatctttctcaccgtccaagcaaccgtcaatcatccttcacatttcatcccgccgtcaacaccaagcctaaatccgttaacctcgtcacggctgtacacgcggctgagccagctanaaacgctgtttcagtcaaagaatccgttgcgtcttcttcgtctggtgcattgaaatggactccagagagctggaaactgaagaaggctctgcaacttcctgattatcctaacgccaatnagcttgagtctgtgcttaaaangnatagagggnntttcctccggaatgtgntcgcccgggaaaaagccnagggatccctggag

SEQ ID NO: 2142 - DNA, 443 bp, Arabidopsis thaliana
  unsure at all n locations
  Clone ID: LIB22-060-Q1-E1-A8
acgcgtccgatttttttctctgatcttcgagttctgataattgctcttttttctctggctttgttatcgataatttctctggattttctttctggggtgaatttttgcgcagagatgggttcggcgaacaacgagtacgagtttctgagtgagattgggctgacttctcacaacttgggatcttacgttgctggcaaatggcaagccaacggacctcttgtttcaactctcaatcctgctaacaatcagccaattgctcaagttgtggaagcttctctagaggattacgagcaaggtttgaaagcttgcgaggaagcagctaaaatatggatgcaggttacggctcctaaagagangtgatatcgtcagacaagattgggggaatgcactaagattcaaacctgacnaccttgggcgtcntccttccccttgaaaatggaaaa

SEQ ID NO: 2143 - DNA, 410 bp, Arabidopsis thaliana
  unsure at all n locations
  Clone ID: LIB22-060-Q1-E1-A9
tcattgttatggatggaaatggaactttgtttggtactttgagtgggaatacaagagaggttcttcataagttcactgtcgatcttccgaaaaagcacggaagaggaggacaatctgcgttgcgatttgctcgtcttaggatggagaagagacataactatgtgaggaaaaccgcggagcttgccactcagttttacattaatccagctacgagtcagcctaatgtctctggtcttatacttgctggttcagcggattttaagaccgagctaagtcaatcagaactgtttgatcctcgtcttcaagctaagatattgaatgtggttgatgtttcttacggaggagagaatggntcaaccaagcaatttganctgtcngctgaagattcctatcgaatgtnaaagttcaga

SEQ ID NO: 2144 - DNA, 434 bp, Arabidopsis thaliana
  unsure at all n locations
  Clone ID: LIB22-060-Q1-E1-B4
acgcgtccgggaagattcgttgtgttgtgaattttagtgggcaccttcaaattttcgattttttttttattttccttgtctcttacctgatttggtgatttattattacatcaaccactcgattcgttagatttccggatttgaaaaagagtcaccaacttgtacggattctcgttttggggatcgagtattgctgatttgtgattttgttgtttttgggtactttccctttgtggattcggatctggttggtggctttgtcaaatgggcgcattagatganggatgtttgaatctgggagctcgacattgggaatgaaaaatggctgcaattgaancttgcnttccagcaccaaacctgaanactttagcaatccaaagacgctgtcaaacttccccttgcaaaggtcctcaatgaaanatgtcaatccggga

SEQ ID NO: 2145 - DNA, 469 bp, Arabidopsis thaliana
  unsure at all n locations
  Clone ID: LIB22-060-Q1-E1-B7
nggtaccgagtccaagaattcccgggcnaggttaacatatgatgaccaattggtttccgaacactgattccaggcttcttagtatacagtgttgtggttgtgaagaacagtaacttcagattttgcgtttagactatgaaaatggatttgtatatcttatgttgtgctagttcctagctgttagagctggaattgatctctggatacttagacatgttgttacatgagtggtggtgcgacattgatactgtttttgttgcaggagagagtgagagattcttgcagaaagcaatacaagaacaaggaagaggaagggtgttagacaccattaacgagattcaagaaaggcatgatgcggttaaagacattgagaagaatctcagggagcttcaccaggtgtttctagacatggccgtgctggtagagcancagggagctcagcttgatgacatcgaanagtcatgtgggg

SEQ ID NO: 2146 - DNA, 461 bp, Arabidopsis thaliana
  unsure at all n locations
  Clone ID: LIB22-059-Q1-E1-H11
acgcgtccgcgttgataataatagaacactttctttctctctctaaaaagcaanagtagtctantcactgatttcttctaatcctccggtggagtgagaagatgatatctccgacgttgtttcctcncctctgcgctttatttctatgtcttccagtggctgttatcttcacagtccagcgagaactcacctgcgttatctcgccggagtttggtttccgctctctttccgtcttctctctttactctcgaaatgtccccgactcttcttcttcttctccggcggttcggattcgacagncgattcccaaagaagacgaccctcttcttcnagntatcttctcggggttaacccgaatctacctccnggttcgacncgggaaaatactttnatggtanttaacgacgtcgcctcttccgttcgcgcgtctttggganatgnttcttcgacggggatctcca

SEQ ID NO: 2147 - DNA, 518 bp, Arabidopsis thaliana
  unsure at all n locations
  Clone ID: LIB22-058-Q1-E1-G7
tttacgccngcccggtaacggtccgaatattcccgggtcgacccacgcgtccgcgaaaacctagcagtcgtctctttctcagttctccatgggaaagtctaaatccgccaccaaagttgttgcagagattaaggccactaagcctttgaagaaaggcaagagagagcctgaagatgatattgacaccaaagtgagtcttaagaagcagaagaaagacgtgattgctgctgtccagaaggaaaaagctgtgaagaaggttcctaagaaggttgagagctctgatgattcagattctgaatctgaggaagaggagaaggctaagaaagtcccagccaagaaggctgcttcaagcagtgatgagtcatctgatgactcttcttcagatgatgaacctgcacccaagaaggccgttgctgctactaacggaactgttgcaaagaagtctaaggatgactcatcatcatctgatgatgattcttcagacgaggaagttgctgtcaccaagaagcccgcagctg

SEQ ID NO: 2148 - DNA, 399 bp, Arabidopsis thaliana
  unsure at all n locations
  Clone ID: LIB22-058-Q1-E1-G9
ttacggtggctacaacgagatggctgatatactcgtcaacttaacctctttagccactganatgggtcgactcgtgtcanaaggctacgttttaaccgttcttgctcctaacgacgaagccatggctaagctcacaacggaccagcttagcgagccaggtgctcctgaacaaattatgtattaccacatcataccggagtancaaacagaggagagtatgtanaacgctgttcggagattcggaaaagtgaagtatgattcattganattcccacataaagtgttggctcaagaagctgatggatctgtcnnattcgggacagcngtgatgggttcanncttacttgnttgattctganatctanagnngacnggtccgggatttcagttcaagggtan

SEQ ID NO: 2149 - DNA, 517 bp, Arabidopsis thaliana
  unsure at all n locations
  Clone ID: LIB22-058-Q1-E1-H3
gcctgtcggtaggcctccgaaattcccaaggtcgacccacgcntccggtttggttagatgttgtgcatctgagttagaaaaaagtcttttaaggaagtgagagaaaacatgtcttctcttagtagagagctcgttttcttgatcttacagtttctcgatgaagagaagtttaaagagactgttcacaagcttgaacaagaatctgggtttttcttcaatatgaagtattttgaggatgaggttcacaatggaaattgggatgaggttgagaagtatctctctggtttcactaaagtagatgataatagatactctatgaagatattcttcgangataagaaagcagaagtatctcgaggctttggataagcatgatcgtcccaaggctgtggatatactagtgaaggatttgaaagtgttttcaacttttaatgaggagcttttcaaggaaataaacacagctcttgacattggagaacttccgggagaatgaacagttttccangtaagggggaca

SEQ ID NO: 2150 - DNA, 497 bp, Arabidopsis thaliana
  unsure at all n locations
  Clone ID: LIB22-058-Q1-E1-H5
gtccgaatattcccgggtcgacccacgcgtccgaaanaattctcttaaaagagctaagaaaatgcattcctctttgataaaattgggatttcttcttcttcttattcaggtatcattgtctcatgctcaactaagcccttccttttacgataaaacatgtccgcaagtctttgacattgcaaccactaccattgtcaatgctctaagatcggaccctcgcatcgctgcaagcatccttcgtcttcatttccacgactgctttgttaatggatgtgatgcatcgatattgttagacaacaccacatcgtttaggacggagaaagatgcgtttgggaacgctaattccgctcgaggtttcgatgtgatcgacaaaatgaaggctgccgtggagaaagcatgtcctaaaactgtttcatgtgctgatttgctcgccatcgcggctcaagaatctgtcgttttggcgggaggtccttcatggaggggttccaaatggaaag

SEQ ID NO: 2151 - DNA, 452 bp, Arabidopsis thaliana
  unsure at all n locations
  Clone ID: LIB22-058-Q1-E1-H7
acgcgtccgcccacgcgtccgaaaaacccctaactttgacatggaaggagagattcaagactgggaaatacttcagagctcgagatctaccacggaagatgacaattcgaggagcttggaggagattgatgatggcacgcaaggtatgattaggtttgatcatttctctcttgagaaccagagtggtttgtctcgtttggaggcaaacgatgaagatgggtctgttcaatcgggtagtccangatggatcgaacctagctccgatgttccttanggtccgaagcattttagtgagttatggtctgattcaagcantgatcggcttgatgatnagaggttagtggatgatgatggtgaataacgaggatgggtatagagagaancgaagtgggtattgttngaatanagtgaagngtatatctcaggacatggatttgatgagcnctgaggag

SEQ ID NO: 2152 - DNA, 421 bp, Arabidopsis thaliana
  unsure at all n locations
  Clone ID: LIB22-058-Q1-E1-H9
aagtttcgtctttggcaactgactgaatacagtaagatcatcttcatcgatgcagacatgcttatcctgagaaacattgatttcctcttcgagttccctgagatatcagcaactggaaacaatgctacgctcttcaactctggtctaatggtggttgagccatctaattcaacattccagttactaatggataacattaatgaagttgtgtcttacaacggaggagaccaaggttaccttaacgangatattcacatggtggcatcggattccaaaacacatgaatttcttgaagcatttctgggaaggagacgaacctgagattaaaaanatgaagacgaagtctatttggagctgattctccgatcctatacgttcttcattacctangttataacaaaccctggttatgcctcagnag

SEQ ID NO: 2153 - DNA, 504 bp, Arabidopsis thaliana
  unsure at all n locations
  Clone ID: LIB22-059-Q1-E1-A10
aantgtttccctggccgtancggtccggaaattcccggggtcgacccacgcgtccgcccacgcgtccgcccacgcgtccgtccttctcgaccacttctctatcaccaaagactctcctcaagggaaagccataaaggagactttgggacattgtgatgctaaagctattgaaggagagcataagttttgtggaacttctttggagtcattgatcgatcttgtgaagaaaacaatggggtataatgttgacctcaaggtcatgacgactaaagtaatggtaccggcccaaaattcgataagctacgctttgcataactacacattcgtcgaggctccaaaggaacttgttgggattaagatgttgggatgtcacagaatgccttacccttatgctgtttactattgccatggacataaaggtggaagtagagtctttgaagttaatttggtgacggatgatgggagacaacgggtagtaggacccgctgtctgccacatggacac

SEQ ID NO: 2154 - DNA, 521 bp, Arabidopsis thaliana
  unsure at all n locations
  Clone ID: LIB22-059-Q1-E1-A2
ggtttcctgcgcccacggtccggaatcccgggtcgacccacgcgtccgcccacgcgtccgacttttggannnnnnnnnnnnnnnnnnnnnnnnnnnnnnnnnnnnnnnnnnnnnnnnnnnnnnnnnnnnnnnnnnnnagacactaagattcaagtcctctctttggtcggagaagatgcaggtagtctcgagcttcgattttcagtcttcgccgttctcacacggcgccggagagattctcatttctccggtagaccaccgagagttatcctcacacggtgacgcgcttgaaggcgcgtgtgatgactcgactagattggcggcggtgaaagtacagaaggtctacaggagttatcgtacgcggcgtagattagcagactctgtcgttgtcgccgaagagctctggtggcaagcgatggattatgcgangcttaatcatagtacgatttcgtttttcgattactcgagacctgaaactgctgtttccaaaatgggaaccgtgttaancttgaatgcttcca

SEQ ID NO: 2155 - DNA, 517 bp, Arabidopsis thaliana
  unsure at all n locations
  Clone ID: LIB22-059-Q1-E1-A3
nttccctgcccctaccggtccaatactcgggncnnccanggcgtctgccnangcgtcngcggacgcgtggggggagaattaccacaggatgaaggcgatctcagacatccatgatttgcctcttttgtcttctttaccttattcgtctctcantctttgaatcncctttccctttctctcaatcttcctcacttacatttcttatctcactccctctctcactttctccttcaatgttctctcctctgcgttttcacgaaacagagaaccttatcgttccgtcttcgtagacattgaaatcgatagagaggtgttgatttgattaggtttaatattgattcggatgaanggaagagatggttactaatanctacatggatacgcgatcaaatttgacaagtgtgaatcgaggatccaatgtggatctcgaagatcgattccagaagggagctcgaatctttgctccaacaacatcgtaatcagcaatcatttggccgagaacgagaacgagacattg

SEQ ID NO: 2156 - DNA, 505 bp, Arabidopsis thaliana
  unsure at all n locations
  Clone ID: LIB22-059-Q1-E1-A5
ctacggtccanaatcccgggtcgacccacgcgtccgcccacgcgtccgatctgcagatcacttatacacagccatttgtggaatcataccaaacatttctagcccaggttgcaggatatttcattgtggaggatcgggtgattaggacagctggagatttcttgttggctgatcaagttgagacaatgtgggaaacagccatttccaaaattgtagccatattggagaaccaatttgccagaatggattcgcctactcatctgcttttggtgaaagattatgtaactctccttggcacaacccttagacagtacggttatgaagtgggtccagttcttgatgcccttgacaagagccgagataaataccacgagcttcttcttgaagagtgtcgaaagcaaattgtgactgctattacagaggacacttatcagcagatggtaatcaagaaggaagctgactatgaaaacaatgtcntgtcgtttaaccttcagacctcagacat

SEQ ID NO: 2157 - DNA, 503 bp, Arabidopsis thaliana
  unsure at all n locations
  Clone ID: LIB22-059-Q1-E1-A7
taccggtccgnaatcccgggtcgacccacgcgtccgcccacgcgtccgtgcattttttcctcttctaagctcgtttcagatcttcgatttcaccatttttataaactattatgcgaacttagttttgttctttgtgattttgtatgacaatgatcttcttctctaagcttaatcgctccatttctcgttcaaagggatttttgtacggtggtggtgttagatcggcggcaaggctacttacttcgccgggacttgaggcggcgtctgtgaatgaagtggaaggtggattagggtttataagaagacactttgcttctttagcttcacggaagggtttagtcaataatgatttgattggtgtttttgctaatccaagacttcgtagattcttctctgatgaagctcctaagaagaagaattatgagaactattttcctaaagataagcaagaacccaagagtgatcagaaatcagagcataaagaggggttcagaaaagaatga

SEQ ID NO: 2158 - DNA, 518 bp, Arabidopsis thaliana
  unsure at all n locations
  Clone ID: LIB22-059-Q1-E1-B1
nttttctggggcctcccggtccggaaaaanccgggtcgacccacgcgtccgcggacgcgtgggtttcgtcgtctcctccattgcaaaatctagctcgatctgtgaaggtttctctgagttcttcaaaaatctcttctagagaaagacttcattagctcaattttagcaacttcctccacctccttttactcacactgtgcttcgatttcaacttcgcatttcacaatgatccccaacggagaattgagattacctgctctcaaggtccgtgaagaccgcgtgtcaccctcagctcctattccggtcaccagaaccctagtggctgatactgacgtcacttccgatgacgatatgagtacaaattccgaggatgtctctctcgattcgtctcccgagaacagtagagtgtccagtgccgttggtcgcagctacgggagaaattcttcttattatacttactccgaggtgaagctcatcaagagagactttggtcggtgcgcgcgaacangacgggaact

SEQ ID NO: 2159 - DNA, 524 bp, Arabidopsis thaliana
  unsure at all n locations
  Clone ID: LIB22-058-Q1-E1-G3
ttncgcctgtncggtaggcctccgaanattcccanggtcgacccacgcntccggaaagatcaaatctttgacgacatcaaggaggaggatttggtaagctacagataaaaacaaaagctatgatatgagataatgtagtccaccaccacaccaaattcccccttcaccgtctctcttcgtcggtgattcacattccgatttggtgtctttttttactcttaacaagtcctcaaaaaccctacttttactcgagattttgtctccgccgccgagtaccaagtgcctcccgatctacgccccaatccctaaatggctacggaggctacaaccgtacccaaattccaggaacctgatctccggcaggtttctcagacaccggatttcaaaccggaaatcgctcacgatggtcttaagttctgggcaatttatgattgctggttcnattgctggctccgtccaacacatggcgatgtttcccgtcgataccaancnggaaccatntgnaaagcgcctcgancaagttc

SEQ ID NO: 2160 - DNA, 505 bp, Arabidopsis thaliana
  unsure at all n locations
  Clone ID: LIB22-058-Q1-E1-C4
cgcctgtcggtaggcgtccgnaattcccaaggtcgacccacgcgtccgcaaaaaaaaagcaaaatcgcaagagagaccttaaacgacatcgttttcagatgaggagacaccaccaccgatgccaaatcggctccgatagcgaaaccggatccgaatccgattccgataccgacacgccgatgcgatgcatctcttgtcgagaagagtacctccctcgcaacgccgggacctgcaaggaatgctacgtcgaagccggcgaaactgaagaagaactcaaacgcgagatcgatgacctcaaagctaaagttgctttccttcgcttatcttcttctcttgatcatggaactagttcaacctctagatccttcactgatgttgttctcatcgcctctgaagataacgccggatctcctcctattcccgctcataaatccgttctggtgagtcgttctccagttttcaaaagcaatgcttgagaatgaaatggaagagagtctaancggca

SEQ ID NO: 2161 - DNA, 471 bp, Arabidopsis thaliana
  unsure at all n locations
  Clone ID: LIB22-058-Q1-E1-C6
acgcgtccgacagttctttgttacaattttttttcctcaaattgtttttgaaagggttttattatgcggttaaacatcaacaaaatctctgttcttttatatatatatgaacaaaaagagatttaagaaaaaaaaatagatgataccttaagcaatactatttaattgaagtatgtttagttattcatattaaggatcttgttttcaattatggtgaattttgagttaattgaaatgatatttgtgaataactttaatgaagaatcttgtttttattttggtgaaatatgacagtaagttggaatgagaagagaagtttttgagtcggtgagcaccaatgcttctaatgaaagggttcacgtggctcccaaaatagcggcagaggaacaagattatgaggagaaaggaatgcactgaggagaattctctctctcagaatcataaatcntctaatgtaatcacagagaatga

SEQ ID NO: 2162 - DNA, 489 bp, Arabidopsis thaliana
  unsure at all n locations
  Clone ID: LIB22-058-Q1-E1-C7
ttcccgggtcgacccacgcgnnnnnnnnnnnnnnnnnnnnnnnnnnnnnnnnnnnnnnnnnnnnnnnnnnnnnnnnnnnnnnncagcacctccgtcttctgattctatctacgaatcattcgttcaatgtttctccgacaagacaaaatctccacaagcccaaatcaccgacaatgtcttctctcggacaaacccttctttctcctccgtccttcgtgcttacattcgaaatggcaggttcaacacttcatctacgccaaaaccagctatcatcgtcactcctcgctccgatatccacgtcaagcgccgccgtcacttgctcaaaaagtttaaatttccttctcaanatccgaagtggtggccatgattacgaaggtctctcttacatctctgataaacattttttatactcgacatgtcgaatctccgntgatgtcnctgttgataancgccgatcantcagcttgggatgtccggccggagcaactc

SEQ ID NO: 2163 - DNA, 496 bp, Arabidopsis thaliana
  unsure at all n locations
  Clone ID: LIB22-058-Q1-E1-D1
ctgtccgtacgcntccgaaattcccaggtcgacccacgcgtccgattcaggaaaaagatttcatctttgagtttttcattcatctatcggttgtttccattctcaggtttcagtcgaaaattccctctctttcttttcgatttgatctgggtttcattgtacatagctcgatcttcaagtttcgtcatctgggtcttgtaaagttttagacttttagggttgttttacntgtgaaggtttctctcttttctaagggattctctgggtaattgatcgattagggtttaagattttagcggtgngggaaaagctgtttggntcganaattctatcntgattaacgtcacttgcanctttcgcacaagttttgggaattgtactacgttttgantgannancatagagtngggaagtgagttggggagtttccctgaactgggctnatcaanggngggnngctaagtcgggcngtancccttggtggggtcancgacct

SEQ ID NO: 2164 - DNA, 512 bp, Arabidopsis thaliana
  unsure at all n locations
  Clone ID: LIB22-058-Q1-E1-D3
nccgtcagtaggctccgaaattcccaggtcgacccacgcgtccgcatgacgactcggagatctctaggctatggctacgttaactatgcaactcctcaagatgcttccagggcactgaatgagctgaatttcatggctcttaatggaagggctataanagttatgtattctgttcgtgatccaagtctccgtaagagcggngttggtantatatttattaagaatcttgacnaatcaaatgatcacaaagcacttcacgagacattttcagcctttggtcccattctatcttgcaaagtggccgttgatccctctggtcagtcgaaaggctatgggtttgtgcaagtacgacactgatgaagcagctcagggagccattgataaactgaatggnatgcttcttaacgataagcaagtttatgttgggaccctttgttcacaagctgcagagagatccttcgggtganaaagttaagttcactaatgtttangtcaaaaatctctccgagtcc

SEQ ID NO: 2165 - DNA, 474 bp, Arabidopsis thaliana
  unsure at all n locations
  Clone ID: LIB22-058-Q1-E1-D7
acgcgtccgaaataaaaaaggtctaaactttactcttacatgcgccattgaactaacagggctaatggctgcagctcctttactgctccaactacgatttccacagttgcagagatattacatccttcgaattcaagttttgggtattgatcgtgagaattcaaggaacatcttttcttcggtcagtatgtggcactctaagttagtgttcgtctctcggatcaaattttcgaattactcttgcttagtttctctgattacttgtgtagatgtgattacccaataagctgaaaacaaaaggcgtgattttgtgattactctggcgtaataatgcctcaagtatgggtcaacgggtcaacactgcgagttcacggcggcgtcttacttctcgtggccgacttcaagcaggctaagcancgccgcggaggganagagctnaactaagttcncaaacttgcagaaagaggaggatga

SEQ ID NO: 2166 - DNA, 412 bp, Arabidopsis thaliana
  unsure at all n locations
  Clone ID: LIB22-058-Q1-E1-E11
ttatttttttcccctaccaaattttcttcgaatttcagctcagatcccttccttcttccagatcgatcttcagatctattgttttttaagaatgggtttcaagcgaacgtttgacgctgaagatgttcaagagctcaacgttaagaatggaagacagattagttactgtaataagctggccaaactagatgaaggagttccatatcgtctttcactggagaagccaggtgtcgtangtaataataacaccttgtttcttgcagaggggttcacatgataaacttaagcagttcgcttaatgattatctgtctttatcatttagcaggatatgatataagtgatctctacgggtataaatgtgaggataacgttgacaangggtttgaagaccaatgcgcctttccccttggn

SEQ ID NO: 2167 - DNA, 495 bp, Arabidopsis thaliana
  unsure at all n locations
  Clone ID: LIB22-058-Q1-E1-F4
tccgnaaattcccaggtcgacccacgcgtccgatttctttcctttgccatatttataaaataaaaganagaggaaagaattttcaataattttcaacaagcaaagttcatgatggggaataagcgaaatctcggatttgtgatcttcttctgggctctggtggttgcagtagtagccacggccatcgagcatcgtcgcaatgagaggactaaaggcgtcaatggtcttgacaagatcatcatccgcgaccgtcgtggccgatctgctgaggtttacttgtatggaggtcaagtcagttcttggaaaaatgagaatggagaggagttacttgttatgagtancaaggctatattccagcctccaacaccgattcgtggaggaattccagtattgtttccgcaatacagtaacaccggtccacttccctcacatggatttgtaagacagaggttctgggaagttgagactanaccacctcctttgccatcacttnct

SEQ ID NO: 2168 - DNA, 507 bp, Arabidopsis thaliana
  unsure at all n locations
  Clone ID: LIB22-058-Q1-E1-F8
gaantgttacgcctgccggtaacggtccgaanattcccgggctctctctttcacttgcantgtgtcgctttgctgccttcattctcatttcacacgaagattaaaaaaagttggtctctttcctaatttagaanagtgataaaccaatcccagatccgagtctctctccccatctccttctttctctcttttgaataacacactgcggttttttgcctttgagatctgtcattgtctcttccanatctagaacctttacttgggttgtaacagattcaaatatctgtaactagtgagaaatcatcaatttttaaagctgaaggtcttcanttactagtctgcatcctttaactcggaacgttgggtctccgtttggctttatctcaaataagaaggcaatgaaaggaagatnaagatggacggcanaagaagcgggtgattgctttggtttgccgttgcagcggtagttcgtgntntcgtanatctgttcnacgggctcttctgatc

SEQ ID NO: 2169 - DNA, 526 bp, Arabidopsis thaliana
  unsure at all n locations
  Clone ID: LIB22-058-Q1-E1-G1
acgcctgtctgtaggcntccgaaattcccaggtcgacccacgcntccggagagattcanctgcgttgggcaaaatcccagacgaagatcagtgattaagtcttttgataacttgagccatggcaactggtaaaactgtgaaagacgtctcgcctcatgacttcgtcaaggcttatgcttctcatctcaagcgatctggcaagatcgagcttcccacatggacagacattgtgaagaccggaaagttgaaggagcttgcaccatatgatcctgattggtactacatcagagctgcatctatggcaaggaaggtttacctgaggggaggacttggtgttggtgctttccgtagaatctaatggtgggnagcaagaggaacngtagtcgcccacctcacntttgcaaaagcagtgggtggnattgcccgtcacatcctccaacaagctgggagacagtgaacattngttganctcgacaacaaaaggaggaaagaaggatcacttccanttggccaaangggaatttgg

SEQ ID NO: 2170 - DNA, 396 bp, Arabidopsis thaliana
  unsure at all n locations
  Clone ID: LIB22-058-Q1-E1-G11
gaaataaaaagagagagaatgttagagagacaaactctgagagacaaaacaagagaaaatcgctcgtcgtcggtattcaagcgtctgtgactccgataaagcctangactagcgaggacggcgagagagagagagagagagctttggagttgtcgtatctctaaatcggaggcaatttgagtgagataaagacaaaggaaggaatcaagtggactaccgaagcgagttttgagctttttcanagacggatttggagatttcttgttgatatcgtctgcntagaggcttatttggtaccanatganacagatctgangcttcggaaggtatgggcganttcggaggtttcaatgaaaggtaatccgtgggaggagataacttctcctcctctngggt

SEQ ID NO: 2171 - DNA, 428 bp, Arabidopsis thaliana
  unsure at all n locations
  Clone ID: LIB22-058-Q1-E1-G12
acgcgtccgcccacgcgtccgaattgtctcacccgagcttcctctccagctagggtttgtttgtttgattgaagaaagaaaacaagaatggtgtatttcaatttcaataggattaanacgaagaagactctaattggatttggattgggacagatcctctcgcttctctcgacttctcttagctttacatcgtctgagatcgctaggaaaagattttagcttttttttttttcaaaccatcccatttttaaanattctcatgaacntacaaaatttgaaatctttannagggantaatgctccaacatcacaagtcgtttctgggttatgtgtgactggcantngtctaggcgantatgagaatggancantgagngtttcangtannnaatntttctaagcgagtgccaaganatttgtaaagccag

SEQ ID NO: 2172 - DNA, 463 bp, Arabidopsis thaliana
  unsure at all n locations
  Clone ID: LIB22-058-Q1-E1-G2
cacgcntccgcaaatactgaaaataaaaagaatgaagagagaaatctacggtggtgggtgattcgccggagttcaatttcgtagctagatttctcctccttttccccccgacgagctgtgcgagagagggaggggaatcatgcagaaacggnnaacggtgaaggaatctacgaagataagaaatggtaaaggtatggattccggcgaaaagaacagatctgagaagagattgatgaagttcgaggagttacctaggtatttgaaagataacgagttcatacacaatcattatcgatgtgagtggncaatcanagaaactttcctcagcgctttctcatggcacantgagactctcaacatctggacgcatttgtgtgggatttgcgatatttacttggntgatnnnntgtgaagttcaatggagacgacaggcgccttggcctccccggctttgttaaccttn

SEQ ID NO: 2173 - DNA, 511 bp, Arabidopsis thaliana
  unsure at all n locations
  Clone ID: LIB22-058-Q1-E1-C3
tacgccgtccgaaattcccnaggtcgacccacgcgtccgcagagattgcctcaggcgttgactacgcttgtaagtcaatatccaagaggaagttgatctctaaagaagatgttgaggatgttagaagggagattcagataatgcatcatttagctggtcacggtagtatcgtgacgattaaaggagcttatgaggactctttgtatgttcacattgttatggagctttgtgctggaggtgaattgtttgataggattattcagagaggacattatagtgagaggaaagctgctgagctgactaagatcattgtcggtgttgttgaagcgtgtcattcgcttggtgtgatgcataagagacttgaagcctgagaatttcttattggttaataaggatgatgatttctctctcaaggcnattgattttgggctatctgtctttttcaaancaaggtcaantattcactgatgttgttgggaagtccataattatgtttgcccccgaagttttt

SEQ ID NO: 2174 - DNA, 490 bp, Arabidopsis thaliana
  unsure at all n locations
  Clone ID: LIB22-056-Q1-E1-H9
ntgttaccctgcctgtaccgggtccgaaaattcccgggtcgacccacgcgtccgcccacgcgtccgcggacgcgtgggtgccattgaccctaagactaagaagattctccagctcttgcgtttgagacagattttcaatggtgttttccttaaagtcaacaaggctacgatgaacatgcttcgccgtgttgagccctatgtcacttacggattccctaacttgaagagtgtcaaggaattgatctacaagagaggttacggaaagcttaaccaccagaggatagctttgactgacaactctattgtagagcaggctcttggaaagcatggtatcatttgcactgaggatttgatccacgangattctaacagtaggacctcatttcaaggaagccaacaacttcctttggncattccaagcttaangnaccactaggtgggcctcaagaagaanagaaatcactacngtggaanggtgggtgatgcccgg

SEQ ID NO: 2175 - DNA, 509 bp, Arabidopsis thaliana
  unsure at all n locations
  Clone ID: LIB22-057-Q1-E1-C8
cctgnccgtaccggtccggaattcccgggtcgacccacgcgtccgcgcgtgggcttttggtggcatgatcttcatccttgtctactgcaccgccggtatctcaggtggtcacataaaccctgcggtgacgtttggtttgttcttagcccggaaggtatcgctgattagggcggtgctttacatggtggctcagtgtttgggtgctatttgtggagttggtttcgtcaaagcctttcaaagctcttactatgatcgttacggtggaggagccaactctctagcagacggctacaacacaggcaccggactagccgcagagatcattgnaacattcgttctcgtctacacaagtcttctccgctactgatcccaaacgtaacgcctagagactcccacgttccggttttggcgccacttccgatttgngtttgccngtgnttanggtacatttggccactanttcccattaccgggaaaccggnaatccancccnggccaaggagttttcg

SEQ ID NO: 2176 - DNA, 476 bp, Arabidopsis thaliana
  unsure at all n locations
  Clone ID: LIB22-057-Q1-E1-F12
acgcctgccngtaccggtccnaaaattcncgggtccacccacgcgtccgtgttcaggcgccgcaggagcataagcttccgcccaggccaangaggaacaacaagcggcttgctgcttcggatccggatccggatcctattgagtcggttcaggagaaaccaaagcgcacgcgtggatcgtcgaagcaagaggaaaatgaactgcccaagagtactagggcttcgaggaaaaagaatctggacgatatcnccgataaagaagaggaattggatgtggaaattgagaaggtggtcaaagctagggttgggaggcctcggaagaacgcaggcagtgcaattgcgaatggaangaagaanttgtggaggagaaaaaaanggttgggangccccggaagaacgcaagtagtgcaattacgggaggaagaagaacttgtggngggngaaanaagggnanctctaanggctccggagaggtta

SEQ ID NO: 2177 - DNA, 449 bp, Arabidopsis thaliana
  unsure at all n locations
  Clone ID: LIB22-057-Q1-E1-G10
tacgcctgcccgtaccggtccaaaattcncgggnccacccacgcgtccgaatganagaaagatcattangtttctgaggggataaccattttttttttcttcttaaaaagtttttttttttgtcaattggtcntcttcttcctcatccgctcgcttanatttaatttaataataataaaaatcggtgttcatttttatataaaagtataaattttgtgtttggntgatccanccgtagtcgtagtnaatctacaagctctgaaattccacgcccacatctcctccgtcctcttgagatccttctccgtcattcattttcttgctcaacttgagttgcttccaacatcttgcaagattgtcnttgagttcantcaaggtcttggaggaaaagcacgcttttaaagctggtgtgaaacttgcgccgttccngtgaaggaancgaccgtttg

SEQ ID NO: 2178 - DNA, 523 bp, Arabidopsis thaliana
  unsure at all n locations
  Clone ID: LIB22-057-Q1-E1-G8
gcaactgcttccctggcctaacggtccggaattcccgggtcgacccacgcgtccgcttcattttcttcgaatccaaatttctgtgtctgcttttgattcacagagaaggagcaggaaanatgttggatatcaatctatttcgtgaagagaaaggtaacaatccggagattatccgagaatcgcaacgccggagatttgccagcgttgaaatcgtcgatgagatcattaagctggacaaggaatggcgtcagcgtcaatttgaagttgatagcttcagaaaggagttcaacaagctcaataagcaagtggcgcagctcaaaattaanaaagaagatgcgagtgagattattcaacanactgagaaaaacanacaagattctactgcaaaggangctgaagttcgtgaagcttatgctgctttgaaagccaagttggagcaagttggtaatttggtccatgattctgttccagttgataaggacngaagntaatnaatccntgtggattnaactgtggggtgaaa

SEQ ID NO: 2179 - DNA, 455 bp, Arabidopsis thaliana
  unsure at all n locations
  Clone ID: LIB22-057-Q1-E1-H12
ancacgcgtccgcacacgcgtccggacaaaccagattatccatacctaaagaggcttttcagggatctctttattcgagaaggttatcagtttgactatgtatttgattggacaatcttgacgtatccacagtttagttcgggctccagctctagctccaagccaagatcaagcctgagaccaggctatgaancctccagtaccaattgccgaaagaccagatanaccttcagctggagctgggcaagacagtcgagatagattctcacgtgctttaagagngcatatgctagaagaaatggctcaaggaanccngtgtggtacaaggctggatnggatctagaccaaggaacctcagangnatggtgttagcatccgtcaanaggatnccagtcaccagananccaangagaagagtcgagangnccaaatctcttcaanaaggaaaaggcaag

SEQ ID NO: 2180 - DNA, 484 bp, Arabidopsis thaliana
  unsure at all n locations
  Clone ID: LIB22-057-Q1-E1-H8
acgcgtccgaaanactagccgccttantcgtcttcttcgttctctanttttttcctcagtctctgttcntagatcccttgtantttccaaatcttccganaaaaatgtcnggtanaggagaaggaccagctatcggtatcgatcttggtaccacttacncttgcgtcggantatggcaacacgaccgtgttgagatcattgctaatgatcaangaaacagaaccacgccatcttacgttgctttcaccgactccgagaggttgatcggtgacgcagctaagaatcaggtcgccatgaaccccgttaacaccgttttcgacgctaagaggttgatcggtcgtcgtttcnctgacagctctgttcagaagtgacatgaaattgtgggcattcaagattcangccgggacctgccgataagccaatgatccaaggtccaatanaaagggtgncggagaaaacagttcgcaagctggaggganaattc

SEQ ID NO: 2181 - DNA, 452 bp, Arabidopsis thaliana
  unsure at all n locations
  Clone ID: LIB22-058-Q1-E1-A6
acgcgtccgctttctcctccgacacactccaaaactcataaatctatctgatgcgaatttgactaactctttcgtaattcaggatcttactacaaatctttaactcaccaatcttcttcttattcaaagattagagagaaaatggacaacgagctgtttatgancacagagtttccaccaccgccggagatggcgacgcatttcgaacaccaacagtcttcttcatcggccatgatgcttaattgggctttaatggatccaaatccgcatcaagattcttcctttttatgggaaagagtcaacggaacancaacaacaacaaagcatctttgantctgctttaagctcattagtctcatcancgacgccgtcaaattcnancttctccgggcggtggtggtgacggttttcgcancagngaactcatcggnaagcttgggaanacatcggta

SEQ ID NO: 2182 - DNA, 515 bp, Arabidopsis thaliana
  unsure at all n locations
  Clone ID: LIB22-058-Q1-E1-A8
ntgnttacgcctgcaggtancggtccgnaaattcccgggtcgacccacgcgtccggtggntgttccttgaaatccgattctgattccttccttttggatccgattctatctccaccttcaagcacaatattcgactcggtactctctctttcttcttcttattgcaaaaagattctctttttatctgttttgtggatatacagattctggataaaaacaatcatcttttttctctcaaaaatctctgcttaagaactgggattcttcaaaagctcttctcttgtctgatttcttctgaatttcccctctaagtctctccaattcttctccattagctataaagtcgattcctttatcaccgttctgaagaatttggtcgaaagttttggcctttagtanccaattttcaatcctgncgataactganttgaaaagggttccaaaagttacatcacctgaaancaacagtgcttttgattgtgttggtggtttggagtgcttgataagtttaatca

SEQ ID NO: 2183 - DNA, 465 bp, Arabidopsis thaliana
  unsure at all n locations
  Clone ID: LIB22-058-Q1-E1-A9
canaacggtccagcctcccgggtcgaccnacgcgtccgatttgttttgctttgtcagtcaacggttgacccattgactcgcccaccatccatgacttcttcagcttaagttatgcactcatcttttatctccttcttaaaaaaatctgatgaactgtaacgttttgtttcttctctctgttctcgtctctgttacggctggagttacggcggcgtaccatcctaccgatgtctttctcttcaactgcggcgatacttccaacaacgtcgacaacagtggccggaactggacggtggaaagtcgtcaaattctgtcgtcgaatttagtcaacgcttcattcacttcagaagcgtcataccaaaaagcaggggtctctcgggattccgtacatgaaagctcgaatattccgatctgagttcacctacangtttcccagtcactcccggttcgatatttcccggggta

SEQ ID NO: 2184 - DNA, 519 bp, Arabidopsis thaliana
  unsure at all n locations
  Clone ID: LIB22-058-Q1-E1-B7
actgtttacgcctgccaggtancggtccgaanattcccgggtcgacccacgcgtccgagaggttcctaagagagtgcctccggatagtcctttggctcctcaatggtacacattggaatctgagaaatcaccggggaatgacgtcatgctcgctgtttggctcgggactcaagctgatgaagcgtttcaagaagcttggcaatctgattccggtgggttgattccggagacgagatccaaagtttacttatcttcgaagctttggtatttgcgtctaacggtcatacaaacccaagatttgcagctaggtttgggatccgaagctaagtcaaagatccccaccactgagctttatgtgaaagctcagcttggacctcaagttttcaaaacggctacgacttcgattgggccgtcggcttcttccgtccggatccggtaacccgacttggaacgaggatctagttttcgtancttccgagccgtttgaagccgttcttgatagtgactgtggaagatata

SEQ ID NO: 2185 - DNA, 500 bp, Arabidopsis thaliana
  unsure at all n locations
  Clone ID: LIB22-058-Q1-E1-B8
ntgtttacgcctgccaggtaacggtccgaanattcccgggtcgacccacgcgtccgcccacgcgtccggtcatttttaataggaaaataagacatagttatctacaatataaagcctattcggtataataacagagtagaatctaacaaccccaaagctttcatagattgggttttgtagggatatttcagtttttactggaaggatcatgaagaacatcaacaatggcttcttcctctgcatgcttttactcctctggtgttttgtgcattcggggatttcaattgatcctttctccccaagcgactcactcaaaacagagtgtgtaatgaagcctccacgaagcagtgaaacgaaaggattattacaatttagccgctctgtcgaagatgactctgatgaanaatggaaaatagatggaagtgngatccataagaganatgacacagagaattcagcttcaccaacgaagacatttacaagcttntctgcttgggtga

SEQ ID NO: 2186 - DNA, 391 bp, Arabidopsis thaliana
  unsure at all n locations
  Clone ID: LIB22-058-Q1-E1-B9
acgcgtccgcttcactccaagtttatgaggagatctagagagataatcatatagagaaagagagatctccagagaaaatccattgaagggaaaaaaacagtctgtctttcataattgctctttctataaatcttctctcttgtgttcttacctttcttctaaaaccattctctctctctttaacacttcatcactctttacggaaaatttcttattttcaccacctgagccatctctattttcgtcaanacttctcaacttttgtgccaaaacgtcatttcttctgagggaataaacacaanagaacaattttcccggaaaatcatggagatttcnactgctctaatgattctttcggncatcacgggggtatttctnatggctcacattc

SEQ ID NO: 2187 - DNA, 452 bp, Arabidopsis thaliana
  unsure at all n locations
  Clone ID: LIB22-056-Q1-E1-H4
ganccacgcgtccgcaacanttanggtttcagangatcggctgattttcacatccacaagtatggcgactcaaatcagcaagaagagaaagtttgtagcggatggtgtattctacagctgaattgaatgaggttctcacaagagagctagcanaggatggttactctggtgttgaggttagggttactccantgangactgagattatcatcanagctactcgtactcaaaatgttcttggtgagaaggggaggagaattagggaattgacatctcttgtcnacaanagattcaangtttccagttgacagtgtntgagctctatgctgacaaggttaanaacagaggtctctggtgccanttgctcangctgagtctccacgtnacaaagcttctcnggtggtcgttcctgttcgcagggcccnttannggtggttttgagnatttgttag

SEQ ID NO: 2188 - DNA, 389 bp, Arabidopsis thaliana
  unsure at all n locations
  Clone ID: LIB22-055-Q1-E1-C4
catctctcattcaaacccacaagtccgatctcgcgatccaaacaccatgggaagaggttgaagaagaagtgagacgaatcgtcgaacaagttaaagagcttcatgactcttccacatccttcgtctcttcttcttctcaagaagagctttctctccgtaacagagcctccgtcgttgactcatcaatccgccgtcttcattctactcttgcctctgacaaacatctcgatcccaagcttttcgaaaagctagaagaggatntggaacgagctagatgcatgcttgcagatggagacacntcatcgtttcntccanctaaacctcaaaggaacgttttgtgagaaatgtttttgggacctgttgaangttaggaagcttcacgaaanaag

SEQ ID NO: 2189 - DNA, 425 bp, Arabidopsis thaliana
  unsure at all n locations
  Clone ID: LIB22-055-Q1-E1-C8
aaattgaagacaaaaatgtctcgcagatcgctaactctcctcaagaatctagctagaaacgcgaatggatcaggtattcaaacccgatccgtgacttacatgcccagacccggtgacggagcaccacgcgcagtgacgctgatccccggagatggaatcggtcctctggtgacgaacgccgtggaacaggtgatggaagcgatgcacgctccgatcttcttcgagaagtacgatgttcacggagaaatgagccgtgtgccgccggaagtgatggagtcgataaggaagaataaggtttgtttgaaaggtgggcttaagactcctgttggtggtggtgttaagttctcttaacgtccagcttaggaaagagcttgacctcnttgcttctcctggtcaactgttttaatttgcctggtttacctact

SEQ ID NO: 2190 - DNA, 488 bp, Arabidopsis thaliana
  unsure at all n locations
  Clone ID: LIB22-055-Q1-E1-D4
gttacccttccggtagccgtccganaattcangggtcgacccacgcgtccgggaagttgtgtgagagaaagaaaaagcccagagagaagagagagagacccacaacacanacacaaagtagacgaagaagacgacgacgaaacagctctcttcttctctcctctctctcagcatcttctgctggtttggtctttcactaaagtctcggtgtgcacctaaatgtgcttgatccaaggtcgttataattctgtgtacagagccaatgccatatatagaaatgaagagcaagataagcaaggttcttgggtgtctgtaagaaacataaagcaagtacaaagaaattcttgctcctttgtccaaaatatcaaggagacttgggnaaagcataaccgcagctattactacttgccacgaacgaatgaagaaacagcacctggggtttggataactttttctccgggagaagtgaaaactaaatgangcccgct

SEQ ID NO: 2191 - DNA, 421 bp, Arabidopsis thaliana
  unsure at all n locations
  Clone ID: LIB22-055-Q1-E1-D8
tcacaagagagagatagagagagaaaaaggctctgctttctacattatttacgattatacactttccaacatggcggcctctgtagataatcgccaatacgctcgtctcgagccaggtttgaacggcgtggttcgtttttacaaacctcccgttccaggccggtccgattcccctaaggcgcaccagaaccaaaccaccaaccaaaccgtgttcttgaaaccagccaaggttcatgacgatgacgaagacgtgtcgagcgaagacgangaacgangacacacaacaagcaacgccgtgtactacaaggagatgatangaaaatccaaangccgagcttggaaccgtccgttttggacccgagggacgaatacacggcttgataactgggattngagccgtancccttccatgggtacgttc

SEQ ID NO: 2192 - DNA, 491 bp, Arabidopsis thaliana
  unsure at all n locations
  Clone ID: LIB22-055-Q1-E1-E1
acccttcnggtagccgtccgaaattcaagggtcgacccacncgtccgagaaattctattatcaattcctatcatttgttaagaaaaagagttagaagtattaataatcttacaatatttatagataagataacaacaatatgaagcattctcacgttttgcttcttctatttgttcaagtcattgtccttttgcctctcctttgtctatccgacgattttgttaactctagagctacttattatggcagccccgattgcaaagcaaatcctcggggacattgtgggtatggagaatttggnagagatatcaataacggtgaagtgantggtgtttcatgggcgactatggaacaatggaactggctgtgggtgctttgttaccanggntgaggtgccaggatagcancacactgccaantgaggaaaggatanacgtnngtggctacgggactccnggngaaaggagatggcacgggccttcatccttaag

SEQ ID NO: 2193 - DNA, 374 bp, Arabidopsis thaliana
  unsure at all n locations
  Clone ID: LIB22-055-Q1-E1-E4
acgcgtccgtgaaaccctaaccacaacaatcgccgccgtctctagaaatatccatccacctacttcggctttgtttatcagattttgatgaaaccangatcgggtcttcctctagatccgttctaggttttctanttcnnnnnnnnnnnnnnnnnnnnnnnnnnnnnnnnnnnnnnnnnnnnnnnnnnnnnnnnnnnnnnnnnnnnnnnnnnnnnnagacatgtctctgtttctgaaagacgattcgattcanattcgcgaagtctggaaccgataaccttcaagaagaaatgggatctgatccgagatgtcgtcgacgacgtcccttacgtcgccatgggacactgagttccccggcatcgtcggtccganct

SEQ ID NO: 2194 - DNA, 407 bp, Arabidopsis thaliana
  unsure at all n locations
  Clone ID: LIB22-055-Q1-E1-F10
aaaacccaaatcgaaaaatcgattctttagtcagaaaaaatgaggaccaaatctccatcttctcttaatctcaaggtcatattcataggttcctcaatcttgatcttgatcatcatctacttagcaagatcaaacatctcttcttcctcttcaaagccaatctccaaancaaatctctcccaagaagaagaagaaactcagcataaacaagaaggatgtccaacaacacaacaatgcacaaagatgccactttctttatccgatgcattgggttcattacgtcantagtaacgtcactccacaacngacattttgatgaagtcnctgtctcaagngagaagtcttgggacaangaagtccncncgtggtaaacttccntgggcgttgggcttaaggtcncgacagtt

SEQ ID NO: 2195 - DNA, 455 bp, Arabidopsis thaliana
  unsure at all n locations
  Clone ID: LIB22-055-Q1-E1-F12
ctgtttacgccttncagcangcctgtaacggtccaanaattcccgggantcccatattgtgatnctccaaacggacgggttgtgggaatcagtggagtctctttttgagtttacgctgaatcatctgggagattgacaaagaagagtttaagacagtgatgagtctgatgcgatctcagcatagacaaggagttggccacagagatggccttcgaacagggttacatatgaccggttctgtcgaggatggaggattggtagaatacttctttgggaaagatggcaagtcaaaaactgaaacacgacaaattcactaagtttatgaaagatctaactgaagagatgctgaggctggantttgcacattangacnataancnaangaggaagtatatcggccaaagattttgcanntgtcnattggntgcagcnggctgatgcaaggcattntgagc

SEQ ID NO: 2196 - DNA, 433 bp, Arabidopsis thaliana
  unsure at all n locations
  Clone ID: LIB22-055-Q1-E1-F2
gtggagagattgatttaagatacagagtttgnatctatcttgaggagaacacgaagaagctcagggaatatattgcagttgcttcaagggattcntgcanggattgcttctgagtangaaagctctgataacaattgggataantctcgagagagggatagagttataatgattaatccgtataaccaatcgctagttgttccttcggatcagaatcagaatcatccttcattgacttcacttggngattacttcattggacctggtttagatcttttgcttcagcanttggctgagantgntcnnaataggcaacggactccacctgctcgtaaagaanctgttgaagctttaccaacggttaanataatnggaagctttgcaatgttctgttttgtttggatcaantttgagaaaaggtacgggaanccta

SEQ ID NO: 2197 - DNA, 480 bp, Arabidopsis thaliana
  unsure at all n locations
  Clone ID: LIB22-055-Q1-E1-F5
ctgttncgcctgccggtaacggtccaaaattcccgggtcgacccacgcgtccggcagcttcctgttcaacgaatgctcgatttcgactttctctgtggacgtgaaacgccttctgttgctggaatcataaatcctggttctgaaggttttcaaaagctctttttcgggcaggaggaaatcgctatccctgttcatgccgccattgaggcagcttgtgctgcgcatccaacagcggatgtattcatcaactttgcatcttttaggagtgctgctgcttcatccatggctgctttgaagcagccgactattaaagttgtggcaattatagctgaaggtgttccagaatcagacactaancagctgattgcgtatgctccgtgcaaacaataaggttgttattggaccggctacngttggaggtattcaagctggagcctttaagattggtgatactgcaggaacaatttgataacattatcc

SEQ ID NO: 2198 - DNA, 440 bp, Arabidopsis thaliana
  unsure at all n locations
  Clone ID: LIB22-055-Q1-E1-F9
acgcgtccgcccacgcgtccggttgttggtgaacctgctcttcctagaactgagattgtgaggcaattgtgggcttatataaggaagaataaccttcaagacccgagtaacaagcggaagatcatctgtgatgatgcgttgcgtgtggtttttgagactgattgcactgacatgttcaagatgaataagttgcttgctaagcatattctcccgcttgatccatcaaaggactctggtcaagcaaaaaaggcaaaaactgaggtggagactaagactgagaccacccgagnctattagttcaactgctattaagttcaactgttacattatctgagccactttggtaangttccttggcactggtgaagaangganatggnaagacganagangattaantcgcccgtggtttggggaatacnttagagctcaacaatttt

SEQ ID NO: 2199 - DNA, 487 bp, Arabidopsis thaliana
  unsure at all n locations
  Clone ID: LIB22-055-Q1-E1-G2
acgccggccggtagccgtccanaattcangggtcgacccacgcgtccgcaaaaacacacaaatggaaggaagagtcaacgctctgtcaaacataaacgatctcgaacttcacaatttcttggtcgatccaaacttcgatcagttcataaacctcataagaggagatcatcaaaccattgacgaaaacccagttcttgatttcgatcttggnccattacaaaacagcccctgtttcatagacgagaaccagttcatcccaacacctgtcgatgacctcttcgacgaattgcctgacttagactccaacgttgctgaatcattccgtagcttcgacggtgatagtgttanagccggtggtgaagaagatgaagaaagattacaacnacggtgatgattcttcagccaactactacgaataatgattgggaccccgtnaagacgaagactgatncggtccaaggacnttgatctctgagaagaangaaag

SEQ ID NO: 2200 - DNA, 423 bp, Arabidopsis thaliana
  unsure at all n locations
  Clone ID: LIB22-055-Q1-E1-G7
aattcttcgaatctgaaatccgatcgggctcgcttgttctgatttcgtgagggtgaacatggatggaaacaaagacgatgcgttgaagtgcttgaaaatctgcaaaagtgctatggaagctggagatcgacctcgcgctttgaaattcctggctaaagctcgtcgtcttgatccaaatctcccgatcgatgatctcgtatctgagcttaacaacaacaaatcagacgaaccaggatctgcaaaatcgcctggatctgcagcagcaaaggattcttccaattcttcagatcggccttctttacgtcaacgtggatcgtcaacaangtcatcgtcttcttcgatgtccnacactgaagaacaggntctcaatcgtngagaananatanaatctagaaaggattantacgaagatcttangtcctg

SEQ ID NO: 2201 - DNA, 493 bp, Arabidopsis thaliana
  unsure at all n locations
  Clone ID: LIB22-055-Q1-E1-C3
ttacgccttcccgtagccgtccnaaaattcaagggtcgacccacgcgtccgtttcaagcgaaggaacggtgggaggaacaagcacaacagaggacacgtcaacccaatcagatgctccaactgcggcaaatgctgccctaangacaaggccattaagaggttcattgtgaggaacattgtggagcaggctgctattagagatgttcaggaagctagcgtctatgagggatacacattgccgaagctatatgcaaagacgcaatactgtgtctcctgtgctatccactctcacgtcgttagagtccgttcccgcaccaaccgtagggttcgtactcctcctccacgtttcaccaagacgcaaggaggatactcccaagccctgggacaagccangacangcccctcgtccagctgggccctggagcttgcagctgcaaccgcgtgtctgaagcctgcaatcanccttaaattgtagtttcattttttcaaggat

SEQ ID NO: 2202 - DNA, 371 bp, Arabidopsis thaliana
  unsure at all n locations
  Clone ID: LIB22-054-Q1-E2-D12
acctgaatctcaccgtgaggatgaagttacgagttttgctgtggtcaatccaagtgggagggatctagagaatggtgtgaacagtgaaagtcaagcttatactattgcaactggtcaagctgatggctctttaaaactttggagaantagttttcaggaaagttcaacaccttccggtctgtgggagctagttggcatgcttacggttggccaaaatcctgtcagtgctanatctctgactgattcgggacacangatagcagccctctgtacagagagtcattcaanagctgcccgcgcagttagtanatngganattgtacaccttatagattcaggggttttcatacnagaggatgaggtacatnttg

SEQ ID NO: 2203 - DNA, 393 bp, Arabidopsis thaliana
  unsure at all n locations
  Clone ID: LIB22-054-Q1-E2-E6
cgcgtccncacagacttctgctncatttccgtcttttccgctaggtttccgtctctgttttttcttgcattttccccagaattccttcacattctctccttttcctctttttaattcctcaccacctcaaattcttcataaacaaatccacttctgcatggttgggagaatctgttagagaatttttgttgttgttgggttcagatttggaaaatttcctttttttcgagtttcttctgaattattcatcgtggagattctcggatcgggaagggctgcgagaggtggttttcacggcggggatagattcatcttctgtcttctcctgagggggtagccgaggctccggcctcngcggtttttaaancccgacctttaaaaattnctggggaa

SEQ ID NO: 2204 - DNA, 403 bp, Arabidopsis thaliana
  unsure at all n locations
  Clone ID: LIB22-054-Q1-E2-E8
cagagaggagatttgagattttgggtttcaatggcggtttcaagtgctttcgttggttgtccaaagcttgagactttattgaatcaccataannnnnnnnnnnnnnnnnnnnnnnnnnnnnnnnnnnnnnnnnnnnnnnnnnnnnnnnnnnnnnnnnnnnnnnnnncgaagaacaatagaaccagacgaggtttgatccaaaaagctcgttgtgagctctctgcttcttctgattctgcgtctaatgcagctagcatctctgctcttgaacaactcaagaactctgcagctgatcgatatacaaaggaaagaagcagtattgttgtgattggacttaagtattcacacaagctcctgttgagaagcgtgaagaagcttgctatacctgaanctgaatggccaa

SEQ ID NO: 2205 - DNA, 413 bp, Arabidopsis thaliana
  unsure at all n locations
  Clone ID: LIB22-054-Q1-E2-F12
acgcgtccggtttttttgtaataccatcaatgtgtgtttaaagaaaggcctcttgtgtatctgcacgacatctcaaacaaaaccaatcaataaaaacaagaaacaatcttctttctcatggacagatctcaagaacactatgccaatggtgaccagaacttagaagcaaaccttatagatcatgaggtggtaactgaatcatcatcatcagctgtgcctcaaaccgagaactataaaaggtggcttcgtgtctccatanaccgtaatctttgtcctcttttgccagccactanctacaantctgggtagattgtactatgaaaatggaggaantagcanatangtggtaacacttcatcagctcaattgggcttccctgtacngggttctgttcggcttctgttcgctnaagc

SEQ ID NO: 2206 - DNA, 394 bp, Arabidopsis thaliana
  unsure at all n locations
  Clone ID: LIB22-054-Q1-E2-F6
tttcttcctcacggtcttcttcttgcccgagtccccaaggtggctcgtgagcaaaggtcgaatgcttgaacgcaaagcgggttcttcagagactgcgtggtcgcgaagatgtgtctggtgagatggctttgttggttgagggtcttgnaattggaggtgaaacaaccatatgaggaatatataattggtcccgcggatgaagttactgatgatcatgatatagctgtggataaggatcaaattaagttatatggtgcagaagaagggcngaagttgggttgctaggccagtcaaaggangaagcactatgagtgttttgtctcgccatgggaagtacaatgagcaggaagcaaggctcaatgattgatcctcctgtcacaactgtntggggaag

SEQ ID NO: 2207 - DNA, 446 bp, Arabidopsis thaliana
  unsure at all n locations
  Clone ID: LIB22-054-Q1-E2-G9
cacaggtcnggaactcgcgggtcgacccacgcctcnncnctnagtcnnnanacttgttgtcggagatgtgttcagagaaccagaaatgtcaaagcttctatgcattatggtgggagatggggttcgaattacaggaatggctgttgtcactattgttttcgctgcacttggattcatgtcgcctgcctcaagaggaatgctactaaccgggatgattattctctatcttttcttgggtattgttgctgggtacgctggtgttcggctctggagaactgtcaaggggacttcacaaggatggagatcactttcctggtccattgcatgcttcttcccgggtattgcttttgttatacncacngtgttnaacttccttcnctggagcagcatcagtactggngccatcncaanctcnttgtatttnaactcttgggnctccggttctg

SEQ ID NO: 2208 - DNA, 431 bp, Arabidopsis thaliana
  unsure at all n locations
  Clone ID: LIB22-054-Q1-E2-H12
tagcttccatggaaaccaaattcagtgactttacctgaaattaatcttttgaatcccaagcaattgactgcctcgagttctcagtatcgtagaactcgaaactggagaattagaagttcgtcggaagataatgtancaatttcgagtgacggcggagatttgaagaattctctgtccggtattgtgggaaatcaagtggaggagctattgagcagataatgagaacaaaggtttgcttgatggtctggaaaaagcttcgttgagagtggagattgcgaanagagagctcgangatntagagagacnngaaattgaggcgaaattgcnacagggattatannantcagctcngaatcaatgaaccgccanagganttgccgnaaattgcccaagcagggagnatngacngcagcaaaggttcaatngggttg

SEQ ID NO: 2209 - DNA, 401 bp, Arabidopsis thaliana
  unsure at all n locations
  Clone ID: LIB22-054-Q1-E2-H5
aacacagagagagagagattcacttccccatttcagaaaatcaaaatgggtggtggtggtgatacaacagataccaatatgatgcagagagttaattcttcttctggtacatcgtcttcttcgatccctaaacacaatcttcacttgaatcctgctcttatccgctctcaccatcacttccgtcaccctttcaccggagctcctccaccgccgattccacccatttctccttactctcagatcccggcgactttacaacctatgacattctcgctctatgtcgcaaccgtcttctttcttctcctttgattcattgccgccgttaaatccttctgctccgtcggtttcggtgtcggtggaggataaaacggtgcccggatttagtcctttgttgnccttcg

SEQ ID NO: 2210 - DNA, 370 bp, Arabidopsis thaliana
  unsure at all n locations
  Clone ID: LIB22-054-Q1-E2-H7
tcnctctcagcacgatgcnaagaatcgagcatttgtgtcgctctctggaacgtgtgtcttcatcgggaatataaccataatctccacgagctgcttgaatgcgtacccttcgttccctaatgttggcggcggctctagcagtggctttggncgtgactggttttgcagcatcgccgttaccttcggcntangcgaaatacgcagctggtccgaccaagattcttcctttacaaanggcttttcctctagaccaagctaatggagctgagtgaacttanagcgcgtgatcgtgtcagacacgcgcgaatcttactcggcggtggtcgtcanagcnctgttggcggcntcgtcgacttcccagttcanggct

SEQ ID NO: 2211 - DNA, 485 bp, Arabidopsis thaliana
  unsure at all n locations
  Clone ID: LIB22-055-Q1-E1-A2
ntgttacgcctgccggtagcggtccaaaattcangggtcgacccacgcgtccgctaaaaatcttactcttcttcactctaaatcccttctctgaacctcttcgtttgctgtatgtgttgatttcacttctctctgagcaagaagctttcgcgtgagagaatgacgaaggtctatggaactggcacgtacgacttcaagcgccacagagtggcggagtatccattggagttacctagccatcctgctgagaagcctctagagtcaaagcctggatctaatttgccgagctccatcactttatcggagattcagcaagataggttaacgaaaatcgctgangagagctggattaagactggaggtaagctccctgagaaaccgttcgattcggaggttgtgaaggagatttatgtgacggagcttaaggtaactaatggtcgtaaacctgtttcacttcaacgagttatgaatcctgggaagtgaan

SEQ ID NO: 2212 - DNA, 473 bp, Arabidopsis thaliana
  unsure at all n locations
  Clone ID: LIB22-055-Q1-E1-A3
gtaggccgtccaaanttcaagggtcgagggacgcgtcagtcatcancnctccataantgcttcgatttctctgcaaagacacaacacaaaaagtgctttttttaatcagatattttctgggcttcactttaactctcttcgtgcttggttttccgatcttagtcgttactaattgagtcggagactgttcatttcctgattctgaagaaagttttggagaaggagaagatgtcaactctgcgagtgagctagggtttagtgtgttttccgatttttgagctcttggggattgttgttttctcttaaagagtcgattttgaatggcggtggagtatgtatgttgcagcccaaacttctttatacatatagctgtgattgtgtttcttgtcttgttcgctggactcatgtccgggcttaacattgggtcctangtccttgagtcncgttgatcttgaaagttctcgctaaaaccc

SEQ ID NO: 2213 - DNA, 433 bp, Arabidopsis thaliana
  unsure at all n locations
  Clone ID: LIB22-055-Q1-E1-A9
aggtctgtttcaatctgacggctggattttgtcacagaccgccgccaagtctgaagagggaagagaagtggagaagatggtgttgagtgctgtgttttggaagaaggttcagtatgttttgaaatcggttgatccggtgatgcaggtgattcacatgatcaatgatggtggcgatagactatctatgccatatgcttacggttacatgtgctgtgcgaaaatggcgatcaagtctattcatagcgatgatgcaaggaaatacggaccgttttggcgggtgatagaataccgttggaacccattgtttcatcatccctctcctatgttggctgcataatttccttcaacccgggcaatacaaantaaccgtccctgaattttannggcgtcctggaaggttttncccttggagtttaaccaaatgcaatggntt

SEQ ID NO: 2214 - DNA, 491 bp, Arabidopsis thaliana
  unsure at all n locations
  Clone ID: LIB22-055-Q1-E1-B4
ctgttacgcctgccggtagcngtccnanaattcangggtcgacccacgcgtccgcacatcctctgattaactaaaacgcacacaaacaagaaaaaaagctnnnnnnnnnnnnnnnnnnnnnnnnnnnnnnnnnnnnnnnnnnnnnnnnnnnnnnnnnnnnnnnnnntcgagacaaacatttcacattcccagagattgtggtgtcgttgggtacttacttcttagggtgattcaggacttgctaattataggcaaaaaatggttttgggtttaagctcaaagaacagaagatgctcatcggtacaagtttttacctgatccacattcatgacatcaagccttggcctccttctcagtcccttcgatctcctccgctctgttgttatccaatgggagaatggtgaccgcaattcctggtaccaacttctgttgttgcccntcctcttgggttccgtcaattggcgaaaggcaaaatccgagttcaacgaatc

SEQ ID NO: 2215 - DNA, 399 bp, Arabidopsis thaliana
  unsure at all n locations
  Clone ID: LIB22-055-Q1-E1-B9
cgggatcttgggagttggaggttcggatcagagtcgagcaacagccgtcgtggtcgctagtagacgaagatggctaaagaggcgagaaacatggctggtggttctcggtgttgctcttcacgccgtctacatgctaagcatcttcgacatttacttcaaaacgcccatagtccacgggatggatcctgtgcctccgagattctctgagccgccggctaagcgacttgttcttctcatctcggatggtttacgtgctgacaaattctttgagccggacgangaaggcaaatacagagcacccttcttgaggnatatcataaagaatcagggggcgttgggggtgtctcctcaatgcctcgtcctcctaacaggantctanaacttggncaatggttgcta

SEQ ID NO: 2216 - DNA, 481 bp, Arabidopsis thaliana
  unsure at all n locations
  Clone ID: LIB22-054-Q1-E2-C9
gttacgcctgcccntaccggtccgnaattcccgggncgacccacgcgtccgggatgccagaagaagctcgaagatcgacgatgaccagaaactacgtgcgtttttacgacaagagaatctctcaagaagtcagtggagatgctttgggcgaggagttcaaaggatacgttttcaagatcaagggtggttgcnataagcaaggtttcccaatgaagcagggagttttgactccaggccgtgttcgccttttgcttcaccgaggaactccttgcttcaagaggacatggaaggagaactggtgagaggagaagaaagtctgttcgtggttgcattgtgagccctgatctctctgttccgaaccttgtcattgtgaaagaaggggtgagaacgattctcctgggcttacgantcctgagaagcccaagaatgnnagggaccnangagaagcctcccaagattcngtaancggttaacccccaag

SEQ ID NO: 2217 - DNA, 413 bp, Arabidopsis thaliana
  unsure at all n locations
  Clone ID: LIB22-055-Q1-E1-C12
gaaaaaaaacagagctttacaatttctctctacagagatcgaagatatggaaggcaaggaagaagacgttagagttggagctaacaagttcccggagagacaaccaatcggaacatcagctcagagtgacaaggactacaaggaaccaccaccagctccgtttttcgaacctggtgagctttcttcatggtctttttggagagctgggatngctganttcatcgctacntttctctttctctacancactgtcttgactgttatggggangtgaaaangtcaccgaacatgtgtgcttccgtcgggatccnnagggaatcacttgggctttcggttggtatgatanttgncttagtcnactgtnncgctggtanctccgggtggganacatcaacccaagcggttacnttttg

SEQ ID NO: 2218 - DNA, 419 bp, Arabidopsis thaliana
  unsure at all n locations
  Clone ID: LIB22-053-Q1-E1-D11
acgcgtccgtcttctcactctgttttcgtttagagagattttgcagagatgtcgagacgagcaatggtgataaagatgccaatacttatgatactgatttcatcaatggtgatgacgatggtcgagtcttcgagatcagttaataatggtcatgacgattctgagatcttacgaagacacttgctcactaatggcctcggagtcactcctcccatggggtggaatagctggaaccattttagctgcaacatagatganaaaatgatcaaagaaactgctgatgctttggttaccactggcctctctaagcttggntacanctatgttaanatcgatgattgctgggctgaaatttctcgtgacagcangggaagtctggtgccaaangaagtcanctttcccttctggaattaanggcg

SEQ ID NO: 2219 - DNA, 406 bp, Arabidopsis thaliana
  unsure at all n locations
  Clone ID: LIB22-053-Q1-E1-D8
gggtctaccctaagaatcttccacatagacagcccttgctcccccttcaaatcancatccccactctcatgggaagcgcgtgtgctccagacgctggctcaagaccaggcccgtctccagtacctgagcagcctcgtcgccgggagatctgtantccccattgcctcagggcgtcaaatgttgcaaagcactanatacattgtcnnggctttgatcggtactccggctcagccgctgctcctagccatggacacgagcagtgacgtggcttggattccttgctccggctgcgttggctgtccntctaacacggccttttcccctgntaagtctacatccttcaaggaacgttagctgcangcgctcctcagtgnanngcaggtaccaaaccncacgtggtggagca

SEQ ID NO: 2220 - DNA, 405 bp, Arabidopsis thaliana
  unsure at all n locations
  Clone ID: LIB22-053-Q1-E1-E12
ctctcttgaaaaatctataaccgatttctgcaatggcgacttcagattcgaggtcttctccttcatcatccgacaccgaattcgccgatccaaatcctagctccgatccagagacgaattcggagcgtgttcaaagtcaattagagtcaatgaatttatctcaacctagcgaagtctctgatggtagccacaccgaatttagcggtggcggcgatgataatgatgatgaggttgcatcggctaacgggaacgaaggcggagttagcaatggaggtttattgcgtgaaggtgtggcgggaactagcggaggagaggttttgttaagggcggaaaatccggtggaaatggnaagcangttgaaggaaccacncgaagtccggactagtagncggttacgaatggaga

SEQ ID NO: 2221 - DNA, 466 bp, Arabidopsis thaliana
  unsure at all n locations
  Clone ID: LIB22-053-Q1-E1-F4
tctgccggcacggtccaaaaancccgggtccacccacgcgtccgcnttgacaacattcttaaagagaaggatttttggactgacacagagaatgctataaggaatgcctacagatcaacagatgccgtgatattgcagcagtcccttaagcttggtaaaggcggatcaacagctgtaacgggaattctaattgatggtaaaaagctagttgttgctaatgttggagactccagagcagtgatgtctaagaatggtgttgcgcatcagctatctgtcgatcatgaaccaagcaaggagaaaaaagaaatagagagccgaggtggctttgtgtcaaatattccaaggggatgttccacgagtggatggacaagttagcggttgcaagagcatttggagataanagcttaaagttacatctgagctcagaaccggacataacacaccaagacaattgatgatcacactg

SEQ ID NO: 2222 - DNA, 394 bp, Arabidopsis thaliana
  unsure at all n locations
  Clone ID: LIB22-053-Q1-E1-F9
caatcatgcttcttcatttctagttctctcttcctgactcatttccctcattagatcttcttctccactaaacccataattgaaagaagctctttttttgcttacattgaagttaaaaaatcatcacttgttttgtttttgaagaaacacacataaagtttgtctttttacttctcaaatttggttgttttcactcaatttcaatcttgctttctgattcagantctgggttttcttcagaattcccagagaagttgttggaattgaatttttcacttttttgttcataaaagttctagtctttttagatgaacatgggacaaggaancagagcaaancctaaattanttacctttgggtcaagagcgatccctttggcaatggcaatgangga

SEQ ID NO: 2223 - DNA, 476 bp, Arabidopsis thaliana
  unsure at all n locations
  Clone ID: LIB22-053-Q1-E1-G3
tgttacgtctgcccgtcccggtccgaaaatacccgggtccacccacgcgtccgcaaaacttttttctttcatcctctaaaaaaaaatctttctggtgagtaacgaaaaaaatgtgtccggtggagaacaaatggttaaaggtgggtcaaaaaggagctggtcctggggctagaagctcacatgccatgaccgtcgttgggaacaaagtttactgttttggtggtgagcttaagccaacgatccatattgataacgatctttacgttttcgatcttgagactcaagaatggtcgatagctcctgcgaccggagaggctcctttcccctggttttggtgtctcgatgggnaacgatcggttcaacnatctatgtctacngtgggccgtgaccnagaaacggngatacaaacggncttcatttcgtaatgatactgaggaccaattagtggnaattggttggctcctgttgaaggaagg

SEQ ID NO: 2224 - DNA, 413 bp, Arabidopsis thaliana
  Clone ID: LIB22-053-Q1-E1-G4
tcctcaagctatctcctttgtgtccataatcgaaacgctttttgcgatttatcctaatcttttttctatcttctgctacaaatttggttcttttttggttgaatttggataaaatcataatctcctcttcaattttcttgtgaaatggaagtttcagtgattggaaatcctcaagcgaggatctgcagagcagaattagcttacagagagcttggatttagatttggctctgatgtaatctccggtgaatcgagaaatagggttagtttctgcaaccaaagctctaaatggaaagagatcgcgatacgttgctcttcgagatctgtcaaatgtgaagccatcgtctccgatgacgcttctccgtttctcaaatccactccaaaatctaaatcgctcgagagtgtaaaattatt

SEQ ID NO: 2225 - DNA, 349 bp, Arabidopsis thaliana
  unsure at all n locations
  Clone ID: LIB22-053-Q1-E1-G5
tcgctgtttctcgtctcggtggacgatctgctttcgtcggaaaacttggagacgacgagttcggtcatatgttggctgggattttgaggaagaacggtgttgatgatcaggggattaacttcgatactggagctanaactgctttanctttcgttacgttacgtgctgatggagatcgtgagtttatgttttaccgcaatcctagcgccganatgcttcttcgtcctgatgaactcaatctcgacctcatcangatccgccaaagtgtttcactatggatcaataagtttgatagtgggagccgtggtangtcagctcatttgaaggccatggaagtggcgaaagangc

SEQ ID NO: 2226 - DNA, 428 bp, Arabidopsis thaliana
  unsure at all n locations
  Clone ID: LIB22-053-Q1-E1-H4
tgcatgaaagaataaaaaaaaaacatcacaatctctttccatttctgagagctaaaaaacctctctctctttctctttgattcaagtttccaaaaatggaaggtttgtgtttaaactctttcactcgtgttttacttttattgttcgttttcttggtttttttctcataaatggnaacgagtcaacgcggtcgaaccggttttggagctggtaaaaggctttgaagctaaaccggactcgtcnatcgactcgttccaagcctctcctcactgactcaaacgggnaacttttcantcgggttctaaggggtaaacgggtcaccgttntctctcncnccgncacgcanccaaatttaaacngatcnacnaatgggttctcgaaccggannngctcangctangcgggggtctcagaanacgaaaactcct

SEQ ID NO: 2227 - DNA, 423 bp, Arabidopsis thaliana
  unsure at all n locations
  Clone ID: LIB22-053-Q1-E1-H5
acgcgtccgcncacgcgtccgcggacgcgtgggctgacattggcaaacccggctggatccctcgtgttctcgggtatgatcgcgagtagcatatacgaccgggaagcagaaaggcaagctcacggctccgtgtttgatccagatgacgcccttagatgcaatggttctatctgtttcttcttgacatcactcataatgtctggattctgcatcatcgcttgcatgttgagtatgattcttgtgcgtcgtaccaantctgtctacactcatctctatggcaagacccgcacctaagatctctgttcccttttatannatnatcgtgcncagcttcttantctttggggtntngtcgtcanatctangatccaanatggttttccgtctccngtanccgatttttttggcttggttcctggtanc

SEQ ID NO: 2228 - DNA, 423 bp, Arabidopsis thaliana
  unsure at all n locations
  Clone ID: LIB22-054-Q1-E1-B8
tttantagcaagcttagatctcctccttccacagtcactttctcttctttctctgcttttgtttcttcaatcgatttgcttcagatttccccagattatatagaattcgatgtcaagacacagaattcacatgggttttgtctaaaaatcataaaaatcatatctttttacggatttgaagatgaatcagaattcctctgttgcggaggcgacgcttcagcttaattccggtgaaaaaccatcgccgggatcgattccgtttatctcctctggtcaacacggaaacataagcacntcagcgacgagttcgacaagcacaagctcaggtaagtgctcntgccgtagttaaatccgccggtgaanaaancaactnaagatcgggcatantaaagtcgatggtcgtggacggcgaattcgtatgcc

SEQ ID NO: 2229 - DNA, 372 bp, Arabidopsis thaliana
  unsure at all n locations
  Clone ID: LIB22-054-Q1-E1-E5
atttacaagaggcagctggagccagatttagccagattgagttgattggaagaggctcttttggtgatgtctataaagcgtttgataaggacctcaataaagaagttgccattaaagtaatcgacctggaagaatcagaanatgagatcgaagatattcagaaggaaatttcagtattgtcacaatgtcgttgcccatatatcaccgaatactanggttcttaccttcatcagaccaagttgtggatcatcanggaatatatggccggtgggctctgttgctgatnttcntcantctaataatccgttggagtgnaacagcaatcgcnctgtatcacacgcnatttgcgttcagcnggttggaatattccgc

SEQ ID NO: 2230 - DNA, 459 bp, Arabidopsis thaliana
  unsure at all n locations
  Clone ID: LIB22-054-Q1-E2-A1
cggcacagtgtccggnactcncgggtcgacccacgcgtccnacataatgtctgcgaaagatcgaggaatcggaagcagaggcggtgatcggaatcgaatcggaccaccgcctctgccggtagccttgtcgtcgtctactgaatttggcgataacgcgttgtcgtcgcggtggacgtcgtggcttgttccgatgttcgttgtggctaacgttgcggttttcgtcgtggcgatgttcgttaataactgtccgaatcatttcgagtctcaccgtctcagaggtcactgtgtcgccaagtttctcggtagactctcctttgagcctctccgaactaatcctctctttggtccatcttctcacacattggagaagttaggagcacttgagtggagcananttgtgggagaagaaggaacgttggcgtcncctggacatgtatantgggtncacgcggggtgtta

SEQ ID NO: 2231 - DNA, 383 bp, Arabidopsis thaliana
  unsure at all n locations
  Clone ID: LIB22-054-Q1-E2-A2
caagctaaaaatctcatagatcagagtcgtcgtcgtcaacttcatcatcacaaaaatctcagctttgnnnnnnnnnnnnnnnnnnnnnnnnnnnnnnnnnnnnnnnnnnnnnnnnnnnnnnnnnnnnnnnnnnnnnnnnnnnnnnnnnnnnnnnnnnnnnnnnnnnnnnnnnccgttactcttgacaccatcaaccccaaggttatcaaatgtgagtatgctgtccgtggagaaattgtcaacattgctcagaaattgcaagaagatttgaagactaacaaggacgcttatccctttgatgagattatcnactgtaatatncgggaatccncaatctcttggncaacagcctatagnattcctcagaagaggttcctggcntt

SEQ ID NO: 2232 - DNA, 404 bp, Arabidopsis thaliana
  unsure at all n locations
  Clone ID: LIB22-053-Q1-E1-D10
tcatctaaacccttaaagcttctctttttcttcttcaagtcatctgtcttttggtgacttactctgttctgtggagaaacactagttttacattcgagagtttggaaaagttattattatggtaagtcaatcagctggtcaaacaagatttcgaacattcaagtacgagaacaacggagactcnagcagancaacaattgtagtgagagttattgcttgcttccaaccganggatanttgtcaggctgaatacttnagacatatactcaaaccagtgacgtagttggtttgtgagcttgtgtttgtatttttggagctggnaccttttttcnttntgtctctactttcttatacgantgtttcaagaaagaatcaanaagtgtngcgttccacacattnggggc

SEQ ID NO: 2233 - DNA, 396 bp, Arabidopsis thaliana
  unsure at all n locations
  Clone ID: LIB22-054-Q1-E2-C7
gaatttagggtttttctctcccccgagcttgcttttccgttgggtgaacgactaccgttgattttcttcgtttttttggataccgattcgattctctctcaccgatttttgaggttctctatttttcgtggataagaagataaagttattgtttattgataagttttctgctgggaagttgcaactttttctagatttaggacgttacaaatttcaatcatgagtgcatcatgggcagatgtggctgattcagagaaggccgtttctcagtcaaagcctccttatgttcccccacacctacggaacaggccatcagagcctgttgctgctcctttgccananaatgatcatgcagggtatggtggtcaaccagctgggtctcngttgggctcctcc

SEQ ID NO: 2234 - DNA, 490 bp, Arabidopsis thaliana
  unsure at all n locations
  Clone ID: LIB22-051-Q1-E1-G5
tgttagncctgccggtaccgatccnaaaattcccgggtccacccacgcgtccggaaaggaagaggcagatctgttattctctgttgaagtctgattgatctgatcggagctattgcggaggaggggtttactgcaattgcacggtggtaatggctgcggttccgcctnnnnnnnnnnnnnnnnnnnnnnnnnnnnnnnnnnnnnnnnnnnnnnnnnnnnnnnnnnnnnnnnnnnnnnnnnnnnnnnnnnnnnnnnnnnnnnnnnnnnnnnnnccacgtctcaaatatcanaggatgggtggcaacgttcctgcgttgctatctaacgatgctgcttcctgcatcgctgttgctgcgaggatgatcgcgcttggtacgcacgacggtaccgtgcgtatcctcgatttattgngggaatcaggttaaagaatttcgtgcccacactgctccggttaatgacatcaactttgacactnagggagagtatatcc

SEQ ID NO: 2235 - DNA, 429 bp, Arabidopsis thaliana
  unsure at all n locations
  Clone ID: LIB22-051-Q1-E1-G6
acgcgtccgcaatacacaaacaaaacaaaaaggatgaaaatgcaaacactaaacttcacttcttctctcttgttcttgtcttttatcttcctctcatgtgctctgcttatctcatcacaacaatctccatcacagccacattctgagcctccgtcacagctaccttttgagcctccggtagagtcaccattcttccctccgtcacagccaccaatattcgtgccaccgtcacagccaccttctttgcctccgtcacagtctcagtcaccttctctcgcttgcaagtcaactccataccctaagctttgccgtacgatcctcaacgctgtcaaatcctcaccgtcagatccttaccgttacggcaaattcactannnagcaatgcctcaagcaagcaagccgtctaggccaaagtcatcaccagttacnc

SEQ ID NO: 2236 - DNA, 439 bp, Arabidopsis thaliana
  unsure at all n locations
  Clone ID: LIB22-051-Q1-E1-H12
acctgttcncgcctgccatgtaanggtccnagagggtcgaggnacccgtccgcaaccacngaatctcgactttgatcaattgagagagaaatgaacaccggcggtggccaatacacggattttccggcggtggaaactcacggaggacagttcataagttacgatatcttcggtagtttattcgagatcacatctaagtatcgtcctccgattataccaattggtcgtggagcttatggaatcgtttgctcngtgttggatacggagacgaacgagctantagcgatgaagaagatagctaatgcttttgataatcatatggatgctaagcgtacgcttcgtgagatcaagcttcttcgncatcttgatcatgaaaacattatagctataagagatgttgttccaccaccactaagaagacagttcangtgaggtttat

SEQ ID NO: 2237 - DNA, 428 bp, Arabidopsis thaliana
  unsure at all n locations
  Clone ID: LIB22-051-Q1-E1-H7
aaacaattttggcaactggggggtacggcagagcatacttctctgcaacctcancacatacatgcacaggggatggaaatgcaatggttgcacgggccggtcttccactgcangacttggagtttgttcaattccatccaactggtatatatggggccggatgtctcatcaccgaaggatctcaaggtgaaggtggtatccttanaaacagtgaaggtgaacgttttatggaacgatatgctcctacagccaaggatcttgcatcaagagatgttgtctccagatccatgactatggaaatcagggaaggtcgtggtgtangaccgcataaggatcatatctatctccatctgaatcatcttcctccaagangttctaaaagaaaggcttcctggaaatctctgagaccgctgccatccnttgctggt

SEQ ID NO: 2238 - DNA, 428 bp, Arabidopsis thaliana
  unsure at all n locations
  Clone ID: LIB22-052-Q1-E1-A1
acgcgtccgcgagacgacactagaagatttcgataacacattcacaataaacacaagagggtctttcttgtgttgcaaggaagcagctaaaagggttatgagaggaggtggtggaagaatcattatgatgtctacatcaatggttggtggtctcgccccgggttatggagtttacgcagcatcaaaggccgcctttgagacaatggtgaaagtgttggcgaaggagcttaagggaagccggataaccgcgaattgcgtggcgccagggccggttgcgacggagatgttttatgctggaaagagtgatgaaacggtgaaaatgcttgcaggggcttgtcctatggggaggatcggtgagtcaaaggatataaccganattgtaagggttttggccccgttaagggggggaaaggggnttaaacggccaa

SEQ ID NO: 2239 - DNA, 406 bp, Arabidopsis thaliana
  unsure at all n locations
  Clone ID: LIB22-052-Q1-E1-A11
gtcttcgtcggagctgtatttaacaaggaagagagtaaacacatcgtaccgatcggtacgcttcgcaattcccggtttatgtcttgtttccggtttaagctctggtggatggcccanagaatgggagaaatgggccgagatattccctacgagacgcagttcttattggtcgagagcaacgatgggtcccaccttgantctgacggagctaacggngtcnagtgtaaccagaaagtttacaccgttttcttgccgttaatcgaaggatctttccgttcgtgtctccaaggaaacgttaacgatgaggttgagctctgtttggagagtggtgacgttggacactaaacggtcgtcgtttactcactctctgtatattcacgccggtacagattcgtttcagacaata

SEQ ID NO: 2240 - DNA, 415 bp, Arabidopsis thaliana
  unsure at all n locations
  Clone ID: LIB22-052-Q1-E1-A2
acgcgtccgctcatcagtgtgaggacacagcagcgagactgctcgaggtactgctcaacaacgtgaagattagagattcaaaagccaccaagactgcaatcttgccattgtctcagtacctcttggatccacaaactcaagctcancaggcgcggttactagcaactttggcccttggtgatcttttccagaatgaagctcttgctanaagcaccgatgcagcttctgcttgccgtgctttagtcaatgtccttgaagaacaacccacagaagaaatgaaagtagttgctatatgtgctctgcaaaatctcgtcatgtatagccgatctaacaaaagagcagttgccgaggcaagtggtgtgcaggtcgtcntggatctgatcaattccanngatcctgaaacgtccggtcaagg

SEQ ID NO: 2241 - DNA, 482 bp, Arabidopsis thaliana
  unsure at all n locations
  Clone ID: LIB22-052-Q1-E1-A3
aactgttacgcctgccgttaccgtgccangtatcgnnggacgactcacggcgtccgcccacgcgtccgcacaattaacatttcctagcaaaaaccttaattgtgtttccatctcaggagtgattcgaagaaggaagtatctactagaagtcttcaactggtatatctcagagcaatggaaacacaattaaggtttttgctaggaaatgttaaattgggaagtcataagcggcatcagatatggttcttgaagaagtttcttttgggtccggagaaagaaacacttttgatagatatagtgagattcgtttgctgtgttattcatccaactaacgaaatcatcagatcagagatcatgccaagatgggctattataggttggcttttggaactgtgtaggcaaaatcatcacatcgagcgaagcgttatgctggctctgttttacgactggctcntccttgaccaaagaatccataanatttt

SEQ ID NO: 2242 - DNA, 487 bp, Arabidopsis thaliana
  unsure at all n locations
  Clone ID: LIB22-052-Q1-E1-A4
aantgttagcctgcccgtaccgggtccaaaattcccgggtcnacccacgcgtccgggggatgttgcccactagaagcaatacttgccatactcaaacagacaacatcaagcctccaacccaatgtgacagttactacacttgtcctganagcaacacttgttgttgtctgtttgagtatggcaagtattgctttgcttggggatgttgcccactagaagcagccacttgctgtgatgacaactatagttgctgccctcacgagtacccggtttgtgaccttgatcaaggaacctgtttattgagcaagaacagtccanttaatgntaangggcntaaagccttaanccgcaatnccantccggncacacagggcaaaagtacatttcnaaaacatttggctctctcaaaannggactcggggtcacagggagaaaagatttcncccctaaggggnttttccaaggngttttaaaggggtngtgttta

SEQ ID NO: 2243 - DNA, 449 bp, Arabidopsis thaliana
  unsure at all n locations
  Clone ID: LIB22-052-Q1-E1-A5
acatccgggtcgacncacgcgtccgcacacccactcatggcgtctcgaagagttttatcatctcttctccgttcatcttccggtagatctgccgccaaattagtcaaccgaaaccccaggcttccttctccttcacccgcgcgtcacgccgctccatgtagctacctcctcggccgcgtcgccgagtatgcgacctcttcaccggcaagctctgctgcgccatcctctgctcctgctaaggatgaggggaaaaagacctatgattacggtggcaaaggtgcgatcgggcgtgtttgtcaggtcatcggtgccattgtcgatgtgagattcgaggatcaggaaggattgcctccgatcatgacatctcttgaggttcaggatcatcccacaaggctggtgcttgaggtgtctcatcatttgggtcaaaatgtcgttaggaccattgctat

SEQ ID NO: 2244 - DNA, 418 bp, Arabidopsis thaliana
  Clone ID: LIB22-052-Q1-E1-A7
aaaaaaactaaactttcgatgtttcaatggcggctgtgaactcgaaagctcttaactttatgtaggaattggcaaattaaaggttttgattgacgaaattggtgattaattgcttaagctgctggtgcttagaggaagatacgtgttgctgatttcaatttgcttccacaatgttgcttcaactacaagttgttaaagcttgattctttttgggacatgagcatgtgacttatgaaagttttaagtctttatttgtgatttgagctggctaagagaagactcttgtctctgtttgatagtagtcatggtgatcattctcctattggtcttctttgttggttcttctgtgagccaaccatgtcatcccaacgacttatctgcgctccgggaattggcaggagcgttgaagaacaagtct

SEQ ID NO: 2245 - DNA, 475 bp, Arabidopsis thaliana
  unsure at all n locations
  Clone ID: LIB22-052-Q1-E1-B3
tgttagcctgcccttaccgggncanaattcccgggacgacccacgcgtccgtttctcgtgtaaggtgtattcaagagatttacaggggatgatgggaagtttcagcaatctcttacggaagatgctaaaggaatacttagcttgtatgaagcggcacacttgggaacaacgacagattatatattggacgaagcgttgaagtttacatcgagccacttgaagtctttattggcaggagggacgtgccggcctcatatcttaaggcttataagaaacacactttatttacctcaacgttggaatatggaagcagtaattgcaagggaatacatttcgttctatgaacaagaagaagatcacgataagatgctactcagattagccaagctcaatttcaagttattgcagctgcattacattaaagaactgaaatcntttatcaaatggtggatggagctaaggcctaaatccaant

SEQ ID NO: 2246 - DNA, 479 bp, Arabidopsis thaliana
  unsure at all n locations
  Clone ID: LIB22-052-Q1-E1-B4
tttacgccgncctttaccgggccaaaattcccggancgacccacgcgtccgcgtcgagctggaaagtttttcagctatgttcaagaatacgacgagaaggaccctcaaatccattccatcatgtgtttttgggtccttctcgtcgtantcttgaacatagntgaaaaggacccaaaancacatgatggaatggatttgagganagttacaactaaggatttgantgcnaaattcggtcttaaanaanatactantgactttatnggtcatgcagtggcacttcactgtnatgacaatcatctccatcaacctgcctatgatacngtaatgagaatgaagctctacgcagagtcccttgcacgttttcanngaggttcaccatatatctatcctctctatgggttgggagaattgcctcaggcatttgcacgacttagtgcgtcnaatggnggggacnttataagtttaaanaaaactgg

SEQ ID NO: 2247 - DNA, 405 bp, Arabidopsis thaliana
  unsure at all n locations
  Clone ID: LIB22-052-Q1-E1-B8
acgcgtccgaaaagtttcgactcgtccaggggacttgatcagtctgagatagtagtttcttcgcactccactagaatgggctcttctgcanaacaggtggagcgtaagaatgatatactcaatggtgattttataagccattggcanaatttgcagtatggccgctcttgccagaattctcaacatccgcctgtgttgtancctgctcctgttgtagtgccacctgcttatctccaggggcgtttaccatgggatggtcctgnaagacctctggcttacaccaatgctgtgaatcaactcatgacctacggacctcgtcttgtaccggttgctcctgtacaacctgtttcaaccaggccacccaacatttaacctcgttacgctatgaaaatcccagatatcnaa

SEQ ID NO: 2248 - DNA, 425 bp, Arabidopsis thaliana
  unsure at all n locations
  Clone ID: LIB22-051-Q1-E1-F8
acgcgtccgcncaaaccctaggtcatggctgggatgtacaatcaagacggcggcggaggtgcgcctattccgtcgtacggtggtgatggatacggcggagggggaggttatggaggtggtgatgctggatatggtggacgcggtgcctctggcggaggtagttacggcggacgcggtggttacggtggaggcggtggtanaggaaatcgaggcggtggaggtggtggatatcaangaggtgatcgcggtggaagaggaantggcggcggaggcagagatggagattggcgttgtcccaaccccagttgtgggaacntgaactttgcaacgagagttgantgtaacaagtgtggtgcacttgctccttctggtactagttctggtgctaatgatcntggacgtggtggctataacccgaacgtgga

SEQ ID NO: 2249 - DNA, 455 bp, Arabidopsis thaliana
  unsure at all n locations
  Clone ID: LIB22-051-Q1-E1-C4
cgggtcnacccacgcgtccganaaaaaggaaaagaatagtccnnnnnnnnnnnnnnnnnnnnnnnnnnnnnnnnnnnnnnnnnnnnnnnnnnnnnnnnnnnnnnnnnnnnnnnnnnnnnnnnnnnnnnnnnnnnnnaaaaccctaatttctctttttcttctctgatcaaaattggtttcgaaaagggaggagagtgaaagatatacatacatacacacgaaaggggtttaagatgtctcttccgctactggagtgtaagtacgtgacggaggagtttgttcgtgaaggtaagaatggcaactatggaaccaagctgcccagctctgtgccgatgcttcgtttcctctacgagctctcttggattttggttcgtggcgaattgccaattcagagctgtaaggcagtgttgggaaagtgtggagtttttggataagccatcgagagaagaattagc

SEQ ID NO: 2250 - DNA, 435 bp, Arabidopsis thaliana
  unsure at all n locations
  Clone ID: LIB22-051-Q1-E1-C6
acgcgtccgcnaaaatgttttagggtttttctttactcgattaagctcactagttcttcgcaacgtagttagagatcgacactggcgcggtggatttagggtttttttcctccgcgactacgctcggcgtttcgatttggaaccctaagctatgtggaacaacaacgatggtatgcccttagctcctcctggtactggcgggtccatgatgccgccacctcccgctgctcatccttcttacacggcgcttccgccgccttctaatccgactcctccggtcgagcctactcctgaggaagcggaggctaagcttgaggagaaggcccgaaaatggatgcagctaaattccaaacggtacggcgacaagaggaagtttggattcgttgaaactcaagaagggaggacatgccacctgagcacgtcaggnagattatc

SEQ ID NO: 2251 - DNA, 367 bp, Arabidopsis thaliana
  unsure at all n locations
  Clone ID: LIB22-051-Q1-E1-C9
attttacgaattcgaatttcaagtttccgattctctaaatccaattgatttcactcttcctcaaatgaaaaagccctaattttgatcgtctaaatttcatacatgggtgcgaacgagtttcgtttcttcctctcctgcgatatcaattcgccggtcacttttcgtatcgagaagcttgatggaaacctccccgtcaagaaatcgtctgattcgggagttgtctccatcgcagaggagaanaaaccagagctttacattgagtgtgcattgtacattgatggagctccttttggccttcccangagaanaaggattgaaaactacaggngcaccatactgctgggaacgaactcntcactctcagttc

SEQ ID NO: 2252 - DNA, 418 bp, Arabidopsis thaliana
  unsure at all n locations
  Clone ID: LIB22-051-Q1-E1-D11
cgtgtttcatgtcaagcctcctccgtcacttcgccttcttctccttccgatgtcaaaggaaaatctgacctgaaagactttctggcaatagatgattttgacacagccaccattaaaacgattttagacaaggcttcagaggttaaggccttgctgaaatcaggggagagaaattatctaccttttaaagggaagtctatgtctatgatctttgcaaaaccttccatgagggactcgggtttcgtttgagactggttttttcttgctcggtggccatgcgttatatcgaggtcccaatgacattcagatggggtaaagcgggaaggaaagctcgtgatgtttgcncgtggtcctttcaacgccaaanatggggaatcagtaacggggcccctgntatttggcccaacangggaaattc

SEQ ID NO: 2253 - DNA, 432 bp, Arabidopsis thaliana
  unsure at all n locations
  Clone ID: LIB22-051-Q1-E1-D12
atttcaaacacaaaagtttcgtctccgatttaatctttctacgtcttggtttatgagctcaaaggagaagcccactctcggaggtacgcggattaagacccgcaaaaggaatattgctgctcctctcgaccctgctgctttttctgatgcactagttcagatttatctggataatgctggtgatctggaacttgttgccagnagtttagagtcatctgatcttaatttctcaagatacggtgatattttctttgaggttgttttcattggaggacgtactcaaactggttcagtgaaatctgatgaaggggaacaccacccttactctataatcgactgtgaaccaannccgtngaaagctantttaccatcaattgtatacanacangaaantttttgcngnngggaaaaccctccctaagtaagaaacct

SEQ ID NO: 2254 - DNA, 466 bp, Arabidopsis thaliana
  unsure at all n locations
  Clone ID: LIB22-051-Q1-E1-D8
tgttagcctgccggtaccgatccaaaattcncgggtcnacccacgcgtccgatccttttctctctctctctctcgattctagcttcatcgctgttccaaatttaggaagtttctgaggtgggnnnnnnnnnnnnnnnnnnnnnnnnnnnnnnnnnnnnnnnnnnnnnnnnnnnnnnnnnnnngagtcttgacaaaacccaaattccaagttcacatcttttcnagttgttttcatgtttaagatttttggtcccttctgacttggacatagattctattgaggaattgagtacgtaattgaaatggatctatgcntgctttacnagttagttanaagtcaaatctctgaattgcttctgatnaattgcagaaacaggtcacaggtctgtctnanatagttacattgatggggttgctcntggntatcgtgtcacaggaganaagntacagaaattgatgngacaaa

SEQ ID NO: 2255 - DNA, 415 bp, Arabidopsis thaliana
  unsure at all n locations
  Clone ID: LIB22-051-Q1-E1-E10
acgcgtccgctttgtactctctcctcacattancttttgttggtgggattttttgaggatggtgattgctgcagctgtcatcgtgcctttgggccttctcttcntcatatctggtctcgctgtcaatctctttcaggcagtttgctatgtactcattcgaccactgtctangaacacatacagaaaaattaaccgggtggttgcanaaaccttgtggttggagcttgtatggatagttgactggtgggctggagttaanatccaagtgtttgctgataatgagaccttcaatcgaatgggcaaagaacatgctcttgtcgtttgtaatcaccgaagtgatattgattgggcttgtgggatggattctggctcaccngtcaggttgccctngngaaagcgcattaanctgttaagg

SEQ ID NO: 2256 - DNA, 481 bp, Arabidopsis thaliana
  unsure at all n locations
  Clone ID: LIB22-051-Q1-E1-E3
ccngtcccgggtccgaaaattcccgggtcnacccacgcgtccgcncacgcgtccgagttagtgtgtctctctcgccggccgatatggccgcctccgtagcaaactgctgcttctccgtcctcaatgcctccgttaaaattcaatcttcgtccatctcctcaccgtggtgtttcgtgtccgcatcgtcgttgactccccgagcttcctccaatattaagaggaaatcgtcgaggtctgattcaccatctcctatattaaacccagagaagaattacccaggtagagttcgagatgaaagttccaatcctcctcaaaaaatggctttcaaggcttttgggtcacccaaaaaggagaaaaaagagtctctttctgattttagtcgagaccaacagactgatcctgccaagattcacgatgcatcctttctcaacgctgttgtcaaggtttattgcactcatactgctcctgattaatcccctcc

SEQ ID NO: 2257 - DNA, 429 bp, Arabidopsis thaliana
  unsure at all n locations
  Clone ID: LIB22-051-Q1-E1-E6
aaaaaaaaccttcaccgtctctgctccgcgacgccgccttcgctttctcaaactccgatataatccttctcagagatatgtcagtaatggatgaatcaggcatgtttaacgttcaacaaaccattggaagtgtattgtgttgcaagtgtggtgttcccatggcaccaaacgcagccaacatgtgtgtgaattgtcttcgttccgaagtcgatatcancgaaggtttacagaanagtattcagatcttctattgccctgaatgcacttgttacttacaagccaccaaaggacttggatcaaatgtcantgggaatctaaagagcttttgacattttgtatcaagaggttgaagaatctcaataaggttaagctgaagaacgctgaattcgtttggactgagcctcattcnaagaggattaaggntaagtt

SEQ ID NO: 2258 - DNA, 395 bp, Arabidopsis thaliana
  unsure at all n locations
  Clone ID: LIB22-051-Q1-E1-F11
atattttnnnnnnnnnnnnnnnnnnnnnnnnnnnnnnnnnnnnnnnnnnnnnnnnnnnnnnngatggatgtcttatagaatgaacaaaacatcctctgtttctcttgtccttgtccctttttccagatcttaaggttttccacattttatcatctgggtcctctccttaatgatttgaagacactcaattcctatttgatcggggactagaatttggattctgtttcangacaaaagtagatttccctgtctctttcccgtttgattttcaataagatgaatccggaggagcaaaagatggaatctgcatcggatctgggcaagctcttcattgggcgggatttcangggacacagatgaagaacgactgnaaggagtattttggcaagtattng

SEQ ID NO: 2259 - DNA, 434 bp, Arabidopsis thaliana
  unsure at all n locations
  Clone ID: LIB22-051-Q1-E1-F2
acgcgtccggacaaagctagatttgattccctctcttcgatttttaattccttgctcctctgctcgtttctctaccggcgacgtaacctctctgtctctgttctgttccttgcctgctcgaggtgtgcatcttcttggaatcagctgactttgcggtcaatcggatttcttgggattgtttggagaaactttggaggtgatggacaacaaaaatgatcaggatattgatgttagatcagtggttgaagctgtttccgccgatctttcctttggngctcccctctatgtggttgagagcatgtgcatgcgctgcnaaggaaaatggnacaancagatttcnantgaccttaattcctcacttcagaaaggtcntaatatctgcanttgaaatgtccgcattgcgggggaaagggataatgaactttcagttncgc

SEQ ID NO: 2260 - DNA, 442 bp, Arabidopsis thaliana
  unsure at all n locations
  Clone ID: LIB22-051-Q1-E1-F5
ngttagcctgccggtaccgatccgaaaattcccgggtccacccacgcgtccggntcaataaattcgttgatcaggaggtcgacatgttcaggcttgaaggatgtctgtgaactgggaagcttgaggagttccattatatacccacagaagtcaaataactcaggatttggttggcgagatggagactctgatgacctttgtcagaccgatatggatgatctctgcaacattgaatcagtcanaaacaatgttttgtcacagtccaccgatttaaacaagagttttaatcccatgtgtgattccacggataactggtcttgcaagtttgatgaaagcccaaaagtgatgaaaagcanatctaacctgctttcttaccaagcntcncaactcccanactggnnttccatngtgaggancgaaaccatcttaacatttgccnggg

SEQ ID NO: 2261 - DNA, 482 bp, Arabidopsis thaliana
  unsure at all n locations
  Clone ID: LIB22-051-Q1-E1-C2
ccgtnccggtccgaaaattaccgggtccacccacgcgtccggnttgcttgccttctgggcttcacgattctcacgacatctgtttatcttctccgatttccacgtccatggatctcagtcaatgttccttaatctctctttttgattagtccaatctccactaatctctgacctcagatcgcttccgacgccgctgaactgtgtccgtcttgatctgtgtttaggagaaagcttctagggtttttgttttggttgctgagtagaatttgttggatctgaaacggaaatcaaaatgggctttttcaagtacgatactaggattttgtggatttgganttgggatttcattgggacttgttattggttacgttctcttcgtctacttgctccccaacgacgtcaaggatcctgaaaatccgttcaaatancctgaccaagattcccanagctatgcntacgggntgctccaagaagaaaactcc

SEQ ID NO: 2262 - DNA, 458 bp, Arabidopsis thaliana
  unsure at all n locations
  Clone ID: LIB22-051-Q1-E1-F7
acgcgtccgcncacgcgtccgcccacgcgtccggtacgggaaaaaaaaactttgaactgctctctctctctcgaagctctcnnnnnnnnnnnnnnnnnnnnnnnnnnnnnnnnnnnnnnnnnnnnnncctccttttgaaagatcgaaacgtctccacaacttctctttgcctcaactccgttggggtcaacaaagattcctcagatgcgtcaatctaccatctcctcctccttcttcttcctctcccgatcacgcagccaccaatagatccgtctccatagctggaagtttcncttacnnnnnnnnnnnnnnnnnnnnnnnnnnnnnnnnnnnnnnnnnnnnnnnnnnnnnnnnnnnnnnnnnnnnnnnnnnngaagctgcgtgtangtgaacctggcnganagaattgaaanttgggngttaaagnangagaaagaagtatcaatccgantgagtgg

SEQ ID NO: 2263 - DNA, 380 bp, Arabidopsis thaliana
  unsure at all n locations
  Clone ID: LIB22-050-Q1-E1-F8
agaaagaggaattggttttaagtgttaagagagaaaagcctttgcgcaatctcactgtgtgttggtatatattacggcgccaaggtttctttgatcgatttcttcttcttcttctggaaaattatctcgttttccgtttttagttctttgagtttgggatcgttcaatggagcccaacgtagtggacatcgctactcctcctgccgcttcntgctcgagaattcgaacgccaacaaaggctgaaactccagaagtgattgatgtggaggaatatgatttgcaaaacgggtggngttcctaatgggcaacaatggttgattatcagaacaaaggggaaaggctatagangtttgantccaaggtcttacgnggtgaccatg

SEQ ID NO: 2264 - DNA, 423 bp, Arabidopsis thaliana
  Clone ID: LIB22-050-Q1-E1-F9
acgcgtccgcggacgcgtgggcccgccaccattaagaaacgctttcaacgatgtttacatcgcgtatgagttaatggacactgatctccatcaaatcattcggtcaaatcaagcattatccgaagaacattgccagtattttctttaccagatcctccgtggattgaaatacattcactctgcaaatgtgcttcacagggatttgaaaccaagtaatctcctcctgaacgcaaactgcgacctaaaaatctgcgattttgggctagctcgagtcacttctgagagtgatttcatgactgaatatgttgtcacgagatggtaccgtgcaccagagcttctcttaaactcttctgattatactgcagctatcgatgtttgggtctgtaggctgtattttcatggagttaatgggaccgtaagcca

SEQ ID NO: 2265 - DNA, 442 bp, Arabidopsis thaliana
  unsure at all n locations
  Clone ID: LIB22-050-Q1-E1-G10
acgcntccgaacagtaaatactatatctactcttagttccaaacaacaaaactatctacacagctttgccttcttccacaagggtttgcttgtagactgtgagaagtttcggagaccaagctacttctgttgctgtttccctttgtgtcaaatccattgnacngactgaatccttgcgntttttnctcnggttttgncggtannttatagnacacagcggctcttangnatgcttcgatattcattctaagagattctgagaccaatcttgctcatgtantagttantgttgtattagtancattgattcttccttcagtttgatcnccatgaccgttttccnaaacatgatgaagtcgctgaggtagggtatatcggaaccggtgcatccccaggtataangggacagggtngaaactagcgttaggacccgttgggctcc

SEQ ID NO: 2266 - DNA, 494 bp, Arabidopsis thaliana
  unsure at all n locations
  Clone ID: LIB22-050-Q1-E1-G2
angcttccggtgccggtccanaattcacgggtcgacccacgcgtccgcccacgcgtccgctaccagacaatcatctcaaaagcaggaagggagaacccaatcccgtggaacgaagtgaaatgcgtgctgtggttccttaacccagacagctatgctgatactcctgagaagcagaaaactattctgcagaatttcttcgagcacatggcaatcaagattactcggcgataagctttacaaaatccgagtagttctcacaatgaacaacgtcagattctcactcttacaggttgagaagctangccagagaaagcttcttcttccttggagagtctttcncacacgattcagaaagctttggtgcattccaagacacattaacaatccagaagcctatgctagtctccagaccaantctcctaatgtcnttaatcnccatccgcctttctgacatcnagtttggtaactacacctctcttcttcgcnaaatctct

SEQ ID NO: 2267 - DNA, 504 bp, Arabidopsis thaliana
  unsure at all n locations
  Clone ID: LIB22-050-Q1-E1-G3
ttacgctgccggtaccggtccaaaaattcacgggtcnacccacgcgtccgaacaacgccttccgggagaaaaagggncnnagaaatgggcgggtcgcaaatatctggggagtagtttggntatcgtcgactcttcagcattataataatcggatttatatccgagattatccgattccgtgtcactcttctaatccaatttgcaattcttttaatttcaaaagacgttcgttctctccttcntcccccaaatttaacgaccatgtcgttaacccttcctcttcttatttatcctccaagctttctccaattcgaacccattcctctttcgctgcgtgtggctgctcctggattcaagacaattcaatggttcatgattatgctacancaactaatgggacgtccaagcgttgctcggcgttaccaacaacangacacagtgggatgtctcntcggtgtcaagatctttttgaattcataangctccgggtcctctcgtaaaaca

SEQ ID NO: 2268 - DNA, 495 bp, Arabidopsis thaliana
  unsure at all n locations
  Clone ID: LIB22-050-Q1-E1-G4
aagttnccggtgccggtccanaattcacgggtcgacccacgcgtccgaaaaaaacttgaaactctctgaatctcacaagaacattgcaaggtaaagaaaccacaagatcatcactcgaagtaaaaatggtgagcccatttagatctccatgttcttcacccaaaaaatcaagaaaagcaagcaagaacccttattcaaatcgtggacttgataaattctctgagcttctctccgagctagacgagaagaggcaaagcatctactcgaagaagctcgattccggtggcccgcctcttgttcgatttgtgttcacaagctccggtgagtgtgtccccgttgtgatcagatcatcttatcttcacaagaagaacaagaagacgaaagatgttgtagctgataaagtcaaaacagaagtcaaggaagcaaanacaagagggaaatcaagaacacagagcctgaaacaggagcaaaaaacaagagctgtgtttataaacg

SEQ ID NO: 2269 - DNA, 438 bp, Arabidopsis thaliana
  unsure at all n locations
  Clone ID: LIB22-050-Q1-E1-G5
aatttcattctctcttctctctccaatttcacaacaatgggagtcaaaagtttcgttgaaggtgggattgcctctgtaatcgccggttgctctactcaccctctcgatctaatcaaggttcgtcttcagcttcacggtgaagcaccttccaccaccaccgtcactctcctccgtccagctctcgctttccccaattcttctcctgcagctttcctgnaaacgacttcttcagtccccaaagtaggaccgatctcactcggaatcaacatagtcaaatcggaaggcgccgccgcgttattctcaggagtctccgctacacttctccgtcagacgttatattccaccaccaggatgggtctatacnaantgcttaagaacaaatggactgatcctgagtcagggaaanttgnatccngagtagggaagatcggtgcaggg

SEQ ID NO: 2270 - DNA, 412 bp, Arabidopsis thaliana
  unsure at all n locations
  Clone ID: LIB22-050-Q1-E1-G7
gacattagtttgttgttgactactgtaagggttgggtttcgaaaagagacatggaggagtgttattaggttgattgttctcaagtacctccagtgtcaaacaaacattgacgattgattctcttcccataatttattgttatgcattacatatcacagtaaacggactttcagtcaacaccgcatttatttgccctcttcattgtttcacgtacgtaatcaaggaccaagggattttcttcttttggctaccatggccacaanatgcttttggtgttggaccactttgctcttctgctctcagctgcttaccggctttgcccgagcttcgnctgcaggcggcgccaaagagaaaggactctcccaaactcccacctgggccggttgccctcgtctgtaccttccttcaattn

SEQ ID NO: 2271 - DNA, 420 bp, Arabidopsis thaliana
  unsure at all n locations
  Clone ID: LIB22-050-Q1-E1-G9
atataataactcaacaaaatctctctgtccaatttccaaagtcaactcctttttggtttttgttttactttctgttttcctcttctctactctggaacaacaactacacacacacacaaaaaaaaacaattttctgtctanatanatattaaggatccaaattagggagagaccaaagaggaaattaataacaatcaatccaacaacgaatggagattgaagaagcgagtcgtgaaagtggacatgttgtgtgcggatcatggattcgtcgcccgaagaaagtaaantgggttcttatcgcnaaagcttcnaaacgccgtggctcatctgtttcntctcctgctctcctcaacatcntctcttttgaccccattactgcttctctttcctcctctcctttggcaacacacacgcntaagg

SEQ ID NO: 2272 - DNA, 429 bp, Arabidopsis thaliana
  unsure at all n locations
  Clone ID: LIB22-050-Q1-E1-H8
aaaccttaactttttgctcttctccctccgcctcaatcgcacgaagacgataatcgaatatggcggaactaaagctatcagagagtcgggacttaaccagagtcnagcgaatcggcgcacactcacacatcagaggactaggtctcgactctgccctcgagccgcgagctgtttccgaaggtatggtcggtcaagtgaaggcgcgtaaagccgccggtgtaatccttcagatgattagagaagggaaaatcgcgggtcgggctattctaatagcgggtcaacccggaacgggtaagacagcgantgcaatgggtatggcgaaaatctcttggcttggnaactcctttttgcgatgattgcaggangtgaaattttctcatttnnagatgtcaaangacaagaagnctttgactcagtctttccgtaaan

SEQ ID NO: 2273 - DNA, 484 bp, Arabidopsis thaliana
  unsure at all n locations
  Clone ID: LIB22-051-Q1-E1-A8
tgttacccctgccggtaccgntccaaaattcccgggtcnacccacgcgtccgcnttcatctccangatctgctgctgaagataaattagtcagcaatcgtcatagctatggcgattagggtttttcttacccttctcctcttcttatcatctgcaattctatctttctctctttatgaagatcaagccggcctcactgattggcaccaaaggtacattgggaaagtgaagcatgcagtattccacactcaaaagactggaagaaagcgtgttatcgtctcaaccgaggagaatgttgttgcttcacttgatctcagacatggggagatattttggcgacatgttctcgggacaaaggacgctatcgatggggttggtattgccttgggaaaatatgttatcactctttcatcagaaggaagtactttaagagcctgnaaccttcctgatggtcaaatggtgtgggaaacatctctgcataccgn

SEQ ID NO: 2274 - DNA, 397 bp, Arabidopsis thaliana
  unsure at all n locations
  Clone ID: LIB22-051-Q1-E1-A9
ttccctcctccgcttccaaaatcagcgagagagggagacacatagagagacagagagattgctcctaatcagaagcaatctcaccattgaatcatctattttctaccaaaaggaagcttcttttgcttttcattttgccaagtttccgtctaaatctctctactttaaaactccggcggccaacgtttccaccgatcctccgacttctttccgagtttcatcttctaacaaaggaacgaagaagctctcttcaccgtttgagtaacgtgatccggtctacaaagaaatcagtctgcgggagaaagtggaagaagactgaagatgaagagagctaagagaagatgttcacactgacactcaaaagcgaaagcctgaagtttcgtctcgaggngaaaca

SEQ ID NO: 2275 - DNA, 447 bp, Arabidopsis thaliana
  unsure at all n locations
  Clone ID: LIB22-051-Q1-E1-B4
acgcgtccgcaaaaattcttcatcgactcaaattcaaaaactcatctctctctatctctatttctctggttccatagctcaccgtcgcatcgcagatctactccttccgcaataaattttaccggcggaggtatcagatctcgccgatctgttgtagcagctactgtattttgggcttctcatttgatattggggaaacgaggagtagaggacgatggaaaatctgatctctctggttaacaagatacagagagcttgcacggctttaggagaccatggagactccagcgctttacctactctttgggattccttgcctgcgatcgccgtcgttggtgggtcagaagctcagggaagtcttcagtcctggagagcatcgttgggaaaggactttttaccccgtggatctggcattgttactcnaaaggccccntgtctaaagttgca

SEQ ID NO: 2276 - DNA, 406 bp, Arabidopsis thaliana
  unsure at all n locations
  Clone ID: LIB22-051-Q1-E1-C11
attttcacttgttaaaattttgttactttgctctatctgaaaccaaagctgccatctttctccttttgggttttgattagatctccgattttgggtttctatatattatgcgagctcacttttgttcgttctgattatctgacaatgatattctccaagcttggttcttccctcgctcgatcctcacgttctaagggatttgtgtacggcggtggtgtgagatcggcggtatttaaccaagggaggttacgagcgccgcagaatctcgaggcggccgtcaatcaggtggatggtggattagggtttttgaggcggcactttgcttcttttgctgctcgaaanggactagaagccggtgatttaagccgtgctttcgctaaccctagattgcgtcnggttcctttcg

SEQ ID NO: 2277 - DNA, 416 bp, Arabidopsis thaliana
  unsure at all n locations
  Clone ID: LIB22-050-Q1-E1-F6
acatacaaaaaaaaaacatttctttttataactcttctctagtcttctccaaatggaatggactagaggaagaatcctaggccgaggctctacagccaccgtatacgccgccgcaggtcacaattcagatgaaatcctcgccgttaaatcatctgaggttcaccgctcagagttcttgcaaagagaagccaagattctctcgtcgttaagttctccttacgtgatcggatacagaggatcagaaaccaagagagagtcaaacggtgtcgttatgtataatcttttgatggagtacgcacngtatggaacgttgaccgangcggcggcgaaagacggggggaagagtcgacgaggactcggggtagtgaaggtanacgcgcgatatactaannagggattggagtatatacantccg

SEQ ID NO: 2278 - DNA, 432 bp, Arabidopsis thaliana
  unsure at all n locations
  Clone ID: LIB22-049-Q1-E1-B4
acgcgtccgcggacgcgtgggcaacaattcgaatctgaaatctgcaattcacgagaagaagtttttttttgtaacaatggcgaatccaattcaagagattattgagaaacaagttctaacggtagcgaaagctatggaggataagatagacgacgagatagcgtctctggaaaagcttnnnnnnnnnnnnnnnnnnnnnnnnnnnnnnnnnnnnnnnnnnnnnnnnnnnnnnnnnnnnnnnnnnnnnnnacggtggatgagtattggacatggtgaatactctgagattcattctgagaaagatttcttctccgttgttaaatctagtgaacgcgtcgtttgtcacttctaccgtgagaattggcctgtaaagtgatggataaacacatgagcatattggcaaagcaacacattgagacacgtttccgtgaa

SEQ ID NO: 2279 - DNA, 445 bp, Arabidopsis thaliana
  unsure at all n locations
  Clone ID: LIB22-049-Q1-E1-B6
acgcgtccgcccacgcgtccgggatgcccgggcattgagaaggnaggacgctttcagaggcgaaaggccatggggagataccgtctgtgatccatggatctccgatcgggaaaccgtatccaagctccgtggctagtctgcgctctttggactttgaaaacttagcgaactgaaacatctaagtagctaaaggaagggaaatcaaccgagaccccgttagtagcggcgagcgagagcggntttgggattttaagaaaaagaaagacgaagcttcgttccaaagtgttcacttctttttcgccaggtttcattcgatttantgtggattggatgatggnaaaaccancaagccctcttccttcagtcgagttacttcgtancttgactgaagaatcctaaaagggcgctgttaaactgttaattgtgnaaaaggttgggaagatct

SEQ ID NO: 2280 - DNA, 484 bp, Arabidopsis thaliana
  unsure at all n locations
  Clone ID: LIB22-049-Q1-E1-C1
ctgttacgttgcccgggcccggtccaagaatacccgggtcgacccacgcgtccggtttttgtttctgtgagtgctgtgtgtgttctcggtttgtaatatctaagtcgcacaaagatcagacaaagtctgtttgcgtttgatagcattagagtctgatcgaatttggaanacctgtgagattagggtttctttttgtttgtttttttttattccgaaggagagctgcggagcaattggaattacctcggttaaagcaatcacgtagctttggatcgtttagggttttctcattgggtttgggggatttgtattctagcttcctcaaactcaatctgatggtgatgtgaagacaaggcttaatcctgttaattggcgattctagggtttttcaatggcgaacacaggcgaacctgaccgtaaaaggcgtcactttagctccatatcaccttctgaagctgcagncgccgtaaaagaaacagccntt

SEQ ID NO: 2281 - DNA, 429 bp, Arabidopsis thaliana
  unsure at all n locations
  Clone ID: LIB22-049-Q1-E1-C3
ttatccangcaatgggaggtgctccatctggtcctgaagctggccctcgaacaatgaaattccttgacaatttccatgtgcaaacaangagagagcatgctttgttgggagataacgagaatggtgagaatgatgaggaaggcggtgaggttgcagacccaanatggntcaccattaaagcagctctgctgctactgttaggagctgccattgcagctgcatttgctgatcctttagtcgacactgttaacaacttctccgcagccacagggattccgtctttcttcatttccttcatcgctttgcctttggccaccaattcaagtgaagccgtgtctgccancatcttcgcatcccgcanaaagatnagaaccggctccttaactttctccgagctatgtggtgggagtgacaaatgaacaacattct

SEQ ID NO: 2282 - DNA, 494 bp, Arabidopsis thaliana
  unsure at all n locations
  Clone ID: LIB22-049-Q1-E1-C4
ctgttactttgcccgncccggtccanaataaccggggtcgacccacgcgtccgctctcntcttcttgctcctttctcttctctctcacgcgttgctgttgttgactcttatttctctctgggtttccttaaaccttccgctacaatcttctcctcttacatgcgaagcttctccgattctcaagttttgatagcggcttaatactcgcaattatggatttcgcagccaagaaattcatcaacaaccccaacgatgttgtaactgagttcatagagggtctggtagaaacttatcctggactccagtatttggatggttttcctgaagttaaggtggtgctacgagctgatgtctcggctgcaaaatatgacaaggttgccgttatctcaagtggaggcaatgggcaatgagccaacaaatgctgggatacnttggagaaaggaatgctaacanctgctaatttgtgggaaangtctttgcctccccaacaantt

SEQ ID NO: 2283 - DNA, 439 bp, Arabidopsis thaliana
  unsure at all n locations
  Clone ID: LIB22-049-Q1-E1-D10
acgcgtccgcaaaagcatctctctgtttcttctcctctcntcaagctttttgtttcgtctcagtcgtcgtcatcatctctgacagcaaggttattcacataggcaaagaagtcattcttttgcatgctgttttccaataaagttaattcnctaacagaacaagtttcgagattggatattgacgacaacgatatgggacttggaggtagtgaaacaatggaatgcaagtgtggtatgcctctgtgtatctgtgtagctcctcccaaatcaactgataaaccaaacccacctgctaccattgctcctgtggttcttcctcagttgaagtcanaggcttcagcanaaagtaaaggttccacttccagcagcaatgctagatcagctctaaatgctggactagacaccccccaaagagactatgaagccagtggggagggat

SEQ ID NO: 2284 - DNA, 366 bp, Arabidopsis thaliana
  unsure at all n locations
  Clone ID: LIB22-049-Q1-E1-D12
ccgccaaattagtcaaccgaaaccccaggcttccttctccttcacccgcgcgtcacgccgctccatgtagctacctcctcggccgcgtcgccgagtatgcgacctcttcaccggcaagctctgctgcgccatcctctgctcctgctaaggatgaggggaaaaagacctatgattacggtggcaaaggtgcgatcgggcgtgtttgtcaggtcatcggtgccattgtcgatgtgagattcgaggatcaggaaggattgcctccgatcatgacatctcttgaggttcaggatcatcccacaaggctggtgcttgaggtgtctcatcatttgggtcaaaatgtcgttaggaccattgctatgggatggn

SEQ ID NO: 2285 - DNA, 428 bp, Arabidopsis thaliana
  unsure at all n locations
  Clone ID: LIB22-049-Q1-E1-D3
aaaagcatcaaccaaaccatggctgcgagaaatttggagaagatggcttctattgatgctcagctcaggcttcttgctcctggcaaggtttctgaagacgacaagcttatcgagtacgatgctctgttactggatcgatttctcgatattcttcaggatttgcatggccaggatgtcagagaattcgttcaagaatgctacgaagttgcagctgattacgatggaaaccgcaacactgagaagcttgaggagcttggaaatatgctgacgagtttggatccaggggattcaattgttgtcactaaatcattctccaacatgcttagcttggctaatcctggctgaggaagtccagattgcttaccggcgtangattaagaaactcaagaaaggtgatttcgctgatganggcctctgcaacaacggaa

SEQ ID NO: 2286 - DNA, 429 bp, Arabidopsis thaliana
  unsure at all n locations
  Clone ID: LIB22-049-Q1-E1-D7
acgcgtccgcccacgcgtccggttgcnatggaccaacgcaccaatgtgaacggagatnccggcgccgganaccggaagaaagaagaaaggnttgatncgaatgnanaaccancgttcaagattnggngatataaagggggngaatcccaaacantgttgggttaaaaatcccttttgagatcaatgaagttacgtcgtcaganacattatcgccgtcgcggctttggccatcgctgccgtgtangttgatagctggttcctttggcctctttattgggccgcccaaggaacacttttctgggccatctttgttctcggccacgactgtggacatgggaagtttctcagacattcctccaactgaatantgtgggtggncacaatcctcattccttcaaccccgttccttanaatgggttggagaataaa

SEQ ID NO: 2287 - DNA, 372 bp, Arabidopsis thaliana
  unsure at all n locations
  Clone ID: LIB22-049-Q1-E1-D9
cttcntcttcttcgttgaatccgtcatcctccgatcactgaagaggtttccgattacnnnnnnnnnnnnnnnnnnnnnnnnnnnnnnnnnnnnnnnnnnnnnnnnnnnnnnnnnnnnnnnnnnnnnntctcgaggcatcaacganacgctttcgctcccattcatnattgtttgatctctatcaatcccagcacatcttcttcatctctattctcggnttcttccttctgttcgtctccacattcnaatggagatggaaagattgcanggccgtnagtggagtatgaacgcagaatcgtagctggagagttattggatggagatttatgtcaagctaggtacactaagagaacttcaagagactctacgacg

SEQ ID NO: 2288 - DNA, 435 bp, Arabidopsis thaliana
  unsure at all n locations
  Clone ID: LIB22-049-Q1-E1-E1
ttgccaaggcaatggcggctcctcgagacttcatggtgaacaaagtcccgttccccttaccctctcctcagatcttcaacctggatcaaatcaatgcacttacaaccgatacacttgtatctgacaacgccttgaagtttcaggatctggaccttgtcccccataaattgaagggatatccggtcgagtttcttatccaatattgcaagggtggnccnaacttcggttcaacggcnntngaaagntnccaacnaanctctaaccctgnngctggnctccccggtcaaaagncaattcctggactaaatttttcaagcaagtgtcncaaatgagattgcgggaancanatttgcaagtttgaagacttcaatttacntccggncaataataaaacggggtccccctccttggtggggttccctgaaaaaaaataan

SEQ ID NO: 2289 - DNA, 389 bp, Arabidopsis thaliana
  unsure at all n locations
  Clone ID: LIB22-049-Q1-E1-E10
aactttcatntacaacanaaaaagttatanaaatggccaaagacntggaaggacctgagggatttcagacaagagactacnaanatccgccaccaantccgtttttcgatgcggacgagcttaccaagtggtctttatacagagccgtcattgccgagttcgtagccnctctcctcttcttgtacatcaccgttttaactgtcatcgngttacaagattcactccgacacaaaagccggtggacttgactgcggcggcgtcggaatccntgggatcgcgtgggcttttggtgggcatgatcttcatccntgtctactgcaacgccggtatctcaaggtggtcacatgaaccctgcgggtgacgtttggtttgttcttagcccnggacgt

SEQ ID NO: 2290 - DNA, 428 bp, Arabidopsis thaliana
  unsure at all n locations
  Clone ID: LIB22-049-Q1-E1-E11
ttcaacaccggggttatccntacggtgggttatcataacggtttccgtggagttcctcctcgtgggacaatagcgtcctatggctcgtggaggaaaccaaantgatgcatttctgaagaanatcctcttttttgttggaatctgtgtggtgatatttctcatctggtgaaaacnaatcacatttggtgtatttccaggtatgatcaaacttacttacttggtgcaagttgtgtatgtaaatatggtnatagctgagtgtacttgtctgctatttcgacgttgttattgtatttttgttttgaanatgaaccgtgagtctacaagcttttttacacaactcttttgttgcttttgtgttttgtctaancatcntgtgaaaactagttgtgacaataaatggtgccgtgttangacataagaagtattat

SEQ ID NO: 2291 - DNA, 463 bp, Arabidopsis thaliana
  unsure at all n locations
  Clone ID: LIB22-049-Q1-E1-E12
gggccaaaattcnggggccnaccaanncnncggncaaggcntcggcncncncttctncttcncncnattcnatggctttantacgtgaacgtcgtcagctaaatctccgtcttnnnnnnnnnnnnnnnnnnnnnnnnnnnnnnnnnnnnnnnnnnnnnnnnnnnnnnnnnnnnnnngtcgctggctgtaacggaatctccgcttgtgatctcgagaaactcaacgttctcggatgcggaaacggcgggattgtttacaaagtccgtcataaaaccacatcggagatctacgctttgaaaacagttaacggcgacatggatccgattttcacaagacagttgatgcgagagatggagattctccgccgtacagattcaccgtacgtcgttaagtgtcacggaatcttcgagaaacctgtcgtcggtgaagtatcgattctaatggagtatatggacggngggac

SEQ ID NO: 2292 - DNA, 484 bp, Arabidopsis thaliana
  unsure at all n locations
  Clone ID: LIB22-049-Q1-E1-B3
ntgttacgttgccgggccggtccanaattnccgggtcgacccacgcgtccgcccacgcgtccgatcgtttcaatttctaaaattctcctctctcaacgcaatcaccaaatccaaatttagggtttcttttctctttctgcgatcgatctctgaaaactcataactgttgtttaatcgtgaagatggcatcaaacggatctttctctgctcagagaaacgcaaacgctagaacaacgatgaagagaagaagcgacaatcgcggttacggtggcggaatcggaggttatcaagaggagacgaaccgttacgcgccgccgcaaaaacgtttcagatcacaagcgcaacagcaattccgatctggtcataatcctctgtatcatcatcatggtagtaataataataacgtgtctagggtttcttctcaatcatataacaattgcggtgttgatgtgattgcttctaattcaaagttttgcattacgtt

SEQ ID NO: 2293 - DNA, 413 bp, Arabidopsis thaliana
  Clone ID: LIB22-048-Q1-E1-F7
ggggtttaccccgggaacgtgttgtctctacacatgacgaagccacaaggattcaaatacaaaagtggacagttcatgttggtgaactgccgagccgtatctccattcgaatggcatcctttctcaatcacatcagctcccggagacgattacctgagcgtacatatccgcactctcggtgactggacacgtaagctcaggaccgttttctccgaggtttgcaaacctcctaccgccggtaaaagcggtcttctccgagcagacggaggagatggaaacctcccgttcccgaaggtccttatcgacggtccatacggtgctcccgcacaaggactacaagaaatacgacgtggtactcctcgtaggtctcggcattggaagccacgcctatgatcagtatccttaaggacatc

SEQ ID NO: 2294 - DNA, 401 bp, Arabidopsis thaliana
  unsure at all n locations
  Clone ID: LIB22-048-Q1-E1-F9
tttctcttctctctgtgttaccctcttgaaattttccgcgaaaaatctcaacttttccatctgaaaaccccccaaaatcaaacaattggatcttgatttttagctgtgatttagtgattaagaggcttagggtttgtggcgaaatgttggtacagagaagagtaatgagttggagaagagtctggaagtcgtttcaagcggcttctgcgcattgtttactcttctccttcacgcttcttctcgctttgaagcttgatcatgttgtttctcattcatggtggtttgtatttgcacccttgtggttgtttcatgctgtgattgctcgtggtagattttcattgcctgctccatcaatgcctcatgatcgacattgggctccttttcaactcggttatggcaan

SEQ ID NO: 2295 - DNA, 424 bp, Arabidopsis thaliana
  unsure at all n locations
  Clone ID: LIB22-048-Q1-E1-G1
ggggcgcggcggagccatggttctcaagactgagctttgccgattcagtggccagaaaatttaccctggtagagggatcanatttatccgatcggactctcaggtgtttttgtttctcaactccaaatgtaaggaggtatttccacaanaaattgnagccancnaatctttnctcggaatgctnnggtgactggacaagtaaacncaggaccgtttnctccaaggtttgcaaacctcctaacgccggtnaaagcngtcttctccgagcagacgggncggtgctactttggaggttattcagaagaangcgagcagagaagcctgaagttcgtgatgccgctagagaanctgccctacgtgagatcantgagagaatcaaggaagaccaanggnccgangaangaaggcaaagaanggtcaattt

SEQ ID NO: 2296 - DNA, 427 bp, Arabidopsis thaliana
  unsure at all n locations
  Clone ID: LIB22-048-Q1-E1-G3
agatcggaaacgacaaacctaattttcccgaagaatcgagaccattatgtggaggagaatcgtttcatcgcatcttaantccatctccgccgtcgggtcctgcgcggntccgtcntgcatgnacgccntcntagactcgntncanctttcnctcactactacgaacactggtggatctgtttcatattcctccatattctctcgtttaatcggctccgctgcancggatactgctgtgaagaagcgtgttgaaagatgtgatgcctattgcaaccggtcacgagaaagangaactacaagccgaattgggaggggatgaagctggacgatatanactttcctgaagggccttttggaacaaaggaagctcctgctgtagtcaaaatcctactacgacatganaatactttggtngcctggaaggtgg

SEQ ID NO: 2297 - DNA, 391 bp, Arabidopsis thaliana
  unsure at all n locations
  Clone ID: LIB22-048-Q1-E1-G7
actggcggcttaaacctggaggtggaggtgtgaatgcagcaatattcaaagctgctggtccagatcttgagactgcgacaagagtacgagcaaacactcttcttcctggaaaagccgtggtagttcctcttccttctacttgtccattacacaatgcagaaggaattacacatgtcatacatgttctaggaccaaacatgaacccaaaccgaccagacaaccttaacaacgactacaccaaggggtgcaaaactctccgggaagcttacacatctctatttgaaggttttctatcagtagtacaggatcaatcgaagttgcccaaacgaagcaagtcaaacagctgtgtcagattctggtgaggatattaaagnaagactctgagagaaaa

SEQ ID NO: 2298 - DNA, 411 bp, Arabidopsis thaliana
  unsure at all n locations
  Clone ID: LIB22-048-Q1-E1-H2
acgcgtgggtctcactaccacgagctcttcatctccacttccttctccgacaacgcttccgtcgctctaaacctccacaccctcacgcgccgccctcatgtagccggtacagtggccaacgctgaagcatcggaatatgttcgctctgttttcacctcctctgctctcaaatcanacgtcgttgcttaccaagtgtctctaacttacccagttcatcgctctttggtactaangccgacagactctgcaaagccaatcactttcttgctggnacaanaaaaactcggagacaatccttatgctaatgaagtgatgcctacttttcatggatacgctaagtcaggtaacgtttcaggtccagtggtttaagcanactatgggcgagtggnaagatttcgtnaagaactccag

SEQ ID NO: 2299 - DNA, 388 bp, Arabidopsis thaliana
  unsure at all n locations
  Clone ID: LIB22-048-Q1-E1-H8
taattaggttttttttttttttatctcatggccggcgccggaatccacccataccaccagcagtggccgccggcaggtgcgccgccnnnnnnnnnnnnnnnnnnnnnnnnnnnnnnnnnnnnnnnnnnnnnnnnnnnnnnnnnnnnnnnnnnnnnnnnngttttagttgacaaccataatcgtcctccttatgacgagctgcggacaatcttcatcgcagggcttcccgatgatgtaaaagagagagagcttttgaatctcttgagatggttgcctggttacgaggcttctcaggtgaacttcagcggagaaaagcccatggggtttgctcttttctccacagctcagtttgcaatgggcagncanaggtaccccttcagcanaatgg

SEQ ID NO: 2300 - DNA, 377 bp, Arabidopsis thaliana
  unsure at all n locations
  Clone ID: LIB22-049-Q1-E1-A10
agatcaaagaacanggagaaatgctccatgggaacgatnacaaagcttccgccgtgaaaggaacttcangggcgcagaggaaagcaaacggggatattggacagactgagaaaagctatgaatctcactcatacagcctgagaaaagccttgaaatctgcaatgtanattacctaaaatcttgtttcttttttttactttatttggctgtaagaatttttgtaaattattcatatctttaggatctgaatggttattggttttcgtatgtgagatgtaagtagaaatctgtgtgaatagtttttgcgtttgatgtttctggagaaatcaatcaataaaatcaatgttggtggctttattcacaaaaaaaaaataang

SEQ ID NO: 2301 - DNA, 490 bp, Arabidopsis thaliana
  unsure at all n locations
  Clone ID: LIB22-049-Q1-E1-A2
ctgtttacgccgcccggtnccgggtccaanaattcccgggtcgacccacgcgtccggtctaggttaatcgaatatttcactatttgctttctatctttctgctgcgaatcaatggcgctatggatggacgctggagcgacgccgaccacggagaaggaaaaggctgatcttgaagctatttctgctctcaaagaatccaccgccatcgaattcaaagaagagggcaatgaatgtgtaaggaaagggaaaaagcattactctgaggcgattgattgttacacgaaagccattagtcagggagttctaagtgattcagagacctctattttgttctcgaatcgatcccatgttaatctactcttaggcaactatcggcgtgccctcaccgatgctgaaggaatcaatgaggttatctcctcataacgttaatgcggtgttacnagctgctaaggcatccatgtcattgggattttgctgaacgangcaaagt

SEQ ID NO: 2302 - DNA, 443 bp, Arabidopsis thaliana
  unsure at all n locations
  Clone ID: LIB22-049-Q1-E1-A4
acgcgtccgtatggtgatcttagtacatcgccactctatgtttataagaccactttctctgggaaactaagtcttcatgaagacgatgaagagatctttggagtgttctctttcatcttctggacatttacactcattgctctttttaaatacgttttcattgttctctcagcagatgacaatggagaangtggaacatttgcgttgtactcgcttctttgtagatatgccaagctaagcattttaccaaatcatcaagaaatggatgagaaactatcaacatatgcaacgggaagcccaggagagactcggcaaagcgcagcggttaaatcattctttgagaagcaccgaaatctcaaaagtgtttgttgctctttgttcttttaagggacatgtanggctattgggtgatagtgtcctcactccaacaatctcagttcttt

SEQ ID NO: 2303 - DNA, 404 bp, Arabidopsis thaliana
  unsure at all n locations
  Clone ID: LIB22-049-Q1-E1-A6
angccatgggtttaggcatcttancttctcgaananttcgaccaancttcacgtcttcttcaatctcaaacctccaatttcttcctcngcacaatcgtctcaaaaccagagctccaatctcctgaatccgctgctgtctctgagcctgagccgccgacacagattctccctcctanaaaccctgtangtggagcacgcgtccacttctcgaatcctgaagatgcgatccaggtctttgtcgatggttacgcggtcaaagtccctaaaggattcactgttcttcangcttgtgaggtcgctggagttgatatcccgangttttgtcatcattctcgtttatctanntgctggaaattgcagggatgtgtcctggttgagggttgagaaaatctcccaangcctgt

SEQ ID NO: 2304 - DNA, 488 bp, Arabidopsis thaliana
  unsure at all n locations
  Clone ID: LIB22-049-Q1-E1-A7
ctgttaactgttgccacngcccngtanaagtccaagaattcccgggangttgtatgcacaggttaaatggggtaatgttttagtcanactgatcaacaagtttcgtaagaagctgtctttgaaagttcagtggaggcccttgtatgataccttgattcatgctcatttcancangagcccgggtcctgaaggttggaggttaagacaacnacactttatggctgttacctccctcattcgttcctgtangagattttttccacaaggggccgcatctgagatatggtctgaattcatgtctcttttggagaatccttggcataattcctcgtttgagggctctggctttgtganattgttccttcctacgaaccccgaaaatcatgatttcntctccgaaaagtggataanaaacgttctagagctctgggattcaataccaaattgtcaattttggnatantcaatggacatctgtactanctcgcg

SEQ ID NO: 2305 - DNA, 427 bp, Arabidopsis thaliana
  unsure at all n locations
  Clone ID: LIB22-049-Q1-E1-A9
tcccctttgttatctgacaacgggttggtcccntttgcaaaagcntccttatcacntgngagtcctcagcttgaagaatgccacagggttacccaatttgggttttttggntcccttttgaactgtggtgaaaagttgaaggcnttctcnctggtgaactgtntgagtattagagatctcaccacaggattgcctgcttcatctcattgcagcgctctgcgctctttgtccattcgtaactgccctggctttggngatgcaaatcttgcagccatctggaagttgtgccctcagctcnaggataatgatctgtgtgggctcaangggataacacagtctggttncctanatcctgaatcaaaactctcttgtgaagatcaactcagtggttgtgccaatttgactganacaagtgatctcctgccat

SEQ ID NO: 2306 - DNA, 430 bp, Arabidopsis thaliana
  unsure at all n locations
  Clone ID: LIB22-049-Q1-E1-B1
gaacatttcgaccggagttttgagagagctcagagtgtttcgagtgtgttatttggatctgcgatctgatcgtctcgcatcgacgtgaaaggttttctaatccaattggttctgtggaaatttggattcggaggtttttgtttggnagatctttctgcggttttcaccgccatggctgctccgtttttctctactccatttcagccttatgtctatcagagtcaagaagatacnatcacacctttccaaattttgggtggtgaancacaggttgttcagataatgttaaaaccacaagagaaggtcattgctaagcctggttcaatgtgctacatgtctgggtccattgagatggataatacttatacccctgaacaagaagttgggagttgtacaatggattttangaaaagagtgttaagtagtanaa

SEQ ID NO: 2307 - DNA, 473 bp, Arabidopsis thaliana
  unsure at all n locations
  Clone ID: LIB22-049-Q1-E1-B11
ggtnccggtccaaaaattcccggggtccgacccacgccgttcngntnccccttngancaaaattngtaacctncggggnatncaaaaaantccnatttttcctccaaccccnaaattttcagggagttccttnctnctncttttgaaaaccctttgtcatgagcnaatttttancctccggtgtgttgagaaagatctcattttttaagctttaggattgagggagtttcgatttttacttagcacttttccttggaagtgatttggtgggaactcatggtgattgggtttcttcctaaggttattagagattgagttctggatttttcacgcgccttgggatttgannnnnnnnnnnnnnnnnnnnnnnnnnnnnnnnnnnnnnnnnnnnnnnnnnnnnnnnnnnnnnnnnnnnnnnnnnnnnnnnnnnnnnnnnnnnnnnnnnnnnnnnnnnctgtgttgattaagaatcn

SEQ ID NO: 2308 - DNA, 410 bp, Arabidopsis thaliana
  Clone ID: LIB22-048-Q1-E1-F11
aatttccaagctttacgttttgtccctcacattacatcactcggtgatgctcttgtcagccgccttagaaacccgtcatggagaagcaataaggaacagaaaaatgttgatcatttaggagacatgaccaacccacacagaagacaagaacccgggaagtttgctgtgcttcatcttcgcttcgacaaggacatggctgcgcattcagcgtgtgattttggcggaggcaaagccgagaaactctccttggcgaaatacagacaaatgatttggcaaggaagagtgttgaattctcaattcactgatgaagagttaagaagtcaaggacggtgtcctctaacaccaagaagaaatgggacttcttttagctgctttcggattcgataacaatactcgtctctatccttgca

SEQ ID NO: 2309 - DNA, 486 bp, Arabidopsis thaliana
  unsure at all n locations
  Clone ID: LIB22-048-Q1-E1-C4
ntgttacgcctgcaggtagcggtccggaattcacgggtcgacccacgcgtccgcccacgcgtccgcccacgcgtccgcccacgcgtccgcccacgcgtccgtggagagagaaaagggttagatacagagagatagcgaaagagaagaagaagaagaggtctatcgacagagcaaacttcgtcaagagatccgttaaaaggatccatttggagctccgattcgagctagagtcaataatgagcggaagacagagatctgttgcagcggcggtgcatcaccagaggcagctctccgataaccctctcgatatgtcttcatccaatggcagatggcttcaatccactggtcttcagcattttcagtcatccgccaatgattatggntactatgctggtgggcaaggaggtggtggtcaagcagcanggangataacaanaatgctcagagaaggaaaacgagtttctttggggaaaccaanctgactcc

SEQ ID NO: 2310 - DNA, 382 bp, Arabidopsis thaliana
  unsure at all n locations
  Clone ID: LIB22-048-Q1-E1-C5
tcctggtgtggtttcgtgtcgtagtcattaaaatctcatctctctcactctcagttccaataataccccttcctatcagagccaacacgcatccagcatccttcatcagcctttgcgtatgaaaatgatgaaacttgaatagagatcattcgtatttcatcgacgtttctaattcgcaatcacaattgttttcttcaaggaattggtttgcttgctttgatcctcagttttgtcaaaggtctttttttttttttcctggacttgctaaaatctcttgtggcttttgctctgatacttgttagtttgggtttcgtgagtctcgctttaaaaaggatatgggacanaagagatgggntcttcntgtggggaatttttgtttgnc

SEQ ID NO: 2311 - DNA, 408 bp, Arabidopsis thaliana
  Clone ID: LIB22-048-Q1-E1-C9
agatgcgagtgagcttgcgaattccatcaaacatccattcagaaacatcttgcagaaacgacacaggcctcagctagttatggctatttgcatgccaatgtttcagatactcacagggataaactccattctcttctacgcacctgttctgttccagacaatggggtttggaggaaacgcatctctctattcatcagctttaacaggagctgttcttgtcctatcaacatttatttccataggattagtagacagattgggacgaagagctcttctcataactggaggaatacaaatgataatctgtcaagtcatagtagcagtgatcttaggagtgaaatttggagacaaccaagagctatcaaaagggtactcagtgatcgtagtcatcttcatctgcctctttgt

SEQ ID NO: 2312 - DNA, 408 bp, Arabidopsis thaliana
  Clone ID: LIB22-048-Q1-E1-D10
acacaagttttattttgttttcttactatatataaatcaccaaaagaaagtaactttatacacacgtctaggtcgcactactattcttttaactacacaatgatcggctctttaattacttttgtattgatgttcttcgttttccttttggtatcatctttagatggtcagcgattgcagcaaaactgcctggaagaaccgataacgagatcaagaacgtatggcacactcacttgaagaagagactcgaagattatcaaccagctaaacctaagaccagcaacaaaaagaagggtactaaaccaaaatctgaatccgtaataacgagctcgaacagtactagaagcgaatcggagctagcagattcatcaaacccttctggagaaagcttattttcgacatcgcctt

SEQ ID NO: 2313 - DNA, 409 bp, Arabidopsis thaliana
  Clone ID: LIB22-048-Q1-E1-D12
aaattgaaaacaaatatatttccacctgaaacaacataaacagaatggaaccttcaaaacaagaagttccaaagctcatggagacaccaccgaacatatcaaacgattcatcagcaaccgagaaaggagaagcaacaaggcaacaacagctaccaaacaataggtacgcactcacagttgacgaggtgatcgagcaacacattggagcacttgggtttgctcagatcttgcatgctctcttggtctctatcgcttggatcttcgatgctcagaccactcttatatccattttctccgatgctcagcccgcggcgaggcttcttgcaaccggtgccatcgtggagggtgcctccttgtgtggattggccagtggagaatgggaatggattggaccaaagagtgacactgt

SEQ ID NO: 2314 - DNA, 489 bp, Arabidopsis thaliana
  unsure at all n locations
  Clone ID: LIB22-048-Q1-E1-D6
aactgttcacgccnccaggtaacggtccaagaattcccgggtcgacccacgcgtccggatagcttctctagcagctcaaatccgtcccttcacatgtttggccgcgtctctgccgtcacggttggcgcctcatccaccagacctcatccggtggatcaagcgagaaggcggcttcgttcaccacgcggttaagctctctcaggagactcaatttggtatcggactcatttccaccgagcaaatctctccaggcaccgacctaatctctctccctcctcacgttcccttacgcttcgaatcagatgattcgtcatcttcatcgtcctctctcctctccgcattgggccgtcngtgttccctgaaggaactgtnggcantgaaattgggattgangttgttacaagaaaggagccaatggcagattctttctggtgggccatacattaggcaanctcccgggaaaacntaaaactgggtcccanaaatcct

SEQ ID NO: 2315 - DNA, 427 bp, Arabidopsis thaliana
  Clone ID: LIB22-048-Q1-E1-D7
agaaaccttgaaaatccgagacatccacaatgccgccaaagttggatccgagtcagatcgttgacgtgtacgtccgagtaaccgggggagaagtcggagcagcgagttctctagctcccaaaatcggtccgctaggtctcgcaccaaagaagatcggagaagatatcgcgaaagaaaccgcaaaggaatggaaaggattacgtgtaaccgtcaagctcacagtgcagaatcgtcaggcgaaagtgacggtggttccatcaagcagcagcactcgtcatcaaggcgttgaaagagccggagagagataggaagaaggtgaagaacattaagcataacgggaacatctcgtttgatgatgtgactgagattgctaggatcatgagacctaagattctaattgctaaaggaattggagtggaacaagtga

SEQ ID NO: 2316 - DNA, 397 bp, Arabidopsis thaliana
  unsure at all n locations
  Clone ID: LIB22-048-Q1-E1-D9
ttttgcaaactaacatccgtctggagatcataccgggaagatacagttctctcaccgatcataagtttcgtgcgccgtatcgaattaggtgcgccgccgcttcaccggtgaaaaaacggtataacatcactctgcttcccggcgatggtatcggtccagaagttatatctgttgctaagaatgtgcttcagaaagctggatttctccaaggactagagtttgatttccaggagatgcctttcggcggagcagctttggatttggtcggagttccattgccggaggaaacttccactgctgctaaacagtctgatgccattcttcttggagctatcggagggtacaaatgggacaagaatgagaaacatctgaganctgagatgggtctgcttaacat

SEQ ID NO: 2317 - DNA, 395 bp, Arabidopsis thaliana
  unsure at all n locations
  Clone ID: LIB22-048-Q1-E1-E1
ttctattgataaattttatatcaaaaaccttaaaaagtttcattggtttacaaattttaccttttttcgttgtgtgttgcgtgtgttactaaatcactgaagagggtaaagagaaaaacaaaacaaaaagttcttagctttggatgaatctggaagtgatccaaaacactggcttattccactcctcttctctagggttgaattgttagttaatagatggcgacacttcaggatattggtgtatcagctgggataaacattctcagtgcctttgttttcttcataatctttgcggttttgaggcttcancctttcaatgatagantttacttcacaaaanggtatcctcaaggggttaagaagcagccatgnncatggttaacgccatcncagat

SEQ ID NO: 2318 - DNA, 405 bp, Arabidopsis thaliana
  unsure at all n locations
  Clone ID: LIB22-048-Q1-E1-E11
ggattcagatctatacgacgaaactgaatcnnnnnnnnnnnnnnnnnnnnnnnnnnnnnnnnnnnnnnnnnnnnnnnnnnnnnnnnnnnnnnnnnnnnnnnnctggtaatgctactgatcgtcaccgtgaagctgagcttgatcgcttccccttgtgaactgatctgatctgagagttgtttctgtttcgtaatctgtgaatatgctgaccaagttcgagaccaagagtaaccgagttaagggtctgagtttccaccctaaacgaccatggattctcgcgagtttacacagtggtgtgatccagctctgggattatcgtatgggtactttgatcgacagatttgatgagcacgaaggacctgttcgtggtgttcatttccacaactcanagcctttattcgtctc

SEQ ID NO: 2319 - DNA, 423 bp, Arabidopsis thaliana
  unsure at all n locations
  Clone ID: LIB22-048-Q1-E1-E3
atgtacctcaagcattgatgaacagaaagttgatatctcttgatatgggtgctctcattgctggagcaaagtatcggggagaattcgaagacagactaaaagctgtgcttaaggaagtcacagactcagaaggccaaatcattttgttcatcgatgagatccatacagttgttggtgcaggtgcgactaatggggccatggatgctggtaatctgctgaaaccgatgctgggccgaggcgagttacgttgtatcggtgcaaccacgcttgatgaatataggaaatacatagagaaagatccagccttggagcgtaggtttcaacaggtttatgttgatcaacctacggttgaagacacgatttcattctcccgtggtttgcgggaaaggtatgaactacatcatggggntcgcatcccacaaa

SEQ ID NO: 2320 - DNA, 468 bp, Arabidopsis thaliana
  unsure at all n locations
  Clone ID: LIB22-048-Q1-E1-E4
ctgttacgcctnccggtagccggtccnagaattcaagggtcgacncacgcgtccgcccacgcgtccggagctcgctgcttacttcactcactgtaaacttcaaacacctcacctacggctcgcgtacttcagtgcaatgaccgtctgctacaagtcaaagaacatggctactgctgctcacttcgccagaagtttgttggatacaaacccaactattgagagccaggccaggacggctagacaagttatgcaagcagctgaacgcaacatgacagatgcaacaacactcaactacgactttagaaacccgtttgtgatatgcggggtccacttatgtgccaatctacaaaggacagaaagacgttgcatgtccttactgcactgcccggtttgtaccaagccangnaaggtaacattttgctcgggtctgtgatncttgcngtcatttggcgcangacgccatcctgg

SEQ ID NO: 2321 - DNA, 415 bp, Arabidopsis thaliana
  unsure at all n locations
  Clone ID: LIB22-048-Q1-E1-E6
gaatcagaaggagaatccatgataatccatagttaggttatgaggaagtagagacatctaagcttgttanagcagagttggagaacatgggtgtttcttataagtacccagttgctgtnacnggtgttgttgggtatgttggaactggtcatgctccttttgttgctttaagggctgatatggatgcacttgctatgcangaaatggtggaatgggaacacaagagtaaggttccagggaagatgcacgcttgtggacatgacgctcacactacgatgcttctcggtgctgcaaaattgctcaaagaacatgaagaagagctacagggcacagtggttctaagttttccaaccagctgangaaggaggaggaggtgcaaagaanattgtggaggctgggagtgttggaagaatgt

SEQ ID NO: 2322 - DNA, 416 bp, Arabidopsis thaliana
  unsure at all n locations
  Clone ID: LIB22-048-Q1-E1-E8
gttgcatcctcgtttctttggtcgtaacctaaaagaaaacctcgtatctaagctcatgaaagatgtcgaaggcacttgcagtggccgacatggatttgtagtggcgataactggaatagatacaataggaaagggtttgatcagagatgggactggttttgtcacctttccagttaaataccaatgcgtcgttttcagacctttcaaaggcgagattttggaagctgttgtcactttggtcaataagatgggattcttcgctgaagctggccctgttcagatttttgtgtctaagcatttgattccagatgatatggagtttcaagctggagacatgcctaactataccacatcagatggatcaagttaagatccagaaggagtgtgaagtgagactaaagattattggnacaaag

SEQ ID NO: 2323 - DNA, 405 bp, Arabidopsis thaliana
  unsure at all n locations
  Clone ID: LIB22-048-Q1-E1-E9
gatttcacaccaaatcctgatttcctcaagaagactgttcctcatttcaagggtaatccaagagctagggttggtccaagcaaggtggtcatttgtgaacaaagatgagaatctcctcacgaggctacaaaacataaacttatgtttccacttcgaagtagaacaacaagtgaacggtgtgtttctcaatttcttcggattcaatggaaccgctggagtatggaggatcaaggcattggaagaatccggcggatggctcgagagaaccaccgtggaagatatggatatcgcggttagagcgcatctcaacggctggaagtttatttaccttaatgatgttgaagtcacttgcgaagttgccagagtcttatgaagcttacaagaagcaacaacatcgttgggngt

SEQ ID NO: 2324 - DNA, 408 bp, Arabidopsis thaliana
  Clone ID: LIB22-048-Q1-E1-C12
acgcgtccgcggacgcgtgggattctgaattcaagatgtatgttacaaggcatctctccgaataccagagaaactcgtcggacttgacacgatcgttgccggaaggtccaaactccggcgtacttgtgattcaagacgaagagtcaaaaccgacttgttgctttggaaattgctacgatggtgaactcaaaggcttaccgttcccacagaacgcaaagctgactgtgacttacagaaccggaactggtaatgacaggcgcagttaccatgaccaggttctgttcattccggttcttgatcagccttattattcgaaccgttattatgtcattaaacgacgtgggaagcaatcaggaggagcttcggcgagtgcaaaggaagaagacagagtcccctgctgcttttgct

SEQ ID NO: 2325 - DNA, 492 bp, Arabidopsis thaliana
  unsure at all n locations
  Clone ID: LIB22-046-Q1-E1-F4
aactgttacgcctgccgtagccgtccnaaattccngggtcgacccacgcgtccgattctaatcttaattcttcataaaccctaactttattaatcccttttttagtttcatctttaaaaacatttgttttcttgaaaatgtcggaagaattcgacgaatctgagatcattttctctgacaattactttccgattcgccggcgagaagacggtaacgagaaagagaataaccgtccggtggatttccgggaaaattctgagagagtgtggaacaagtcatctagacggagtaaaacgacgccgttgccttcagcggtgacggcgttttctagttcgcttccggttaacataccgatgaggaggtattcgacggaggaggaatattccgatgacgacggangaaggaaaatgattccgccgcatttgatagttgggcggangatggaaagangtcaaatgggcgttttccgtttgtacaggtaaccggaagaac

SEQ ID NO: 2326 - DNA, 441 bp, Arabidopsis thaliana
  unsure at all n locations
  Clone ID: LIB22-046-Q1-E1-F8
acgcgtccggtttcaaannnnnnnnnnnnnnnnnnnnnnnnnnnnnnnnnnnnnnnnnnnnnnnnnnnnnnnnnaatcaaagatgcgagagattcttcacatacaaggtggccaatgcggaaaccagatcggagctaagttctgggaagtagtttgcgccgagcacgggatcgattcgacgggaagataccaaggagagaacgatttgcaactcgaacgagtcaatgtctactacaacgaagcgagttgcggaagattcgtcccacgcgccgtcctcatggatctagagcctggtactatggatagtgtcagatccggtccgtacggtcagatcttccgtcctgataacttcgtatttgggtcaatccggtgccggtaacaattgggctaaaggacactacactgaangggctgaacttancgaatccgttcccgangttg

SEQ ID NO: 2327 - DNA, 373 bp, Arabidopsis thaliana
  Clone ID: LIB22-046-Q1-E1-F9
tgctccttatctcagcttgttgaatttgcgaagtatgggagacgctagagacaacgaagcctacgaggaggagctcttggactatgaagaagaagacgagaaggtcccagattctggaaacaaagttaacggcgaagctgtgaaaaaagggtacgtgggaatacacagttctggattcagagacttccttttgaaaccggagcttctcagagctattgttgactcaggatttgaacatccatctgaagtgcaacacgaatgtatccctcaagctatcttgggtatggatgttatctgccaagcaaagtctggtatggggaagactgctgtgtttgtcctgtctactctacaacaagattgaaccatctcctgg

SEQ ID NO: 2328 - DNA, 490 bp, Arabidopsis thaliana
  unsure at all n locations
  Clone ID: LIB22-046-Q1-E1-G1
ctgttaccctnccgtagccgtccgaaattccagggtcgacccacgcgtccgaaaaatccctaaatctcaacaaaaccctaatttcaaggaagacgaagaaagaatgagttacagagtcgctaaagcatcgcagtatcttgcgatcaccggtggtgggatcacagacatcaagcttgcaaagaagtcttgggtgtttccatggcagtcttgcaccgtcttcgacgtttctccggtgaactacacgttcgaggttcaagctatgagttccgagaaacttccctttgttattcctgctgttttcacaatcggtcctcgcgttgatgatcctcacgctctcttgttgtatgccatgcttatgtctcaacacgataagcactcgaatcacgtcaatgagcttgttcanggtgttatcgaaggagagaccgtgttcttgttgcttccatgactatggaagaagtcntcaaaaggaacaaaggagttaaaaaaggaa

SEQ ID NO: 2329 - DNA, 407 bp, Arabidopsis thaliana
  unsure at all n locations
  Clone ID: LIB22-046-Q1-E1-G10
ggatccggtgattgagccgccgttgttggtggtaaacacagtcttatctgtgacggctcttgactacccaccggagaaactcgccgtttatctctcagatgacggtggttctgagctgacgttctatgctctcacggaggcagctgagtttgctaaaacttgggttcccttctgcaagaagttcaacgttgagccaacatctcccgctgcttacttgtcttccaaggcaaactgtcttgattctgcggctgaggaggtggctaagctgtatagagaaatggcggcgaggattgaaacggcggcgagactgggacgaataccggangaggcgcgggtgaagtacggtgacgggttttcacagtgggatgctgacgctactcgaagaaaccatggaaaccattcttcaa

SEQ ID NO: 2330 - DNA, 439 bp, Arabidopsis thaliana
  unsure at all n locations
  Clone ID: LIB22-046-Q1-E1-G2
caattgaaaaaaaaaaaaaaattcaacccaaagctctgcttcgttgagctaaaacaatggcggaaacaactcccaaagtgaaaggccacgtcgtaatcttaccatacccagttcaaggccacctaaacccaatggttcaattcgctaaacgtctagtctccaaaaacgtcaaagtcacaatcgccaccactacctacaccgcctcctcaatcacaacaccatcactctccgtcgaaccaatctccgatggattcgatttcatccccataggtatccccggtttcagcgtcgatacttactcagaatccttcaagctcaacggatccganaaccctaactctcctaatcgagaaattcaaatccacagattcaccaatcgattgcttaatctacgattcgtttcgtcccttgggggacttgaagttgctacattcnatgg

SEQ ID NO: 2331 - DNA, 450 bp, Arabidopsis thaliana
  unsure at all n locations
  Clone ID: LIB22-046-Q1-E1-G3
acgcgtccgctttcataagctgaagattgaattataccacattgctctatatcatctcgagaaattaaaggaagctcgtgacaaggctgcggattctgatgaagttcanaaatgcgacagtgaaatcgaggatctgcaaaacttgctgaacaatgatgttttgatcagtggagtcaacctagaaagtcttcaaccaggatcttctggcatgactgaactttataaggctctccaggagccaaagtttcgagaacttgattcagaagatctcctgacagagagattgttatcagcagagaaggactggaaatcaacaatcnaactactcaaacacgccacactgaccctgaagatcataaacttgggttctcttgagcaacagtcganatacgcttcaacttggtttgaaanttcttcgacctgtgctcaagaaattgcgacatgctgcat

SEQ ID NO: 2332 - DNA, 436 bp, Arabidopsis thaliana
  unsure at all n locations
  Clone ID: LIB22-046-Q1-E1-G4
acgcgtccggaagaaacgaagcatcagtgatcttatcctctcatagctaccaccgaactaactctctccatcaccaccataaccattgattctactgtggaaaaaatagaaagttccaagctttttctcaaatggttctgatttaagtaagagtgaagaaaagtaaaaatagagtcagaaatggagaancagaggagagaagaaagcagctttcaacaacctccatggattcctcagacacccatgaagccattttcaccgatctgcccatacacggtggaggatcaatatcatagcagtcaattggaggaaaaggagatttgtttgggaacaaggatatgagtggtcttgatcacttgtccttttggggatttgcttgctctagctaacactgcatccctcaaaattctcctggtcagactccagtancctacaa

SEQ ID NO: 2333 - DNA, 449 bp, Arabidopsis thaliana
  unsure at all n locations
  Clone ID: LIB22-046-Q1-E1-G6
tctctcaatccaacaaagaaaaaaaaaagtcttcttctttttttacaagtctgagaattttctacagaaacaaaaatctgattgtttttcccactttgcatctgttttgaggatgccagctacggattttcaaggatcatttggaaggtcgttgctaagtttacggcgagaccaagttgactcatcaancagtcgtctccggaagtagtagccaccacgagncanncaccanggaggttgagctanattcgtttcanatgacaaagttcgctgagaaattcatcggatctcaacgcttcttcaagacgaacttctcactcgtcnaatgggatngggaaaagcttcntgantccttccctcnggttgtncaaggaagaagttttgaagctancngtattcanccnaccgnatttcagatttgcgnaatcctccaatgggcccgtttgant

SEQ ID NO: 2334 - DNA, 446 bp, Arabidopsis thaliana
  unsure at all n locations
  Clone ID: LIB22-046-Q1-E1-G7
acgcgtccgctttttccggtgtggctggggctggtctttgcactgactactggtttttgttcaagcagggaccattttttcacgacggaatgaaagagtggagctgctgcaagcaaagaagtcatgatttcagtttgttcttggaaattccaggatgtaaaacaggtaaacacacaactgagaaaccagttctggccaaatcggttccaaaacatcctgttgcggctcctacttcatctccaagatgccaatgcagcaacaaaagactcttgctccagatgccggcaaggcttcttctgctcagaccatggatcccaacccaaagaacagatcaagcaagaccctgaacacaccgggacaagcagaagaagaaaaaatgaacccttaacgcctccagtacaaaangctgtgatagacattaatcaaccgcaagtctgcaaaaacaa

SEQ ID NO: 2335 - DNA, 501 bp, Arabidopsis thaliana
  unsure at all n locations
  Clone ID: LIB22-046-Q1-E1-G8
ctgtttaaactggtcagccggcctgtaanggtccaaanattcccgggtcnacccacncgtccgcccacgcgtccgagctccaatcaatctttcggatcgtctccatcaagttcttcgatgggcgcttgggtcggttgagattttcttgagtaggcattgtcctatttggtatggttatggaggtgggttgaaatggcttgagcggttgtcctacattaactctgtggtttacccgtggacctctctaccgctcatcgtttactgttctctccctgccatctgtcttctcactggaaaattcatcgttcccganattagcanctatgcgaagtatcctcttcatggcgctcttctcgtcgattgcaataacgggtattctcgagatgcaaatgggggcaaagttgggatcaatgattgggngganaaaacgannagttttgggtcattggaagngtttcctgcgcatccnggtttgctcctccttccaaangtctcctcaaa

SEQ ID NO: 2336 - DNA, 501 bp, Arabidopsis thaliana
  unsure at all n locations
  Clone ID: LIB22-046-Q1-E1-H1
aactgtttacgcctgccggtaccgcgtccgaaaattcccgggtcnacccacgcgtccgcccacgcgtccggaggtaccagagtagaactgggtaccacaacatgtacaaggagtaccgtgacaccactcttaacggagctgttgagcagatgtacactgagatggcatcccgtcaccgtgtcagattcccttgcattcagatcatcaagacagccactgtcccagccaagctgtgcaagagagagagcactaaacagttccacaacagcaagatcaagttcccattggtgttccgcaaggttagaccaccaagcaggaagctgaagacgacttacaaggccaacaagcccaacttgttcatgtaaaacgtctctgattgactcttttttggggtggaatcgatgttgaagctgtgctctctcccgttttgggattttatcggttatttttgtttttcaatatgttaagcgtactcatgaatgtgaactccnactttgtcca

SEQ ID NO: 2337 - DNA, 408 bp, Arabidopsis thaliana
  Clone ID: LIB22-046-Q1-E1-H10
agtatgaccgttacttgtacccgcatttccggttctacatgagggaagtcagaacagtggtgtactctcagtttttggaatcttacaaaagtgtgacagttgaagcaatggcaaaggcctttggcgtttctgtcgatttcatagaccaggagttgtcgcgcttcattgctgctgggaagcttcactgtaagatagacaaggttgcaggtgttttggagacaaaccgtcctgatgcaaagaatgcactttaccaggcaacaatcaagcaaggggatttcttgctaaaccgaatccagaagctgtctcgtgtgatcgatctgtgagcatgctacatgtttctgtttcactctttcgtcaagctttgcaacttggaaactccgaacggtagaatcttaaaggtctgagaaa

SEQ ID NO: 2338 - DNA, 408 bp, Arabidopsis thaliana
  Clone ID: LIB22-046-Q1-E1-H11
aagccatcatggtttactatggtaccaagcctctttataccttggatttgcagcttcaataatatgggttggtcagggaacataccttacatcaattgcgagaagccatgctacagatcatggcctgcatgaaggttcggtaataggtgtcttcaatggggaattttgggctatgtttgcctgccaccagctgtttgggaatctcatcacacttgcattactgaaagatggaaaggaaggaagcaccaagtggcactaccttattgatgttggtgtttctcttcagtatgacattaggaacaatacttatgttcttcattcggaaaattgatggagaagatggaaaaggacctgtgggttctcctgtgggcttagttgattccttggcatctcttccaagggatgata

SEQ ID NO: 2339 - DNA, 482 bp, Arabidopsis thaliana
  unsure at all n locations
  Clone ID: LIB22-046-Q1-E1-F3
ngtagccgtccgaaattccagggtcgacccacgcgnnnnnnnnnnnnnnnnnnnnnnnnnnnnnnnnnnnnnnnnnnnnnnnnnnnnnnnnnnnnnnnnnnnnnnnnnnnnnnnnnnnnnnnnnnnnntagagatcctctgttttagcaacccaagtgtccaccgaactcttttctcactctctcggaatttcaatgtccgagcaatgatcatcgatttcttctgcaccgccgttttagacatcaccgctgacttcacgttcccggtttacttcttctacacctctggagccgcatgtctcgccttttccttctatctcccgaccatcgacgaaacaacccccggaaaaaacctcaaagacattcctacagttcatatccccggcgttcctccgatgaanggctccgatatgcctaangcggtgctcgaacgaagacgatgaggtctacgatgtttttaaaatgttcgggtaaacaagctct

SEQ ID NO: 2340 - DNA, 444 bp, Arabidopsis thaliana
  Clone ID: LIB22-046-Q1-E1-C8
acgcgtccgagcattcacatgagaccttggattggatttcagtcatggcgtgctgctggtaggaaggtctcgttatcatctaaagctgaagagtctctggaaaacattataaagcaagaaacaaagggggagattatttacttctggacaagattagacatcgatggtgatgcgtatggaagtaaaaatgctcttacattctggtctatgtgcgatatccttaaccaaggaaactgcagaaccacttttgaagatgcattccggcatatgtatgggttaccagaacacattgaagcgcttcctcccatgcctgaagatggtcatcactggtcttctctccacaattgggtgatgccaactccgtctttcctcgagtttgtcatgttctcaaggatgttctcagaagtctcctaagatgcactgcacaacaatcttaacgactcc

SEQ ID NO: 2341 - DNA, 406 bp, Arabidopsis thaliana
  unsure at all n locations
  Clone ID: LIB22-046-Q1-E1-C9
tttctttcctttatcatatccatcatcccaaacctagctaaacccacaaatcatatcttaggattactacaatacacaacataccaaatgaaattgtatttctgttgaactttatgcatccatagttatatatatttaccagaaatcaagcaagttgaggaaatcatccaaggcttttgttttgatggaggaaaacccgcatcgagtttcacgtagaaaccatggcgggacccactgtcaaaacgacgccgtggacgaagagaaccgtcgacgacggcataaccaccacactcacggcgacgaagtcaaatgctccagtaagagatgccgatcgtgggcggctgcggcgattgctgactgtgtagcgctttgttgctgtccatgtgcgatnatcaaccttcttact

SEQ ID NO: 2342 - DNA, 499 bp, Arabidopsis thaliana
  unsure at all n locations
  Clone ID: LIB22-046-Q1-E1-D1
ctgttacgcctncccgtagccgtccgaaattcnanggtcgacccacgcgtccgcagctactggttccttcagtttgattttaaggcaattgaggcagcaacgaattgctttttgccaattaacaagctaagtcaaggtggtttcggcgaagtttacaagggtacattgagtagtggactacaagttgcggtgaagagactatcgaagacatcaggacaaggtgaaaaagagtttgaaaaccaagttgttgttgttgcaaagctccaacatagaaatttggtaaagctgcttggttattgtttggaaggagaagaaaaaatacttgtctacgagtttgtgcccaacaagagccttgatcacttcctctttgactctacgatgaaaatgaanctagactggacaagaaggtacaagatnataggaggaantgcctagaaggaatccttaaccctcatcaagattcacgactcacaaattatnccatccaagacctcaaagc

SEQ ID NO: 2343 - DNA, 406 bp, Arabidopsis thaliana
  Clone ID: LIB22-046-Q1-E1-D12
tcctcttcatcggccattataaagctctgttttttattaccctgttttataaacagaggaagccctaaatttggattctctattctaaagttttctcatttcgctaattttggagaaaaacgattgttttttttaatcgtttcttcatttctgattcatttttcttggtttatgatctgttcaagtaaaggaacaatcttaatcgctagaggtaaaaattcaaatacaatccctagattacccctaaaagggtcatccacaaattacgcgaatcgaattcaaattcgaaacccaatcagtgtcaaaactttccggcgatcatcttcatcgtcaatggcggtggaaacaatgtcgatgggatcagattcatcaactttgattctaacatcaaggagcaagcggtcgc

SEQ ID NO: 2344 - DNA, 477 bp, Arabidopsis thaliana
  unsure at all n locations
  Clone ID: LIB22-046-Q1-E1-D2
ngtaggcgtccgaaaattccagggtcnacccacgcgtccgcncacgcgtccgaacgacgaaacctttgccaaaatgaagaagggagttcgaattgttaatgttgctcgtggaggtgtcatagacgaagatgcgttagtgagagctctggatgctggtattgttgcgcangctgcacttgatgttttcaccaaagagcctccggctaaagatagcaagctcgtgcagcacganagggtcactgtgacacctcatcttggagctagtaccatggaggctcaggaaggagttgccatcgaaattgctgaagctgttgttggagctctgaatggagaacttgctgctactgcagtcaatgcacctatggtttctgctgaagttctgaccgaactgaaaccatatgtggtgctaaccganaaactaagaagactgggcaatgcaactgggtggccggaaggaaaccgtgtnaaaaaacgcca

SEQ ID NO: 2345 - DNA, 490 bp, Arabidopsis thaliana
  unsure at all n locations
  Clone ID: LIB22-046-Q1-E1-D3
cgttagccnccgtagcgtccaaattccagggtcnacccacgcgtccgcnatgantgtgatctagaggccccaancttgtttgagcgcatggtaacaactttgtctaaaattgctcaagggtctcagagtgctgatccaaatcctgccatggcttcgcagacagcttcggttaaaggttcatcccttcagtgcctggtcaacgttcttaaatcactagttgattgggagaaaataaggagagaggcagaaaatagtacaagaaatgcanacgaggactctgcntctactggagagccaattgaaaccanaagcagggaanatgtcccaagcaactttgagaangctaaagctcataaatccacaatggaggctgccatctccgagttcaacaggaattcagtgaaaggtgtcgaatatctaattgcaaaacaagttggttgaaangaatcctgcttcagttgcacagttttctganaaagtactccaatcc

SEQ ID NO: 2346 - DNA, 453 bp, Arabidopsis thaliana
  unsure at all n locations
  Clone ID: LIB22-046-Q1-E1-D4
tccanggtccacccacgcgtccgcngccttcttcttcactttaccaaaatcatcgaatccatttttagggtttttgttttctctctaaatttntattgttatcttcttcgcgataccttggaatcgcatctctgagatagataaataattctgattcgtatctttaaatcttgggttcntcttcttctcgcgattcgtttaaaagagcagcatcaatgaancagaatcttcatgtantatcaatggattcgttaccagttggattaagattccgtccaacagacgaggagctaatccgttactatctccgtagganaatcaacggtcacgatgacgacgtcaaagctatccgtgagatcgatatttgcaaatggggaaccttgggatttacctgatttttcctggtgatcaaaactaaagactcagagtggctctacntccggtccaatggga

SEQ ID NO: 2347 - DNA, 497 bp, Arabidopsis thaliana
  unsure at all n locations
  Clone ID: LIB22-046-Q1-E1-D7
actgttaactgntccgcctgccggtaaaggtccgaaattcccgggtcgacccacgcgtccgcggagactgagagcagcagcgacgagcttcatcggccgtcgtctccgacctcactcgcgatctccgattacaaaaattagatcctcgattaagaattcgaaacatcaaaatttcatcaacaaaaaaaatcagttactggatttacgtttcgtttgcgtcacagatcagatctccatgatcccttatccgctttcgttgcggttccttaaaccttgatgcaacggtctaatgcncgttccaggtcgaatatcaattcangatatggtaagatcctcccgaggttcaagacttcacctggcaaccaccgatcatcgccgtccaccgccgccaaacccaagtcgaaacgaacanaatcgattatcttcgtaatcgtcgcttgtgtaactattgccttgggtttaataatcaatggntaattcanttttacgctccgggg

SEQ ID NO: 2348 - DNA, 411 bp, Arabidopsis thaliana
  Clone ID: LIB22-046-Q1-E1-E10
ggatctcgctacgaaacagaagtatctccgaaatgcaatcgaatctgctagaaaagctgtggagctgtctcctaactcgattgagtttgggcatttttatgccaacttgctttatgaggctgctaacgaagggaagagagagtacgaggaggttgtgcaagagtgccaccgtgctctctccatcgaatatccgattgatcctgctagagagagtcttcaggatgagactcagctgaagatattgacacctgaggctcgtattgctcatttccaggatgagctcaggtcactgatacagaagtctaacatttattcattgtccacttggatgcagaccttgggaaatggtgaagaagaaatttaaggttgattcctcttaggagaatgggccgaaggattctattggagagt

SEQ ID NO: 2349 - DNA, 495 bp, Arabidopsis thaliana
  unsure at all n locations
  Clone ID: LIB22-046-Q1-E1-E3
antgttacgccttccgtagccgtccgaaattcnagggtcgacccacgcgtccgaaaagttgaaacagaaatcatctaagagacgattaagagaaaactaagaacgataactctcgccttcgattctttttgttgattgaggcgcaagctacctgcacacaatggagaacaatcgagagggaccatactctgttctaacgagagatcaacttaaaggaaatatgaagaagcagatcgccgaaatctctgagatcttctcgttatcaaaacccgatgcgaccgtactcctcatgtttctccgatgggactctcatgaagtttctgagtttttggttgaaaacaacgaaaaagtcttgtcggaatcaggtttgaaaccagtggtaagttgatccgaatcaagacttatataagatttcttcttgtgggatttgctttaagacttgtgatgatggtgattacttaatctccacgcccttttggctctcacatgttctgc

SEQ ID NO: 2350 - DNA, 492 bp, Arabidopsis thaliana
  unsure at all n locations
  Clone ID: LIB22-046-Q1-E1-E4
ctgttacccttccgtaggcntccgaaaattccnaggcttgtagtggctaacaggctcccagtttctgccgtgagaagaggtgaagattcatggtctcttgagatcagtgctggtggtctagtcagtgctctcttaggtgtaaaggaatttgaggccagatggataggatgggctggagttaatgtgcctgatgaggttggacagaaggcacttagcaaagctttggctgagaagaggtgtattcccgtgttccttgatgaagagattgttcatcagtactataatggttactgcaacaatattctgtggcctctgtttcactaccttggacttccgcaagaagatcggcttgccacaaccaagaagctttcagtcccaatttgctgcatacaagaaggcaaaccaaatgttcgctgatgttgtaaatgaacactatgaanaaggaaatgtcgtcctggtgccatgactatcatcttangttccctcctaaaa

SEQ ID NO: 2351 - DNA, 432 bp, Arabidopsis thaliana
  unsure at all n locations
  Clone ID: LIB22-046-Q1-E1-E8
acgcgtccgaaaaaattttcaaaacaaaatctaaggaaaaaagagcaacaagtttcaaatctcatttgggtttttcattttgaaaagaaggacccatttttatctctctctttgttttgttttctcgaatctgaaggagtaaagttaaaagctttgaaggagagaatcaatggcgggttacagagcanatgatgaatacgattacctattcaaggttgttctgataggtgattcaggtgtgggcaaatccaatttgctttcacgattcacgaagaacgagtttaagtctcgagtcaaaatccacgatcggggtcgagttcgcgactcggagtttgaatgttgatgataagagtcatcaaagctcagatttgggatactgctggtcaaagaaaggtancgagccatcactagtgcgtaataccgangagctgt

SEQ ID NO: 2352 - DNA, 405 bp, Arabidopsis thaliana
  Clone ID: LIB22-046-Q1-E1-E9
gcgattacctcccatgggaaaaatctctgaagtgattatttagcactactttttctttgtctccttctgaatccattttttatggatcttggagttcgtgtttctggtcatgaaaccgtttcttctccgggtcaaactgaactcggatctggtttcagtaacaagcaagaaagatccggtttcgatggtgaagattgctggagaagttcaaagctctcacgaacatcaactgatggattctcttcttcccctgcctctgctaaaacgctgtcgtttcatcaaggcatccctttactgagatctaccactattaatgatcctcgtaaaggacaagaacacatgcttagcttctcttctgcttcaggcaaatcaagatgtctcaccttatcttcagtactgtagaaa

SEQ ID NO: 2353 - DNA, 405 bp, Arabidopsis thaliana
  unsure at all n locations
  Clone ID: LIB22-046-Q1-E1-F11
aaaaaaatcatggagatgaccgaagcttccaaacagacaacagcagaaggatcagcaaatccagaaccagaccaaatcttgagtccgagaagatcgttggagctaaaacaaaagaaatggtggatctctgtttctttatgtattttcttagtcttgctcggagattctctagtcatgcttctcttgaacttcttctatgttcaagacaatcgagaagatagtgaccaagatctacaataccgaggaacatggttgcaagctctggtccaaaacgctgcgtttccactactcattcctctgtttttcattttcccttcaccaaaacaaaaccaagaaaccaccaatactcgtttcctctcttttcgtctcatcttactttacatctctcttggtgttcntgttgct

SEQ ID NO: 2354 - DNA, 451 bp, Arabidopsis thaliana
  unsure at all n locations
  Clone ID: LIB22-046-Q1-E1-C7
ccatccagccgccactggttccttcagtttgattttaaggcaattgangcagcaacgaattgctttttgccaattaacaagctaggtcaaggtggtttcggcgaagtttacaagggtacattgagtagtggactacaagttgcggtgaagagactatcgaagacatcaggacaaggtgaaaaagagtttgaaaacgaagttgttgttgttgcaaagctccaacatagaaatttggtaaagctgcttggttattgtttggaaggagaagaaaaaatacttgtctacgagtttgtgcccaacaagagccttgatcacttcctctttgactctacgatgaaaatgaactagactgggcaanaaggtacaaggatnataggaggaatttgcctagaggaantccttaancntcaacaagaattcacgactcccaatttatacatccangacctcc

SEQ ID NO: 2355 - DNA, 450 bp, Arabidopsis thaliana
  unsure at all n locations
  Clone ID: LIB22-045-Q1-E1-H3
acgcgtccgcagcattctgaccctagacacagagtcctccggtcttctgataaacccccatgtggaaggccaagacatgcttccgtcagatttacttgaccgtactaatacggcggtactcgagagtcgctccgccgccgtcttcggtgatccgcgtgacaaacaacgtagcacacctgggaccaccgaagcaaggaccactgccacgtcagctgatatccctgccgccatttcccggtcatccattacctggcaaaaacgccggagctgacggcgacgatggagatagcggcggccacgtcacagctataagctgggtcaagtactattttgaagaaatctatgataaggctattcaaactcatttcacaaaagggccttgttcaaatngaattttcgangtcntaagggatgcctcaagaganaaagaagatgggagctattcctatg

SEQ ID NO: 2356 - DNA, 489 bp, Arabidopsis thaliana
  unsure at all n locations
  Clone ID: LIB22-045-Q1-E1-H5
ccgtttacgccngccaagtaccggtccaagaattcccggggtcgacccacgcgtccgcggacgcgtgggatttattgggaattccacatcgatccaagagatgtttaggcgggtgagcgagcagttcactgctatgttcaggaggaaagctttcttgcattggtacacaggtgaaggaatggacgagatggagtttactgaagctgagagcaacatgaacgatctagtctcagagtaccagcaataccaagacgcaactgcagatgacgaaggcgagtatgaagaagacgaggatgaagaagagatattggatcatgagtgagtgaaaagagctgatattaccgatttttaaatacctctcttatcttcttttcgtttggtcggtatatgtttattgagttccatgtattgtttgtgatgggtccgtgttgtaatagtgagggtcggntcnaaactttaagccgtggttttaaatgaaaattgtccaat

SEQ ID NO: 2357 - DNA, 433 bp, Arabidopsis thaliana
  unsure at all n locations
  Clone ID: LIB22-045-Q1-E1-H6
actactctcttttcctccccattttagaggggttgacttggacgaggacgaaggacaagaagtggtaaacagaataatgttatgccaaacacttgggatcttgaggaatcttgactagatggatctgaaactcttgagtcggccggattgggatcaagaatcttacccagattcttctgatttcttggtcctcatcttctttgctccattcttcctttttcttcgcttaatcctcgacagatgcatattcgagagggtcgctagaagactggtagttcctaaaggactatgtgctgattcaaacgagagaagaaagaaggtagtgaaattcaaagaatcccgcttggaaatgtttgtgctccttctcggtggaagcttttgctcctctacgttacttataanggagccatgggtttaaagacaccaagattct

SEQ ID NO: 2358 - DNA, 434 bp, Arabidopsis thaliana
  unsure at all n locations
  Clone ID: LIB22-045-Q1-E1-H8
ggagaaacactttccgtggtttagtgttgaggacgatcactgtttgtaattcgatggcgaggaagaagatcagagaatatgactccaagagacttctcaaggagcatttgaagcgtcttgctaatattgacctgcagattcgctctgctcaggtgacagaatctacggatttcactgagttaaccaaccaggagtcatggctatcgtccacaaagctagttgtgaaaccggatatgctatttgggaaacgcgggaaaagtggtttggtagctctaaagctggatcttgctgaagttgcagactttgtcaaagcccgcctcggcactgangtcnagatggagggatgtaaaagcacctatcactacattcattgtggaaccttttgtgcctcatgatnaaagaatactacctctctatagtatctgatagacttg

SEQ ID NO: 2359 - DNA, 453 bp, Arabidopsis thaliana
  unsure at all n locations
  Clone ID: LIB22-046-Q1-E1-A1
acgcgtccggcaatcnnnnnnnnnnnnnnnnnnnnnnnnnnnnnnnattaacacaaaaaattatggagcacaacaaggttgatacagaacctcaagattcatatgatgatcaacaaaaatgggttctcgattcttcgaccgatagtagaggagagattccgcttcgggctcaaaccggagcttggagagctgcactcttcatcattggtatcgaattcagcgagaggctaagttactttgggatctccacgaacttagtggtctacttgactaccattcttcaccaagatctcaagatggctgtaaaaaatacgaactactgggtctggtgtcactactttgatgcctcttcttggangcttcgtcgcagatgcttatctcggccgttatgggaactgtcctacttgcaaccancanttaccttaatgggcttgaatccgtttaacattggcc

SEQ ID NO: 2360 - DNA, 395 bp, Arabidopsis thaliana
  unsure at all n locations
  Clone ID: LIB22-046-Q1-E1-A10
gggcggacgcgtgggctcaagcttcctggacaagcaccatcatctcgatgtggtcatacagttacatctggaggacattatcttctgttatttgggggacatggaactggtggatggctgagtcgttatgatgtttactataatgatactataattttggacagagtaactgctcagtggaagcgcttaccaatnaggaatnancctcctcctcctccancttancaaancaagacttntattggagctcgtcatcttttaatttgtggttttgatggaaaattgaccttcngtgatctctggtggttaattcccgaagatgatncgatagccaaganggtcctccggtgcctcaagttgttaaacccccctgaaatttaagaatccaganaaga

SEQ ID NO: 2361 - DNA, 410 bp, Arabidopsis thaliana
  unsure at all n locations
  Clone ID: LIB22-046-Q1-E1-A11
taatcttgtttctcttcatcttccattgacgtttccttctatcctcgttgccttcatttttcactcgcacgctaatcttcgcctactttgttagattttcggttttgggtttttgtcttttggtcgatttcccctgttcccagaatctccgattaagctgcttccttaatctcntgtctgaataaactttttccgggggtgtaatttananangtggttaaaattacgaagtagtgagaggagtgttgttgctgttttgtttattcggtaaaacgaaatcggaagttctttgttgtcgtttgattccttttgagaaagagagatgttggggaactgggattttaacttcactcaagcttcaagaagagctcaaattgacgtccncttaagggctggcaagattcgaagtc

SEQ ID NO: 2362 - DNA, 481 bp, Arabidopsis thaliana
  unsure at all n locations
  Clone ID: LIB22-046-Q1-E1-A3
cggtaggcctccgaaaattccanggtcgacccacgcgtccgcagtaaaatggccaaaaactctgtcgaattcgatcgttacatcgagcgcaaagctttcgacaatacaaaagaaggtgttaaagggctcatcgatgctaaaatcaccgagatccctcgaattttccacgtccctcaagataccttaccagacaagaaacgctctgtttcagacctagagatccctaccatcgactttgcaagcgtcaacgtggacacaccctcacgtgaagccatcgtggagaaagtcaaatatgcggtggagaattggggattcttccaggtgattaatcatggtgttcctttaaacgttcttgaagaagattaaagatggggttcgtaagtttcacgangaagaanattctgaggtcaagaaatcatactactcgcttgatttcaacaagaacaaaatttgcatacagtagtaatttcgatcaaatagt

SEQ ID NO: 2363 - DNA, 491 bp, Arabidopsis thaliana
  unsure at all n locations
  Clone ID: LIB22-046-Q1-E1-B2
ctgtttacccgnccgtagccgtccaaaattccanggtcnacccacgcgtccgaagtttatagcgactcttttcctctaaaagggtctgtctcttccttcttctctcttcagatctccatttcacggatcaatcctgtgtttgaaacaatgggtgttgaagttgtaaactctggtggatttgaggttgctccggctcctttcgaggggaaacctgagaagaacgggaagctggaccaaggaaaaggagatgatgcccccatcaattttggttcagtcggtgagctaccaaagaatgccgaagagaataataacaaagtggtcaactctgatgcacccaaaaatgcagcagaagagtggcctgtggctaaagcagatccactctttctaccttgttaaataccgttcttacgctgaccccaaaattaaagctaagcttgatctaactgataaagagcttgaaaaagttgaacaaagctcggactggaattttg

SEQ ID NO: 2364 - DNA, 480 bp, Arabidopsis thaliana
  unsure at all n locations
  Clone ID: LIB22-046-Q1-E1-B3
ngtaggcctccgaaattccanggtcgacccacgcgtccggaagacttcactgcttttgcagatgtatgcttcagagagtttggggaggatgtgaagttatggactaaaatcaacgaagctactttattcgccattggttcttatggcgacggaatgaggtatggacattgtcctcctatgaattactctaccgcaaatgtttgtacggaaacatatattgcaggccataacatgttgctagctcactcctctgcttcaaatttgtataaactgaagtacaagactaagcaaagaggatccgtaggccttagtatatatgcttatgggctatctccttatacggactccaaggacgatgaaaccgcaactgaaagagctgaagctttcctctttggctgggatgttaaagcctttgggtagttggggattatccggatataatgaagagaaccttggggtcgagattaccggtttttctca

SEQ ID NO: 2365 - DNA, 492 bp, Arabidopsis thaliana
  unsure at all n locations
  Clone ID: LIB22-046-Q1-E1-C1
ntgttacgcctgccgtaggcgtccgaaaattccanggtcgacccacgcgtccgtagcctacccatttcctccttctttctctcttctatctgtgaacaaggcacattagaactcttcttttcaacttttttaggtgtatatagatgaatctagaaatagttttatagttggaaattaattgaagagagagagatattactacaccaatcttttcaagaggtcctaacgaattacccacaatccaggaaacccttattgaaattcaattcatttctttctttctgtgtttgtgattttcccgggaaatatttttgggtatatgtctctctgtttttgctttcctttttcataggagtcatgtgtttcttcttgtcttcctaagcttcttctaataaagtccttctcttgtgaaaatctctcgaattttcatttttggtccattggagctatcttatagatnacaaccagagaaaaagatnaaatccttaccgt

SEQ ID NO: 2366 - DNA, 406 bp, Arabidopsis thaliana
  unsure at all n locations
  Clone ID: LIB22-046-Q1-E1-C11
aattgagtcagagaaaaagagaaagagagaaggtaacatggatgcttgttttcttacctcaagatcaatctctggtgttaaagagcttgtcccgttcatcaaagcgagaatctttacttgccccaagagaaattctggccaatttgttaccaggaaggttgcttctccgatctctgtaaattgttctctttcggattcatggaagccactggaagatgatgctgatctcttcaaggattgtgtcaacaattctacatcagatgctgattggagggagttcagggcaaggcttgttgcaggggaacaagctgcaacgtccgagaaggatcagccctcgtggtctaacccggacatggtggtggactatcaaccatcatcgtcctcactgatnacaattgggaagcaa

SEQ ID NO: 2367 - DNA, 433 bp, Arabidopsis thaliana
  unsure at all n locations
  Clone ID: LIB22-046-Q1-E1-C4
ngtaggcctccaaaattccagggtcnacccacgcgtccgaaaaagggtacgangattcaatcatctccaatcccaaaattccacttctgtccacaaaacacaaagcgattctcgatctttgatcgtcccaccagatggccgggaacgattgggtaaacagttacttagaggcgattctcgacgtcggtcagggtcttgacgatgctcgctcttctccatcacttcttcttagggagagaggtcgattcactcccagccgttactttgttgaggaagttatcactggttacgatgagactgatcttcatagatcctgggttaaggctgttgctacgaggagtccacaagagaggaacacgaggttagagaatatgtgttggaggatctggaatcttgctcgtcaaaagaancagcatgaaggaaaaanaagcac

SEQ ID NO: 2368 - DNA, 489 bp, Arabidopsis thaliana
  unsure at all n locations
  Clone ID: LIB22-046-Q1-E1-C6
aaactgtctccgccggnacgtnaaggtccaagaaattcccgggtcgacccacgcgtccgtttcgcaacttgtcaaagcaccacgaccttctctctacggagttgagatcaatccccccaaatctcggtgtggttcctctagggtttttgatcggaatcggaatcgataatctaaccggcatgaggccaatcctattgccggatccacccagtctatctaccggcgtccctgatattttcgaacaaggcggttcccataacgtcgtcagacgcgccgtcgtcatcggaaacggtttccctggctccgagaatcagtgtatcggtctcgttcgtgcgctcggcttatctgataatcaccttctctaacgagtgacaaggcctaaaggangactaaatgagtggctgcactgggctcccaattggttttcacaaagaagttggactttancctcanggcatatttacctccaatccagattgaatggcntgg

SEQ ID NO: 2369 - DNA, 430 bp, Arabidopsis thaliana
  unsure at all n locations
  Clone ID: LIB22-045-Q1-E1-H12
gatctctcctcctctccttctctctattttgccggaatacatatgatcgagtgaaacggcggacaaagctgtcgtgttgagtactaattcgccgtcgtttttctcagtgaaggagtggtgagagatgtcgagtctcgaagatatcaagaacgagactgttgatctggaaaaaattccgattgaggaagttttccagcagctaaaatgttcaagggaaggattgacaacgcaggaaggggaaggacagggatcagatctttggcccaacaaacctcgaagagaaaaaaggaaacaaaccttccgnaantttttggggttaagttgaatccaacttcaatgggtccatgggaaatgggtncaatccatgggccaattgcctttggcaaccggtgatggtaaggcctccggattggcaaggattttgttggga

SEQ ID NO: 2370 - DNA, 454 bp, Arabidopsis thaliana
  unsure at all n locations
  Clone ID: LIB22-044-Q1-E1-F6
acgcgtccgctctgtctttctatcgcctaatggttgtttggttagttggactagtcggtggctttaagatgcctctaccgtcaacttgccctatggaattctcctgtatgcctgagcattttgttgaagatgcaatggagttgctgatattcgcttcaagaattcccaaagctttggacggggtgccgctggacgactttatgaacttcataattatgttcatggcaagtcctgaatatgttagaaacccgtatctcaagagcaaagatggttgaagttctgaactgctggatgcctcgttcaagtagttcttcttctgctacatctactctctttgagggacatcagttatcgctcgagtatcttgtcaggaatttactgaaactanatgttgacattgagttcacgggttcanacactccagttcnatgacaagttcaatattcgccacaac

SEQ ID NO: 2371 - DNA, 449 bp, Arabidopsis thaliana
  Clone ID: LIB22-044-Q1-E1-F8
gggtttttctctcttccataaaacccaaaagaaactaggaagaggagtaaataatatttgttttaaagaaatgattctccacaaaatggcgttcttggccgttattctcttcttcttgataagcagcagcagcgtttgcgttcatagccgtgaaacgtttgcttgcgatacaaaggacgcagcaacagctacactgagattctgccagctttcagttcctataccggagagagtcagagatttgatcggacggttgacattggccgagaaagtgagcttgttagggaacactgcggcggcgataccacgtctagggaatcaaaagggtacgagtggtggtcgggaggctttacacgggcgttcaaatgtgggacccggtactaaagttccggttggggtttaaccctgcagccaacagtttcccctcaaagtcatcaaccaaccgtttg

SEQ ID NO: 2372 - DNA, 496 bp, Arabidopsis thaliana
  unsure at all n locations
  Clone ID: LIB22-044-Q1-E1-F9
ggaactgttacgcctgcctntancggcccgaaattcccggntcgacccacgcgtccgaacgcgcattagaagcttttcagttagatccttctaaatggggagtcaatgtgcagtctttatcaggatcaccaagctaatttccaagtttacactgcattgttgaagcctcatgaaagaatcatggcacttgatttacctcatggtggacatctttctcatggttatcagactgacacgaagaaaatatcggctgtatccatcttttttgagacaatgccatacagattggatgagaacactggttacattgattatgaccagctagaaaagagtgccgtgcttttcagaccgaaacttattgttgcgggtgcaagtgcttatgctcgtctatatgactatgcacgtattcgtaaggtctgtaacaagcaaaaggcagttatgttggctgatatggctcatattaatgggttggttgcctgctggcgttaatccttcc

SEQ ID NO: 2373 - DNA, 498 bp, Arabidopsis thaliana
  unsure at all n locations
  Clone ID: LIB22-044-Q1-E1-G11
actgttacgcctgccntgtaccggcccgaaaattcccggntcgacccacgcgtccgcaggaaacagcgtctacctctgagtatggggcagggtcaagttctagctgtagcgaagatttgactagagatagatggtttaagggaagcaagcagagtagagttattgctgctacagggatggtttcttctgtgattgcgaaggattacttgaagccaaaccctgtgcgaaaagagtttcctatgatggaacggtctaaagagctctgtgggaacgggaaaaaagctgcggatagagagaaagctgaacagttcttaagttcaatgcttggagatgattgcgaagcttagcatggctgttgttagagatgttttgtgtcaatgtggctatgaatgtcgacatgggcttttgaaatgtcctgccttgacatgtctcctcatcaactgatgattcattgagtggtaaatgtttccggcataaggaatcagcgatatcctggca

SEQ ID NO: 2374 - DNA, 444 bp, Arabidopsis thaliana
  Clone ID: LIB22-044-Q1-E1-G12
acgcgtccgggtgcggcatgatttctgtgaaacctatgggaataattgccagaatgttgatagacattgctttgagccaggttcaagtttcctccggcagtttctgttttttttcaaggcacaaaactcgggagattttgtgatacttgtggagacttgtcgtctactgcagagtttcgttgacagcagtggtgacattgtcagccttttttctggcttggactattcttctgagcataatttggtggattttagagtaaagaaacttgcatttacctgtatcgaggcgatacaccagaataggaaccgtttaagggatcagctcttagttactcctgaagaagctagcatttcaacagctatcttgatggaggcagtttcgttgttgctagatcctaaagctgccttgggtctgcaaaataagttaagttaacctacaaaaaa

SEQ ID NO: 2375 - DNA, 488 bp, Arabidopsis thaliana
  unsure at all n locations
  Clone ID: LIB22-044-Q1-E1-G2
acgttacnttgccggccggtccaaaatacgggtcgacncacgcgtccgcccacgcgtccggtcatatggcagtcatatgtctccggttaatgcggaggttgaggagatgagatcagagtcgccggtggttaatgataaggcgttagatatttctgatgatgatcatgatgatgagaatgaaccgcttattgtttctggtgaatgtcgtatttgttctgatgagtctcctgttgagaatcttgagagcccttgtgcttgcagtggcagcctaaagtatgctcatanaaaatgtgttcagcgttggtgcaatgaaaagggaaacattatatgcgagatttgtcaccaaccttatcaacctgggatataccgctccacaactccaacttnaacctgaagaaaacaactaatgacattggtgganggatggcaaatctcaaggtttgggatgntgcaagaatcccncgccncccttcaaattgctgaancct

SEQ ID NO: 2376 - DNA, 517 bp, Arabidopsis thaliana
  unsure at all n locations
  Clone ID: LIB22-044-Q1-E1-G4
ngttacgttgccctgccggtaccgatctaacgggtcganccacccgtcggccaagccgtcggcccncncngcnccnaaatncagaaaaaaaggaacgatttttatttccggtgaatgagaattttcnctcgaatttgatcgatcacatatttcatctgtgtgttttcattttgaggatgccagcaacggaatatcaaagatcattcgggaggtcttttctgaatttacggcgagacacggcggtgaactcggttgaagtcaacgacggttacccccgagttgactcaagatggaagcagagcttgtttcgtttcagagaaaagttgctgagaggtttatcgatctcaatgcgtctagttgtgaaagatttactgtctcccgaatggggttggggaaacctccttgattccgtttcnaaccttgtcaaagaaananttccgttnccanaagtcatcaaatcatcngttccgatgantaactaaaacaaccgaatgggntcnattgggttcaagaataa

SEQ ID NO: 2377 - DNA, 455 bp, Arabidopsis thaliana
  Clone ID: LIB22-044-Q1-E1-G5
acgcgtccgtctctcttcaccaaatcctcaagaagatgagcaacgacaaggatagcttcaacgtctccgatcttactgctgctcttaaggacgaggatcgagctggccttgtcaatgctctaaagaacaagctgcagaatctggctggtcagcgttctgatgtgctcgagaatctgactcccaatgtgagaaagcgcgttgatgccttgagggatatacagagccaacatgatgaactagaggcaaaattccgtgaggagagagctattcttgaagccaagtatcaaacgctgtatcagcctttgtatgtcaagcgttatgagattgtgaatgggcactactgaagttgaactggctccagaggatgataccaaggtggaccaaggagaggagaaaactgcagaagagaaaggagttccaagtttctggctgacagctctgaaaaataacgatgt

SEQ ID NO: 2378 - DNA, 497 bp, Arabidopsis thaliana
  unsure at all n locations
  Clone ID: LIB22-044-Q1-E1-G7
ctgttacccgnccgtaccggtccaaaaattcccgggtcgacccacgcgtccgctggttttcaatcttctgagaacagagctgttgaatcagctgttccacaagttgctcttcaagcatttgcttttctaagtgagaacactgctgcgcagactgttgttgcttccattgcgagtgacccaaaagtatgggatgctgttatggagaataaggatctcatgaaatttcttcagaccaacaaaaccgctgtttcctctcaagttgaatctgacaatgacgaccaatctgaacgttcgagcacgactgagtgtgaagtcgtggaaactaagccaatggaactcttagagattctgcaggacatgaagctaaaagctgttcggttgatggaaaatgtatcttcctactttggtgacttgtttggggttaggatcagttacagaagatggaaaagacaagaancagacgttgttcaatgaccctcgttctctgtttggattaa

SEQ ID NO: 2379 - DNA, 467 bp, Arabidopsis thaliana
  unsure at all n locations
  Clone ID: LIB22-044-Q1-E1-G8
ccgggtcnacccacgcgtccggggagattatgcgcagttttggtcttactgacagtggagattgcaaatttccgagagccttctgaatggttgtattactttccccctttggctgttgaagatctaagggcatatggattgggttgtgattggagacgctcgtttgtgaccactgatgttaatccctttttcgatgcctttgtgaggtggcagatgaggaagttgaaatctatgggaaagattgttaaagaccgcaggtacactatattctcacctttagatggccagccttgtgctgatcacgaccgtgctactggggaaggtgttcagcctcaagagtatacactcataaagatggaagtagtcaagccattccctctgaaactgggtcctttggaaggcaagaaantgtttttggctgcaactactttaaggcctgaaaacaatgtatggacaaacaaacccca

SEQ ID NO: 2380 - DNA, 446 bp, Arabidopsis thaliana
  unsure at all n locations
  Clone ID: LIB22-044-Q1-E1-G9
acgcgtccgcaattattcaaaaccgcatcatgttcttgttgagaagcctttatgcaccacagttgcagattgcaaacaggttttggaggctgcaaagaaaaggtcagatatggtggtgcaagttgggttggagtacagatacatgccgccagttgctaagctaatagaacaagtaaaaggcagagactttggtaatgtcaagatggtagcaatccgagaacatagattccctttcttggttaaggtgaacaactggaatagattcaatgtgaacactggagggaccttagtggagaaatgctgccacttctttgatctaatgaggctctttgccggtgcaaatcctgtctgtgtgatggcttctggangcatggatgtgaaccacaaggatgaagtttatggtggaaaggtgcctgatataattgataacgcatatgttattantg

SEQ ID NO: 2381 - DNA, 466 bp, Arabidopsis thaliana
  unsure at all n locations
  Clone ID: LIB22-044-Q1-E1-H1
acgcgtccggaagaagcaaagaagcactgataaatctctgcaactcaacaaatttctgagattagctatggaaggttcttcatcttcgtcttcgttaatttccaaatcggacgctgagttggaggaaatgctcgatcggatgctgacgagactcgctctttgcgacgactccaagctcgaatccctagtctctaacctccttcctcttaccatatcttctctttcttctcaatctcccgttgttcgcaacaaggttcttgagatattgagtcatgttaacaagagagtgaagcatcagcatgaaattggtttgcctttattggctttatggaaattgtacacagatcctgctgctgctcctaagggtaaggaacttttgctattggncaatgttgagatggcttttgaacgaactccctgcaaaaggaaaagggaaggaaattgcaccctaatacactggnggaat

SEQ ID NO: 2382 - DNA, 503 bp, Arabidopsis thaliana
  unsure at all n locations
  Clone ID: LIB22-044-Q1-E1-H11
ggggggggaacgtttagccgnccntaccggtcccanaaattcccgggtcnacccacgcgtccggttttggatttggtaaagcttctcggtcacttgctcggtgattgaaactgaatcgattgtgattgtgattgtgattgtgattgtgattgtgagggaattatggctcaagccgtagaagagtggtacaagcagatgccgattataacccggtcgtatctcacggcggctgtagtcaccaccgtcgggtgttcgctcgagattatatctccttataatctctacctaaatcctacccttgtggtgaagcaataccagttctggcgtcttgtcacaaatttcctttatttccgaaagatggatttggactttttgttccatangttttttccaaccccaatactgcaaactgctcgaagaaaaactccttcanggggaaaagaccgccggattcccttacatgcccttaattcgggggcaactgntcctaactgggtaattgt

SEQ ID NO: 2383 - DNA, 508 bp, Arabidopsis thaliana
  unsure at all n locations
  Clone ID: LIB22-044-Q1-E1-F4
aacgttcgttgcccggccggtccaaattaacgggtcnacccncgcgtccggtgacttnaaatttattnagataatttcaatccnaagggattctttaatttaatgttttgggtnanaaccaaacgcagtgagccaaatcaagatgggtgacgccaactacaattagaaccgtcgatctccgctccgacacggtgactaaaccaacagagtcaatgcgttcagcaatggcaaacgcggaagtagacgacgacgttttgggaaacgatccaacggctctgcgtttggagaaagaggtggctgagatcgctggaaaagangcggcgatgtttgttccgtcagggacaatggggaatctgataagcgtgttggtccattgtgatgagagaaggaattgaagtgattccntgggagaacactctcacattcatatatatgaaaaacggcggcgttttcaagcctcngtgggtgttcatccgaaggacggtgaanaatgaaggaagacggttcg

SEQ ID NO: 2384 - DNA, 496 bp, Arabidopsis thaliana
  unsure at all n locations
  Clone ID: LIB22-044-Q1-E1-D7
ccgnccggtaccgagtccanaaattcccgggtcgacccacgcgtccgcccacgcgtccgcccacgcgtccgtctctctctctggcttgctgtttactctcatcgtctcctttacttcattcgtcttcttcctctctttcccacaagctcccattgatatagagagagagatttaaggaaggaatcatggcagggggtggagctccagcacccaaagcagacgaaccacaaccacatcctcctaaagatcaacttcccaacatttcttattgcatcaccagtcctcctccttggcctgaagctattcttcttggattccaacattaccttgtgatgcttgggacaacggtgctcatacctactgctcttgttccccagatgggaggtggatatgaaagagaaaggcanaggtgattcagactattctctttgttgctggnatcaacacattgctccanaacactgttccggtactanattgcctgcggtttgtttgg

SEQ ID NO: 2385 - DNA, 505 bp, Arabidopsis thaliana
  unsure at all n locations
  Clone ID: LIB22-044-Q1-E1-D8
ctgttacgcctggcccggtaccgagtccaaaaattcccgggtcgacccacgcgtccgcatttatttgataaatagatttaagctaagagttaaaaaaagatggcaacactaggagatattggagtagcagcagcaatcaacatactcactgcaatcatcttccttttggcatttgcaatcttgaggattcaaccattcaacgatagggtttatttccctaaatggtatctcaaaggtataagaagcagccctttgcattcaggtgctcttgtcagcaagtttgtcaatgttaacttaggctcatacctccggttcttgaactggatgcccgcggctctaaagatgcctgagcctgagcttattgatcatgctggattggattccgctgtctacttgaaggatttacttgatagggcttaagatctttgtaccgataagcgttacttgcttggtcnattctggtacctggtcaattgggactaatcatggtccgcaactaacctaa

SEQ ID NO: 2386 - DNA, 494 bp, Arabidopsis thaliana
  unsure at all n locations
  Clone ID: LIB22-044-Q1-E1-D9
aactgttacgcntgcctgtaccggtccaaaattcccggntcgacccacgcgtccgaacaacatctgcttcctgggttttctctcctttgcccttatctcccttccctccttgtcacttgctcttaccaatcctgacgatgttgcggctattaacagtctcttccttgcactggagtctcctcttctccccggttgggttgcatctggaggtgacccatgtggtgagagctggcaaggtgttctatgtaatgcttcccaagtagaaacaataattctcatcagtgccaatcttggaggagagcttggtgttggcttaaacatgtttacctctcttaaagcaatggattttagcaacaatcacattggaggaagtatcccatccacgttgcctgtttcattgcagaacttgtttctttcaggtaacaactttacaggaaccatcccagaatctctttcctccttaaaatctttgtctgtcatgtccttgaacaaaa

SEQ ID NO: 2387 - DNA, 504 bp, Arabidopsis thaliana
  unsure at all n locations
  Clone ID: LIB22-044-Q1-E1-E11
actgtttacgccgggcctgtancggtcccanaaattcccggagtcnacccacgcgtccgaacaaaatgaaattttcaatcacattagctctatgcttcactctctccatcttcttgatcggatcacaagccaaagttccagtcgacgaccaattccgagtggtcaacgaaggtggctacaccgattacagtcccatcgaatacaaccccgacgtacgtggcttcgtacccttcagtgacaacttccgtctctgtttctacaacacaaccccaaacgcatacactctcgctctcagaatcggaaacagagtccaagaatccactctcagatgggtctgggaagcaaacagaggctcaccggtcaaagaaaacgcgacgttgacttttggcgaagacggaaacctcgtactcgctgaagccngatggacgccttggtaatggcaaacgaacacagctaacaaangggccgtgggggattaaaatccttgggagaatggcaatatgg

SEQ ID NO: 2388 - DNA, 498 bp, Arabidopsis thaliana
  unsure at all n locations
  Clone ID: LIB22-044-Q1-E1-E3
tgttacgttgccgggccggtccgaaataacgggtcgacgcacgcgtccgctctgcttgagagagtcagagagtcaagagagaaaaggggtcgagaatggcggtcgcaatatctgggagtagtttgatatcgtcgactcttcagcattataataatcggatttatatccgagattatccgattccgtgtcactcttctaatccaatttgcaattcttttaatttcaaaagacgttcgttctctccttcttcccccaaatttaacgaccatgtcgttaacccttcctcttcttatttatcctccaagctttctccaattcgaacccattcctctttcgctgcgtgtggctgctcctggattcaagacaattcantggttcatgattatgctacaacaactaatgggacgttcaaagcgttgctcggcgttaccaancancaaacacagtgggatgtctcttcggtggtcagatctttttgagtcaaaatgctcgggtcct

SEQ ID NO: 2389 - DNA, 501 bp, Arabidopsis thaliana
  unsure at all n locations
  Clone ID: LIB22-044-Q1-E1-E4
ntacgttggccgggcccggtccgnaataacgggtcgacccacgcgtccggaagaacaaaaccgtataaccgttcggttcagaggtgccgaaccgaaccgacccgtaaaccgaaatcctcaaaagaaattgccgatcggtttgctactgttcaaaacctcggtgccgagaaccgaaactgtcggttttttcggttcgggtttctcggtttcttccgaactcccaggcctagtttggttttatttttcacgagttttgcttctcttttcatcggcgacgacgacgtcgagtttctgtcaaaacgttaacgatccgactcgagcgtcgacagtaagagaagaagacagcgattgtgtgtagatcgacggcgaacgtgtgtcgatncgtctcgatcgacggagaatacgtttccgattcggtttcgattcaaatcggagagttgaggattctaaatcgggaaattgcattaatactcaacctccaaaccccttctgaaanatccc

SEQ ID NO: 2390 - DNA, 506 bp, Arabidopsis thaliana
  unsure at all n locations
  Clone ID: LIB22-044-Q1-E1-E6
ctgttacccggccggtaccggtccaaaattcccgggtcgacccacgcgtccgcttggctctaccttgaatttctactttggtgctactcttcttcacatacctagctgctgtatactatacgtgaaccaactccgtattctactttagaggccatgggaaaagcttctcgagacaaaagggatatctattatcgtaaagctaaagaagaaggatggcgtgcaagaagtgcttttaagcttcttcagattgatgaagaatttaatatttttgaaggtgtgaagagggtcgtagatttatgtgctgcacctggtagctggagtcaggtcttgagtcgtcaattatatcttcctgcaaagtcctcaagctgagtcaaaagatggggatcttcctcttatagtagccatcgatttgcaagcctaagggctccaaattgaaggtgtcatccnaggttcaagggggacataactaatgccccggactgctgaaattggtcattagaacactt

SEQ ID NO: 2391 - DNA, 495 bp, Arabidopsis thaliana
  unsure at all n locations
  Clone ID: LIB22-044-Q1-E1-F1
aacgttagttgccggccggtccgaaattacgggtcgacccacgcgtccggcgaaagacgagctccggtctcatttctcgttcttctgattgatagatcgctcggaacttggaaagcagcgtaatcggtagggagtgatttgagttttggtgaggatgtctatggttgatgagcctttatacccgattgctgtgcttatcgacgagctaaaaaacgatgatattcagcgtagattgaactctattaaacggctttctatcattgctcgtgctcttggagaggagaggacaagaaaagagttgattccatttcttagtgagaacaatgacgatgacgatgangtgcttttggctatggcggaaganttggggggttttaatctgtatgtaggaagggttgagtatgcataatgttcctgcntccaacctttggngnacccaaccactggttgaggaaacnttcnttaagggaaaaaagctgttggattcacntttgt

SEQ ID NO: 2392 - DNA, 445 bp, Arabidopsis thaliana
  unsure at all n locations
  Clone ID: LIB22-044-Q1-E1-F10
acgcgtccggaaaatatttcgaacgcagctgttatgattcagccatctctaacaacatattcgtttaactcactacctcaacctgcattgttggatgttgcttccattggtgcagaccgtatcctcctgttggattcttacattagtgttgtcgttttccatggaatgaccattgcacagtggcgcaacttgggatatcaaaatcagcctgaacaccaggcatttgcccaactcttggaagcccctcaagaagatgcgcagatgatcattcgtgatcgtttccctgtaccaagattaagttgtttgtgatcaacatggatnccaggcaaggtttctgttagcaaagctaaatccgtcaagcaacatacaacaatgcaagcgagatgaatgcaggctctgatataatcctcacggatgaagtcaagtcctcaagtcctccttccaa

SEQ ID NO: 2393 - DNA, 508 bp, Arabidopsis thaliana
  unsure at all n locations
  Clone ID: LIB22-044-Q1-E1-F11
ggggnaacgtttagccggctntagcgggccaagaattcccggantcgacccacgcgtccgcntttgaatcnctcaaaattctcctaattcccaaaattacccctctcatggcgacgaacggatcgtcggagcatcttctcccggagacgacaagaccaagcgcgatcatcaacaaacaacaaccggagtttcctgcatcacgattcacgttcatgtccctcgtgctctggttcgaccagtcaaatttcggtacggctctgctttcgtggtccgttttcttccttctcgtcgtcatcgttcctttgatctctcacttcttgctcgtttgctccgactgcgatttccatcaccgacgtccgtannacgttattgtgcagcttgngntaatcnannttcgcatgnaaccttttgccgatagcngaaaacatctngctcacgngaancngagtggncgcttgggtatggcaaaccgaacacagctaacanaangcgcccttgggggattaaa

SEQ ID NO: 2394 - DNA, 492 bp, Arabidopsis thaliana
  unsure at all n locations
  Clone ID: LIB22-044-Q1-E1-F12
tgttaccctgcctgtaccggtccnaaattcccgggcttctctgcaaaatcgactaaagttttgagtttcttcaccgtacgattaaccggagatggagtcttctcccgatccaggagagttgattaagtcgtctcagccgagtttctttgagtttcagaagcaggcgtctctaatgacgagctgcaatcttctatggaaagagctctctgagcatttcacttccatggagcaaaacctgatgaagaaatctgaagctctgagacagatgattgaaaccctagataatcaaacgcaagagctcgattgagttactcaagcatcgtgaggtgactatagaccacagcgtcgagatcgcggaggggaaagttgaggaacgccgttagagccggcgttggattcncctgggagaaagctagagactgtggtgatgaagataccggagaagtcgacgacnggcgacgggcntttaatcggcgcctgaantcccctttg

SEQ ID NO: 2395 - DNA, 511 bp, Arabidopsis thaliana
  unsure at all n locations
  Clone ID: LIB22-044-Q1-E1-D3
tacgttgccggccggtccgaaataacgggtcgacgcacgcgtccgaaaatcntctctctaatctctccactctttcataaatattttcctaattcttctaccttggtgtctgattctagcaccaaaccattttctcctaccaaaatctgggtttcgatcaattttaggtcttttgattcctacttgtctaatcgtcttgcaatttcaaagatgacagttgttggagatgttgctccaattccaaggaggaacagttctacttgctctaatgatatcgctgctccgttattaccagagtgtcatgggagatgaagttgctcatgatgaattcaatggagcttcttttagtggcgcggtttttanctcgcccacgactataaattggtgctgggtatcatgggctttgccctggctacaaatgaaanattccttgggaccttgggacntgggaatcacgaatgantggttgttaanggctttccttgaactgaatgcgtccgaattgaagttc

SEQ ID NO: 2396 - DNA, 500 bp, Arabidopsis thaliana
  unsure at all n locations
  Clone ID: LIB22-044-Q1-E1-B3
ctgttacntttgcccgtgccggtccgaaattaacgggtcgacncacgcgtccgcgcaaaatcttccctcaaactcaagatccgattcttctaattctttgtccccccagagattcttcttctttctccaagtaaaagaaaacaactttctttctcttttcttgcgaaagtcctcaactttcaccactaaatcagcttccttcaatcactgtgtttgctttggacccagtttctgatttagcgactagggttttgattggaaccgtattaagtatatgagaatcgggttttactggtgaatcggattatcatcggaattcggaaaaagatggatcggaatcaaaagatggatcacgttatcggcgggaagtttaagttgggtangaagcttggaagtgggatnattcggtgaactttatttagggatcaatattcaaacctggaagaagaagtcgcagttaagctggaaacctgtgaaagaagaagcatcctcnaactgca

SEQ ID NO: 2397 - DNA, 591 bp, Arabidopsis thaliana
  unsure at all n locations
  Clone ID: LIB22-044-Q1-E1-B4
ctgtttcgcttggnccgtaccgggtccanaaattcccggggtcgacccacgccgtccgngcaatcctcccaaatcctaatcctcaantccgggttccgaaanaaagccttnanagggcgaattccctttggctttaagcctaaactaagtaantttccgtncatggtncttggggngcaacgaatttgaagttcgggattcctgggtggtaattttacaagaagcctttattcaancaaaatgcaaagttcaaaagggaagttgcaaggttgaaagaaantgttattccctggaatcctgattctctcaaataacctcacacccggtatacggtctgatctttcttttcaaatgggcaaagctggggggaaaaagatgagcgtccaaacgattccaaagatcaagtttccgaaacttanttttcgcanaatcaggtcattaacaaatgcttgtgcaacccaagccgattccttgctaacctcntgaaactcctccaagaggttgacatcggggcctgaaactatcaagncgctgaaaagaattccaccaaggaactttccngtccgaacctcaaangggttttggctatca

SEQ ID NO: 2398 - DNA, 456 bp, Arabidopsis thaliana
  unsure at all n locations
  Clone ID: LIB22-044-Q1-E1-B6
acgcgtccgctcacaacgcagagcttcaatttctccctcgcagggattcggatcagttcaatttcaagtttctgaaccactcatggatcaggcggagctgagtatagagcaggtattgaaaagggacattccatgggagacttacatgaacactaagctggtttcagctaaaggtctccagctcttaaggcgctatgataaaaaacctgaaagtgctagggcacagttgctcgatgaagatggtccagcttatgttcatctctttgttagcatcttacgtgatatattcaaggaagaaactgtcgaatatgttttggctttgatttatgaaatgctctcagcaaacccaacacgagctcgattattccatgatgaaatcnttgggcaaatgaggatacttatgagcctttcttgaggttgctttggaagggaaatttggtcaatcaagaaaaanag

SEQ ID NO: 2399 - DNA, 441 bp, Arabidopsis thaliana
  unsure at all n locations
  Clone ID: LIB22-044-Q1-E1-B7
caatccaccattggagacgtgccatcttcatcctctgagatgtggagattctgcttcttcttatcgttactattctttgatgttagcgcggtgaaatctgcagaatcgattttcctcccaagtcaaatcggagttgaagattcccgcgtctttgaatctcttagtcttagtcctgtatgctccgcggctgatccaaacctcaactacaagccggtcatcgggattctgacccaccctggcgaaggtcgatgggacgctcgtcttcactctctgaaaaactacgcctacgcgacgaacatatcgtacatcgcagcttcgtatgtgaagttagctgagactggtggagctcgtgtgattcctcttatctacaacgagcctgaaagaaatcctgtttcagaagctagaattggtaaatggtgtgatattcacangtgggttggg

SEQ ID NO: 2400 - DNA, 467 bp, Arabidopsis thaliana
  unsure at all n locations
  Clone ID: LIB22-044-Q1-E1-C11
cgaaattcccgagtcnacccaggcntccgacnaattatnccnaggtcaaanctnggggttnattnccctncaaccttnccnanggaaacaancncnaacttgnctnccagggtncgncttaacattggtggaaagaaattttgtacgaccattgatactttgactattcgtgagccagactcaatgctcgcagcgatgtttagtggtcgacatgcaatgtgccaggaatccaaaaagggatatgtattcatagatagggatgggaagcacttccgtcatattttaaattggttgcgtgatggcgttattcctaagtctgtcagatcctgattgttctgaacttttgcgggaagcagactactatcagcttcttggactgaaagatggaataaaagattcgagaaaagaattggtgaagtagaagctgaattaacgcgtatagatatcatcaaatgtatacaaaccga

SEQ ID NO: 2401 - DNA, 518 bp, Arabidopsis thaliana
  unsure at all n locations
  Clone ID: LIB22-044-Q1-E1-C3
ctgnttacgctttgccggtgaccggtccgaaattaacgggtcgacncacgcgtccgcagcttttgaaaaacatgacctttctaaaaatgaaaagcctttctttcttcttcaccatcctcctctctctctcgaccctcttcaccatctccaacgcacggaagtttaatgtcggaggcagtggcgcgtgggttacaaacccacctgaaaactacgaatcttggtctggcaaaaaccgtttccttgttcacgacactctctattttagctacgctaagggagctgactcggtgctagaggtgaacaaggctgattacgacgcttgtaatacaaagaatccgatcaaaagagtggacgatggagattctgagatctctccttgatcgttatggtcccgttttacttcatcagtggcaatgaaagattaactgtaangaaagggtcaaaaagcctaatgtcgttgtcataatccngctaaggattccatccaacgggctcaagtctcctcaacgccggctgca

SEQ ID NO: 2402 - DNA, 515 bp, Arabidopsis thaliana
  unsure at all n locations
  Clone ID: LIB22-044-Q1-E1-C4
gttagttgccgggccggtcgaaataccgggtcgaccacgcgtccgcctaaagcncnctttncccncaagattncaattcccgaggcncaagagaaaaccgtaaacccctncnccgttcacncaatcaaccaaagatgcttgagattcttcaaatcaagggtggtcaatgcggtaaccagatcggagccaagttctggggaaagtggtttgcgccgagcacggcatcgatccaaccggaaggtacaccggagactcagatctgcaacttgagcgcatcaaacgtttactacaatgaagcgagttgcggtagattcgttcctcgtgcagtgctcatggatttgggagcctgggactatggatagtctcagatctgggaccgtacggtcagaacctttccgacctgataacnttcgtctttggtcaatcccggtngcggggtaacaaacttgggccaaaggggacactacacttgaaaggagcctgaactaaaccgaattccgttccncgaaggtttg

SEQ ID NO: 2403 - DNA, 436 bp, Arabidopsis thaliana
  unsure at all n locations
  Clone ID: LIB22-044-Q1-E1-C5
gcctcctctgaacttctagagcttgctgcagctcgggactcggtatctgcaaaaaacagaaagccccaatgattttgccatcgatgctgacccgtttgttcaaagtcaggagagcctgaatgaattcccctttgcgatcaaagaacgggaatgggaatttatcagtatcttggccacggaggtcaaatccatggctgtctacggtgaccaagataaggctccaacaggttctcgcagaatttctgctaagtattgtccgttatgcacccatggaaggctcggtagagctccatctatgcccgactctgaancaaatggctgacggattctccgctgtacgtttggganttcaaaattggcgtttgcaaggggaaagtgtgccgccagaagaaagttgcaagacatgtttccataantaacccgatggacaagtcca

SEQ ID NO: 2404 - DNA, 454 bp, Arabidopsis thaliana
  unsure at all n locations
  Clone ID: LIB22-044-Q1-E1-C8
acgcgtccgcnatgagaaagaaaggaatcgcaaaagagtagtgactgattccgttgacgagaatgcgtctactattactaagaagaaggataaacaaccaagtgatgctgctgataatggcggaggcgaagatgaagaaggaatggatgtgaatgagattgagatgatgaagatgttagggattcctactggatttgattccacaaaaggcaaaccagttgctggtgctgatgttagtggtattagagctgtaactaagcgtcagccaagacagtacatgaaccgtcgcggtggatttaaccgtcctctaccggccgagcgtaatcgctagtcttctcaaggtccctctaacgctgtcttgaacactagtcaaaaagatgagggctagagctgcatttccangatagtagttactagttactccaattcttccccaaaactctgttctgatgtc

SEQ ID NO: 2405 - DNA, 451 bp, Arabidopsis thaliana
  unsure at all n locations
  Clone ID: LIB22-044-Q1-E1-C9
acgcgtccgcccacgcgtccgcggacgcgtgggcttaagttgagcatctccaattcctcttgacacagctaaagatccctggattctccaaacaccgtgaaacgtatcaacaggaattggagatgctcaacttaagaaatgggttatagctgaaccagagacaaagatttcgagaatcgagcatgaccatgagtttttgatcttggcatctgatggtttatgggataaagtgagtaaccaagaagcagtagacattgctcgtcctctctgcttaggaaccgagaagccattgttgttagctgcctgtaagaagcttgtcgatttatctgcttcacgaggctcgtctgatgatatcagtgtgatgttgatcccttttacgccaagttcatatagaaaagagangcatcttaagaagattttagatatatgataaacgttagaaatttggagg

SEQ ID NO: 2406 - DNA, 424 bp, Arabidopsis thaliana
  unsure at all n locations
  Clone ID: LIB22-044-Q1-E1-D1
aaagatcccgatgatctctcatctagagagatcgcgtttgaagatcccttctccgttgatatcacaaaactcacagttgggtatacaaaagatgctgatatgaaggtggtggaagttcttggttccaaaggtgtcaatatggttccttttgagctaaattatactgtggaatcggttcaagggatattgaacttcacaatggatgtagatatgttggctcattttgatgaatggcaaagaaccggtcaagaagatctctatgaagctcaagatcaatggccggttgagttacgccgtgctcgtgtagttacagcagtagattacattcangctcagagagctcgtggtaagttgattccggattggagaaaaactttacaatcnaatgccgtttaatgggaaatgtgaccgattgggaaaaaag

SEQ ID NO: 2407 - DNA, 497 bp, Arabidopsis thaliana
  unsure at all n locations
  Clone ID: LIB22-044-Q1-E1-D11
gaactgttaccctgccctgtancggtccgaaaattcccgggtcnacccacgcgtccggaaaggggaagcaaataaattatcgaagcccactggtttcggagctgatcggtctctatttctctcttcatacatatctcaagcagataaagttgatcggatactagaatgggaggaggatttagagttttgcatttggtgaggccattcttggcttttctgcctgaggttcagagtgctgataggaaggttccattcagagagaaggttatctacactgtcatctctctcttcatctttcttgtctgcagtcagcttcctctttatggaatccattccaccaccggtgcggatccattctattggatgcgtgtcattcttgcgtccaaccgtggaactgtcatggagctcggtattactcctattgttacatctggacttgtgatgcaactcttggctgggtccaaagattattgaaggtttacaacaatgttccgtga

SEQ ID NO: 2408 - DNA, 412 bp, Arabidopsis thaliana
  unsure at all n locations
  Clone ID: LIB22-044-Q1-E1-D12
agctctgaaacagttggaaaatctcaatctgtttccacacaacattgtctttcgctctgtcaccgtccctcatgtggatggtctccccgttggcacagagacagtctctgagatccccgtgacatcagctgatctcttgatgtctgctatggatctcacacgtgatcaagttgaaggtgtggtccgagccgtggaaccggacctgatcttctttgacttcgctcattggattccagaggtagctagagactttgggccttaagactgtaaagtacgtcgtggtatctgcatcgactatagctagtatgcttgttccaagtggtgagttangtgttcctccgccgggatatccttcatcgaaggtgctgcttcgtaaacaaagatgcttacaccaatgaagaatccnggatcc

SEQ ID NO: 2409 - DNA, 505 bp, Arabidopsis thaliana
  unsure at all n locations
  Clone ID: LIB22-044-Q1-E1-B2
ctgttacgcttgccggtgccggtccaaaattcacgggtcgacccacgcgtccgattttcttccactttctcgatctttgagatttctttcaaaggaagaaaaaaaaaaaaactcgcgatgtccgccgaatcagctagccaaattcctaagggacaggttgatctactagattttattgactggtctggtgttgaatgtcttaaccaaagctcaagtcactctttgcccaatgctctcaagcagggatatagagaagatgaaggtttaaacttagagagtgatgctgatgaacaacttctcatctatattccttttaaccaagttatcaaactacattcctttgctatcaaaggccctgaagaggaaggtcctaaaactgtaaagtttttctcaaacaaagagcacatgtgcttcagcaatgtcaatgatttcctccaagcgacancgctgaactaactggaagaaaaaccttaagggaaaancggtggtcctaaagtaccttaaa

SEQ ID NO: 2410 - DNA, 494 bp, Arabidopsis thaliana
  unsure at all n locations
  Clone ID: LIB22-043-Q1-E1-A3
acnttgcccggccaggtacaagtctagngggtcgacccacgcgtccgatttctgactcgtcccgtgactcagtgattctcctcttccaatcctctccggaagaactaaacaaaaacacgatctttctcagatttagagagagtaagagtgagagagtgtcagagacacgaatcaaagaaatgatttttaaaagcttctgttaattctaatttgcatagatttgtttactcgagcttgagcttgagcttcttctaatggagttaaggaaggacaagcttcttatgttttactcagaggggaaagaaagcaaagaagctaaatgggcagtgaatgatccaatgagcaaatcttataagctctctttaccttcagcactaagacctgataatctcttacctgggaaatagacttagatacactgatgcttctaagtccaaatcntctaaagtctcaaggnacaaaggactatcctgatcaaggaatngagattgtct

SEQ ID NO: 2411 - DNA, 503 bp, Arabidopsis thaliana
  unsure at all n locations
  Clone ID: LIB22-043-Q1-E1-A5
ttacgccngccagtaccggtccaanaataacgttcccgggtcgacccacgcgtccgaagaaaacaaaatcatgtctcgatttgctatcttagtaaccttggcacttgccattgccactgtttcggtggttatagctcaagtccctccggagaaacaattcagagtcgtcaacgaaggagaattcggtgaatacatcactgagtacgacgcaagttacagattcatcgaatcatcaaaccagagcttcttcacatcaccattccagctcttgttttacaacactacccctagcgcctacatcttagctctccgagtcggactcaggcgtgacgaagtctaccatgcgttggatatgggacgcgaatcgcaacaaccccgtcggagaaaacgctacactctcactcgggccgtaacggcaacctcgtcctngctgaaactgacgggacgagtcaaatggcagactancacagctaaacaaaggcgtcaccgggattccaaatctt

SEQ ID NO: 2412 - DNA, 417 bp, Arabidopsis thaliana
  unsure at all n locations
  Clone ID: LIB22-043-Q1-E1-A9
aaaaaaaaaacacacacacacatcaagttcaccttggacatggtatatttacctttagatgcagcatctaagaagtgtagactcgttttgcatactcaagacaaaagctgtcctaaagcgtctgtgtgaggtggcaccgcagctcctactccagccatccagccatccataattgctgtggaaagaagctctaattggccagtggttactcctgaaacatcatctgctgtaacagagagaaactcaaaactttctgcaagccatgacctaatctgtctttgcagttcaccaaccggaagtgtgaacaantaaagcagctaagggtttgtttccaatggnaaaaacttttggcttcaacctggtanctccctcangctttcctccagtcacttggctggcctccccaattatcccaan

SEQ ID NO: 2413 - DNA, 487 bp, Arabidopsis thaliana
  unsure at all n locations
  Clone ID: LIB22-043-Q1-E1-B3
ctgttacgtttgccnggcccggtccagaatncccgggtcgacccacgcgtccgcccacncgtccgggtttcttcatcttcacaacaatggcgtcctcactcactaggaattgctctcgcttctcaaaagccatctctgtccgtttcatgagtaacctaccggaaaacaccgtctacggaggaccaaagccacaaaacccaaaccaaagagtgacgctaacgcatctcagacaaaaacaccggagaggagaaccgatcaccgtcgtaactgcctacgattacccatccgccgttcatttagacacagctggtatcgatgtttgtcttgtcggtgactcagcttccatggttgttcatggtcacgacacaacacttcctatctccttanacgaaatgcttgttcattgtcgtgccgttgctcgaggcgctaaacgacntcctcctaagttgggtgacttgccatttgggacctacgaatccaagctcta

SEQ ID NO: 2414 - DNA, 443 bp, Arabidopsis thaliana
  unsure at all n locations
  Clone ID: LIB22-043-Q1-E1-B6
acgcgtccgaaagaaactaggaagaggagtaaataatatttgttttaaagaaatgattctccacaaaatggcgttcttggccgttattctcttcttcttgataagcagcagcagcgtttgcgttcatagccgtgaaacgtttgcttgcgatacaaaggacgcagcaacagctacactgagattctgccagctttcagttcctataccggagagagtcagagatttgatcggacggttgacattggccgagaaagtgagcttgttagggaacactgcggcggcgataccacgtctaggaatcaaagggtacgagtggtggtcggaggctttacacggcgtttcaaatgtgggacccggtactaagttcggtggggtttaccctgcagccaccagtttccctcaagtcatcaacaacgttgcctccttcaatncctcccttgggg

SEQ ID NO: 2415 - DNA, 453 bp, Arabidopsis thaliana
  unsure at all n locations
  Clone ID: LIB22-043-Q1-E1-B7
acgcgtccggctagagtgaaaagtgagccaacagctttgagctcagggttaaaaggaaagttggataactttcctggttcaggaacagagaagagcaaactggtaagcaaggtgacaagaaatatcccacgtcccaaaccgcggccgaagaagaagatattgcttaaaaagaagctaaaaatcgttgtaaattctgctacaaaaatggttgaggaagtcgatacttccttagagcctagtgcaagtcaacttctgtgccagaagtgccactgtgcggtaaagagcaccagcactgaaaaccacccgccctcgaatactagtcatactactgataaaaatgtcagtatagaagcagatcaagaatcactcgcaagcccgcgtctcattcgcattgtgaagtgtaataaaagaggccaacaangggttcctcggattcctgtgaaggttagtgat

SEQ ID NO: 2416 - DNA, 446 bp, Arabidopsis thaliana
  unsure at all n locations
  Clone ID: LIB22-043-Q1-E1-B8
acgcgtccgcaaacattaagtagcactctttttcctctctatatctctcactcacactttttctctatatcttctcctcaacttggatatgggtgaagccgtagaggtcatgttcggaaatgggttcccggagattcacaaagccacatcacccactcaaaccctccactctaaccagcaagactgccattggtatgaagaaaccatcgatgatgatctcaagtggtcttttgccctcaacagtgttctccatcaaggaactagtgagtaccaagatattgctctgttggacaccaaacgttttggaaaggtgcttgtgattgatgggaaaatgcaaagtgctgagagagatgagtttatctaccatgaatgtttgatncatcccgctctccttttccatcccaancccaaagactgtgtttaaaaatgggaaggaggtgaaaggc

SEQ ID NO: 2417 - DNA, 480 bp, Arabidopsis thaliana
  unsure at all n locations
  Clone ID: LIB22-043-Q1-E1-B9
tttgttttgccggccacgggtccagcaatcccgggtcgacccacgcgtccgcggacgcgtgggctcagaacgacgacctatctatgaagattgaaacagcatactattctgttggaactcttgtcctttcagattcatcgccacctgctatgtcttctcttcttgttgttagcagagattcaagcgtgcactctcaggctggcagcagttcagggccaagttcaaggagttctcgggctttacgagaagttgtgtcttcccttcctattgaaggccgtatgctttttgtagcagatgtgctcccctctcctgatactgctgctactattcaatcattatattcagaactagaatactgtggtgtcgaagtctccggagaatccttaatgaaaaaggatgttggaaaaactctggggcgaaaaatgattctttcaacccancataattttgccaaaggagaaaagaatggttggtttttaa

SEQ ID NO: 2418 - DNA, 172 bp, Arabidopsis thaliana
  Clone ID: LIB22-043-Q1-E1-C10
acgcgtccggaaaatagtttcttaagagattttattgtcttgcccttacaactacgaaacacattattataaagccaactagggaaaacagaggtacttcaagtaagggcaagacaataaaatctcttaagaaaatagtttctaatccattaaaaaaaaaaaaaaaaaaagg

SEQ ID NO: 2419 - DNA, 418 bp, Arabidopsis thaliana
  unsure at all n locations
  Clone ID: LIB22-043-Q1-E1-C11
aagtgaacgaaaggagggaagaaaaaagttaggttcgaaacgaaagtaaactagttaggtgaaaagcgaaacaacacccacagagcaatggcccctgctctcgccgttacacgagatctcaccgccgtcggatctccggagaatgctcctgcgaaaggacgtgcttcggtttacagtgaagttcaatcaagccgtattaacaacactcttcctttgccttctgttctcaaaggagctttcaaaatcgtcgaaggtcccgctagttccgccgccggggaatccagatgagatagcgaagttgtttccgggtctatatggccagccatcagtagcagtggttccagatcaggatgcaccttcgtcggcaccgaanattgaagaattggtgtttgntttgtcctggaagtcaaggcanctg

SEQ ID NO: 2420 - DNA, 433 bp, Arabidopsis thaliana
  unsure at all n locations
  Clone ID: LIB22-043-Q1-E1-C4
cgcagagaaggccttccatgagcagctctcggttgctgagatcacaaacagtgcttttgagccagcatccatgatggcaaagtgtgaccctcgtcacggaaagtacatggcttgctgtttgatgtaccgtggtgatgtcgtccccaaggatgtgaacgcagctgttggcaccatcaagaccaagcgtactattcagtttgtggactggtgtcctactggattcaagtgtggaatcaactaccagccaccaactgttgttccaggaggtgatcttgctaaagtccanagagctgtgtgtatgatctcaaactccaccagtgttgctgaggtgttctcccgtattgatcacaagtttgatcttatgtacgcaaaacgtgctttcngttcactggtatgttggtnaaggtatggaaaaaaggagaaatttcaaang

SEQ ID NO: 2421 - DNA, 423 bp, Arabidopsis thaliana
  unsure at all n locations
  Clone ID: LIB22-043-Q1-E1-C5
agttccattctttttcacaaagccattgtgctgttttctccatttggatcaaaatggttgctgnnnnnnnnnnnnnnnnnnnnnnnnnnnnnnnnnnnnnnnnnnnnnnnnnnnnnnnnnnnnnnnnnnnnnnnnnnnnnnnnnnnnnnnnnnnnnnnnnnnnnnnngctttggtcaaacctgaatccgagacacgaaagggcctttacttcttgtcgaatcttgaccagaacatcgccgtgattgttcgtacaatctactgtttcaaatccgaggagagagggaacgaggaagcagtccaagtgatcaagaaagctctgagtcaagttcttgttcattactatcctctcgctggacgcctcancatcagtcctgaaggtaaactcncagttgactgtaccggaagaaggattggngtttgtg

SEQ ID NO: 2422 - DNA, 488 bp, Arabidopsis thaliana
  unsure at all n locations
  Clone ID: LIB22-043-Q1-E1-C8
ctgtttacgccngccaggtaccgagtccagaattcccgggtcgacccacgcgtccggaagaggtgaactggtagatgatgctaaggcaatagccttaaagtatctctcttcttacttcatcattgatctactctctatccttcctctcccacagatagtagttttagccgttattccaagcgtcaaccagccagtctctttgctaacaaaagactaccttaaattttccataattgctcaatatgttcctcggattctccgtatgtatccgctttacactgaagtgacaagaacatctggcattgttactgaaacagcatgggctggagctgcttggaacctctctctctatatgttagccagtcatgtgtttggagctttatggtacttaatctcagtagaacgagaagacagatgctggcaagaggcatgcgagaagacaaaaggttgtaatatgaaantcctcnactgtgaaaacgattggtaac

SEQ ID NO: 2423 - DNA, 436 bp, Arabidopsis thaliana
  Clone ID: LIB22-043-Q1-E1-C9
acgcgtccgctctgtaaaccttttcttcttcttcttcttcaatgcctccctaaaaccctagactcagaattctcaaaggcgacacctttaacctcctccactctgtttctttctccaacaaaaaatgtcaaattcccatttgggtactctctgtttcatcatctctttactgggtttggccaatttctcactttctcaaaccggtctcgatgattcgactatgcaatctctcaaatcaagtctgaatcttacatcagacgtcgattggtctaaccctaacccttgtaaatggcaatctgttcaatgcgatggaagtaatcgtgttactaagattcagcttaaacaaaaaggggatttcgtggaactcttccctactaaatccttcagagtctctctgaattgggtaattctccgaagcttttttctcaatcgtaat

SEQ ID NO: 2424 - DNA, 406 bp, Arabidopsis thaliana
  unsure at all n locations
  Clone ID: LIB22-042-Q1-E1-H9
gaaacaatgcttgagcttttaggaagttacaggaatctaacacttcaaatcctactatctctcttcttaacgttagtcctttcattcgtcaaaatctcaatcatcttcctccacggtctctgtacctatatccaacctgaaaatctcaaccaaaacaacaccggaaatggactccgacctgcgattagacgaccatctagtaccgacgatccaaaatctaatgttgaagtcagaagaagaaacagatccaaagataaatccgaattcgacgaaagcaatgctcagatctttcgaattaagctcgatgaagatcatctcagatctcgaatgtatttcactgagtacaattcgctattcgtgatatcgttcttagctgtttcttgctttcttcnagataagtacttcg

SEQ ID NO: 2425 - DNA, 481 bp, Arabidopsis thaliana
  unsure at all n locations
  Clone ID: LIB22-042-Q1-E1-F4
ntgtttacccgccagttttncgncgnacagtcccggggtaaacccacgcgtccgctcctctctctcntaccaagttcaatcacaaggaaatggagatccaggcaaagctcatggaatacagattccatttcatggtgacaatcatggtgagcgtgattgtggcgtctctcgtgtatgcagcaccaaggattctgaacattttagcctatttctggcctctgtttgcgtcaacagccgccttcttagcgatggcaatcacctttggtggctttcaacagctttcagaagaagccaccggcgagagactgatggattacgtcgccggacggcctgaggattctcacaagtacgactgacaaagatttgcacacaaaaacaacttgagagacgatatagaagctaccacctaagatgagtagaatgagaatgggcggagattgggttcttganggnntcaaagatgggctccaaagnaaggcgg

SEQ ID NO: 2426 - DNA, 395 bp, Arabidopsis thaliana
  unsure at all n locations
  Clone ID: LIB22-042-Q1-E1-F7
ccaatacactgaaatccacttcaaaatatttatttaataaaaagaaaagaaaagaaaaaaactctgccaggatggcttctttgatcacaaccaaagcaatgatgagtcatcatcatgttttgtcgtcaactagaatcactactctttattccgacaattccatcggcgatcaacaaataaaaacaaaacctcaagtccctcaccggttatttgctcggaggatcttcggtgtaaccagagctgtaattaattcagcggcaccgtctccgttgccggagaaagagaaggtggaaggtgagagacggtgtcatgttgcgtggacaagtgtacaacaagagaattgggagggtgaacttactgtccaaggaaagatacccacttggctgaatggnacg

SEQ ID NO: 2427 - DNA, 486 bp, Arabidopsis thaliana
  unsure at all n locations
  Clone ID: LIB22-042-Q1-E1-F9
tgttacgccgnccggtaccggaacanaaattcccgggtcgacccacgcgtccgcccacgcgtccgcggacgcgtgggaacgaaaggtcttttctagtctagtcacttcacttctacggctactgccatggcggcttctttctcttccactgctcccacgacaccggttcttcgattcagagccaactactccaagcctctcctctctctcccagattcgtgtttgaggataatctcttcggcgatatctccctctacacgcttaattgcgtgttcgttcaagacagacaagcttccgctcggtgccggcgtcaatctctccggtggccccgttgtcaagcgctctctacagaagagattggtgataaggtctgctactattgaagaaatagaagcagagaagtctgctattgagactgatgttaaatcaaagatggagaagactattgaaacgcttcgggacgagtttcaactccataagggagag

SEQ ID NO: 2428 - DNA, 495 bp, Arabidopsis thaliana
  unsure at all n locations
  Clone ID: LIB22-042-Q1-E1-G10
naactgtttattcagcccgcccggtaccgganccaagaattcncgggtcgacccacgcgtccgcgtgttttttttagaataacaataaaaaatttgtacacacatggtttattattgtagataatattaatatatatcaaacgaaattttaaaagtagatgatttatgaaaataatttttgcttattttaattagttcttgagtaaaattatttatacattctagatattaaataatgttgaatttttaattgaataaacactttattatatataaaaattgaaaaacaaagcaagccgaggaatctctctctaatctatctccaagacggaccaaaccagttttagttctatctctcaatctctctgatcagctccatttccaattttgttggaaagtagatacctttgagaatctaaaggatctccctttatggcggataaggacgttccttttggggttgaagatattgttcagacgcctttaactgggtta

SEQ ID NO: 2429 - DNA, 408 bp, Arabidopsis thaliana
  unsure at all n locations
  Clone ID: LIB22-042-Q1-E1-G12
acataaacgacattgatgtttcttcatcagatcctttaattcttctccaattctcattctccttacatcaatgataaactttgtagttggagatttgttgtggatgaagattattgattgcagcttataggaagctgctctttttgttttgaacaatgttgctaacttttcagattcttataattaatcagtcttatgatgagaagttggttcttgattacatactacaatcaagaagtaaacagtttatgcaatcttgtgacggttcttgtgttcaaagagtagatacttgttcttcaaggtggaggttaacagaggacaattgacggggtttttaatcgttgttgtattgctcgaataaacggaatcatggaaaggtataagattttggaagagctggtgatggna

SEQ ID NO: 2430 - DNA, 483 bp, Arabidopsis thaliana
  unsure at all n locations
  Clone ID: LIB22-042-Q1-E1-G2
ttacccgccngttcaggccgccagttcccgggtanacccacgcgtccgcaaagattaaaatatttagcaaaaatttccaggaaaagaggagtatccgccctactttttcagctgagaagatctttggaggaaccttgttagctatgtgttcaagtgatttcatctgcttttatgattgggctgaatgtaggctgattcaacgtattgacgtcactgtaaagaatctatattgggctgacagtggtgatttagtagccattgctagtgacacatcattctacatcttgaaattcaaccgcgacttagttacctcacattttgatagcggaagacctactgaggaagaaggtgttgaggatgcttttgaggttctccatgaaaatgatgaacgtgttaggacaggtatatgggttggtgactgtttcatttacaacaactcttcctggnaacctaactaacggggttgganggcaaaggtaacca

SEQ ID NO: 2431 - DNA, 52 bp, Arabidopsis thaliana
  unsure at all n locations
  Clone ID: LIB22-042-Q1-E1-G5
nnnnnnnnnnnnnnnnnnnnnnnnnnnnnnnnnnnnnnnnnnnnnnnnnngg

SEQ ID NO: 2432 - DNA, 422 bp, Arabidopsis thaliana
  unsure at all n locations
  Clone ID: LIB22-042-Q1-E1-G6
acgcgtccgcccacgcgtccggtcgtctctgtctcctccaccgattccaatggaactccacgccggtaaccggaaaaagttactagaatcaatacgccgtcagttatctagttccaatcgttctctcgatggatttgttcttctacagggtggcgaggagaaaaatcgatactgtactgatcacaccgagctcttcaggcaagagagttattttgcttacttgtttggagtcagagagccagatttctatggagctattgacattggaagtgggaaatctatcctttttattccaaggttgcctgatgattatgctgtttggttgggagagattaagccattgtcgcattttaaggaaacatatatggttgacatggttttctatgtggatgagantaatcaagtccttaaaggaccaantt

SEQ ID NO: 2433 - DNA, 417 bp, Arabidopsis thaliana
  unsure at all n locations
  Clone ID: LIB22-042-Q1-E1-G7
tgattctgttttcagggttttctttgctttgacaatggcggctgtagctatttctcagtcaagttcattgtctcctgattccagcaaagctagcaatgcggctgcatcgatcttcgcggttatagacagagaatcgaagattgatccaagtgatgagtctgggagagttcttgataatgttaaaggagatatcgaacttcgtcatattagtttcaaatatccttcaagaccagatgttcagatcttccaagatctctgtctgtctattcgcgctggcaagacaatagctttggttggagagagcgggagcgggaaatcgacagtgattgcgttgctacagaggttttacgaccctgattctggtcagatcactcttgatggagttgagataaagacattgcanctgaaatgggtaaa

SEQ ID NO: 2434 - DNA, 432 bp, Arabidopsis thaliana
  unsure at all n locations
  Clone ID: LIB22-042-Q1-E1-H1
acgcgtccgaaaaattcttcatcgactcaaattcaaaaactcatctctctctatctctatttctctggttccatagctcaccgtcgcatcgcagatctactccttccgcaataaattttaccggcggaggtatcagatctcgccgatctgttgtagcagctactgtattttgggcttctcatttgatattggggaaacgaggagtagaggacgatggaaaatctgatctctctggttaacaagatacagagagcttgcacggctttaggagaccatggagactccagcgctttacctactctttgggattccttgcctgcgatcgccgtcgttggtggtcagagctcagggaagtcttcagtcctggagagcatcgtgggaaaggactttttaccccgtggatntggnaatggtactccnaagggccccttt

SEQ ID NO: 2435 - DNA, 425 bp, Arabidopsis thaliana
  unsure at all n locations
  Clone ID: LIB22-042-Q1-E1-H10
acgcgtccggggaaagccgattgccctaatagttgaagatgctgaaagtattgaagccatcaagtcttcttccgcaggtagttctgaggttgatacagttaaagaagtccctgacagtgttgtagataaacctacagagaggaaagcaggcttcacaaagatcagtcctgctgcaaagctattgattttagaacatggattggaggcatcatcaattgaggcatcgggtccctatggtacattattgaaatcagacgttgtggccgcaattgcttctggaaaagcttctaaatcatctgcgtctacgaagaagaagcaaccatcaaaggagaccccgtctaaatcctcctccacatcgaagccttctgtgacacagtcaagataataattatgaagattttccaaatagtcaaattcncaaagat

SEQ ID NO: 2436 - DNA, 406 bp, Arabidopsis thaliana
  unsure at all n locations
  Clone ID: LIB22-042-Q1-E1-H3
acgcgtccgcatgatcaaagttgcctttcttttggtcatcgagcttggggtctttcctctgatgtgtggttggtggctagatgtttgcactgttaggatgttcggtaaaacaatgtcccacagggtacagtttttatcaatttctcctctggcaagctcacttgttcattgggttgttggaatcatgtacatgttgcaaataagcatcttcgtcagccttcttcgaggggttcttcgtcctggagttctgtatttccttcgtgatccancagatcctaattacaatccattccgagatttgattgatgatccagtgcacaagcatgctcggagggtactgttatcagttgcagtgtatggaagtttgattgtgaagctggtatttttaccaagtcaaacntgcgaa

SEQ ID NO: 2437 - DNA, 478 bp, Arabidopsis thaliana
  unsure at all n locations
  Clone ID: LIB22-042-Q1-E1-H4
cngttcggtcgccaattccngnnanaaattcccgggncgacccacgcgtccgtgaggattattnanacnnnntcancgacnntcccacttgctaactttctagtctttggcctcggccgcgactccctcatgtgggcctccctcaatccaggtggcacaactgtgttcttggaagaggatcctgagtggatagaggccgtcctcaaggacgccccatccctcagggcccaccatgttcagtaccggacccacctttctgaggccggccgccttctctcgacttacaagaacgaacccatgtgtttaccagctaaagctttcccgatccgctacaacgaaaagtgtcccttggcgttgacttctctccctgatgagttctatgataccgagtgggatctgatcatggtggacgcaccaaaagggtacttcccaaaagcgccanggaaagattggnggnanaattttcctcggccatcag

SEQ ID NO: 2438 - DNA, 416 bp, Arabidopsis thaliana
  Clone ID: LIB22-042-Q1-E1-H7
tgattgaaaacattcaattgaaacaaaacatattcaaagaaatcgaaaaggtttgttcaccccactgcattttggcgagtaatacatctactatcgacctcgatgtaattggtgaaaagactaactcaaaagatcgcattgttggcgcacatttcttcagtccggcccatctgatgccccttctcgagattgttcgttcaaagaatacttctgctcaggtgattctggatctcatggcggttggaaaggccataaagaaagttcccgtggtggttggaaactgcataggctttgcagtgaataggacattctttccttattcacaagctgcacatatgttggccaatctaggtgttgacttgttcagaattgacagcgttattacctctttcggcttgccattgggcccttttcaa

SEQ ID NO: 2439 - DNA, 411 bp, Arabidopsis thaliana
  unsure at all n locations
  Clone ID: LIB22-042-Q1-E1-H8
ggattagccacaatgtatcttcctctcctctatcttctgtttctggcttcttgcttgacacatcaagctttaggccgtggtcgtggccggccatcaccggaaggaagcttggatccttcttctcgcatcaccgtagtcggagttgtctactgtgacacgtgttctatcaacactttctcaagacaaagctatttcttacaaggtgtggaagttcatgtgacatgtagattcaaagcaagttcaccaaaaacagcagaggaagtgaacatatcagtaaacagaacaacaaacagaagtggcgtgtacaagctcgagatccctcacgtagatggcatcgattgtgtcgacggaatcgctatatcatcacaatgcagtgccaagatactcaaaacctcctctgacganaaccgg

SEQ ID NO: 2440 - DNA, 443 bp, Arabidopsis thaliana
  unsure at all n locations
  Clone ID: LIB22-042-Q1-E1-F11
acgcgtccgcccacgcgtccgaaagagagagagagagaaacaaaaatggcgtcacagagttgctacaatggaatccatcgtataaaaagggttcatcctctgattcactctctcacatttcatcgattctcctcatcttctcttccattcaaatctcacattccctcttcacaacaacagcttcgtattcgctcatcttcttcgctttctgatcttggaaatcgcaggcattgttcgtctactcgaggatttcaattttggtcatnnnnnnnnnnnnnnnnnnnnnnnnnnnnnnnnnnnnnnnnnnnnnnnnnnnnnnnnnnnnnnnnnnnnnnnnnnnnaccggcggttcgtatttccgacgggaatctaatcatcaaaaaccggacgattctaaccggtgtaccaagataatgtcatcacgacgtnagcatcgggaagct

SEQ ID NO: 2441 - DNA, 420 bp, Arabidopsis thaliana
  unsure at all n locations
  Clone ID: LIB22-042-Q1-E1-B8
ggggtgagtgagagagagagagaaactagctccatgttcgaaacagagnnnnnnnnnnnnnnnnnnnnnnnnnnnnnnnnnnnnnnnnnnnnnnnnnnnnnnnnnnnnnnnnnnnngaagagaagaaatagaaaaaccagattcaatctacctccgggtaaatccggttggccatttcttggtgaaaccatcggttatcttaaaccgtacaccgccacaacactcggtgacttcatgcaacaacatgtctccaagtatggtaagatatatagatcgaacttgtttgggagaaccaacgatcgtatcagctgatgctggacttaatagattcatattacaaaacgaaggaaggctctttgaatgtagttatcctanaagtataagtgggattcctgggaaatgggccaatgcctggtcctg

SEQ ID NO: 2442 - DNA, 424 bp, Arabidopsis thaliana
  Clone ID: LIB22-042-Q1-E1-B9
aaaaaaaaaaaaaaaaagtatctcaccggaaacgatttcttcgccgattccaagacttttcttcctaagctttttaacagatccggtgaaaatttcaaaatccgaagaattctctaaagctagggtttcttaattcacgagacggaggtgatataattcccccccgtcgtagctatgatgatttcgagaggtttgtttggttggtctccgccgcatatacaaccgttaactcctgtttctgaagtttccgagcctcctgagtctccatctccttaccttgatcctggtgctgagcacggtggtacaggaacagcggcgcaagcggatgatgaggaggaaatggaggagccggaggagatggagcctcctcctgctgctgttcctttctctcaactaattgcctgtgccgattgccttgaatggg

SEQ ID NO: 2443 - DNA, 448 bp, Arabidopsis thaliana
  unsure at all n locations
  Clone ID: LIB22-042-Q1-E1-C2
acgcgtccgctcagaccaaatcttcttcttcttccttctctgttctcgacgaccttctcaaattcgatctcaactcaaaacatttgtctgatccattaatcggattcagatttttgtgaagattcaacaacagatctgtgagtccattggagtatattactattcatagtgatacaatgacaagggttacacgcgattttcgggattcattacagagagatggtgttcctgcagtatcagcagatgtgaaatttgcttcaagtagatttcctaattatagaattggagctaatgatcaaatatttgatgttaaagacgatcctaaagtgatgtccatgaaagaggttgttgcgcgtgagacagcgcagcttatggaccagcagaaacgtttgtccgttccgtgaactcgcccaanaaattttganaagggtttggctgcaaccngcca

SEQ ID NO: 2444 - DNA, 490 bp, Arabidopsis thaliana
  unsure at all n locations
  Clone ID: LIB22-042-Q1-E1-D1
ggnggaactgtttacgccgccggttccggtcgnanaattcccgggtngacccacgcgtccgcgtctttgctgcccaagagcacaaaggaactagcgtcctctttaaagtcctctcggctttcgctttcagagacattagcctgaccaagatcgagtcccggcctcaccataaccgcccgcttagggttgttggtgacgggagctttgggacgtcgaagaacttcgagtacatgttttacgtggattttgaggcatcgatggctgagccgcgtgcacagaacgcgcttgcggaggttcaagagtacacgtcgttcctaagggtgctgggaagttaccccatggatatgacaccatggtccatgacatccacagaagaagcatgaccccatcgccaaaaacaaactcaccaataaatttatttaaattattctgttctttctcnttttgtgaaaattgtagtatacatttgaaatttaaacccttaagttta

SEQ ID NO: 2445 - DNA, 418 bp, Arabidopsis thaliana
  unsure at all n locations
  Clone ID: LIB22-042-Q1-E1-D11
tttttctctatcgatctagcagattctttcggggaccaaaatcaaaatcatggtggatcatcaatggaaggatttaatcggataaaagagaagagacggaatcacgacgggagaagagatcgggaaatcggaaaatcggagatgatggggatttctttcgccgccaaactccgtttccgatctcgatttcgaacttcttcaatcgattcttattgcttcgctcgtgaggctttctccgattgtatctcctccgtccatttcttcttcttataacctttttctttgtcagatatcgtccatggaagaggctgattttgccgagaaagatccttctggccgttacatcaggtatgatgatgttctggggagaggagctttcaagactgtatataaggngtttgaccaaatntaccgggaa

SEQ ID NO: 2446 - DNA, 435 bp, Arabidopsis thaliana
  unsure at all n locations
  Clone ID: LIB22-042-Q1-E1-D2
aacatttcacacacacatttgtcgaaatcttaacaccaatcccaaatcagaaaaatcaaaactttttattttattttatcaaaatggcgcttatgaatggaagcatgaatctatcatcggtcaaatcatcgatgatcaaccaccgtcaaccaaacttctcctccgccgtctccagacccacttctttccggatctccgccgtgcaaaccgacccaaaaacaccagctgcttcatcggcgtcggcggcgacgacgactccggcaacgttgacgaagcccgttggagttaatgtgggtaaaggaaaatgggcaccagagagttggaggacgaagaaagctttacagcaaccggactatccagatttagctgcgcttgaagctgtgctagagacgatngaagcntttccnccgattgngnttccccgggaaaaactaa

SEQ ID NO: 2447 - DNA, 413 bp, Arabidopsis thaliana
  unsure at all n locations
  Clone ID: LIB22-042-Q1-E1-D7
ctcgtgtttggctagatgctgagttaggtcaagatgggaagatgaggttttgtgcagatagtgattcagatgtgtcgaaagggatgtgttcttgtttgattcaagttcttgatgaggcttctcctgtagaagttatggagttgaagactgaggatttagctgagcttaatgttggtttgttgggtggagagagatcgagagttaacacttggtataatgttcttgtgagtatgcagaagaagactcgacgattagtagcggagagggaaggtaaagttccttcctttgagccatttccttcacttgtgttaacggctcatggcattgaagctaaaggaagctttgctcaagctcangcgaaatatttgtttccggangaatcacnggttnaanaaacttgcaangtgttttaa

SEQ ID NO: 2448 - DNA, 418 bp, Arabidopsis thaliana
  unsure at all n locations
  Clone ID: LIB22-042-Q1-E1-D8
acgcgtccgaaaacttttgacttccattttcttgagaattcccctttctgggttcttgatttggaaagatgggtaacaagataatctcaatgatgaagaaagatagcaaagatggaggaggaggaggatctaagagcaagagaatgaatcggtctcagaggaaattacttgctgatgaagagatgttgcatcgtcgagctctttccatggcgattcatcaagctcagctttctcagagatttgatggatctatgtctagacgggtcgggtctactagtactaggaaacgtactctctctgacccgttttctaatggcaagcaggttaagtcactactgattctcaatcttctccacacttataaaagtttcaatcttgaaaagttcaaaaggtttcatttttaaatganttaaagggt

SEQ ID NO: 2449 - DNA, 416 bp, Arabidopsis thaliana
  unsure at all n locations
  Clone ID: LIB22-042-Q1-E1-E11
aagaacgtgatcataaccatcgccgagcccacttcggtggaacagggggtgtgaagagctgcacaaattattctccagttgtaaaatcgttgatcgaagcaaagtcttcgggtttctctgatgtcttgttcctggatgcggcaactggtaaaaacatcgaagaggtttctacttgtaacatcttcattctaaagggaaacattgtatccactcccccaacttcaggaaccattttaccaggaatcacaaggaagagcatatgtgagctagcccgtgacattggctatgaggttcaagaacgtgatctttctgtggatgagctattagaggcagaggaagttttttgcacggggacggcagtggtcattaaagcctgttgaaaccgtgacattccatgacaaagaggggtaaaaatn

SEQ ID NO: 2450 - DNA, 376 bp, Arabidopsis thaliana
  unsure at all n locations
  Clone ID: LIB22-042-Q1-E1-E12
catcgtggaagagccaaagcggcgagagaagaaacacgaggcggcggatttgccacgtgttgagctgacggcgattgacttgcaatggatgcatgtattaagcgaaggctgggcaagtccactcggaggtttcatgagagaatccgagttcctccaaactcttcattttaactcgctacgtcttgacgacggctccgtcgttaacatgtccgtgcctattgttctcgctattgacgatgaacaaaaagcacgtatcggcgagtctacacgtgtcgctcttttcaattccgatggtaaccccgtcgctatcctcagcgatattgagatttataagcatccaaaggaagaaaggatagctagaacatggggtacgacn

SEQ ID NO: 2451 - DNA, 470 bp, Arabidopsis thaliana
  unsure at all n locations
  Clone ID: LIB22-042-Q1-E1-E4
ngttacccgcccggttcggtcgncaattcccgggtaaacccacgcgtccgatcaaacagcaancgtactattcagtttgtggactggtgtcctactggattcaagtgtggaatcaactaccagccaccaactgttgttccaggaggtgatcttgctaaagtccagagagctgtgtgtatgatctcaaactccaccagtgttgctgaggtgttctcccgtattgatcacaagtttgatcttatgtacgcaaaacgtgctttcgttcactggtatgtgggtgagggtatggaagaaggagaattttcagaggctcgtgaggatcttgcagcattgganaaggattacgaagaggttggtgctgaaggtggtgacgatgaggatgatgaaggagaggagtactaagaaggttgtcggttttatgtgggatttctattatctcgtgtttgtgtgaataaggctcnaaactccta

SEQ ID NO: 2452 - DNA, 437 bp, Arabidopsis thaliana
  unsure at all n locations
  Clone ID: LIB22-042-Q1-E1-E7
acgcgtccgagctttctctttccgatctttcaatggcgattctcaaatctcacttcttcttactcttccctcttcttcttctccactttcacactgtctcctttgctcaagacgctctttgtgttcggagatggtctttacgacgccggaaacaaacagtttctctctcagaaccgagttgacgcaagctttcctccttatggagtcactgtaggacaagccaccggacggtggtccgatggttctatcgttcctgattatcttgctaaattcatgggaattcctaaaatctctccgattctcctaaccacggcggatttttctcacggagctaatttcgccatcgccgacgctaccgttcttggctctcctccggagacgatgactttgtcacaacaagtgaagaaattctcgggaaaacaaggaatnagttgggc

SEQ ID NO: 2453 - DNA, 443 bp, Arabidopsis thaliana
  unsure at all n locations
  Clone ID: LIB22-042-Q1-E1-F1
acgcgtccgcgcttttaaagcgagtatgtccggttacgcctccggtgtagccaaaggtgttgctccaaaagctcgtatcgccgcctacaaagtctgttggaaagattccggttgtctcgattccgatattctcgccgcctttgatgccgctgttagagacggtgtcgacgttatatcgatctcaatcggtggtggagacgggattacttcgccgtattacctcgatccaatcgctataggctcgtacggcgccgcgtcgaaaggaatcttcgtctcttcctctgccggaaacgaaggacctaacggtatgtcagttacgaacctcgcgccgtgggtaaccaccgttggtgctagtacaatcgatcggaatttcccaacggatgctattctcggcgaacggcatcgtctcaaaagaatnnncccnttaacccgggagtaccttt

SEQ ID NO: 2454 - DNA, 495 bp, Arabidopsis thaliana
  unsure at all n locations
  Clone ID: LIB22-042-Q1-E1-B4
aatgttaccctgccggtttcggtcgagaattcccgggtngacccacgcgtccgtggagttctctacctcaaaacgtccggcgacgacagcgacggcggcggagtctgtacatttccgtcttctctgtccggcaacaagaactggtgcaataatcggaaaaggcggctcagtcattcgacacctccaatctgtaaccggttcaaaaatccgcgtcatcgatgatattcccgttccttcagaagagcgtgtagtgttgataatcgcacctagtggaaagaagaaggacgaatcgaatgtgtgtgattccgaaaaccctggctctgaagagcctaagcaagagaaagggagcgagtgtgcggggactagtggtggagatgacgaggaagcgccgtcgtcggcgcagatggctttacttaaggttttccaaagaatantgtttggggaagacccctgcaacggttgatgggggaannaattgggntaaaaggtgaaagt

SEQ ID NO: 2455 - DNA, 495 bp, Arabidopsis thaliana
  unsure at all n locations
  Clone ID: LIB22-040-Q1-E1-H1
ccgggnccggtccgaaattnacgggtcgacccacgcgtccgattcaaaattttacagagaggaagaagaagttcccgacacttgtgagagactataaaagtatacgatctcctcctctcgctctcttcagatcacaaagttttcgtttttagggttctctcatcgatctcggtttgtgatcttcttcttcatcaatggcgtctagtgataaacaaacaagcccaaagcctcctccttcaccgtctcctctccgtaattccaagttttgtcaagtcaaatatgaggattttgatctcaggaggagctggattcattgggttctcaccttgttgataagctgatgggaaaacgaaaagaatgaaggtgattggtggctgataactatttcactgggttcaaaaggacaaccttaaagaagtggattggtcatccaagatttgagcttaacccgtcacgatgtcacgggagccacttttgatcnagggtgattaaaat

SEQ ID NO: 2456 - DNA, 421 bp, Arabidopsis thaliana
  unsure at all n locations
  Clone ID: LIB22-040-Q1-E1-H10
atccatcatcgtcactttctcccggcgaattccgttttatcgatttaagtaacgagatttgtgcaaagatgactcaggacgtggagatgaaagataacaacaccccttctcaatcgattatctcttcttctacctctactatgcagaatttgaaggagattgcancactcatcgatactgggtcttacacganggaggttcgtcgtantgctcgtgctgtgcgtctcactatagggcttaagcagaaactcancggctctgtgctctcttccttcctggattttgcnttggttccaggatcngaanctcactctcgcctctcttcctttgttcctaagggtgatgaacatgacatggaagttgatactgcctcatnggncacataagctgctccntctaagcatctacctgcagagctcga

SEQ ID NO: 2457 - DNA, 474 bp, Arabidopsis thaliana
  unsure at all n locations
  Clone ID: LIB22-040-Q1-E1-H11
acgcgtccggtcgatgtcactcggcggtggaatgtcggattattatagagacggtgttgcgatcggagcattcgccgccatggaaagagggattttagtatcttgctcagctggtaatgctggtccgagtagttctaagtttatcaaacgtagctccatggatcacaactgttggtgctggtactttagatcgtgattttccggcgcttgcgattctcggtaacggcaaagaatttcaccgggagtttcctttgtttaaaggagaaagctttaccgggattaaattgttgcccgttttaatttacgctggggaaatgctantnaatggctactaaattgggtaatcctctgttatgacccggaacttttggattcccgggagaaaagntaaanggggaaanaattgtgatngttgttgataagaaggaaattnaatgctaggagttcagaaaagggtgatgttgggttnaaagc

SEQ ID NO: 2458 - DNA, 416 bp, Arabidopsis thaliana
  unsure at all n locations
  Clone ID: LIB22-040-Q1-E1-H12
aaaccaacaaaaatccaactcaaaatcgaagaccgtgaagagcttgaacaatcccgcaaatctcaaccatccagcaccacanncaccgcaccatcttcctcctccgccgnctcctctctccaccacctcatagacccaaaacacaaaaacccttcctccaaatccgaccgaatcggtctctcttaaaacactccatggaagtcgaagtcaagctccgtctcctaaccgccgctgctcatctccgtctcaccactctcctcactccataccacctcaanacccttcancaacgcaacaccttcttcgaanacacccaaaaacgacctctctctcngccgcgccgtcctcngtctccgcttcnttcaaaacgccgccgtttccgcggcttctcnttctccgcgcgttgtatcgtcnct

SEQ ID NO: 2459 - DNA, 442 bp, Arabidopsis thaliana
  unsure at all n locations
  Clone ID: LIB22-040-Q1-E1-H4
ttnctccttgattttcgcattctttagagtcttaacgcaaagatgagacctcctctaactggaagtggtggtgggttcagtggtggaagagggcgtggtggatacannnnnnnnnnnnnnnnnnnnnnnnnnnnnnnnnnnnnnnnnnnnnnnnnnnnnnnnnnnnnnnnnnntttcagcgaccgtggtggtcgcggcaagangaagaggaccaccacgtggtggtgctcgcggcggcagaggaccagctggccgtggaggcatgaaaggaggaagcaaagtgattgtggaacctcacagacacgcangagtgttcattgcaaagggtaaagaanatgcccttgttaccaagaatttggttcctggtgaanctgtctacaacgagaagagaatctctgttcagaacgaanattggancaaagactgaatacaaaattttgga

SEQ ID NO: 2460 - DNA, 492 bp, Arabidopsis thaliana
  unsure at all n locations
  Clone ID: LIB22-040-Q1-E1-H8
cgngnaaaaccaaaattcccgggtcgacccacgcgtccgaaaccaaaaccaaaaanatagcttatctctctcttatcaccggttcaatcactaaaccatggcgacctccgtcgataaccgncattatcccaccatgaacggcgtcgctcaagccttcaaacctcctctcgttccttctcctcggctcantcgaccgccaacgtcaccaaaaccaaactctcgacgtcatcctcagcgaaactaaaatcgtcaaataancccgatgtcatcatcancgtcgtagacagttacgaacgactcctcaagcgacgacgaagacgaagagccataaccgtaacgtccttactacaanagagctgggttanaaaatcanacagcgatttagaaccgtcgattttagatccgagagatgaatcaacgggtgaatagttggnttcaacgtaactcatccatgctccgtctcancggggaaaacatccaattcaangccga

SEQ ID NO: 2461 - DNA, 426 bp, Arabidopsis thaliana
  unsure at all n locations
  Clone ID: LIB22-041-Q1-E1-A1
acgcgtccgggtaaaacgccaaaacaaaacgccattttttgtcgattcttcgtcgtcctcctttgaaattcacaccaatttgtctctcttcctagagaaacaaangattattcgaaactcgggaaagtatcatccggtcaccggaaaattgattatttccgatgccaataggtgaccgtcagaatccgagtgtggagaanaagaagaacctcttcaggctatgtccgttttggcagaggagaagcaccacttcttcatcttcaacacagaatccaaaccanaactaccgtagccgccatggaaatcgggatacagatatttccgccgtctctaagcctccgttgactatgtcttccgtcgccaagatnacttcttccagctcgccgtcgtctccgactagattcttccaagttanctgtaattccc

SEQ ID NO: 2462 - DNA, 232 bp, Arabidopsis thaliana
  unsure at all n locations
  Clone ID: LIB22-041-Q1-E1-A11
gtcnacgcatccgaacagttgcaaggataatatcagcccaggatcaattggtggaagttgcgaaagaggaggcgagttccataagtaatataattgctcaggctaccaagtagtccttttctgaacttttcttatgcagctgaaacaatcgtaaatgagttaatattttccttaaactctgagatattctcttctgaatcacacttttgtttgtcaaaaaaaaaaaaaaagg

SEQ ID NO: 2463 - DNA, 425 bp, Arabidopsis thaliana
  unsure at all n locations
  Clone ID: LIB22-041-Q1-E1-A2
gtacatacaaacaaagagtggtgcacctcgtcaactcgacttcggacgagtctttgttatgtcaaggtctggctttgaatgatgacttgcagcgtgtcttaaccaattatgaagcaattgcttctggattacctggaacttcttctcagatcgagaagcccaagtccgagacaggaaaatcccttgttgatgttgatggtccacttattgatacaggggacagcagtaatcaggcgaacggagctacatcgagctctggtaacggggttctaaatcagttggccctccctgcaccacctgtaactaatggttcagccaattccaaaatagacctcctcagtggcgatgatcttgcccttgttcctgttggacctcctcagccagcaagtcccggttgcatcaagatnaaaatgcactcgccctta

SEQ ID NO: 2464 - DNA, 382 bp, Arabidopsis thaliana
  unsure at all n locations
  Clone ID: LIB22-041-Q1-E1-A4
cnnnnnnnnnnnnnnnnnnnnnnnnnnnnnnnnnnnnnnnnnnnnnnnnnnnnnnnnnncctgataatgggagcctatgaaacagaaaaaccaactaaagatgcggcggctctagagacacagtcgccggaagatttcgatcaaccatctccgcttcgtaaaatcatctccgtcgcttccatcgccgccggtgtacagttcgggtgggccttacagctctctcttcttactccgtacgttcaactcctcggaatccctcacaaatggtcatctctcatttggctctgtggtccaagtctccggcatgattgttcaaccaatcgtcggtttccacagtgaccgatgtaggtccaaatttggtcgccgtcgtcctttcatcgcc

SEQ ID NO: 2465 - DNA, 421 bp, Arabidopsis thaliana
  Clone ID: LIB22-041-Q1-E1-A5
acgcgtccgcaatttttatagctttcttcctctccaaaaccacaccaaaaaaaaaaaaaaaaaatttgattttcagatccaatcaaccagagatgagagataacaacaataacaacacaagagaagaagagagaagcagttcttcaaagcagcaacaaccacaagctcctatgtctttgaagatcatagattcatgtctcagactaagtgtggttcctctcagtgttgcaaccatctggttaactgtcactaaccacgaatccaacccggactacggcaatttagagtacaactccatcatgggtctcaagtatatggttggtgtgagtgccatatctgctatttatgctctgctctctactgtttcttcatgggtcacatgtttagtctccaaagcttggctcttctttatcctgaccag

SEQ ID NO: 2466 - DNA, 417 bp, Arabidopsis thaliana
  unsure at all n locations
  Clone ID: LIB22-041-Q1-E1-A7
ccagttactgtcaaaaaaaataaatgaaaacgtaatcgaagaaaaggtcgtgttttctaagtgttgcagaaaatggcaactactagtactactacaangctctccgttctctgctgctctttcatttcatctcctctcgttgactctcctccttctctcgccttcttctctccgattccacgattcctcactgtccgaatcgcgactagctttagatcgagctctaggtttccggccaccaaaatccgcaagtcttcactcgccgccgtgatgtttccggaaaattcggttttatcaagatgtctgcgccgtttggagtcactagcatccgttgcgttctcgtgcctcggtttctggggagagattggcaaacgtnggcatnttcgaacaanannctcatccggaagcntgtgcaat

SEQ ID NO: 2467 - DNA, 424 bp, Arabidopsis thaliana
  unsure at all n locations
  Clone ID: LIB22-041-Q1-E1-B1
aagaactcaagctttccaacactataaatctataatacagcttttattctcaaattttgtttgtcttaccatcattaccaaaccatgcaagccgcaacgtcgtgtgatctcaagttccgatcaacagatccgacgtctaggaacaaatgtttctcccacgcgattccaaagcgcgtggctgttacgtgcggttataggtcggagtcgtttagcttccctaacggtgtctccgtgagtcgatctgattggcaaagctcatgtgccattttatctagtaaagttgcttctgttgaaaataccggtggtttagcggacaaaatcgccgccgttaatggtcacacgaacggctctgtgaatcttggtcccgtcgccgttgngtcaactaacggaaagttagctcctggctcaagccgttgactaaata

SEQ ID NO: 2468 - DNA, 485 bp, Arabidopsis thaliana
  unsure at all n locations
  Clone ID: LIB22-041-Q1-E1-B10
cgttatcctgccgcnaccggtccaaaatcccgggtcgacccacgcgtccggagaaaattcacttttccaatcaaaacgtaaagaagaagaggaagaatggctacatgtcctcctttcgatttctcgaccaaatattacgatggtgacggcggatgccagaggcagagcagcttcttcggaggcacgacggtgctcgatcaaggcgttggctacgccgtgattcttggttttggtgctttctttgccgtcttcacatcttttttggtatggttagaaaaacgatatgtgggagctcgtcatacatcggaatggttcaatacagcgggaagaaacgttaagacaggacttattgcaagtgtcattgtatcacagtggacatgggctgcgaccatactgcaaagttcaaacgtagcatgggcagtatggggttagtggaccgttttggtacgctagtggagccaccatacaagtgccgttgtttgggg

SEQ ID NO: 2469 - DNA, 438 bp, Arabidopsis thaliana
  unsure at all n locations
  Clone ID: LIB22-040-Q1-E1-G9
acgcgtccggaaaatccattattttgtttgaccaaaaaanaaaaaaatcatttttgtgtgcaataatggcgatgatcataggcttacttgaaatcttcatcgcattcattttcttctttgtctaccagtgtttctcgctccacaagaaaactccaaagcatatggtcatgaactggccggtccttgggatgcttccgggtgtgctcttccaaatccctcgtatctacgactttgttacggaggctcttgaggcagaaaatatgacgggttgtttcatagggccatggcttagtggaacagacatattgctcactgttgacccggtgaatatccagtatattctaagttcaaacttcgtgaattaccccaaagggaagaagtttaacaagatctttgaattcttgggagatgggattttcaacgttgactccggcttgt

SEQ ID NO: 2470 - DNA, 499 bp, Arabidopsis thaliana
  unsure at all n locations
  Clone ID: LIB22-040-Q1-E1-E4
tttcgttggncggcccggtcnaaaatnaccgggtcgagcacgcgtccgttcctcttccacttcatctaattcctcatcctccaccgcatcagacccattaaaaccatcaaaggatggctcaccgtcaacagatgaggcatactcctccttgagatcagcctcagactcttcttcatcctcgtcggaaatcacataatcctcatctgactcatctgaacccttatccttagatctaacctttctattagaatttctagcccaagacgtgtttctctttcccatatgctcctcaaaataagatatagaaacaaaccactaaggcactaatctaaatctaaactcatcaaccaaaaacacaatgattccttcagctccgtcttgttctaaaaacttatatagcctagaccaaatcacccaagaaatctcaaacctcaattctccgaattcagagcaagaagatntgcaaaatcaacccaaanaacaaacaagaaatcaagga

SEQ ID NO: 2471 - DNA, 448 bp, Arabidopsis thaliana
  unsure at all n locations
  Clone ID: LIB22-040-Q1-E1-E6
acgcgtccggtcgtctctttctcagatcgattttcggttatgccgatcaacggttaatctccgccgtttgatttcatcgccggagaggatctttctccgtctacgtatgccctttcgtatacgcgtttcgtgttttgattttccccgaaacctttcgttgttctgggttactgtgtgaggaaggacgtgcaaatttgtttggaagttgtgttaagttaaagcagagtattgganatcgtctgatagagaagagaatagttcttgtgtaaggttatgggttcagtttgttgtgtagctgtgaaagacanaaangttcctcctagtggtggacctgcgagttcatctgttcatcggaattcagcatgttcgccacaatggagttttcgacgtgataatangaggcgagtggctgatgagattgagggttcaccttattacagtccttaag

SEQ ID NO: 2472 - DNA, 439 bp, Arabidopsis thaliana
  unsure at all n locations
  Clone ID: LIB22-040-Q1-E1-E7
ttccnatctcacagngacaannnnnnnnnnnnnnnnnnnnnnnnnnnnnnnnnnnnnnnnnnnnnnnnnnnnnnnnnnnnnnnnnnntctccggtgtattccgttctccgggaatttctcngaagagggagagaggaaaannaaaacgtccgattcaatctcttcgttgctcgacgaatttttcttaagctttccttattggagatttgaagattcngagtggntgttatgataatgtgggtttgattagttcttcacaganagcttctcaacgcgcatggattcttctctcgatggagctgcangtgactcatcnaaatgcantgaaatgagtgttgatgaagaagagacagcntgtttaagaactgtcgaagcaatcacatctagctgctgaagtcttgcaaggcatggancngnnaaagagaatccaacanatttt

SEQ ID NO: 2473 - DNA, 419 bp, Arabidopsis thaliana
  unsure at all n locations
  Clone ID: LIB22-040-Q1-E1-E9
gntacttagtctcaatcttctctttgtctttgtttcatgtgcttcttccatagagtttgtttaccctaatttcacaancttctanncctcanattcgncgatagctccaaaggagctttcctcttgtctcgtaattccatcttcaaagccggtttattcagtcccggnggngatgattcctctaccggtttctacttcnccgtcgtccatgtcgattccggntcaacaatctggtcatcaaatcgagattcccctgtttcangctcnggtacaatgaatcttactcctcaaggaatctctgttattgaagatggtaaaagtcaaataccagtttggtcaacgccggttttaagcttctccggttaantccgttcggttaaccgacgccggtagtctccttcttcttgatcacttgaacg

SEQ ID NO: 2474 - DNA, 487 bp, Arabidopsis thaliana
  unsure at all n locations
  Clone ID: LIB22-040-Q1-E1-F1
gaccggtccganaattaacgggtcgacccacgcgtccgcttaactctctctctttctctttcccctttcttcttctgagatacgcttctctactccactgccatggagctctaatgggtctctgcaattttcattcttttcctcttttcttctgagaatttcagctcaagaaccatggatgagtcttctcttgttcgttttgtgttccttctctgtttggtttcgtcgtctgtgttctgtttggctgagtctgaccaaaacgcaaccgtttcttctgctgtttacattgttactctcaaggaccgtccatctgttcatttctccggcaagagaatcgagtgactctaaacacaagccttaccgctacttcgtcccaaatttacaagaacattgaaccgaagtgcttctattattaagagttcangattcattgctgagaaatgtattgagaaaggagaattancttaaagcnttaaaggtaacaact

SEQ ID NO: 2475 - DNA, 445 bp, Arabidopsis thaliana
  unsure at all n locations
  Clone ID: LIB22-040-Q1-E1-F3
cttcntcncaatctctctgatagagaaaccannagcacaannngnnanganatttactgtgaccatggatccaggagatcctacttcgatacttttcacaaagatcagaactttagaaccagatttcgcttccaaaatcattggntacttgcttttacaggacttgggtaagacagatttgatgcgtttggctcttggaccagagactctcttgcagtccgtttgtctcaaagctaaatctgctttaggtctttcttctaatggatcntcttcngcttcttcgccattgaaccctatctccaagacccattaacatccaccgtcattctctctctcactcttcaccgggaaatgggttttcgangaaccctttgtctccntcttttgctactcctgggtcactcgggtagtaaccctaacatgaattccaatccgtttcaaagca

SEQ ID NO: 2476 - DNA, 499 bp, Arabidopsis thaliana
  unsure at all n locations
  Clone ID: LIB22-040-Q1-E1-F4
actgttacgttggccgggcccggtccnaaattaccgggtcganccacgcgtccgcacaagtcaactttgcattataactccatttgccctcctggttcatcttgttctctaccatggctgattcaaaatctggtgacacggaagtagcgcatcgctcnagcgatccaagcgaaaagcgtggtggctggatcactttaccgttcatgctagttacattattaggcatgtccataacttctttcggatggggaatgaacttgatcgtcttcttgatcgaggaattccacatcaagaacatcgctgctgctcagatttcaaatgttgtcaatggagttgtcaacatgttacctgttgttgcagccatcctagctgattccttttttgggaacattcncgtcatctccacctccactttcatttctctggctggaacctctctcttgaccttaatcacatcctttgaactacttgatgcctaaaaccgtgtnaaaccggggca

SEQ ID NO: 2477 - DNA, 488 bp, Arabidopsis thaliana
  unsure at all n locations
  Clone ID: LIB22-040-Q1-E1-F8
ggtaccgantccaaaaattcccgnggtcgacccacgcgtccgctcttttctctgtctttctctccctgcagttaccggattcctccactccggctagatctccccgttcaccgccgatgacagaacgaatcanagcaagaggacccagatcatcctctgttaactctgttcctctgattcttgacattgaagacttcaagggtgatttttcatttgatgcattatttgggaacctggtaaacgacctcttgccgtctttcctangacgaagaagcagattctggggatggccatggcaacattgctggagttgatggtttgacaaatgggcatttacgtggacagtctgctcctttgtcctctgctcctttttttcctgaagtagatggtcttttgtctctgttcaaagatgcttgcaangagttagttgatcttcggaagcaagttgatggaaagctcaatacactaaaagaanggaagtttcaaac

SEQ ID NO: 2478 - DNA, 478 bp, Arabidopsis thaliana
  unsure at all n locations
  Clone ID: LIB22-040-Q1-E1-G10
gcttacgccngccgaaaccggtccaaaattcccgggatcnatcntcntcatctttgtttcagcttcncctttgaaactagattatctccgttaatggcgcctcagatctaaccttgggagttatatatatatacttgttcaactcttcttcgaacgctgtccaacttcttcctctggttcgatcatcgagatctcgaggttatttggccgcaatgcagaagcgaatagccttgtcgtttccagaagaggtactanagcatgtgttctcgtttattcagctggataaggataggaactcagtctctctggtgtgcaagtcatggtacgagatcgancggtggtgcaggaggaaagtcttcatcgggaactgctacgccgtgagtccagcgacggtgattaggaggttcccgaaagtgagatccgtggagcttaaaggaaaacctcactttgctgactttaanttggtacctgacgggat

SEQ ID NO: 2479 - DNA, 497 bp, Arabidopsis thaliana
  unsure at all n locations
  Clone ID: LIB22-040-Q1-E1-G2
tgttacgttgccgggcccggtccnaaattnccgggtcgacccacgcgtccgggaatccattgtttcatttgaagaaaactctaactttctcgttgangctttgagctctctacctctttatctccggagatgtataataacatgggacctcaaccggggatgccaagacctccangaaaccctgagcctggtccatttggtaatcctttcactggagctggctcgggttttatccgtggtggtttgggancgtanggggagagaattttaggatcnagctctgantatgttcanagcantataagccggtacttctctgatccgcaatactatttccaagtgaatgatcaatatgtgaggaataaactgaaggttgttctgtttcctttccnacaccggggacactggaccaanaatatctgaaccagttggtggtaggctctcatacaagcctccaatatatgatatcaatgctccatacttgtacattcccntta

SEQ ID NO: 2480 - DNA, 499 bp, Arabidopsis thaliana
  unsure at all n locations
  Clone ID: LIB22-040-Q1-E1-G4
ttacnttgccggccgggtccanaattaacgggtcgacccacgcgtccgattaggggataataaggaagtatttgaaanaagaaggtggcaagcaagcggttctttcnagtactttggggtcnttaatatgggagaagcctacatggaccgacttcaagcagcttgccaaagaaagcgaatttgcggcatggacgcttatccacggctacacaatgaatcatcttgcttttgcggttcatcgattcaaacatcgtttcagtgacatcaaattcgtcaaacagcgtcttgaggaaaagggattcaaactcaacagtgacggagaaatcctcaaagtgagtcaagatggtctactatttcaagtttcatcgatctcggaaaggcttccggtaacatttgcaagatggagtaactgaaacaatcccagcttcatacattgaattcactcaagcgtcaagttcctccaaaggtcaaaagatgtgccgcctgaagaagattnaag

SEQ ID NO: 2481 - DNA, 492 bp, Arabidopsis thaliana
  unsure at all n locations
  Clone ID: LIB22-040-Q1-E1-G5
cgccgnccggtaccgagtccaaaaattcccgggtcgacccacgcgtccgcttctctttctcttagcatattctgctcttcctctctctgttgttcnctgttccaaaggctttgagaaaaaatggagttcgagaacnggtacggacttgcaacgtcgcagaagtacgactgtctcttgttcgatttgganganactctttatcntcttagntccggaatcgcaagagaatgtgggaacaacatcanagattacatgaccganaaactcggtatacctaangacaaaatcgtcgaattgtctgatcttctatacaagaactatggaacaacaatggctggtcttagggcgatcggatatgaatttgactacgatgagtaccacagcttcgtcnacggtcgtttaacctatgacaacataaaacncgaccttgttcntcgcagcctccttgcttagcctccctctccncaaaagtcatccttacaaancggacaa

SEQ ID NO: 2482 - DNA, 454 bp, Arabidopsis thaliana
  unsure at all n locations
  Clone ID: LIB22-040-Q1-E1-G6
acgcgtccgagccccaatagcaaagatagaaaaaagaaactttatttctcttagtaatacaataatccntatagaacgggtcaagcaagatatcttttttgtttgtttcccttgttaatcgttataaacttgtttctcaataaaacttgagtttttaaaaatccagtcttgcaaattcatcgacgatgttagatccttcttctgctaaatccttcaatacccatttgtgttttccgagtattcccaatgatgatcactcagattccggtgtctgttcgcctactttgtggagaaccagtcccccgaagagtcctcctccttttcaccggccggaagattactgggagtctttcgccggattctaaagcacaggctattgctcgtggtcaacggggagcttaaggnaatggttagtaaagatgcctgagtccgtgttacgagctttcantgaagg

SEQ ID NO: 2483 - DNA, 449 bp, Arabidopsis thaliana
  unsure at all n locations
  Clone ID: LIB22-040-Q1-E1-E3
cnctttcttccntcctctccgatctccgttcacatctctctctcatctttagcttcttctntttttgccttgtgggttgaaagtttctatantttctcnttctcntctgtttacacaacccattttcaggctcaagcagcngaagaataacgatcannaaccannnnagangaaaacgaatctgttcttagctttgatgggttcttgcttcagttctcgagtcaaagcagacatcntccacaatggtaagagcagcgatctttatggtctaagtctctcaagtcggaaatcgtcttcgactgtagcggcggctcagaagacggaaggggagatattgagttcgacccctgtcaaaagcttcacctttaacgaaactcaaactcgccacaagaaacttcaagancaagatagtgtgatcgggagaaagggggctttgggttgtgtccttn

SEQ ID NO: 2484 - DNA, 503 bp, Arabidopsis thaliana
  unsure at all n locations
  Clone ID: LIB22-040-Q1-E1-C1
ctgttactcttgncccggccggtccaaaattcacgggtcgacccacgcgtccggtttaatacatgtcctcttcgatggaaaccaattcacgggcgaaattccagagaccctcagtctcgttaaaacgttgacggtgttacgccttgataggaacaaactcattggagatattccttcatatcttaacaatctcacaaatcttaacgaactgtacttggccaacaacagatttactggtactcttccaaatttaaccagcttgaccagtctctacacattggatgtgagcaataacactttggatttctcacccattccatcatggatctcttcattaccctccctatcaacattaaggatggaagggatccaacttaatggtccaataccaatctcatttttcagccctcctcagttgcagactgttatcttaaagcgaaatagtatagtggaaagcttagactttggtacaagacgttaagcanccagtttgaatttggtgg

SEQ ID NO: 2485 - DNA, 445 bp, Arabidopsis thaliana
  unsure at all n locations
  Clone ID: LIB22-040-Q1-E1-C10
acgcgtccgcccgtgtctagggttttctttcgtagctgattgggggctgcaagagtttcgccgaggacgattgagaattttgattttcgaaaaatggattctgtggaggaagaaggtgttgttagggttgaagaagagaacggacgcggtggtctccgtaggcatcggagggtttctacgaagctggcgaattacgtagatcctccgactgacgacgaagaagatggaggacccaagcgaaagggcaaaaggggtggaaatagggctccgaaaaagacaccgaagaaagacgaggagatgcaaaagaacgaaattgatgaagcaaaccgagtcactggtctggtgaaggaaaaaagagccgcgactaagattctgaatcccaanagactccattaattgaanttaggagaagcntccnggaaaccatgcccaagggaantaaagg

SEQ ID NO: 2486 - DNA, 456 bp, Arabidopsis thaliana
  unsure at all n locations
  Clone ID: LIB22-040-Q1-E1-C6
acgcgtccgcancaacacaacacacgcagaagagagagagagaacantcaaaaagaaggagcggttacatattctctggtctgtcacaagaaaaatggatatctgtatggacaaggagccagatggtgtggtggtctatgcgaacggtgattcgtgtaatccaaaccaanaaaatgtttctgagcctctcttagattcagtatcangcgatgatgctaatgtacatacagagcttcgatatggggaagagaacatcgaagtaaacgaatatgatgttaaagagtgtactantgagatccccgttggtaagccgataggagatgattttgagtctaaagatgtcactaagtcaagtttacatgcaaagcatgcttcaaaatcaggtacagggaataacaaggcaaggaacacccgttccacaaaccgttttcctttagcaactgagaaacttcctcc

SEQ ID NO: 2487 - DNA, 461 bp, Arabidopsis thaliana
  unsure at all n locations
  Clone ID: LIB22-040-Q1-E1-D1
acgcgtccgcgaaaagctaagaactttcttcgtctctattggtctctcactctctctcttacctcttctcatttgttctttctccttctaaattgggttatcaagtatattggatcaacgggtttgattcacgatttgtcatttcatcttcgtggagagagtttgatctgatttgttgatcgtcagcgttatgtctagtccgagaagtaacaagccgaagattgtcaacggtcctggtggttatattctacaagacgttcctcatctcattgattaccttcctgatcttcctacttatccaaatccattgcaagacaatccaagcttactcaagtggttaagcaatactttgttcatgctgatgatagtgtccctgagaaggttgttgttcacaaggatggtccaaagangagtccaattcaagcgtgctgggtccaacgtcnaaaaggttaactttgagt

SEQ ID NO: 2488 - DNA, 484 bp, Arabidopsis thaliana
  unsure at all n locations
  Clone ID: LIB22-040-Q1-E1-D11
gcttacgcctgccggnaccggtccagaattcccgggtcgacccacgcgtccgcccacgcgtccgcccacgcgtccgcccacgcgtccgcttcttcttggtctcttctccatctcatcggagctgatctcgaattgttctccgttcatttgttacggtggagatgacatcggatcaccgcgacgctcttttctctctggaactggaatcgcctgatccggacgaaggaggtgtagcagacggaggagaatctgataccgacgaggatttgcgcgacaacgatgatgttgttatgccgggaacgaacgaagctgaagctgaagacgacgatcccgaagaggaagatctcaattctccgtctacatcatcactccccatggtttctacgatctcagcgactgctgttgtttccgggaccccgacggcgacttcctctacaggcgccgtgaccgttgcacttccggctggattcgccgtccctgtctc

SEQ ID NO: 2489 - DNA, 490 bp, Arabidopsis thaliana
  unsure at all n locations
  Clone ID: LIB22-040-Q1-E1-D12
gnaagtgttgacgcctgccggnaccggtccagaattcccgggtcgacccacgcgtccgcancaataatgatgattccttattaactacgagccagatttgccatggagctcacgaccaagactcatgccangctctcttgtccgaattcacgacgttgtcgctctcaaagctcaaccgncttgacctattgcaggtgtttttgaagaactcggtgtggcggcttgagagcacgatgaccatggtgagcgaggctaggatccgctcgaacggtgttagagacaaggcaggttttgctgactgcgaggagatgatggncgtatcaanggatcggatgatgagttcgatggagggaacttcgcggaggaaactataatcttgagtcatactcaaacgttcatacttggctgagcagtgtgcttacaaactacatgacatgtttagaaagtattaantgatgtcccccgtcaactctaagcaaaatagtcaaag

SEQ ID NO: 2490 - DNA, 442 bp, Arabidopsis thaliana
  unsure at all n locations
  Clone ID: LIB22-040-Q1-E1-D2
cttcctctttctctacttcatacataatttcatttctcaggtttctatatattttcttctccactttttataatttatccgcttgtctgctatctcttacattaaatctaaacctaaatcattagaannnnnnnnnnnnnnnnnnnnnnnnnnnnnnnnnnnnnnnnnnnnnnnnnnnnnnnnnnnnnnnnnnnnnggcatggctggtctcgatctaggcacaacttctcgctacgtccacaacgtcgatggtggcggcggcggacagttcaccaccgacaaccaccacgaagatgacggtggcgctggaggaannnnnnnnnnnnnnnnnnnnnnnnnnnnnnnnnnnnnaggtttagatttaatagcttctaatgataactctgggactaagcggcggtgggangagganggagcggtgacctcgtcaagcgtccggcaa

SEQ ID NO: 2491 - DNA, 456 bp, Arabidopsis thaliana
  unsure at all n locations
  Clone ID: LIB22-040-Q1-E1-D3
acgcgtccgaaattacgacgttgacgctccctcagtctaaaggattcngaggttgacgctgaactaaataatgggagaagagctgcantatcagcagaatggttcatctgtgacatctaattatggntatggaagttcgcttgcttacgatcaatctcaagacattgaatctgccgcaaacactgctcttctccgagaacaagaaatataaacgcagaagattatacaaggtcaaagagaactgggacttcagtatccggagactctaagcataacactgatattcttcgagatcgtgctgaccccaatgctctaaaggaacatttgctaaagttcactgcacatcatagagcanaagcagcggcaaagcgtgggtgggagtgtgantacatgcagataaggtaatgtggatgttggaaacngttatggtataacgggtggaattgcatanccggg

SEQ ID NO: 2492 - DNA, 431 bp, Arabidopsis thaliana
  unsure at all n locations
  Clone ID: LIB22-040-Q1-E1-D5
acgcgtccgcggacgcgtgggctcacananacctcacctttccaccataacattgtttctgttctanttcacacaagaacagaggacanaagaaagaacgggtctttggtcggaaagttcgacncttttagnancttcanatgttcnaatctcgaaaaanatgcaactttactctgcaattttccgaggacatancanacctaacgccgtcgtcngtgctgcctccatgtttattcaacataagtccatcgnagcttcatcgganccctaaattgttgttganancttcntctgtagtaaggtctcttcattgccggaggtcaggtggattggttacgcattctcaagaggtcaagggtcttgtgtgtganagcaactcgtggtgaggcntcgtccatcgactcctgggatacattggagagcagccnaat

SEQ ID NO: 2493 - DNA, 450 bp, Arabidopsis thaliana
  unsure at all n locations
  Clone ID: LIB22-040-Q1-E1-D6
acgcgtccgaaaacatcanatcatgagtgggcaagagaatcatgatcatggccggatctcttctacgcccgccgccgcgtcggagccttccaaggctgctgctcannnnnnnnnnnnnnnnnnnnnnnnnnnnnnnnnnnnnnnnnnnnnnnnnnnnnnnnnnnnnnnnnnnnnnnncaccggtgccgccgcaaccancatgccagcggaatccaatccttacgtttctccttcccctgccccaaggaatacgatggattcggtgaaggatacgttagggaaatgggggaaaatggctgccgacgccaccaagaangcngaggatctcgccggaaatttttggcagcacttgaaaacaggcccaangtgtagcaaatgctgctgtttcacgaattgctcangggacaaaaatacttgcanaaggtggatacgaaaaaggctttaagnaaa

SEQ ID NO: 2494 - DNA, 435 bp, Arabidopsis thaliana
  unsure at all n locations
  Clone ID: LIB22-040-Q1-E1-D7
nnttcgagcaangcganggtcgcanctgcttcaatcttcgcgatnatcgatagangntcaaagatagacccgagcgatgagacanggacagtgttggagaatgttangggagatattgagctgcgtcanttaagcnatacttatccagcaagaccanacattcanatctttcgtgatctttgcttacccattcacgcaggaaagactgttgctctggtaggagaaagcgggtcggggaaatcaacggtgatcncgctgttacanagattttacgatccagattccggtcatataactttagatggagttgagctcaagaagctgcagttgaaatggttgagacaacaaatgggactagtgggacaagaanctgtcntgttcaacgacacgattcgagccaacattgcttatggcaaaggaagcgaanaaggcccc

SEQ ID NO: 2495 - DNA, 428 bp, Arabidopsis thaliana
  unsure at all n locations
  Clone ID: LIB22-040-Q1-E1-D9
gggtgggtatcgatcntatcncangaggtannagtangaagaccaaaaggactgctcctaagtccgatgatgtctacctaaagcttctcgtcaagctttaccggtttttggtgatgagatctaacagcaacttcaatgctgtgattctgaanangcttttcatgaagcaaagtcaacaaagctcctctttcactctctaggcttgtacagttcatgactggcaaggatgacaagattgctgtgttggttggaactatcactgatgatttgagagttcatgagattcctgccatgaangttactgccntgangtttactganagggctacgggctacaattgacaaagctgngtgngagagtgcttaacctttgacnaaccttgctctcaaanctccattgngacagaacacagttcctcttaaaagga

SEQ ID NO: 2496 - DNA, 458 bp, Arabidopsis thaliana
  unsure at all n locations
  Clone ID: LIB22-040-Q1-E1-E1
acgcgtccgtaaaatcaagaaaccatgtctgcgagtgttctaagtgatccaacaatgctaatttcaacaccggaggtaatactcgtctctccggtatcggttactcaaatctccggagatgagccagattcggtgacgtgtgattgttgcggattaaccgaggagtgtacccaatcgtacatagagatggtcagagagcgttacatggggaaatggatctgtggactttgttctgaagctgtgaagtatgaagtcatgagaacgaaaagattgttaacgacagaggaagctatggccaagacacatgaacatgtgtaataagttcaaatcctcaaagcccancaccgaatccgacaggacatttgatcctgccatgagacaagatcttgagaaaaagcttagattcaccaagaatgctanatttaagcctaataatccatctaaaggacgaacaaaga

SEQ ID NO: 2497 - DNA, 438 bp, Arabidopsis thaliana
  unsure at all n locations
  Clone ID: LIB22-040-Q1-E1-E11
acgcgtccggtaaaaagaagaatcgccattgagattgtcccaaaacctccaaaggaaacacacgtttgtctttgctctgaggtatcttcgacgggacgttgaagcgagcaagatacgacacgaaatcgatctcccccttgcgttttccatctccgtcgtctgctgaaaccatttgatcgatctctcagataaggttctcaggatttaggttgcttctatgagaaggacacgttgcagttggtgcttcatgtctaggtaatgaaggctttatgtgatagatttgttcctcaacaatgttcttcatcaagcaagagtgatacgcatgataaatcccctttagtttcagattctggacctagtgataataagtccaagtttaccttatggtcaaacgtgtttacgtcttcttcctcagtttctcaaccgtatanggagtct

SEQ ID NO: 2498 - DNA, 439 bp, Arabidopsis thaliana
  unsure at all n locations
  Clone ID: LIB22-040-Q1-E1-B8
attcttctttcttcttcttctcagatcctttcaccgagtaagaagattttaangatgccgtcancgccgacnacgccgactacaacaacgccgatcacggcttcgtattggtgttacagctgtacgcgtttcgtcagcgtttgggctgatcaaggcacaacaaccgtcggtagcgtcgcntgccctcactgcgacggcggttttatcnaacagatnaacgattcttcctccgccgctacngaattnacgattccggnttcnactgaagtaacatcgatcaataacaaccgtagatccgtgattagacgccggagatccggtcgtcgtccgtcctttannccggtcatcgtacttcaaggatgcgcnggcnagaganaananggacaanaagganatgcnggctagagattgaancgcctttgggttttagtacgaagcc

SEQ ID NO: 2499 - DNA, 473 bp, Arabidopsis thaliana
  unsure at all n locations
  Clone ID: LIB22-038-Q1-E1-F3
cgcctgcctttaccgggccnaaaattcccggaancnacccacgcctccggtgggcgtaagtattgccatgggcttttggcgactttggagcttaagagtagacacgatctgatctcaaggctattcaactctgtcntgccttgtanagatgagattagttttgaggtgtanatgaatgatgaagccatggatcacattgtgtttgctatggcgaggaagaangcggctaaaacgatgcacaaggagctgagggatctgcacagatttgngagggatggttcccaagtcctggcgggaggaagtgggtaacggagganttanctgtggtctctgagtctaaggaggtagctggagatatgatcaccgatgttgtactttgatcaangtttttggtgacaagtcttttgaaaagtttgggaagtatttcatcctcaaatgcntttctccgggatcanacatcctgggcaaaacac

SEQ ID NO: 2500 - DNA, 413 bp, Arabidopsis thaliana
  Clone ID: LIB22-038-Q1-E1-G10
ggaagtcaatgatttctcatcattcaataacaacagacgtggtattgcagaggctgttagccactcgacttctaagtttagttcatcaatctcaattctggattcaaatcatctagcttctcgttcgttccagaaccgggaaacttcttgtgggatggattcaaaaactggatcctcctttgaaataggtagtgatagattgcatcttccaaatggattttctgagaaagctatgtccaatatggagcattcattatttgctaatgaaggcagaagcaacattcaagaatacagaggatgatatcatttcaaacattttagactttgatccctgggatgaatcgttgacttcgcaacacaattttgcaaaattacttggtcagagtgatcatagggccagtactctgggaatc

SEQ ID NO: 2501 - DNA, 395 bp, Arabidopsis thaliana
  unsure at all n locations
  Clone ID: LIB22-038-Q1-E1-G12
gaaacgcgggaaaatgaatcaagtttcntccntaaagctatcaattttctatgggaatctgatcaaataggttatcgtcatgtttggcctgaatttgagtttaattggcaaattgtattgggaacacttgttggattcttnnnnnnnnnnnnnnnnnnnnnnnnnnnnnnnnnnnnnnnnnnngattttcgtacctatgcttagtttgattattgggtttgatcctaaatcagctacagctatttcaaaatgtatgattatgggtgcttctgtgtccactgtgtattacaatcttaggattgaggcatccancacttgacatgcctancattgattatgatctcgctttacngatccagcctatgcttangcttgggattaagtattgggtgtng

SEQ ID NO: 2502 - DNA, 414 bp, Arabidopsis thaliana
  unsure at all n locations
  Clone ID: LIB22-038-Q1-E1-G9
tttttgataggactactgggaaggaacctggagaagcaagctccaccgccactacggcggagactgtggaggagagatcaggctccggaagatggcggcggccgagagatttaaagggtggcggcgatatcgaagggattccacaggttttgggtcgtttggtttcgaatggttcaagtaagattgcatgtctttacacacagcaaggcaagaaagggactaaccaagacgccatgctcgtctttgagaacttttgttcgagagacgatacagtgttttgtggtgtattcgatggacatggaccatttggtcatatggttgccaagaaagtccgagatacattgcccttcacactcttaacccagttgaaaatgacctcagagtcagatnaaagcagcttantttggtgccaat

SEQ ID NO: 2503 - DNA, 412 bp, Arabidopsis thaliana
  Clone ID: LIB22-038-Q1-E1-H11
tcctcatcttcaaaacattgtactagtctcaatctccaactgttttaaatgggaatttcgaaaaaatctcaagttagcagagaattagacaccgatggaaaaaagtttatcttcgccaaaacatcgattcgggcttcactaaagccggtgaagacgaaactcattaagcctgagagagaatcagaagatggaatttgtatcactcccacggcgagaggagcaaagactccggagtgtccggcggctccaaggaaacgcccaccggtgttgaaatgtcagaacaatattcgtatagagtactttgtgcctccttcagatttcgagttggtgtttatacaacgccgttaatgtaaaaagatataaaaagagtttctgagtttggtttttacaaaaaaaaaaaaaaagggcgggc

SEQ ID NO: 2504 - DNA, 400 bp, Arabidopsis thaliana
  unsure at all n locations
  Clone ID: LIB22-038-Q1-E1-H7
gagcagaaggagaaactgaagggttcttatgattttgtcggtatcaattacttcacttctacatttgttgctcatacggacaatgttaatccagagaaaccgagttgggaagctgattctcgcttgcagttacattcgaataacgttgatgggttcaagattggttctcagcctgctactgcgaagtatcctgtttgcgctgacgggttaagaaaagttttgaaatacatcaaagagaactacaatgacccagaaatcatagtcactggaaacgggtacaaggagacacttgaagagaaagatgtacttccagatgccctcagcgatagtaacaggaagtattatcatatgagacatctcatggcattacatggancagtctgcgaggacaaggttnatg

SEQ ID NO: 2505 - DNA, 500 bp, Arabidopsis thaliana
  unsure at all n locations
  Clone ID: LIB22-039-Q1-E1-A3
aactgttacgcctggtcgtacggctccanaaattccaaggtcnacccacgcgtccgcncacgcgtccgaatctgaatacactcattgcaaaccttnnnnnnnnnnnnnnnnnnnnnnnnnnnnncttccatagattccgttgggcttttactgtgtttgattgatcggatcgattgcgattacggagaanatatggctcaggctgtagaagaatggtataaacagatgccgattatcactcgctcttatctcacggcggctgttatcaccaccgtcggatgttccctcgatatcatatctccatataacctttatttgaatccgacacttgtggtgaagcaataccaatattggcgtctcgttactaatttcttgtatttccggaagatggatttggacttcatgttccatatgttctttctcgcacgatactgcaaactccttgaagaaaactcattcaggggaaagactgctgaattcctaaacatgnccccaattgg

SEQ ID NO: 2506 - DNA, 410 bp, Arabidopsis thaliana
  unsure at all n locations
  Clone ID: LIB22-039-Q1-E1-A6
ctctctctctctctaaccanaaagcttccatggcgtcagatcagagcacgantccaccgatcatggaggcaaagacaagacatcctcttcaccagatcgcagatacaccaacacacaagcttctcctgaaacaatggttaaaagaagaagagctaattctaagccgtgtcnctcacaaagaatctcagatcgattctgttcgaatgagaaatcactcagctctacatcntcntcnttctcttccactccatttcnctgctacttctcttccacgcttcttcatcctcatcttcctctgcttcttccagtgcttgtaaaagatcatggatcccttcactctgccgctctgctatctnncttggggatcagttggggcggtacgggacaaatccgatgtggaacgcaanctt

SEQ ID NO: 2507 - DNA, 452 bp, Arabidopsis thaliana
  unsure at all n locations
  Clone ID: LIB22-039-Q1-E1-B1
aggtccacgcagncgtccgatggagtaaagccggctcttaacttcaaggggtatttggttggaaatggagttgcggatccgaagtttgatggaaatgcttttgtcccgtttgcacatgggatgggactaatctctgatgaactctttgagaacgttacaaaagcttgcaagggaaatttctatgaaatagagggactcgagtgcgaggaacagtatacgaaagttaacgatgatactaaccaagttgaatatatacaacattcttgagccatgttaccacggaacatcgctatctgcattcgacattagatcgcttccttcaagtctccttcagctaggcaaaactgaaaaacggttacctataagaaaaagaatgtttggtcgancgtggcaattcgtgcgcctgttcanccaagcantgtccctaacctggtccaacttcntgccgaagt

SEQ ID NO: 2508 - DNA, 451 bp, Arabidopsis thaliana
  unsure at all n locations
  Clone ID: LIB22-039-Q1-E1-B5
ccangcgtccggctccttcaagcgtcgttagggtttactctaccgctacctctccttctccttctgaaatttccgtcaagaaagttggtactcataatggaagctttcactgcgacgaagctctcggctgtttcatgattcgcctcgtcgataaattctccggcgctgatatcgtccgttctcgtgaccctaagatattggcagaacttgatgcagtgcttgatgttggaggtgtttatgatccggagcatgaccgttatgatcatcaccagaaaggttttgaagaggtttttggacatggcttcaacactaaagctcagtagtgctggtcctgttacaagcattttggaaaggagatcatagctaaggaacttaatgtcgaacaagatnaccctgatgttctccgggttgtttttaaccggctacaanaacctcaagggaggcaaattga

SEQ ID NO: 2509 - DNA, 453 bp, Arabidopsis thaliana
  unsure at all n locations
  Clone ID: LIB22-039-Q1-E1-B6
acgcgtccggtttattgattcttatttcaagagaaatataccctgagacattctacagatcgcttgtcgcaacagaaaacagcaaggttaataaaatatgggaaaaattggaaggttacaagaagaagcttgcgcgagcagaagcaatattagcagcaactaataaccgtcccacgaacaaaaccggcttctgtgggctagtcggtaaacaagtagacagcattgagtattacactgagctaatcaacgagtctgtagccaaactggaaacagagcagaaagcggttcttgctgagaagcagcaaaccgcagcagtggttttcttcacaaccagggttgctgctgcatcagcaagctcaatctctgcactgccagatggttgataaatggactgtgaccgaagctcctgaancaacgggaantcccaatggaagatcccaacnatcaagccct

SEQ ID NO: 2510 - DNA, 470 bp, Arabidopsis thaliana
  unsure at all n locations
  Clone ID: LIB22-039-Q1-E1-B9
ctgtttacgcctgcntgtaccggcccaaaattcccggagtcnacccacgcgtccgagagaaagtgagacaaggttaaggaggaagaagatgactgagaatcgggtggttttggctctgcttatactctgcattgttgggtttgagccaagtttcatccatggagctacggattcatcagatacttcggcgttaaacatcatgttcagctccatgaattctccaggacagctctcacaatggacagcatcaggaggtgatccttgtggccaaaactggaaaggcataacttgctctggctctcgagttacacaaataaagttaccaagtcttggactttctggatcacttggattcatgcttgataaattgacttctgttactgagtttgatatgagcaacaataaccttggaggcgatttgccttatcagcttcctccaaactttggagccgattgaatcctgctaaaaa

SEQ ID NO: 2511 - DNA, 501 bp, Arabidopsis thaliana
  unsure at all n locations
  Clone ID: LIB22-039-Q1-E1-C1
ggaactgttacgcctgctcgtaccgccccanaaattcccgangtccacccacgcgtccggaggaaagctggagtactagttgggactggaatgggaggtttaactgtgttttcagaaggtgttcagaatttgattgagaagggtcataggaggattagtccattttttataccttatgctataacaaatatgggttctgctttgttggcgattgatcttggtcttatgggtcctaactattcnatttcaactgcttgtgctacttcnaattactgcttttacgctgctgcgaatcacattcgtcgtggtgaanctgatatgatgattgctggtgggactgangctgctattattcctattgggttgggaggttttgttgcntgtagggcattgtcccagagaaatgatgaccctcaaactgcttccangccgttggataaagcangaaatgngtttgttaatgggttaaagaactgggggttctggtgaatgggaancctg

SEQ ID NO: 2512 - DNA, 414 bp, Arabidopsis thaliana
  Clone ID: LIB22-039-Q1-E1-C10
acgcgtccgcccacgcgtccgcccacgcgtccgtcaaaacccatatctctctgtcttgatctctctctcactttctaataagatcaaagaagatgtcgaaagctaccatagaactcgatttcctcggacttgagaagaaacaaaccaacaacgctcctaagcctaagttccagaaatttctcgatcgccgtcgtagtttccgagatattcaaggtgcgatttcgaaaatcgatccggagattatcaaatcgctgttagcttccactggaaacaattccgattcatcggctaaatctcgttcggttccgtctactccgagggaagatcagcctcaagatcccgatttctccggtccacgcgtctctcgccaggtctaagtaccgaactcgtttcgggaactgttcctaagacgat

SEQ ID NO: 2513 - DNA, 406 bp, Arabidopsis thaliana
  unsure at all n locations
  Clone ID: LIB22-038-Q1-E1-F12
aattcaacttctagtcttctcctccaactactggcaaattagggtttctgagttcgagaaaattcgtagcagagtgtgaaaatggaaggaagcaaaagcgaggcagtgttcgattccatgaatctaaatcctcagattttcatcaacgaagcaatcaactccgtcgaagattatgtcgaccaagcttttgacttctatgcccgtgatgcatccaaatctctcaaaatcaaaggatctgataaacaaaagtcacaagctttatcaaatggtattgctcgtgttcgtggtttgctactatctgtaatcgacaatcgtttgaaattgtgggaaagctattctcttcgattctgtttcgcagttcctgatggatttgtgttaccaaagagtgaggagtcttcgnctgtgg

SEQ ID NO: 2514 - DNA, 456 bp, Arabidopsis thaliana
  unsure at all n locations
  Clone ID: LIB22-038-Q1-E1-C2
acgcgtccggcccagagttgacataattgcatccacataatatttttttctccgatcatcggaaaaagcagtaatcaagatgcagaagctcaacgacatcttctccggtggaggagacggcgacggaacaaccgatagtttccttgaagatggatcggagggtctctgtgctctctccaccacccagagaatgtacggattcgccgcgtctttagccactggnctgctacttatgttcctgtcnatgattgtatttgggatccccatcaaatttgcactgctcttcacatttggaaatgttctagctattggaaagcacangctttcctcacggggacctgagcaacagatgactatgatgtttgaccctgttcgtttcttagctanatccatttatntcggatgtgtcnttgttgcnntcanntgcgctcncngattcagagcaaaatncgtacg

SEQ ID NO: 2515 - DNA, 439 bp, Arabidopsis thaliana
  unsure at all n locations
  Clone ID: LIB22-038-Q1-E1-C4
acgcgnnnnnnnnnnnnnnnnnnnnnnnnnnnnnnnnnnnnnnnnnnnnnnnnnnnnnnnnnnagttatttcgctttagcagattacttaaatccacggtttcttcttctccgggagcatttatggcgtcagcggtgacggcgtcaggcaaggtggagaaaggacatcagctatatagagacggcaagtataaggaggcgcttctcttctatacggaggctcttactgctgctaaagctaaaccacagaagatcgctcttcacagcaaccgcgccgcttgttacttgaaattgcacgatttcattaaggcagcagaagaatgcacttgtgttcttgagcttgatcagaaacatagcggagcgttgatgctgagggctcagactttagtcactcttanagaataccaatctgctctttttgatgtcaccangcttaagga

SEQ ID NO: 2516 - DNA, 414 bp, Arabidopsis thaliana
  unsure at all n locations
  Clone ID: LIB22-038-Q1-E1-C5
ctactgcctttttaccacagagaagagagaggatccgtcggtgtgctagtcncactgacactacatccgatcgtcgccggtgacattttataagtgtggagtttacttcagctttattattcaggaattgatggatcagtacgangaaagttgagaagattggtgaaggaacttacggtgtggtttataacgcacgtgacanngtgactaatgagacaattgctttgaagangatcaggcnagagcaggaggatgaaggtgttccnagcacanncatcaggaganatcctcccncttgaaagaaaatgcacgcacagcancattgtcaaattgcaggatgtggtngcacaccgaggaaacgtttggaanctgggttttgagtanccttgacntggatctcaaaanggcacatgg

SEQ ID NO: 2517 - DNA, 483 bp, Arabidopsis thaliana
  unsure at all n locations
  Clone ID: LIB22-038-Q1-E1-C6
cggnaccggtccaaaaattcccgggtcgacccacgcgtccgctcaatacaagaatatctacaatctctagaaaatggcgatcacttacttgcttcctctgtttctttctcttatcatcacctcctctgtttcagctaatttccaaagagacgttgagatcacttggggtgatggtcgtggacagatcaagaacaatggagagcttctcactttatctctagataaatcctctggttctggattccaatccaaaaacgagtacttgtttggtaaagtctccatgcaaatgaagcttgtccctggaaactccgcaggaacagtcacaacactttacttgaaatcacctggaacaacatgggacgagatagatttcgagtttttagggaattcaantgggagaaccttacacacttcacacaaatgtctacacacaaggcaaagggagacanagaacaacnnttcanactccgggttgattccaac

SEQ ID NO: 2518 - DNA, 491 bp, Arabidopsis thaliana
  Clone ID: LIB22-038-Q1-E1-C8
gccttacgcctgccggaaccggtccagaattcccgggtcgacccacgcgtccgcccacgcgtccgctgtaacattaccaaaacgaaaccttccttgtggattcccacttctttcttctgttttcttcttcctcttctttaaattggatgttttgggcaagaaacagagagaaacacgttaatttgagagtttgtcattgaatatttggtttgcaatggaaagagattttctgggtttgagcgacaagcagtatctaagtaataacgttaagcatgaggttaacgatgatgctgtcgaagaacgagggttaagtacgaaggcagctagagaatgggggaagtcaaaggtttttgctacttcaagtttcatgccttcttcagatttccaggaggctaaggcgtttccgggtgcataccagtggggatcagtttctgcggccaatgttttccgcagatgccaatttggtggtgcgtttcaaaacgcgacgccgc

SEQ ID NO: 2519 - DNA, 417 bp, Arabidopsis thaliana
  unsure at all n locations
  Clone ID: LIB22-038-Q1-E1-D10
gaggccccagcaattatatnaangatttccgcccgccttcctcgtggcctgcaacgggaacaattgagctagttgatgttaaggttcgttaagctgagaatcttccaacagtactccatggggtgagctgtgtgtttccgggtggnaaaaagattgggattgttgggcgaacgggaagcggaaagtcgactttgattcaagctttgtttcgattgattgatccaactgctggaaaaattactattgacaacatttgacatttctcaaattggtcttcatgatcttcgtagtcgccttggcgattatacctcaagatcctacattatttgnaggaacaanccgagcaaatcttgacccacgtgaagnncattcatatgatcaaaatcngggagngcgcttgataagatccccacgctt

SEQ ID NO: 2520 - DNA, 453 bp, Arabidopsis thaliana
  unsure at all n locations
  Clone ID: LIB22-038-Q1-E1-D2
acgcgtccgaattcaccaattttagaattcccattctcattttctctctctttctatttctccaaatttgcctaaagattttacattttatcttcaatccttccttgatttacgtttgaaatatttcgacccaaaactatactgatggagagaacaaacagcattgagatggatcgagagagattaacggcggagatggcgtttcgagattcatcatcggccgttataagaattcgaagacgtttgccggatttattaacgtccgttaagctcaaatacgtgaagcttggacttcacaactcttgcaacgtgaccaccattctcttcttcttaattattcttcctttaaccggaaccgtgctggttcagctaaccggtctaacgttcgatacgttctctgagctttggtctaaccaggcggttcaactcgacacgggngacgagacttaactg

SEQ ID NO: 2521 - DNA, 455 bp, Arabidopsis thaliana
  unsure at all n locations
  Clone ID: LIB22-038-Q1-E1-D6
acgcgtccgaaaatcttctctctaatctctccactctttcataaatattttcctaattcttctaccttggtgtctgattctagcaccaaaccattttctcctaccaaaatctgggtttcgatcaattttaggtcttttgattcctacttgtctaatcgtaatccaatttctgggtcaactttcgatcaaaatcaactgggcttgaatcaattttaggtttttcgattcctacttgtctaatcagttgaatcaaagttcgtctcttttaagcttgcantttcaaagatgacagttgttggagatgttgctccanntcgaaggaggaacagttcctacgtgctctaatgatatcgnctgctccggnannaccaagaggtgtcatggacgannaagttgctcatgangaattcaatggagcttccttttagtggcgcggtttttaagcntcgccaagg

SEQ ID NO: 2522 - DNA, 446 bp, Arabidopsis thaliana
  unsure at all n locations
  Clone ID: LIB22-038-Q1-E1-D7
acgcgtccgaacagaaaaggcagatgtttacagcttcggtgtggtggcaatggagattgttagcggaaagagcaacgcgaaatacacgccagatgacgaatgttgtgttggccttctcgattggttttcaatttcaggcatttgtgttgcaaaagaaaggggatatcgcggaaattctggatccgaggctggaaggaatgttcgatgtgatggaggcagagagaatgataaaggtttcacttttatgcgccaacaagtcttcgacattacggccaaacatgtcgcaagttgtgaagatgcttgaaggggagactgagatagaacagatcatatcagaccctggagtgtatagtgataacttgcacttcaagccatcgtctttgtcgtctgattatatcttgtcnattccttcatcatctgaatctgcttangatctgtaccaccca

SEQ ID NO: 2523 - DNA, 409 bp, Arabidopsis thaliana
  unsure at all n locations
  Clone ID: LIB22-038-Q1-E1-E12
aaggatacctcaatttcatgggaaacgaatttggacacccagaatggatcgacttcccaaggaccgaccagcaccttcctgatggcagagtcatcgctgggaataatggtagttatgataaatgccgacgtaggtttgatctgggagatgcagaatatcttagataccatggactacaagagtttgatcgagcaatgcaaaatctagaggagacgtatggtttcatgacttcagagcaccangtacatatcccgcaaggatgaaggagacagagtcattgtattcgagagaggtaacttgctcttcgtcttcaacttccactggaccaacagttactctgacnaccgtatcggttgctctgttcccggaaagtacaaaatcnntttggactccgataactcttanttgg

SEQ ID NO: 2524 - DNA, 448 bp, Arabidopsis thaliana
  unsure at all n locations
  Clone ID: LIB22-038-Q1-E1-E2
acgcgtccggaaaaaggttggagctttatcatcatcagcttcgaaaccaccacctgcgccggttagaggagcaagtggaggagagacttcgaaacaagtaaagttgaagcctttacattgggataaagtaaaccctgattccgatcattcaatggtttgggacaaaatcgatcgtggatcattcagtttcgatggcgatttaatggaagctctgtttggatacgttgccgtggggaagaaatcaccagaacaaggcgatgagaaaaaccctaaatcaacgcaaatattcatacttgatccgagaaagtctcaaaacacagcgattgtgctcaaatcattaggtatgacacgtgaagagcttgttgaatcactcatagaaggaaacgatttcgtgccagacactcttgagaggttagctagaatagctccaacgaaagaagaacnatcc

SEQ ID NO: 2525 - DNA, 520 bp, Arabidopsis thaliana
  unsure at all n locations
  Clone ID: LIB22-038-Q1-E1-E6
ggnagtgtttaccctgccggtaccggtccaaaattcccgggtcgacccacgcgtccgcccacgcgtccggattcntcttctctaccatattcgttgaaaccaganaagatggtgggtgtgtcgccgaagatcgctccgtcgatgttgtcatcggactttgcaaatcttgccgcggaggctaagcggatgatcgatttgggcgccaattggnttcanatggacattatggacgggcattttgtttctaacctaacgattggtgctcctgtcatcgaagagtttgaggancacacaagatcataaccttgatggcaactnantggtggacgaaacccaatgggaataangtggattaagaatgggctaaaagctgggagcctnctggtttcaacattccaacgttggagggtggcccaaagannaattggcaagaacttgtggagaaggattaaaggtgctggggaatgaaggcaaagtngtgggtcntaaaggctggaaanacctgttgnacaagtccaaa

SEQ ID NO: 2526 - DNA, 489 bp, Arabidopsis thaliana
  unsure at all n locations
  Clone ID: LIB22-038-Q1-E1-E7
nagtgttacgcctgccggtaccggtccaaaattcccgggtcgacccacgcgtccggcaagacgcttcactcaagcagcagtaactaaacttgcctccaaaaaccaatcccagatctgaatctcaacctaaacctcagattcatcatcatggcttcttcttctaactacgatggaatccttctcggtatgggtaacccactcctcgatatctctgccgtcgtcgacgacgaatttctcaccaaatacgacatcaagttgaacaatgcgattctcgcggaagacaaacatttgcccatgtatgatgagatgagtagcaagttcaatgttgaatacattgccggaggtgctactcagaactcaatcaaagtggctcagtggatgcttcaaattcctggggcaaccagttacatgggatccattggaaaggacaaatatggagaggccatgaagaaggatgctacagcagctggtgttaatgttcacnattat

SEQ ID NO: 2527 - DNA, 409 bp, Arabidopsis thaliana
  unsure at all n locations
  Clone ID: LIB22-038-Q1-E1-E8
ggggtaacacagaccctttttccctcttactcaaggttcttctttgtcatcttgttgccgaatccacaaagaggagaataaagattcgacctttattagatattaacgactctggatttttgggtttttggagttggatccacatgggttcttatccggatggattccctgnatccatggacgagttggatttcaataangactttgatttgcctccctcctcaaaccaaaccttaggtttatgctaatgggttctatttagatgacttanatttctcatccttggatcctccagaggcatatccctcncnnnnnnnnnnnnnnnnnnnnnnnnnnnnnnnagctgtngcagganatctgtnatcatcttcatctgatgacgctggatttctctgattcctgttttgna

SEQ ID NO: 2528 - DNA, 440 bp, Arabidopsis thaliana
  unsure at all n locations
  Clone ID: LIB22-038-Q1-E1-B7
aggcatcccaatggaagagtattctccggtaatggactacggatgctgcattcaagcttggtgagcctggtacttgtctgttgtttccttaggcatcccaatggaagagtattctccggtaatggactacggaagacatcatcatcctcctgcaacatctgcagctctcatggagctaaccactcgtctggatttcttcaaggaacgacggtcacaacttatggaacagattcagaatcttgacctcaactatggttcctcttcttcttctctgcaccgatcctcttctccaccatgggaattaggctctttgagaaagctcttgtccaaaaaaatagaaaaatgtaaaagaaagtctcgtctgtgcagactcttcatgcttgtaaaaccggttcaaggttaaaccaactatatatttaccacgaaaattgatggngaaa

SEQ ID NO: 2529 - DNA, 493 bp, Arabidopsis thaliana
  unsure at all n locations
  Clone ID: LIB22-037-Q1-E1-G3
ngccggttcgggtcgcaaattccggggtaaacccanccgtccgcttcgtnggaaataatttncnctttcccttcnantattatcttanngtgagaaatcantancgatgttgganaaagagtttttcacggagtatggtgaagcaagtcaatatcagatccaagaagttgttggcaaaggaagctacggagttgttgcttctgcggaatgtccacacacgggaggcaaagtagccatcaagaagatggacaaatgtgtttgaacatgtctcagatgctattcgtatcctcagagagatcaagcttctcaggcttcttcgacatcctgatatcgtggagatcaagcatatcatgcntcctccttgtcgcaangaattcanagatatanatgttgtttttgagttgatggagtctgatcttcaccannttcttaaggtaaatgacgacctcactccncagcatcatcaagtcnnccttgtaccaacttcctcggg

SEQ ID NO: 2530 - DNA, 502 bp, Arabidopsis thaliana
  unsure at all n locations
  Clone ID: LIB22-037-Q1-E1-G4
tttagcctgccgtttcggtccganaattcccggggtcaanccacgcgtccgaaagagtctanagagacngnnagtgaggagaagaganaaagnatttcgagacaaatgggccgccgccgctgctcgtcctctccgtcancatccanaccttgggatggtgacatgtctaccgatnaatcctccaancgtcgtanttctcgacgtcatgacggcgccagttcgaccagacatcgttaacttcgttcacgcccaaatctccaacaacaagncgtcagccatacgccgtatcgaagaangccggtcaccanacctccgccgagtcctgggggaaccggacgtgccgttgtctcgtatncctcgtgttcccggtggtggtactcaccgtgctggtcaagctgcgttcggtaacatgtgtcgtggtggtccgnatgttcnctccaaccaanattctgggcgccgctgggnacngtcgtgtcaatgtcaacaatgaaagcgtcangca

SEQ ID NO: 2531 - DNA, 445 bp, Arabidopsis thaliana
  unsure at all n locations
  Clone ID: LIB22-037-Q1-E1-G5
acgcgtccggctgttcggagtcagggttgtgcttgacccgatgagaaagtgcgtgagtttgaacaatctgtctgactatgaacagacggcggagactccaaagatcgacggcgaagatagagatgaacaagatatgaacaaaaccccggccggttacgcctcggcggatgaagctcttcccatgtcttcttctaacggcaaaatcgagaggaaacgaggagttccatggactgaagaagaacacaagctgttcttgcttgggctgcagagagtcggtaaaggagattggaaaggaatatcaagaaactttgtcaagaccaagaacctctacacaagttgcnantcatgctcagaaatacttcctcaggcgaagtnatcttaaccgtcgccggccgaaagatctagcctttttgacatgactactgatacgggtcatacccaatng

SEQ ID NO: 2532 - DNA, 496 bp, Arabidopsis thaliana
  unsure at all n locations
  Clone ID: LIB22-037-Q1-E1-G6
ggcccctgtttacgcctgccggtaccggtccaaaattcncgggtcgacccacgcgtccggcttattcgattttcttcagatttgaaatggtgtcgttcaaggtctctctcgtctctacttcgcctattgatggccagaaacctgggacttctggactccgtaagaaggtgaaagtgtttaagcaaccaaattaccttgaaaattttgtccaggcaacgttcaatgctcttactacagagaaagttaaaggtgcgacacttgtggtttctggtgatggtccgttattattcagagcaagctattcagattatagtaaagatggcagcagctaatggtgttagacgtgtgtgggttggtcaaaacagtctgctatcaactcctgcagtatcacctattattcgtgaaagagtacgggctgatggatctanangccacaggagcatttancttaanagcaggtcataatcctgngtggcccaaantgaggatttccgga

SEQ ID NO: 2533 - DNA, 424 bp, Arabidopsis thaliana
  unsure at all n locations
  Clone ID: LIB22-037-Q1-E1-G9
gaagaagaataaaagacaaggcttgaacgtccggtgaaagaaagaattcagctttccgcactaaccacttctgaatcctaaccaacaagcttctccatttcgtttttcgcgtctcgattccaaattccacttaagacggcggattttctcaccgggaaattggttttagatggataggactgaggaaatcgaagaatcccccgccggaccttcttccggatccgcgaaattgaagctcggaaacagagcagatcctttccttgttgtttgtagatgcttcaagcctcgttacctctctcatcgccattctctgtgttgtccgttaacgttctcgctgccgttcgctccttccgtgacagccacgatctcttcgatggaatattccggtgttatgctgtgggggattgnctggttttggtggtcc

SEQ ID NO: 2534 - DNA, 474 bp, Arabidopsis thaliana
  unsure at all n locations
  Clone ID: LIB22-037-Q1-E1-H10
accctgccaggtattggtccggccattcncgggtcaacccacgcgtccgcggacgcgtgggctaatacgaagaagcatgtctcagcgaagggtaaagaagcttcgttagaagttcactcttctagtccaggcaaatcaaactcgtcatcttctggttccgaggcgaagaaaccaattactgaaacgccggcgacttctgacgtgaaggaggaatcgccggcgtcggtttcgcctatcatggcttcatctttgggtttgaatagaatcaagacgaggtctggcccgttgccgcaggaaagttttttcagttttgagaatgattatgcaattccggtcttaccgtgttacaagttgtcgaagttggatactggcaagaaggaagctggaagcagcaaggtagatattgggaccgctaagaagcagcaatcccgcgttgctgggcttcgggaactgggtcnaatcaaggtatcacct

SEQ ID NO: 2535 - DNA, 493 bp, Arabidopsis thaliana
  unsure at all n locations
  Clone ID: LIB22-037-Q1-E1-H2
accctgccngttaggtcgcaaattcccgggtnaacccacgcgtccgtaagaacattgaagcttgcaaggagctctccaccattactcgcacctctctcggtcccaatggaatgaataaaatggttatcaatcatttggacaaactgtttgtcacaaatgacgctgctactatagtgaatgagctcgagattcagcacccggctgctaaacttctggttttagctgctaaggctcagcaagaagaaatcggagatggagctaatctgacaatctcctttgctggtgaacttcttcaaaacgctgaggagcttatcaggatgggacttcatccgagtgagatcattagtggatatactaaagctgtcagcaaggctgttgaanatactggaacaactggntgagactggttctgagaccatggatgtacngnacangggatgaagttatttctccggatgacagcagctgttgcaaggcaggcantttgggcaag

SEQ ID NO: 2536 - DNA, 447 bp, Arabidopsis thaliana
  unsure at all n locations
  Clone ID: LIB22-037-Q1-E1-H5
acgcgtccggaaaggtctgaatattccaactctagcactgtaagttcggaaggcagtgttcaagatctaagtcagaagattagtcaatcggatgaagcatcttcaaaccatcaggaaacgggtctggtgaagctctacagtgttggtgaaagttgcaacgagaacattccggaatgtagttcatttttccttccaaaagctgccattggatttatcacaaaccttgcatcaagcctttttggttatcagggttccacttcggttataagttcacattcacgttgcaatgattctgaagatcaaagtgactctgaggtccttgttcaagaaacangcagaatcatatgacaactctgaaacaaattcaggtgaagtgggatatgaccaccangatggtcancatacctatagaaggaaaaggaattaacaagacactggnttcaactc

SEQ ID NO: 2537 - DNA, 432 bp, Arabidopsis thaliana
  unsure at all n locations
  Clone ID: LIB22-038-Q1-E1-A11
acgcgtccgctttggtttttcttcactgacaaaacccctaaaaatggccgactcattcgagctaattgtaacccgaaaagaacctgttctcgtctctccagcctccgaaactccaaaaggtctccattatctctcaaatctcgatcaaaacatcgccatcattgtcaaaacattctactacttcaaatcaaactcaagatccaacgaagaatcctatgaagtcatcaagaagtcactctccgaggttctcgttcactactatcctgccgcagggagactcacgatcagtcctgaaggaaagatcgctgtggattgcaccggagaaggagttgtaagtggtggaagctgaggccaattgtgggatagagaagatanagaangntatntcgggagattgatcaggggagaggctcggtgaaaaggtgggtttgg

SEQ ID NO: 2538 - DNA, 359 bp, Arabidopsis thaliana
  unsure at all n locations
  Clone ID: LIB22-038-Q1-E1-A12
tcccacgctctctcctcttcctcggatcttccatcttctctctaacagcaaatgactcagtcgtaaccttctacactttctctctctccaatttttcacattttatttttggcttccgagctatgaccccagtgcgtctgcttcgtctcgaccgctgatcggaataaaaccancgccgagtttcctaggtctatgtgtattgtaatatcctccggaaatggcagctttcctcgtcatgtttatcttcacgatngctctgttcngtcgcactccnttgggttttcttcaagtctctcccttgggattctcnggcatagtgntggaataantctcagttttcagtttgntggatggaactg

SEQ ID NO: 2539 - DNA, 488 bp, Arabidopsis thaliana
  unsure at all n locations
  Clone ID: LIB22-038-Q1-E1-A8
tacgcctgcccggnaaccggtccanaaattcccgggtcgacccacgcgtccggttttttcttgcattttccccagaattccttcacattctctccttttcctctttttaattcctcaccacctcaaattcttcataaacaaatccacttctgcatggttgggagaatctgttagagaatttttgttgttgttgggttcagatttggaaaatttcctttttttcgagtttcttctgaattattcatcgtggagattctcggatcgggaagggctgcgagaggtggttttcacggcggggatagattcatcttctgtcttctcctgagggggtagccgaggctccggcctcggcggtttttaaacccctacctttacaaattctgggaaattagaaaaaaaaaggtttgatttttcagtttttgctctgttcttctctcgaaagtttttgttttgttcgagaatttctggtaaagtganattgttgatcg

SEQ ID NO: 2540 - DNA, 482 bp, Arabidopsis thaliana
  unsure at all n locations
  Clone ID: LIB22-038-Q1-E1-B4
gttacgcctgcctgtaccgggccgaaaattcccggatcgacccacgcgtccggataaccttcgtttttcaggagtttctttctatatttcttcatcgatttcgttcagtctttgagagaggttcgtcgacgtattatcgtcggaaaaaagctatgagaatctatttctcatagctccagtaatgtgaaatcgagacaacgctttatcttcagaatctgctaatccatgggagattcaatcacattccggtagatttttttccagtttctggggaagtcaaaaatttccagggtttccgatttttgttttccttttccaaatgttctcgaatcagtttgttctcttcttcnctcttctcctatgtctcccatttgttttcttctttgtagcgccacatgtgtttccttctcctcctgggtgaatctttaatcccaatctccgatgagattgatgaccgggagtttattcatcgncgctgcctg

SEQ ID NO: 2541 - DNA, 492 bp, Arabidopsis thaliana
  unsure at all n locations
  Clone ID: LIB22-038-Q1-E1-B6
tacgccnggcccggtaccggtccaaaaattcccgggtcgacccacgcgtccggaaatttggtatgggcaacttctaagcacgacgtgtatcttatgtcaaattttctggttacacattattcttcnctancgtcnggaaagcatgaagttctcantgtccgtggtcatgttgcgccatctgatgaaacatcctggaagttnacttganggatttacgcagactcaagtaagtacacttgcagtaaaagatgactttctggttgctggcgggtttcaaggagaacttatttgcaagcatcttgatagaccgggtgtcagcttttgctctcgtatgacttatgatgataatgctataaccaatgctattgagatctacaacanacccagtggtgcacttcattttactgcgtcaaataatgactgtggagttagagactttgacatgggagaagataccagcttgttaagcatttccgttttccttgggcagtg

SEQ ID NO: 2542 - DNA, 573 bp, Arabidopsis thaliana
  unsure at all n locations
  Clone ID: LIB22-037-Q1-E1-G2
gttacgcctgcccgtntcggtccganaattcccggggtcaaacccaacgcgtccgaataagagcttccaatcctcctcaaatcttccttcnnacgantttttcctcctaaggtttaagagcttttgattcccccgattaaatttccgccgaatttgttgnancnanggatctngaaantangaatgggtggtgaaagcaagattcganggcagccggctgactggctgaaaggcgtancctggttgcccgtngaacggtcangattgctccaantggcaacgaaatttaagtgtgaacgacgaacctcngattccacggtgggangtccttcaaangagttaattgcgncagaaacaacgatgtgccnggcaaatcagcnagcgtttgattacaaagggacgtaatcctcaaaagacgaatnagactcctcctcaagcctaagggtttgcaagggctgattaacaccgttcaatatgggtccgaggtttttgtngccttccttcgccnttctgctncccgcctggcaaaatgctgggaaaaccaaaaccaantggcgccctcaaagcgggttg

SEQ ID NO: 2543 - DNA, 442 bp, Arabidopsis thaliana
  unsure at all n locations
  Clone ID: LIB22-035-Q1-E1-E7
acgcgtccgagatattaaaaaacccaaacttttatttcccccaatcaaaaaccctaatttcttcttatcttgtttggatttttcatttcttctgtttgattttattccacaaacacaataaaaaagtttgcattttttcctcttctaagctcgtttcagatcttcgatttcaccatttttataaactattatgcgaacttagttttgttctttgtgattttgtatgacaatgatcttcttctctaagcttaatcgctccatttctcgttcaaagggatttttgtacggtggtggtgttagatcggcggcaaggctacttacttcgccgggacttgaggcggcgtctgtgaatgaagtggaaggtggattaggggtttataangaagacactttgcctccttaacttcacggaaaggtttaagcaataaaggattggatgggg

SEQ ID NO: 2544 - DNA, 420 bp, Arabidopsis thaliana
  Clone ID: LIB22-035-Q1-E1-E9
acgcgtccgcccacgcgtccggggaaagagacaactccaattcaaagctctgattttttccaccaatccccattttttcccttttacaattcttaagctagttttatacttttcttcttcctttcatttgggttaagagaagccatggataccgagtttctccgaaccctagatcgtcagattcttttgggtgtcttcgttgctttcgtcgccgttggtgctggtgctgcttattttcttacatcctccaagaaacgcagagtgtgtttggatccaagagaatttcaaggagttcaagcttgttaagagacatcaagcttagtcacaatgtggccaagttcgtttttgaactcccaacttctacttctgtgttgggtcttcccattggacaacacatcagttgcaaggggaaaggatggg

SEQ ID NO: 2545 - DNA, 423 bp, Arabidopsis thaliana
  unsure at all n locations
  Clone ID: LIB22-035-Q1-E1-F11
gacgcgtgggcaatctcttcctttctcgntccttctcttcttcgatcagacgattcaatcgcttctcactcaaaccacttcgctccttcgcatcnatgtcttcttcntcccccgacgctgctcagactcctctaaccaccgctccttatggctcctggaaatctccaatcaccgccgacatcgtttccggagcttcaaagcgtcttggcggcaccgccgtcgattctcatggccgtctcgtcttgctcgagtcncgccctaacgaatccgggagaggagttttggtgctacaaggagaaanatcaattgatattactccaaaagacttcgctgtgagaactttaacacaaggaatacggtggtgggtgctttccagatttcatcaagatgatacacttgtgttctctanttacaagggattag

SEQ ID NO: 2546 - DNA, 444 bp, Arabidopsis thaliana
  unsure at all n locations
  Clone ID: LIB22-035-Q1-E1-F2
acgcgtccggagcttccgatgatttctacccaagagatcctgcttctcacaccatccacattgcatcngttgcatacaacagccttttccttggagagttcatgcaacctgactgggatatgttccatantctacacccaactgcagagtaccatgctgcagcgcgtgcagtgggtggatgcgcaatctatgtcagtgataagccaggcaaccacaactttgatctattgaggaagctggttcttcctgatggctcagttcttcgggctaagctcccgggtangcctacccgtgactgcttattcgctgatccagctagaagatggaatcagcttgctcaagatctgggaacatgaataagtttactgggtattgttggcggtantcaantgtcaaggtgctggttggtgcaangaaacnataataacaagattcatgatacnt

SEQ ID NO: 2547 - DNA, 498 bp, Arabidopsis thaliana
  unsure at all n locations
  Clone ID: LIB22-035-Q1-E1-F3
ctgttacgcctgcccgtacgcgtccaaaaattccanggtcnacccacgcgtccgggaaggatctgtacggtaacattgtgctcagtggtggaaccactatgttctcaggtatcgctgaccgtatgagcaangaaancacagcacttgcaccaagcagcatgaanattaaggtcgttgcaccacctgaaaggaagtacagtgtctggatcngtggttccantcttgcttccctcagcacattccancagatgtggatcnccaaggccgagtatgatgaggcaggtccannaancnttcacanaaaatgtttctaagctctcaagatcaaaggcttaaaaagctggggttttatgaatgggatcaaagtttcttttttttcttttatattgtgcttctccatttgtntgtttcatttccccnttntgttttccnttccaatgangcacntgtggtttgacaaactcctccgggtttttacntacctccgcctttccaaaa

SEQ ID NO: 2548 - DNA, 479 bp, Arabidopsis thaliana
  unsure at all n locations
  Clone ID: LIB22-035-Q1-E1-F4
cgtagcctccaaaattccaaggtcgacccacncgtccggctctcgagagacgaannnnnnnnnnnnnnnnnnnnnnnnnnnnnnnnnnnnnnnnnnnnnnnnnnnnnnnnaagatcacactacctcgcacaacaatggagttctggggtgttgangttaagaatggcaaaccacttcacctagatcctgggctagacaggctcgtgcacatctctcaggttgctttgggagagagtaagaacaatgtanccganccaatccagctttacgtgactgttggatcggataagcttctcattggaacgctatctcatgagaagtttcctcaagctgtctacggagattgtcttggaaaggaactttgcgcngtctcatacttggaaagaatgggaacgttttcctctctggttacaanagttggatggcatctgattcccgaagcctgaaggatttgattgatgattaacttnaggctgctg

SEQ ID NO: 2549 - DNA, 415 bp, Arabidopsis thaliana
  unsure at all n locations
  Clone ID: LIB22-035-Q1-E1-F5
acgcgtccgcctcaacaaccatcttcttcgttatattccttgagataacaacaaagcatcgttcttcacctttaccnnnnnnnnnnnnnnnnnnnnnnnnnnnnnnnnnnnnnnnntttataggatcaatcgatcaaggaaccaccagcaccagattcatcatttacgaccacgatgctcgtcctgttgcttctcatcaagtcgagttcactcagttctatcccgaagctggatgggtggaacacgatccaatggagatactggaaagtgtggaaagtgtgcattgcaaaggctctcgacaaagccactgccgatggacacaacgtcgacggtggcttgaaggccattgggcttacagatcagagagatactactgttgtttgggagcaaatccactgggcttcctctccaaaan

SEQ ID NO: 2550 - DNA, 435 bp, Arabidopsis thaliana
  unsure at all n locations
  Clone ID: LIB22-035-Q1-E1-F6
gttcgctagtccttgtgttattggtcatgagattactggtgaanttgttgaacatggtccacttactgatcacaagatcattaatagatttccaatcgggtctcgtgtagttggagctttcattatgccttgtggaacctgttcttattgtgctaagggccatgatgatctatgtgaanacttctttgcttacaacaganccaagggaactctttacgatggcgaaactcgtctctttttgcgacatgatgattcaccagtgtatatgtatagtatgggagggatggctgantactgtgttacaccagctcatggtttanctcctctaccaaagtccttgccctactctgaatctgccattctgggatttgctgtttttacaagcatatggtgctatggctcatgctgctgaagatccgtcctggagattcattg

SEQ ID NO: 2551 - DNA, 448 bp, Arabidopsis thaliana
  unsure at all n locations
  Clone ID: LIB22-035-Q1-E1-F7
attcccgggtcnacccacgcgtccgcangatcagaatgggatttctgtttttatcaaggcagtgtggtcgaacatcttgatggtcacactgatataatccacaaacagctatacagcnattggttaccttgggggatgangagaanagatttttcgctacggcgttactggagaagggaagacgatggcacatatgttattctctatcatnctgtatttcacangaagtgtccacctcaagaaaggctatgtccgtgcgtgccttaaaactggcggttatgtgatttcncccataggacaaacgganaacaatcanttgtgaancacatgcntgctgttgattggaagtcctggagatcttatgtgaanccntccttacctagatctattaccgtgaaaatgccntggaacaanttctgccctgatacaacgttttaagggcanaaca

SEQ ID NO: 2552 - DNA, 449 bp, Arabidopsis thaliana
  unsure at all n locations
  Clone ID: LIB22-035-Q1-E1-F8
acgcgtccggtcagacacaaagatatttacatttttgcagacaataatgggtactttggtcaacggtactattccggcgatgaagtgtcccaagaatgtggcgatgatgaagacaacgtctaacggagtgttcgatggagagagtccattanatttcgcttttcctcttgtcattcttcagatttgccttgtcgtcgccgtcactcgctctttggccttccttctccgtcccatgagacaaccacgtgttgtcgccgagatcattggcgggattcttcttggccccgtcggctctcggtagaatcacgtcgtacaagaattcaattttcccggcgagaagtctaacggtgctcgacactctagcaaacctcggnctccttctcttcnntttcctcgtcgggactccgagatcgatctgacatctctccgacgtaccggcaaaaaagcga

SEQ ID NO: 2553 - DNA, 478 bp, Arabidopsis thaliana
  unsure at all n locations
  Clone ID: LIB22-035-Q1-E1-F9
ctgtttacgcctgnccgtaccggtccnaaaattcccgggtccacccacgcgtccgcnggttccaaggaaaatggttctgaggtttttgttaagacggagaagaaagatgagacagagcatcatcatcatcatagctatgctcctcctcccaacagattaactggtaagaaaagccattggcgcgacgaagatgaagatttcgttgaagaaagaagtaacaagcaatcaagctgtttatgttgaggaaagcgagctttctgaaatgtttgataagatcttggtatgtggccctgggaaacctgtatgcattcttaaccagaactttcctacagaatccgctaaagtcgtgaccgcacagtcaaatggagcaaagattcgtgggaagaaatcaacttctactaatcataagtaacgattctaagaaagaaactgctgatttgaggactcctttggtgttaagtgcacaagctgtacagtg

SEQ ID NO: 2554 - DNA, 501 bp, Arabidopsis thaliana
  unsure at all n locations
  Clone ID: LIB22-035-Q1-E1-G1
antgttagcctgccgtagcntccaaaattccanggtcnacccacgcgtccgcaaaaaacctcaaaataaaaaaatgagaactctcttaccttcccatactccggcaacggtaacaacggcggcgagaagaagacacgtcatacattgcgccggtaagagatctgactctttctccattaattccagtagctccgattggcaaagctcctgcgccattctctcaagcaaagttaactcacaagaacaatctgaatccttancttccaattccaatggatcatcatcctaccacgtttccgccgtcaacggtcacaacaacggcgccggagtnctcaagatttgaatctaagttccattcaacaacaaccantcgattcaatcgaagaagcctttaagtatttcaagatntatctccaagctccgatgcatgggatntaacctcccgtgtagcctaatcaangtgttnccgggagcctaatcccaaaaccgccgctgggtaaa

SEQ ID NO: 2555 - DNA, 418 bp, Arabidopsis thaliana
  unsure at all n locations
  Clone ID: LIB22-035-Q1-E1-G11
agatcgctctgttttcttttgttttctgatctctctttagtctttgaatgattggtgaagagtgttttctgggaacttgccttaagctatagctagaaagatacacaaagatatatccatctcaaagctcctgatgtgaagagtgtttgttctgtttttctaatccaagagatattgtccggaactgttcttcagtgtttggtgtcttagaagaaagaaacacttttggagcattatgcataggagtttctgaagatttcaagctaattactatcattaatcagctatgaagtttatgaaacttggatctcgtcctgacactttctacacttctgaagatttaagatgtgtgtcctctgaagtttccagtgattttactantgaagtgtcanggaagcaggtaacctcctcaacaagn

SEQ ID NO: 2556 - DNA, 496 bp, Arabidopsis thaliana
  unsure at all n locations
  Clone ID: LIB22-035-Q1-E1-G2
ctgttacgcctgnccgtaggcctccaaaattcnaaaggtcgacccacncgtccgcccacgcgtccggttgagatgtctatgatcgatgagccgttgtacccaatcgccgtacttatagacgagttaaaaaacgatgatattcagctaagattgaattccatcagaaggctttctacgatcgctcgtgctcttggggaagagaggactagaaaggaattgatccctttccttagcgaaaacaatgacgatgatgatgangttttattagcaatggctgaagaattgggtgtgtttattccttatgttggtggtgttgagtatgcacatgttcttcntccacctttggaaactctttcgactgtcgaanaaacttgtgttaggggagaaagctgttgagtcgctttgtagagttgggctctcanatgangggacattgncctgggttgatcatttccatttcgtnanttaagcgacttgccgctggtgaatggttcan

SEQ ID NO: 2557 - DNA, 438 bp, Arabidopsis thaliana
  unsure at all n locations
  Clone ID: LIB22-035-Q1-E1-E6
acgcgtccgcccacgcgtccgcaaatctcaaatttgtttggagactctcaaatgtatccttctctcgacgatgatttcgtctctgatttgttttgcttcgatcaaagcaatggagcagaacttgatgattacacacagtttggtgtaaatttgcagactgatcaagaggatacctttccagattttgtgtcatatggtgtgaatttgcagcaggagccagatgaagtctttagtattggagcttctcaattggatttgtcctcgtataatggaagttttgtcgctagagccagaacaggtggggcaacaagattgnnnnnnnnnnnnnnnnnnnnnnnnnnnnnnnnnnnnnnnnnnnnnnnnnnnnnnnnnnnnnnnnnnnnnnnnnnnnnnnaagatgacgattgctccanaaagcgggcaaaggactggatcttt

SEQ ID NO: 2558 - DNA, 424 bp, Arabidopsis thaliana
  unsure at all n locations
  Clone ID: LIB22-035-Q1-E1-C3
ttctccggctaaatcatgtttcgtcgtttaantctccggnaagcanccgccgtcnccgcggaatcgaagattgcttgtcancatactgttcatggattcnaacagcgaagaggattacacagtaggaatgagaaggcaatggantatgtagccaaangatggancgcgattaaanaantanagagagttatcgattactgtgaactcaatgatcgtcgtcttattcctctcctcaggggagctaaagagaactttgaacttgctctggaagctgaataatttgnacactcatgctangtattggctttccaagttgcacctgaagtaccatgttcctggagcttgtaaagctgtgggaactgctttgcttgtcgaaactgcanacatgggtaatgcagatgctcaatatgagctaaggtgtcnt

SEQ ID NO: 2559 - DNA, 488 bp, Arabidopsis thaliana
  unsure at all n locations
  Clone ID: LIB22-035-Q1-E1-C5
cgccgttcgtacggcctccanaattcccaaggtcnacccacgcgtccgaaaaaactttggcctctccggtgactcttccttcttctgctaccgaacttttcgcttccttctctgaccaatttttttcaacaacctctcttcttcaacaaattctcttctcaaatcctccaaatcctctctgccatgaacgctactttcttcctcctctccancaccgtctccaccgtcacaatcancggattcaacggtctcgatttctcatcttagaaccacatgcatcccttctgttgcgttacaactgtctccgatcactctccttcgatgcctccgttacctgaaccacaaccgcctctaccgaattacgccgccgattttggttcggcgagatccgaaccgattataactcgatntgcttctcaaagttataatcattcangtcaattcaatancaatcttaatcaaaaggctctcgtttaaacaatcaacag

SEQ ID NO: 2560 - DNA, 435 bp, Arabidopsis thaliana
  unsure at all n locations
  Clone ID: LIB22-035-Q1-E1-C6
acccaattttttacgangaatcagagaaaagtcgaaacctttttccaataaaaagaaaaatcgaaactttccttggggtttatcactttcctccttcgattccattttctgatcctttttctcgctgttgctggagatggcggaagagaggagcttgaacggcgaagcgactggtcaggatgatgagagtttcttcgattctgatcagcaaggcgacgacggcaagtccacggaactcaatcagaagatcggagacctcgagtctcagaatcaaggaactggccagagataacgatgctatcaatcgtaaaattgagagcttgacggcggagattgaggagttgagaggagccgaatccaaggccaagcgtaaggatgggtgagatggagcgagagattgacaagtccgatgaagaaaagaaaggtcctgaancc

SEQ ID NO: 2561 - DNA, 470 bp, Arabidopsis thaliana
  unsure at all n locations
  Clone ID: LIB22-035-Q1-E1-D1
gtnaaggtccaaggtccacgnncccgtccgcnttcaaaaacacattcttggtctttcttgaattactcaagaattttcttctctcttcttctctaaaaaacccaaattcaaaaatctgtctaaatcttcccaactcttggtggggttcttgaaagtaaaaaactttgttgaaaaaaagaaatgaagcaaattgttataacagctcttgttttactacaagcttatgttcttcatcaatccacatgtgttatgtcccttactacacaagaannnnnnnnnnnnnnnnnnnnnnnnnnnnnnnnnnnnnnnnnnnnnngattatcaacagagagagaaggaattgcataaacaagagagtaacaacatgagactggttatttcactagcagctacattttccttagttggtataatcttactttgctctctgctttaatggttttgccataagagaaagaaacctcaagagc

SEQ ID NO: 2562 - DNA, 414 bp, Arabidopsis thaliana
  unsure at all n locations
  Clone ID: LIB22-035-Q1-E1-D11
tttctctcttccataaaacccaaaagaaactaggaagaggagtaaataatatttgttttaaagaaatgattctccacaaaatggcgttcttggccgttattctcttcttcttgataagcagcagcagcgtttgcgttcatagccgtgaaacgtttgcttgcgatacaaaggacgcagcaacagctacactgagattctgccagctttcagttcctataccggagagagtcagagatttgatcggacggttgacattggccgagaaagtgagcttgttagggaacactgcggcggcgataccacgtctaggaatcaaagggtacgagtggtggtcggaggctttacacggcgtttcaaatgtgggacccggtactaagttcggtggggtttaccctgcanccaccagtttccctc

SEQ ID NO: 2563 - DNA, 436 bp, Arabidopsis thaliana
  unsure at all n locations
  Clone ID: LIB22-035-Q1-E1-D12
acgcgtccgcncgattaagcaaaaccctagatttattctactcttcgaagtcgatttcaatggaaggttcctcgtcagccatcgcgaggaagacatgggagctagagaacaacattctcccagtggaaccaaccgattcagcctccgacagtatattccactacgacgacgcttcacaagccanaatccagcaggagaagccatgggcctccgatcctaactacttcaagcgcgttcacatctcagcccttgctcttctcaagatggtggttcacgctcgctccggtggcacaatcgagatcatgggtcttatgcagggtaaaaccgacggtgatacaatcatcgttatggatgcttttgctttgcctgttgaaggtactgagactagggttaatgctcagtctgatgcctaagaagtataatgggtggaantact

SEQ ID NO: 2564 - DNA, 497 bp, Arabidopsis thaliana
  unsure at all n locations
  Clone ID: LIB22-035-Q1-E1-D2
ttacgccttccngtagccgtccaaaattcaagggtcgacgnacgcgtccgaaaganattaaatacacacaatgaccaaagaagtttgctccaacattggactttggttattgctcacgttacttattggtaactatgtcgtcaatcttgaagcctcgcaccatgtctacaagagacttacccaaagcactaacaccaaatctccttccgtaaaccagccctaccggaccggtttccatttccaaccccccaaaaattggatgaacgatcctaatgggcctatgatatacaaaggaatatatcatcttttctaccaatggaacccgaaaggaagccgtgtggggtaacatcgtgtgggctcattccacgtcaacagacttaatcaattgggatccacatcctccagctatcttcccatcctgcaccttnngatatcaacgggtgctggtcccgggttcagctaactaatctccctaatgggaaaacnggttatcctcc

SEQ ID NO: 2565 - DNA, 507 bp, Arabidopsis thaliana
  unsure at all n locations
  Clone ID: LIB22-035-Q1-E1-D4
aactgtctagccgctcgtagcctccanaaattccanggtccacccacgcgtccgaaagctaagagcaacaaactaaagattttttaagaaaatggcagcttctaagcgactagttgtcccttgcttgttcttagttttgttgtttgctcaagccaattcgcaaggtttgaaagtaggtttctacagcaaaacatgcccacaactcgagggtatagttaaaaaggtcgtgttcgatgcgatgaacaaagcaccaacacttggtgctcctttgcttagaatgttcttccacgactgcttcgttcggggatgtgacngatnagttttgttagataaaccaaacaatcaaggtgagaagaatgcaagttcctaacctaagtcctccaaggtttggcatcatagaccattccaangcngctcctaaaaaaagtgtgtcccggggaattggtttcctgccccggaaancctgggaacttgtccccaaaaaaacccaatnggttgcactttaaa

SEQ ID NO: 2566 - DNA, 485 bp, Arabidopsis thaliana
  unsure at all n locations
  Clone ID: LIB22-035-Q1-E1-D6
gccgnccggtaacggtccanaaattcccgggtcgacccacgcgtccgnccacgcgtccgcccacgcgtccgcccacgcgtccgctttgatgacgttcacccaaacaaggcggatgtgataatggccttggcaggatcaagcggaggctcatggnctacgggtttgtctcanaaaccgaagtcgaagaacaacacaagtgacggtccatacaagctaggccaaatgtatgaaggaggcagctctaaggaaacaccacaaatgcccccggaatttcgtgcaaggccgagtcatcaacctacctccagtgcctgtcaccggatctttacacaaccaggtagagagcatcaaggaagcatcatctcaaggggacgagatatcagagatccggttcacagatcagattctgaaaaagaagncacatgattaaagtctgaatatgagagacgatgagtgtgggctgttcctccaaattgtggtttttttgt

SEQ ID NO: 2567 - DNA, 484 bp, Arabidopsis thaliana
  unsure at all n locations
  Clone ID: LIB22-035-Q1-E1-E1
gtangcctccgaaaattccaaggtccacccacgcgtccggttttcatgttactggtcaggcatataacttaaataccttgacagaggttcaaaacaataccctcaaggaccttgcagacttgggattagtcaagcttcaacagggaaggaaagacagttggtttattcctactaaactggctacaaatttatcagtcagtctggcagattcatcagcgcgaaaagagggatttgtcgtgatggaaacaaacttcacaatgtatgcgtactccacatctaagttacagtgtgaaattttacgactatttgcgaggataagagtaccaacttccaaaccttattgcttgtgccattacaaaggaaagtttgtacaatgcatttgacaatggcatcacatcagatnagattataactttcctccaagcaagaattcctcatccacgatgttgccgatngggtcccatccnattccagaaaaatgtcc

SEQ ID NO: 2568 - DNA, 474 bp, Arabidopsis thaliana
  unsure at all n locations
  Clone ID: LIB22-035-Q1-E1-E11
gttacgcctgccgtagccgtccgaaaattcaagggtcnacccacgcgtccgcnttttttgataggactactgggaaggaacctggagaagcaagctccaccgccactacggcggagactgtggaggagagatcaggctccggaagatggcggcggccgagagatttaaagggtggcggcgatatcgaagggattccacaggttttgggtcgtttggtttcgaatggttcaagtaagattgcatgtctttacacacagcaaggcaagaaagggactaaccaagacgccatgctcgtctttgagaacttttgttcgagagacgatacagtgttttgtggtgtattcgatggacatggaccatttggtcatatggttgccaagaaagtccgaagatacattgcccttcacactcttaanccagttgaaatganctcaagagtcagatnaaagcaacttagtttggtgccaaagggtt

SEQ ID NO: 2569 - DNA, 496 bp, Arabidopsis thaliana
  unsure at all n locations
  Clone ID: LIB22-035-Q1-E1-E2
ctgttaccctgncgtagccctcnaaaatcaanggtcnaccnncccntccgnacangcntccgcncacggcgtccgcatttttctctcttccataanacccaaaagaaactaggaagaggagtanataatatttgttttaaagaaatgattctccacaaaatggcgttcttggccgttattctcttcttcttgataagcancagcagcgtttgcgttcatagccgtgaaacgtttgcttgcgatacaaaggacgcagcancagctacactgagattctgccagctttcagttcctataccggagagagtcatagatttgatcggacggttgacattggccgagaaagtgagcttgttagggaacactgcggcggcgataccacgtctaggaatcaaaggggtacgaagtggtggtcngangctttacacggcgtttcaaatgtgggaaccggtactaagttccggtgggggttaacctgcanccaacaattttcctc

SEQ ID NO: 2570 - DNA, 493 bp, Arabidopsis thaliana
  unsure at all n locations
  Clone ID: LIB22-035-Q1-E1-E5
aactgttcngccggccggtaacggtccaaaattcccgggtcgacccacgcgtccgctcttctccaattcgtcaactatctcctcctggctcctacggtcacggacttttctgttccagccaaggatatggatacnaattccttgatgctcattgataacaatggctcttttgagatcgatgaccaatcccatgtccatgtcgatgcctcccatacccttgaacctgtcaccctacccaccaagcgcaggaggaagaantctgacgtctggaaccacttcactgttgaaactgttagccctggatctgccaaagcttgctgcaancactggccgcaaatccttcgcctacattaatggccaaaagttggcaggaactagccatcttaaacgtcacattcaactgggtatttgtcccatgaaccgagacgacaagcagcaccctccgcacaaatccgntactcccaacancaacaatgattctcccnagaaacgc

SEQ ID NO: 2571 - DNA, 417 bp, Arabidopsis thaliana
  Clone ID: LIB22-035-Q1-E1-B9
cttcttcttctctctctctccctcttcctctgtcacacagatattgacaaaaacaaaaagaatgagtcaatcaaatcgtgtcagagacgaagttacattacctttactccaaaaaacctctcatctgaaaaatcactcctctgttctctctgttttcctaaatgaagcaatctcaatctgcaaaatctcttacccattggtcctcactggtctcttcctctacgttcgctccttcgtctctctgtctttcctcggtggtctcggtgacgccactctcgccggtggctccctcgccgccgcatttgcaaacatcaccggatactctcttttctccggtttaaccatgggcgttgagtctatctgttcacaagcctttggagccagacgctataactacgtctgcgcgagtgtcaagaa

SEQ ID NO: 2572 - DNA, 456 bp, Arabidopsis thaliana
  unsure at all n locations
  Clone ID: LIB22-034-Q1-E2-H2
tacgcatgcctgtngcggtccanggtcgacccacgcgtccgcanaagaagaatcgaaatccggagattattccaactcgtggagactatgcacggttacgcaagtcgaagaactcaagattcggatccgaatgttcccaatctgggcttctggtatcattttctcagctgtatacgcacaaatgtccacaatgtttgttcaacaaggccgagccatgaactgcaaaattggatcattccagcttcctcctgcagcactcgggacattcgacacagcaagcgtcatcatctgggtgccgctctacgaccggttcatcgttcccttagcaagaaagttcacanggagtanacaaaggattcactgagatacaaanaatgggaattggnccgtttgnccccgttctccgtatggcanctgcaactatccgtccaaaatcatccgtctccanaagggcaa

SEQ ID NO: 2573 - DNA, 503 bp, Arabidopsis thaliana
  unsure at all n locations
  Clone ID: LIB22-034-Q1-E2-H3
tgttacgccttcngtagcgtccgaaattccagggtcgacccacgcgtcnnnnnnnnnnnnnnnnnnnnnnnnnnnnnnnnnnnnnnnnnnnnnnnnnnnnnnnnnnnnnnncgccattaccagagctcaacgagctctcactttctttacgcacacttgttggaacgaaatatattcatagagaagaagaatctcgaaactcttgaatctaaaacaactcggagactctgttttccctttccggagatcagatcggatcaagatgcagacaaccaacggctcagattcgacgttggcaacttnnnnnnnnnnnnnnnnnnnnnnnnnnnnnnnnnnnnnnnnnnnnnnnnnnnnnnnnnnnnnnnnnnnnnnnnnnnnnnnnnnnnnnnnnnnnnnnnnnnnnnnnnnnnnggggatgatgatgatgcagcagcaacaagatgctggtgtntcctcaataataagttccgttaaatcaaaggccctaacaacaagcatcatcc

SEQ ID NO: 2574 - DNA, 440 bp, Arabidopsis thaliana
  unsure at all n locations
  Clone ID: LIB22-034-Q1-E2-H5
tcatcctcctcgtctcttctcgttagctctctcaatgaggagcccgatttagggtttcctccattggttatatcaattcgatcatctccacaaagctctcgaagactctttcggtgatctcatcttcttcttcttgtttagcctcctggaggttactttgtttgttactagttccaaaacatgccgaaagagaggaaagaacggtccgtatctcttgataagtataaacgatcgccactgtgttgtgaggcaagccttgctttgaagccgagtgagaaacaagttaaggaatgggaaaaggctcgttgtcctgtttgtatggaacatcctcacaatgggaatcctcccanttgttcctcctaagaaaatgggttgtccaacntacaatgtncgaaactaancaaccgggaatccnaactggttccattaagtttcncaaa

SEQ ID NO: 2575 - DNA, 442 bp, Arabidopsis thaliana
  unsure at all n locations
  Clone ID: LIB22-034-Q1-E2-H7
gcncacgcgtccgcccacgcgtccgcccacgcgtccgcacaaaacaaaaaatattaagaaagtgatattatgacttgcagccaaacactcggaaacaacaacaccaacaaataccatatctgcgaggagatcggccgtggccgtttcggcaccgtctctcgcgtctacgctccggccaccggtgatttcttcgcttgcaaaaccatcgacaaagcctctctctccgacgaccttgaccgtgcctgtctcgacaacgagcctaagctcatggctctcttgtcctatcaccctaacatcgttcaaatccatgatttcatcgacactgattcgactctctccatcttcatggagctcgtcnatccctcngtttcgatntacgacgtctcgtctcttcnggaacttctttganctcanacggngtcttcgctaaanagattctcaa

SEQ ID NO: 2576 - DNA, 452 bp, Arabidopsis thaliana
  unsure at all n locations
  Clone ID: LIB22-035-Q1-E1-A1
acgcgtccgcncaccaatccatttcttctcttcttctttgcgttttttgtttggaactgaatcgaaaaagatggatgctaatttcgagatgcctccagtcggtggaatgaacgacgacgacgacatggatttcggtgacggcgcctcgtttcttaaagtcggtgaagagaaagagatccaacaaggtttgaagaagaagcttcttaaagaaggtgaaggatatgaaactcctgagaatggcgatgaagttgaagtgcattacactggaactttgcttgatgggacgaaagtttgattcgagtcgtgatagagcaacgcctttcaaattcactcttggacaaggtcaagttattaaangatgggatattggtattaagacgatganngaaaanggtgaaaacgctgtnttcactaaacctgcggagnctagnatatggggaanccgggtcccc

SEQ ID NO: 2577 - DNA, 439 bp, Arabidopsis thaliana
  unsure at all n locations
  Clone ID: LIB22-035-Q1-E1-A2
acgcgtccgaagaagggttggaatcagtttgtgggaaataagttcacgagcagtgcttctgcatcgacctgttcagctaaatcggtcaccactgatctgaatcttagggtaagttcagtcaccacaggatccggtctcaagaagcatttggatagcaaagatttttctcagccacaatctgtgtcctcctattcctttgataacccaagggacctcaacgcagagagtttcaagattatttacanaagattaaccgatatggtttcaggacaagatgaggctgctagagttatcagctgtgcactgtcacaaccgcctaagagtgtcactcgaanagatgtttggcttaatttggttgggtcctgatactgtangaaagagaagaatgtcnccttgtccttgctgaaaatgtgttacaaaagcgaacacanattttatg

SEQ ID NO: 2578 - DNA, 475 bp, Arabidopsis thaliana
  unsure at all n locations
  Clone ID: LIB22-035-Q1-E1-A4
tagncgtccagaattccagggtcnacccacgcgtccggnnnnnnnnnnnnnnnnnnnnnnnnnnnnnnnnnnnnnnnnnnnnnnnnnnnnnnnnnnnnnnnnntaagacagctttgaatctacagacaacttcatttttaccaaaatttctgtttcttcaaaggattgaactttcatatttctctcttgcccagttctgagttattgcaatcagaagttgtaaacacttttcctgtctctttctgctacccgaatttatcttctttagcgtctgtctctttcaagcggacgtgtcttgtctctttaaggtaatttncaagacttaaacttgaagtatctctggccttcttctgctgtctgtttcatttttgaaatcgatttggagattaagatctgactcagcttcgactaaaagncaattgctttcgcctttggattgttgattccctaatggatgttcttaaccccttaaaaa

SEQ ID NO: 2579 - DNA, 487 bp, Arabidopsis thaliana
  unsure at all n locations
  Clone ID: LIB22-035-Q1-E1-A5
gtcnggccccaaaggtccanagttcccgggtccacccacacgtccgnaaatattcatcgcaattcgtatcggtttaaagtaaaaaagcaatgggaggtggtaaagacaagcatcatgatgagcaagagaaaggatttcatggttttccaggaggtggacattacccacctgctcaaggaggttaccctcctcaaggttacccaccacaacaagggtatcctccagctggaggctacccacctgccggatatcctcctggtgcttaccctgctgcgcccggtggttatcctcctgcacctggaggttaccctcctgctgggctatcctgcacctggagctcaccattcaggacattctggtggtggactcgggaggcatgatagcaggtgcagctggtgcagccgcagcagcttatncgagctcaccatgttggtcacgcctctcaaaaanccttacgggcatgctgttanggacatggaaggggtat

SEQ ID NO: 2580 - DNA, 491 bp, Arabidopsis thaliana
  unsure at all n locations
  Clone ID: LIB22-035-Q1-E1-A8
naactgttccgcctgccggtaanggtccaaaattcccgggtcgacccacgcgtccgggcattanagccctttgcaggaacttggccagtgtatcagcatgactgagttgcagctcgatcatactgcagctacatcaaatgtcaatcctggagatcatgttctagggatctctcctacgtcatctctctctccaggaactcagagtctcctgcctcttattgaggctttctttgttctctgtgagaagattcaaactccgtcaatgttacagcaggatgcaactgtgacagcgggagaagtaaaggagtcgtctactcatggttcttcatcgaaaaccattgtagattctcagaagaaaattgatggttctgttacattttcaaagtttgtggagaagcacaggcggcttttaaattcatttgttaaggcaaaatccaaagtttgctggagaagtctttttcaatgatgctcaaaggaacaaggctgantga

SEQ ID NO: 2581 - DNA, 423 bp, Arabidopsis thaliana
  unsure at all n locations
  Clone ID: LIB22-035-Q1-E1-A9
acgcgtccgcaagaacatangcactattacattgcaacactttctacaaaaacaagatgaagattgcaacgttttctgttctactcttgcttttanttattttccccgtggcattaagcgcagctgaaatttaagttttacagtgaatcgtgccctaatgcagagactatcgtagaaaacctggttcgccagcagtttgctcgtgacccttcaatcacggncgccttgactcgtatgcattttcacgactgttttgtccagggctgcgacgcttctctcctcatagacccaacgacgtctcaactatcggnaaaaaacgccggcccaaactttancgtgagagggttcgagctgatcgacgagatcaagacggcactcgaagctcaatgtccctctacngtctcggtgctccggatanaatca

SEQ ID NO: 2582 - DNA, 461 bp, Arabidopsis thaliana
  unsure at all n locations
  Clone ID: LIB22-035-Q1-E1-B11
ctgtttagcctgcccgtagcngtccgaaaattcccnggtccacccacgcgtccgcaaaagttttctgttttaacttttcctctgtttttgatttttctctctgaatctctccttcatttccccgggaaatagtaccaagaaaggntatcatcgatcaaactcttcttggtggattcttcagagatgggtttagtcaacgggagagcttcgttgacctttctcctcgcggcgttgaccatcatcgctatggtcgtcgaggctangtttgtggtggagaaagaaagcataagcgtgctgaatccagaggagatgangtcgaagcacgacggctcgatagccaatttcggtttacccgattacgggtgggtttttaatcgggtcaatggtttatccgggataagtaaaanccatggatgctccgcntttggtnaaaacttcaancccaaatttcctncgtccac

SEQ ID NO: 2583 - DNA, 509 bp, Arabidopsis thaliana
  unsure at all n locations
  Clone ID: LIB22-035-Q1-E1-B4
aantgtctacgccgtgtcgtagcctccagaaattccagggtcnacccacgcgtccgatcttctccggcgatgaagacgacggcgacgtcgtttgtnacgggagagagagttgtagttttcgtcgtggtttctcgtattctcttacctcttcctttatcacttatctcccatgggcttctccctcttccncctctctctctccgccttcctcgtcgagatncgngtcganacttcnccgtttcttctctctcatttcaagctccaagacgcggtgcgtcttcagggatattactacgaggctgtgacacttccttctgttatgatatccaagttacgttccagctttcaagagctatttcantccantgaagctgaacaagatgagcttgcacatgtgacaatgcagtattgggcagcatcggctaagttgttgtgctanaacctaaatatccaatcaatggattatgtcacaaagtgaagaanagatgaaacctttgncctcaaccgtc

SEQ ID NO: 2584 - DNA, 434 bp, Arabidopsis thaliana
  unsure at all n locations
  Clone ID: LIB22-035-Q1-E1-B6
ttctttgttnnnnnnnnnnnnnnnnnnnnnnnnnnnnnnnnnnnnnnnnnnnnnnnnnnnnnnnnnnnnnnnnnnnnnnnnnnnnnnnnnnnnnnnnnnnnnngccgactccacaaattttgagcttctttttttgaagttcttgagaacaagtgaaagagcttaatatccacaagactcttgtttctttcttaaatggctaaagtttattggccttatttcgatcctgaatatgagaacttgagctccagaatcaatcctccaagtgtttctatagataacactagctgcaaagaatgcactcttgtcaaggtggacagtatgaacaaacctggaatactacttgaagttgtgcaagtcctaaccgattctccgatctcactatcactaaagcttatatctcctccgaaggtgggatgggtcaanggacgtaa

SEQ ID NO: 2585 - DNA, 449 bp, Arabidopsis thaliana
  unsure at all n locations
  Clone ID: LIB22-034-Q1-E2-H10
tttangacggtgactatcncgaaagtggagttctctttcagcggtggcgccgtcgtggagcttggttcnaaagggatattttacgtgtttaagatatctcaggtttgtctggcgtttgcaaggaatagcgatgacagtaacgctgccatctttggaaacgttcagcagcaaacgcnagaagttgtgtangatggtgcgggtgggcgggtcgggtttgcnccaaangggtgtacttaanttagttaatgaanaacataacggggtaaattttaaatttatggatttggcacanattatcgttatccttaatcaagtgtgtaatttgggtaaagatcagaattcgtgatggtctttgaaataattgtatagtaataagtgtgcatgatacaacaattacnantacgcnttttgnaaaaaaanggggnggcngctctagaagnttcaagctt

SEQ ID NO: 2586 - DNA, 447 bp, Arabidopsis thaliana
  unsure at all n locations
  Clone ID: LIB22-033-Q1-E2-F3
gctccatttggaaatccagatcatgctctagagccctagtttagatctcgaaggaagacaatgggacggatcttcgagtacttcgtcgtgtgcggacttggtccagagatgcgaaccgtggatggagatcttggattccatggaatgcaaacattctacttgcctgctcttcttgaccagttccctcctactgatcaatctccttaccctgcccctcctcctcagcttcctacttgtgttcttcctgctggggtggagttccattcttctggttttgtttccagtgaccctgcaagtttcccacggagctatcccatagtcttgacgganggtgatggatnaaaaatattgtcagttgcattgcatttcgggatcagtctgtgaggataatattgaagcttancgcttaacgccgaatacatacgcanacaagtgtatctgtcctgt

SEQ ID NO: 2587 - DNA, 439 bp, Arabidopsis thaliana
  unsure at all n locations
  Clone ID: LIB22-033-Q1-E2-F6
gcccacgcgtccgcggacgcgtggggcctgtgactgccgttgtcgattccagcagccgagagtttcagctttatgaatcgggagtgtttgacggaacttgcggaacaaacctaaaccatggtgttgttgtggtcgggtatggaaccgagaatggtcgtgactactggattgtgaaaaactcgaggggcgacacatggggggaggctggctacatgaagatggctcgcaacattgccaatccaagaggcctatgtggcatcgcaatgcgagcttcataccctctcaagaactcgttttctacggataaagtttcggttgcctaataatatgaactaaatgtatgccatggaacggatcggttaagccattatcgttattcgactttgaaggaaactaaaaaatatgtggtcgantggtttggtttgttataantaagcat

SEQ ID NO: 2588 - DNA, 450 bp, Arabidopsis thaliana
  unsure at all n locations
  Clone ID: LIB22-033-Q1-E2-F7
gctctcattcactaactttctctgcttctctctatctttctctgtgcataccaactctaaagtctctcatcaatggcggctcgaaaactagggtcgttgttacgtcaatactttttctctctatgcttcctcttcctcggttgcttcttcttccctaaagacgcagactataaacaaaagagaagaaagaagaagcttagaagagtnnnnnnnnnnnnnnnnnnnnnnnnnnnnnnnnnnnggacgtatttaaaacgagttttcttatccacgacaaggatatccaaatcccgtaaccaaacacatcctaacgttactttaacatcggcaagattnatctcaaaaatccctccgnnatcctcgtcaaacccgatacaacaaaacnaacccgaacccggaaanagttattaataagnaancgaaattcganattnccctcttcgaacaaat

SEQ ID NO: 2589 - DNA, 445 bp, Arabidopsis thaliana
  Clone ID: LIB22-033-Q1-E2-F8
gatcatcttatcttcacaatgaagaacaagaagacgaaagatgttgtagctgataaagtcaaaacagaagtcaaggaagcaaaaacagaggaaatcaagaacacagagcctgaaacagagcaaaaacagagctgtgttataaacgagaatctgaagaagatcgctagaccggatcatttcttgcctgtgactgtgatcttggttcttgtgtttttggctttctttggaagatctgtagcgattatgtttacttgtatcgcttggtacttggttccaacgattcaagaacagagtggaaacagaggatcatcaccgtcttacgcgatgaagaagaaagatttcgctaggaaattgagtattgaaaacagaacatcgtttaatccaagaactgttcgtgatcattctcctcgcaagtagaagaatttcctaattttggctgctcgtg

SEQ ID NO: 2590 - DNA, 448 bp, Arabidopsis thaliana
  unsure at all n locations
  Clone ID: LIB22-033-Q1-E2-G1
gatctccttcttcttctccttctcaaatcttttttttcaggcgtaacgaatcgaatcataaacacttacgcagaaacaaaaactaaactttggatcttttaaccgaccatagagattcgtgggttcttcttagtttcgacagattcttgatccgttttagttgttacgctcatctttgcttttatacatcagacccttctcttctcttccttctttatctaagaaacattagggttctttgaaatcttgctaaaaaaaatgggtgttgagaaaatggtgtgtttagcttctcgtacgggtcgtcagtttcagagatacaacaaaggtcgtcgtcaagtcgttggatgtgttccttacagattcaagctatctaaagatggnaaaataagtgatgaagtagaagttcctgntaactcctcccaaaaanggcangccttaatgttcccca

SEQ ID NO: 2591 - DNA, 487 bp, Arabidopsis thaliana
  unsure at all n locations
  Clone ID: LIB22-033-Q1-E2-G11
gccaaactcttctccctcgatcgtctccgtcgccgatctcgtttcttcattttccgcgtgttgattggtacaaaggtttaatcaaatggttggaggaggagttatccagcaaattcttaggaggaagcttcactcccaatcacttgcaactccggttttgtcttggttttcttcgaagaaagctcatgaggatgctggttcttctggtgtaagagcacttgccttgttgggtgctggtgttacaggactgttgagtttttctacagtagcatctgctgatgaggctgaacatggattggagagtccagagtacccttggcctcatgatggcattcttagctcatatgaccatgcttcgattcgtcgtgggcatcaaagtttatcaacaaagtccgttgcatcatggccattcaaatgtccccngattctcaataanccgaagaactttggtggggttgtccnccctaacacaagaagggaaagaagg

SEQ ID NO: 2592 - DNA, 503 bp, Arabidopsis thaliana
  unsure at all n locations
  Clone ID: LIB22-033-Q1-E2-G3
ctgttacgcctnccggtaggcgtccgnaattcccnggtcgacccacgcgtccgggtcgcttccgccagaaatggatggaatgatgatagagctagcagtacaaacgaagcaagtcttcattctgctcttgattttggtggaaaatctagtatagcttctgtgcccataacagacaccacacatgtgaaatctgagactggctctccaagacattcatcctctgctaaaatggatgaaactaatggccgggaggaaaaatcagagaaggaactgaatgatgatggtgaatatttgattagaccttatcttgagcatcttgaaaagattcggttcagatacaactgtgagagagttgttgatctcgacaagcatgatggaatcttcttaatangggaattctgtctgtatgtgatagaaaacttttacattgacgaagatgggtgtatttgtgagaaagaatgcnaagatgagttaccgttaatgatnaaacgttgggtgtgaaa

SEQ ID NO: 2593 - DNA, 353 bp, Arabidopsis thaliana
  unsure at all n locations
  Clone ID: LIB22-033-Q1-E2-G5
gctgaattctgaatccagaatccatcccaaaaaaaaaacatatactgtgagcttcaagtagagagggccgttcagactgaggattggattttattggtactgagagtgggaacgtagtcattcatgagttaagttttgcttggaatggtcgtgagaagtgggtcatcgtctttttccctttgcgttgtgttgtgtgatgttggtacgggttatcttcgtgcttcttgtcgaattgagtatattgtatcagtaaagaatttataacttaaaaagagccttatgtcaaatacgacgtcgttttgtatgggaaatggattttttacaccgctgaaaaaaaaaaaaaaaaaagggng

SEQ ID NO: 2594 - DNA, 440 bp, Arabidopsis thaliana
  unsure at all n locations
  Clone ID: LIB22-033-Q1-E2-G7
gcagagacacaaaggcgaagagctatgtcgtcgtcggtggatttcgtgacggaacaggggagatgcggcgacgatggtaacggcgccggagagacagtaaagaatggcgaaattgatcatttgctttccgaaccgtcggctccgactatttctctccctacggaatctttcctcagagcagcgacgttactcaagaaccaggttgtggaggccacgtggaaaggtggtgtcgaagctcttgcctctggttcgggtccagtgctggattcgactgtgtacacangactactcggcacaacgttcacctgcttgaaatcgtaccaagttacgcngaancatcaagatctgctaacttgcgcanagattatcgacactttgccaaagttncgcgtgccacaancangcacgtnacattttangttgaaaaaggangatttgtt

SEQ ID NO: 2595 - DNA, 467 bp, Arabidopsis thaliana
  unsure at all n locations
  Clone ID: LIB22-033-Q1-E2-G9
gggaaaaaattggattaaggtgaaaatcgctttctctgaaaatcnnnnnnnnnnnnnnnnnnnnnnnnnnnnnnnnnnnnnnnnnnnnnnnnnnnnnnnnnnnnnnnnnnnnnnnntcttttgattcaagtcaaacactactcagaagttttctcatcggtatcgagagagatccatcggattctatcatcggatgttatatctgttcgtcggtggttatcggaggatatgctccgtggttggttcgggggtgttagtggccggtgaggcagatggtgatgatggtggcggttgatgatcgacaaaattanaaagcgtgttttcttatttgtttcgttttgagtttgtctcttaagtgttttggtantagaagatgatgaanaaggggaaaaggaaagaacagtggcttgttancgaaatcccttaanaataaatcctccttgccttaaaactggtaccggtaacgc

SEQ ID NO: 2596 - DNA, 469 bp, Arabidopsis thaliana
  unsure at all n locations
  Clone ID: LIB22-033-Q1-E2-H10
gcccacgcgtccgatcaatttagcacttgctaatacattaacagtccaaatgagacttgggtatgtttgatggtaaccttgggccgtacgctaatcttgggccaagagatgtttgtactccggcccataaacatttagctcttgaagcagcccatcaagggattgttcttctcaaaaactctgctcgctctcttccactctcccccaagacgccaccgcaccgtcgccgtgattggtccaaactccgacgtcactgagactatgatcggcaactatgcagggaaagcatgcgcctatacgtcgccgttgcaagggatttcaagatacgcgaggacacttcaccaagctggctgtgccggcgtggcttgcaaagggaaccaaggatttggtgcaacggangcancggcgcgttgaaaccgacgcgacggttcttgtgatgggaataaatnagtcatagaggnaagagaca

SEQ ID NO: 2597 - DNA, 529 bp, Arabidopsis thaliana
  unsure at all n locations
  Clone ID: LIB22-033-Q1-E2-H12
tggtttgcctgcgcttagcgntgccgtattcgnngggaaatccacgcnnganccacacgcgtccgctcctcatcctccttcttccaagaaccaaaacctgagcaaagtttgacacggttagaagatcacgtgagcatatgagaagccgagaagagagcgagtttgaaacagtttgggtgatgctggtggttcatcaaatgaagctgctaacaaaagacaaggaagagcttctcaagaacaatagttatgacaacaagtcacctttgcataagaattcttatgatggtactggaaaatctaagcctaaacctaccaaccttagagctgatgaaagtcctgaaaaagtcacagtggtgcctaaattcggtgactgggacgagaacaacccgtcatcagctgacgggatacacgcatatcttcaataaagtccgtgaagagagaaattctggagcaaatgtgaatgggttttcaagaacgccgactcatcaaaagtcccgttaacccgaacaacacttcctcaagttgctgc

SEQ ID NO: 2598 - DNA, 507 bp, Arabidopsis thaliana
  unsure at all n locations
  Clone ID: LIB22-033-Q1-E2-F2
ctgttacgcctgccngtacngcntccgaaaattcccnaggtcgacccacgcgtccggttacaaacccgaaaacaaagaacattcgtctctacgtgaagcgtgtgtttatctctgacgattttgatggagagcttttcccgagatatctgagctttgtgaagggagttgtggactctgatgatcttcctcttaatgtttctcgtgaaattctccaagaaagcagaattgtaagaatcatgagaaagaggctcattagaaaaacctttgacatgatacaagaaatctctgagagtgaaaacaaagaggattacaagaaattctgggagaactttggtagattccttaaattgggttgtattgaagacaccggtaaccacaagcgtatcacaccgctacttagattcttcagttccaagaatgaanaggaattgacaagcttggatgattatatcgaagaacatgggagagaaccaaaaggcgatctactanctcgcaactgataatcct

SEQ ID NO: 2599 - DNA, 442 bp, Arabidopsis thaliana
  unsure at all n locations
  Clone ID: LIB22-033-Q1-E2-D5
gcaccgatgtaaaggtaagaggaagagatttgattgaatgactcattcattgttagtttttggctatgtttaggattatgttctaataagtgttcttttgctgttttcagatgagtcctacagatgaagatgaattctctatttacaaacagagaagcactcatatgagaaaccattctttagaagaggatttggaggctgagaagaccatttcctttcaagataaggttgatccaagtggagaagaacaaactctgatgagaaatgagtccatctcaagaaagcaaagcgatctcgagacaccggaaaagatggaatcatttagcacatttggcgatgaaatccaatccgtgggatcgaagtctacaaaagtatctgaagactacaatcaggtgacgatgaanaagaaagaagaaganatgttgagttagaacaagatcca

SEQ ID NO: 2600 - DNA, 447 bp, Arabidopsis thaliana
  unsure at all n locations
  Clone ID: LIB22-033-Q1-E2-D6
gcaccgttctgattactgattcttcattgacggtaggagtcaccacttttggcggcgattccttgttctctattttttttgcacaagcaacatttagcttctgcaaactccagttcatctctcaaccctcatatcgccgtgttttctcgctctagtaccgcgagctcggacgaaccaggaagcaatccgttaatctagaagcggtgttgagaagatgacgattacatcaaatatctctgtacagaacgataacctcgttgttcaagggaagactatccttaccaaaatccctgacaacattatcctaactccggttaccggtaatgggattcgtttccggttcanttanaaggcgcgacgtttgaacaaagcaagagtcttcatgtgttccccatcggtgtattggagggtcttcggttcangtgctgtttccggtttaagctaagg

SEQ ID NO: 2601 - DNA, 450 bp, Arabidopsis thaliana
  unsure at all n locations
  Clone ID: LIB22-033-Q1-E2-D8
gatcaaaattcacaccggcgattttgagattgttctctgattggcttaatccgagagaatcaaggaattgaatggccaagtgaatcagatgcatcgagcattgctactctttcctgtgctcgctgcgagaagcctgcacatcttcagtgtccgaaatgcatagacttaaagcttcctcgtgaacaagcctctttctgcactcaagaatgtttcaaggcagcttggagctcgcacaaatcagtacatgtgaaagctcagctgtcttcaatcggtgattaagaactcctgatctatttcctcaaggctggctctattgcgtcaagaaaggncaaggctaagaacacctaagcttccacactttgattggactgggcctctaaagcaatatcccatatctaacaagcgtgttgtgcctgctgagaatgagaaacctgactgggcaattgatgg

SEQ ID NO: 2602 - DNA, 446 bp, Arabidopsis thaliana
  unsure at all n locations
  Clone ID: LIB22-033-Q1-E2-E1
gttcaaaagaagaaaaagaaattacgaaactttcttcttcaagatatttcaaaatcaaactttggtttaagggtcccannnnnnnnnnnnnnnnnnnnnnnnnnnnnnnnnnnnnnnnnnnnnnnnnnnnnnnnnnnnnnnnnnnnnnnnnnaatcccctgaaagcttataggctccgttgaacagttataacttgtgaaagttgaatccttttaaaccgacagaggaagatctcagatggcaaacaagataagtgaaactgcttccaagatggacgattatgaggtcgtggaacagatcggacgaggcgcttttggttctgcttttcttgtaattcacaagtccgagagacgaaagtatgtggttaagaagattcgtttggctaaacaaacagagagatgcaagcttgctgcaatccaagagatgaatttgatatcaaaagctta

SEQ ID NO: 2603 - DNA, 466 bp, Arabidopsis thaliana
  Clone ID: LIB22-033-Q1-E2-E12
gggaaaatcaaattctcagacaacttttttcgaagaagacgacgaattttaaagattttgttttctatattctcttctgatagtgaagtctcggagactgaatgatattgtttctggtcaacttaaccaatttcagaacatggcaaacagagcagacaactcaatgcgttgttcaaatagtaagaaaccgaatgacggtatgatgctcgtaatatcgattttcgcgggaatagttatcggatttttattaggcatatctttccctacattgtcactaactaagatgaattttccatcaagcattcttccttctgttgctactgtctacatagaaaatgagaaaccggagaaatcatctaagacgagttcacaaaacgaaagtgatgcatcacatcatcataagatttggggttcaacgaatcctccaagggcagagatgttacctccaagtttgttgcaaccgaat

SEQ ID NO: 2604 - DNA, 503 bp, Arabidopsis thaliana
  unsure at all n locations
  Clone ID: LIB22-033-Q1-E2-E2
ctgttaccctgccngtacgcgtccgaaaattcccnaggtcgacccacgcgtccgaaagaagaaacctttttgattctctttgcgatttctttgttcaatctcttctcagattgtgtgaatcgggtttaaatcggggttttagggtctctgttttcaaaagggtaccaaaaagtttggagctttactgtagaaagatttgatttttcgttgacccactccgagattttcggatacaaatcagggttttagggtttttgttggaatggaagaggattatcaacagccgaggtttacgattggtaggcaatcatcaatggcgccggagaagattccggagccgtcggttcactcagaagaagangtgtttgaggatggagaagagatcgatggtggtgtgagactaatgtatttggctaatgaangtgacattgaagggattaaggagcttaatgattcaaggattgatgctaattacagagacattgatgatcggactgctttac

SEQ ID NO: 2605 - DNA, 453 bp, Arabidopsis thaliana
  unsure at all n locations
  Clone ID: LIB22-033-Q1-E2-E3
gcaacgccaaattggtattactaggagatgttggagctggaaaatcaagtcttgtgctacggtttgtgaaagatcagtttgttgaatttcaggaatcaaccattggtgcagcttttttctctcaaacattggctgtgaatgatgcgactgtgaagtttgagatatgggatacagctggtcaggaacgataccacagtttggctccaatgtactacaggggtgcagctgctgctattattgtctttgacattactaatcaagcctcatttgagagggcgaagaaatgggttcaggaactgcaggcacaaggtaaccctaatatggtgatggctcttgctggaaacaaagctgatttattanacgcaaggaaagtgtctgcagangaagcagagatatatgctcaagagaacaancctttccttaagggaaacctcagcgaaagancgcaacaaa

SEQ ID NO: 2606 - DNA, 483 bp, Arabidopsis thaliana
  unsure at all n locations
  Clone ID: LIB22-033-Q1-E2-E4
ntccgaaaattccaaggtcgacccacgcgtccgcnctctcttctcttttcaagtcttcttcttcattactcgcaccatgaccaaaccctccgacccaaccagagactcccacgtggcagttctcgcttttcctttcggcactcatgcagctcctctcctcaccgtcacgcgccgcctcgcctccgcctctccttccaccgtcttctctttcttcaacaccgcacaatccaactcttcgttattttcctccggtgacgaagcagatcgtccggcgaacatcagagtatacgatattgccgacggtgttccggagggatacgtgtttaacgggagaacacaggaagcgatngaactgtttcttcaaactgcgccgggagaaattccggagagaaatcgcgaangcggagacggaggttggtacggaagtgaaatgtttgatgactgatgcgttcttctggttcgcggctgatatggcgacggaga

SEQ ID NO: 2607 - DNA, 444 bp, Arabidopsis thaliana
  unsure at all n locations
  Clone ID: LIB22-033-Q1-E2-E5
gaaatcgaaatcacagatgaaagcgaacatgtcgtcgtcgtcttccactcgatacagatccttcttcgtcttcccaattctcttcgccgtcttgttcctgggacttctgattccctcctccgccgataaccgccacgttatcaacttccgatcgccgggactctacccggagggactaacctgggatccaagggaccagcattttctagtcggttctctccacagccgcacaattcattccgtctccgacgctggagtcatcgaaaccctaatctccgatctcgatctaccggagaactccactatcctcggtctcgccgttgactctactaatcgccgtctccttgcctgtatccagagtttgccgcctctccctcccttcagtgccctaacctcctacgatctccgcagcggangccgtctgtaatcctctctcctctcccg

SEQ ID NO: 2608 - DNA, 450 bp, Arabidopsis thaliana
  unsure at all n locations
  Clone ID: LIB22-033-Q1-E2-E8
ggaagaaagaaggaagacgatgatgatgctcagaatccgaagcagagatggactggagagagtcacagcggagggagctcatatcactgtttcccagctcaaaaccttgatcgcggatcagcttcagatccctctccataagcagaccttatccaccaatcgtgatctcctcctcgccaaaactcccgctgatctactcgccttcaccgacctcacggacccaaacntccccctctcctctctcaacctcggccatggctctatgctctacctcgcctacgatggcgagcgctccattcctggagctcctcccgttactcctgccggattcttcgggaaggaatatgaacgtcgatgacttgatngcccgccaagatncgcgtcactcgtcangagacgtctcactgcgactccgtctcctttcgattgcgatgccggccaacgctttcc

SEQ ID NO: 2609 - DNA, 462 bp, Arabidopsis thaliana
  unsure at all n locations
  Clone ID: LIB22-033-Q1-E2-E9
tctcttctccgtacggagacaccgagcaaaaactggcttcttacttcctccaagctctcttcaaccgcatgaccggttcaggcgaangatgctaccgaaccatggtaacagctgcagccacagagaagacttgctccttcgagtcaacgcgaaaaactgtactaaagttccaagaagttagcccctgggccacgtttggacacgtggcggcaaacggagcaatcttggaagcagtagacggagaggcaaagatccacatcgttgacataagctccacgttttgcactcaatggccgactcttctagaagctttagccacaagatcagacgacacgcctcacctaaggctaaccacagttgtcgtggccaacaagtttgtcaacgatnaaacggcgtcgcatcggatgatgaaagagattggnaaccgaatggagaaattcctaggcttatgggaattncctt

SEQ ID NO: 2610 - DNA, 465 bp, Arabidopsis thaliana
  unsure at all n locations
  Clone ID: LIB22-033-Q1-E2-F10
gcgctgttagagagaaactggagcaacttctcaaattttagcctttttttgtttttgcattttgcctaatcggtgcttctccagatttcgcttatcttgttcctatagcataacaatggcggatttcaaaccaaggatcgagatttcgttccttgaaaccttcatttgcagcgctttcgctgcttgttttgctgagttatgtactataccgttggacacagccaaagttagacttcagcttcaaagaaagattcccactggagatggtgagaatttgcccaagtatagaggatcaattggtactctagctaccatagctagagaagaangtatttcaagtcnttggaaaagtgttattgcangacttcatcgccaatgtatctaagggggctaangantgggttatatgaacccgtgaagacactttgggtggnaattaccttaattggcgaaaatcccttaaaa

SEQ ID NO: 2611 - DNA, 464 bp, Arabidopsis thaliana
  unsure at all n locations
  Clone ID: LIB22-033-Q1-E2-F12
ggaagatgactttaccgcttggcgagaagcattgtggcccgagcttgatacaatactgagggaagaaggggatacagctgttgccacaccatacactgcagctgtgttagaatacagagtttctattcacgactctgaagatgccaaattcaatgatataaacatggcaaatgggaatggttacactgtgtttgatgctcaacatccttacaaagcaaatgtcgctgttaaaagggagcttcatactcccgagtctgatcgttcttgtatccatttggaatttgacattgctggaagtggacttacgtatgaaactggagatcatgttggtgtactttgtgataacttaagtgaaactgtagatgaagctcttagattgctggatatgtcacctgatacttattcccacttcacgctgaaaaagaagacggacancaatcaacaactcaatggctcctcccttc

SEQ ID NO: 2612 - DNA, 630 bp, Arabidopsis thaliana
  unsure at all n locations
  Clone ID: LIB22-033-Q1-E2-D4
cccccgggttaaanccgccggttccccggnnaaaaaattttccccccgggnggggntcccggaaacccccaaacggncccggttccccggcccantttttttttttttttttgttgggttgttgccnaaaaaaacggttnctnctcctnctcctngtcctncaattaaaaaatnctncaaagaagaaaagaaaaacaatncgtccngggttcaanggtccgaaaagaaaangggaagaagaaaattgaagttgggtccacgaattccgaaaataactttctccaacgaacgaaagaaaggggaagaagattccctgaagctcaaagggaagaagcttaattcccaagtataaggataagagaaaagatgcagttaagaaggttattgcggcgatgactgttggaaaggatgtttcatcacttttcactgatgtagtcaattgtatgcaaacggaaaatttggagttgaagaagcttgtttacttgtatctcataaaattatgcgaaaagccaagccaagatcttgctattcttgcagtaaatanctttgtaaaaggattcacaaggattcaaaatccgctgaatcntgccttggctgtnccgacaatggggctgcaatctgtttgataaa

SEQ ID NO: 2613 - DNA, 468 bp, Arabidopsis thaliana
  unsure at all n locations
  Clone ID: LIB22-033-Q1-E2-B9
tagggttttcttctctgtgagcgaagatgcgtgagattcttcatattcaaggaggtcaatgcggaaaccaaatcggttccaagttttgggaagtggttaatctcgagcacgggattgatcagacgggacggtatgtaggagattccgagttacagcttgagagggttaatgtatactacaacgaggcgagttgtggaangtacgttcctcgcgctgttctcatggatttggagcctggaaccatggacagtgtcagatctggtccgtacggtcagatctttccaccggataacttcgtcttcggtcaatccggtgctgggaanaactgggctaaaggtcactacactgaangtgccgaaccttattgaatccggcccttgangttnttcncaaaaaaggctnaaaaactgttaanggcctcaaagggttttaaggggtgccaatncctttgggaaggaggaaantggt

SEQ ID NO: 2614 - DNA, 464 bp, Arabidopsis thaliana
  unsure at all n locations
  Clone ID: LIB22-033-Q1-E2-C10
gcccacgcgtccgcccacgcgtccgggaaactttgtttagtgtgtcttcttaaagcctgcaagatgcagagaccacctcctgaagatttctccttgaaggagacgagacctcatctaggtggaggaaaactctctggagataagcttaccagtacttatgaccttgttgagcaaatgcagtatctctatgttcgtgtggttaaggcaaaggagttacctggcaaggatatgactggtagttgtgacccttatgttgaggttaagcttggaaactacaaaggcaccactaggcatttcgagaagaaatctaatcctgagtggaaccaagttttcgccttttctaaagataggattcaagcttctttccttgaagctactgtcaaggacaaggattttgtcaaagatgatttgattggtccggttgtcnttgatttgaatgaagtactaagaaaantcctcccgat

SEQ ID NO: 2615 - DNA, 468 bp, Arabidopsis thaliana
  unsure at all n locations
  Clone ID: LIB22-033-Q1-E2-C12
gcccacgcgtccgcttagggctggacaaatggcagacttggatactagaagaactgaaatcttgggaagatcggcgagcattatccaaagaaaagtgcgatcatatcttgcgcagaaaacttttatccaactgcgtatttctgctacacaaatccaagcagtttgtagaggttatcttgctagaagtatatacgaaggcatgcgcagggaagctgctgctttgaaaatccagagagacttgcgtaagtttctggccaggaaagcttacactgagctattttctgctactattttaattcaagcgggtatgcgtggtatggtttcccgaaaggaattgtgtctcagaaggcagactaaaactgcaaccataatccagacccggtgtcncgtatacttggctccggtgcaattaccgaaaactaaagaaagcanncatcacgacacaatgttcatggagaaggaaaaatt

SEQ ID NO: 2616 - DNA, 498 bp, Arabidopsis thaliana
  unsure at all n locations
  Clone ID: LIB22-033-Q1-E2-C4
ttacgccgccgtagcntccgaaattccanggtcgacccacgcgtccgcatcatcttctccncttaacccttncgacaaaaaaaaaccaanaattnaactncaagggcaancaaganaacaancaagcntncaaanacatnaganagttancgnaccttggnttacgaacttccttcccctaaaaacctcaaaaccttgggaacacattcaacacgcccatcaacacacacgcgtaccgacaaaatgatggtaagacttccaagtacctccgggaacttattggtcgtctttggtctgaacagcaaagccagtgtttgcagcgccgctgctgtgaaagtagctatcccgaggctccgatgtaacccataggtcactccaagggaattatggccgagcacgattccaatggagaaaccaatgggtcctaaggangaaaccggttaactgtaatgctgcntggatgttagaancaaatgggtcctaatgaatgcantttgg

SEQ ID NO: 2617 - DNA, 449 bp, Arabidopsis thaliana
  unsure at all n locations
  Clone ID: LIB22-033-Q1-E2-C5
ggatcacttgaacacttataaaaaatattttgctcttctttctatatatttatnnnnnnnnnnnnnnnnnnnnnnnnnnnnnnnnnnnnnnnnnactcattttctccgcagagaaaatacaatccatggcttctacttttaggctctctattagcttcctcactctcatcctcttctctctgtgggtagtggaggcacacacgtctagaaagttgatatcaatcaaggaaaaagaaggtcaagatattagtcatttgctcaaagatggtgaatttgatgacccttcgttgtacatgtatttcacactcaatgatctcaaactangaaccaaattgctgatttacttctacaaaaacgattcttcaaaagcttcctccacttctcacaagacaacaaagccgatctcantnccttcactaaagtcaaagccttgactttccttctcgaca

SEQ ID NO: 2618 - DNA, 450 bp, Arabidopsis thaliana
  unsure at all n locations
  Clone ID: LIB22-033-Q1-E2-C6
gaaatagagagagagagtgacagaggagtgtgtgaacatcctttttttagtagatttgggttttcgagatgccgtattgaatcggctacgaatttcccaattttgaattttgtgaatctctctctttctctgtgtgtcggtggctgcgatggaggccagtgccggcttggttgctggatcctaccggagaaacgagctcgttcggatccgacatgaatctgatggcgggtgcagaccaaacctttgaagaatatgaaatgggccagatatgtcagatctgtggtgatgatgttgggactcgctgaaactgggagatgtctttgtcgcgtgtaatgaatggtgccttccctgtgtgtcggccttgctatgagtacgaaangaaagatggaactcagtgttgccctcaatgcaagactaagattcagacgacacaaggggaatcctcgtgtt

SEQ ID NO: 2619 - DNA, 428 bp, Arabidopsis thaliana
  unsure at all n locations
  Clone ID: LIB22-033-Q1-E2-C7
ggaataacgaatcgaatcgggttgtcgaaacgcctaattcaattgagaatgctactgtttctggtggcgggtttggtgtttccgggtcgggtaatttcccgagacctgagatgtggggaggtgatcctaatatggggtttaggccaatgatgaatgcaccaagaggaatgcaaatgatgggaatgcatcatccaatggggataatgggtagaccaccaccatttcctttgcctttgccgttgcctgtaccgtcgaatcagaagcttagaagtgaggaagaggatttgaaagatgttgaggctcttttgagtaagaagtcttttaaggagaagcaacagtctaagacangtgangagttgcttgatctgattcancgtccaaccgctaaagaaaccgctactgctgctaagtttaaaagcaaagganga

SEQ ID NO: 2620 - DNA, 442 bp, Arabidopsis thaliana
  unsure at all n locations
  Clone ID: LIB22-033-Q1-E2-C8
ganagaatcgtctctctggttcgttgagtcgtgagattaggaatctctcaagtcttgttcgtcttgatgtttcttggaatttgttttccggtgaaatccctgatgtgttcgacgaattgcctcagttaaagtttttcttaggtcagaccaatggattcattggaggaatacctaaatcgttggcgaattcaccgagtttgaatctgcttaacttgaggaacaattctttatcgggtcgtttgatgttgaattgtacggcgatgattgctttgaactctcttgatttaggtaccaatagattcaatgggaggttacctgagaatctaccggattgcaagcggttaaagaacgttaacctcgcgaggaacaccttccatggacaagtaccanagagtttcaagaacttcgagagcttatcttacttctcgttatcgaattcgag

SEQ ID NO: 2621 - DNA, 473 bp, Arabidopsis thaliana
  unsure at all n locations
  Clone ID: LIB22-033-Q1-E2-C9
ggctttctgcttcttccttcttcgtcctttgttttaattctctcatatcacttacgaaaagaagaaagaaaaaaaacaccaaaactaaagagaaatttcgttatcactctcttgccaaaactcacatacatataatcatatatcatcgcaaaatgtcttgcctagagatttataacaaagacacgatgaagaagaaagaaggagaagaagaaacaagagatgggacagtggattactatggtcgtccctctattcgttctaactcaggccaatgggttgctggcatcgtcattcttctgaaccaggggctggctacactagccttctttggagttggagtgaacttggtgctcttcctaactcgcgttttgcagcagaacaacgcagacgcagctaacaacgttagcaaatggacanggactgtttatatccttctcaatggntggagcgtttctcaagcgaatcgtantggg

SEQ ID NO: 2622 - DNA, 452 bp, Arabidopsis thaliana
  unsure at all n locations
  Clone ID: LIB22-033-Q1-E2-D1
gcccacgcgtccgcccacgcgtccgaaaggagggaagaaaaaagttaggttcgaaacgaaagtaaactagttaggtgaaaagcgaaacaacacccacagagcaatggcccctgctctcgccgttacacgagatctcaccgccgtcggatctccggagaatgctcctgcgaaaggacgtgcttcggtttacagtgaagttcaatcaagccgtattaacaacactcttcctttgccttctgttctcaaaggagctttcaaaatcgtcgaaggtcccgctagttccgccgccgggaatccagatgagatagcgaagttgtttccgggtctatatggccagccatcagtagcagtggttccaagatnaggatgcaccttcgtcggcaccgaaattgaagattggtgttgttttgtctggangtcangcacctggtgggcacaatgttatttctgga

SEQ ID NO: 2623 - DNA, 456 bp, Arabidopsis thaliana
  unsure at all n locations
  Clone ID: LIB22-033-Q1-E2-D10
cgcggacgcgtggggttttcgagatcgtggcggatcgtcccatcgctggtgataaacctgtcggtgaggttagcgttccggtgaaggagcttttggatcagaataaaggtgacgaggagaaaacggttacttacgccgtgaggttgcctaacgggaaggcgaaaggatctctcaaattctcgttcaaatttggggaaaagtatacttatggatcttcgagtggtcctcacgcgccggtcccttcggctatggatcataagactatggatcagcccgtcaccgcttacccgcccggacacggtgcaccgtctgcataccctgctcctcccgcgggtccttcttccggatatccaccacaaggacatgacnataancacgatggtgtttaaggatacccgcaacangctggatatccaactggaancggtggttatccgccaactggtgcaaaaccan

SEQ ID NO: 2624 - DNA, 441 bp, Arabidopsis thaliana
  unsure at all n locations
  Clone ID: LIB22-033-Q1-E2-D2
ggcatattgatcttcgccggaggatatggcgatttcagaagaagaagccaaactcgaaaggttcctanattggcttcaggtgaatggaggtgaattaagaggctgcaacatcaaatattctgactccctaaaaggatttggcatattcgcttccacctccactcaagcttccgatgaagttttgcttgttgttccgcttgatctggccattacccctatgagagttcttcaggaccctctcctgggccctgagtgtcagaaaatgttcgaacaaggacaagttgatgaccgctttctcatgattctgttcctcactttggagcgtcttcgtatcaattcttcttggaagccgtatcttgatatgcttcctactcgatttggcatcctctttggtttctgatgatgacatccttgagctaaaagggactaacttgtatcacg

SEQ ID NO: 2625 - DNA, 480 bp, Arabidopsis thaliana
  unsure at all n locations
  Clone ID: LIB22-033-Q1-E2-D3
tccgaaaattcccnggtcgacccacgcgtccgattgggtttgggatcaagtgggcaaaccaatatggatccttctccgatcgctcagggaaatgacgatgacacaccggcgccggggaatcagtttgcccaattcggagctggatgtttctggggtgtcgagctggcgtttcagagagtcccaggggtgactcagaccgaggctggatacacccaagggaccgtagacaatccttcatacggagatgtttgttctggtaccacaggccattcggaggttgttagggttcaatatgatcttaacgattgcacctatgagtctctgcttgatttgttctggtctaagcatgatcccaccactttgaatcgccagggaaatgacgtgggaacccaatacagatctggaatatacttctacacacccgagcaagagaaactagcccgtgagtcacttgaacgtcancaacaacaaatggagaaa

SEQ ID NO: 2626 - DNA, 448 bp, Arabidopsis thaliana
  unsure at all n locations
  Clone ID: LIB22-033-Q1-E2-B8
aaggacggtaagacctttgtcgattgcttgcgcgatgccaacatcgtccctggcatcaaagttgacaagggcttgtctcccctagccggttccaacgaagagtcttggtgccaaggcttggatggattggcctcacgctctgctgagtactacaagcaaggcgctcgttttgccaagtggaggacagtggtgagtgttccctgcggtccttcagcactggctgtnaaggaagctgccttggggctggctcgctatgcaaccatctctcaagataatggtcctgtccccaattgtgganccaaaagattccttctgggacngggaacaaccaatananaagactctggaaggtggcaaanaaagtgttgtcaaaagtgttcctccnacttggcaaaagaacaacgtcatgttttgaagggaattctgttnaaacccaagcatggtcaac

SEQ ID NO: 2627 - DNA, 443 bp, Arabidopsis thaliana
  unsure at all n locations
  Clone ID: LIB22-032-Q1-E1-H6
gctgatttacggttaaaacgcctcttccctctctccgacgcttctcgtcggaaatctgggtttaagtttcttctgcagatcggaagagattctattgaagcggcgttgacacgatttcatctataattgtnnnnnnnnnnnnnnnnnnnnnnnnnnnnnnnnnnnnnnnnnncgatcctgcgccgcgaaaccttccggtgatggaacgacgtcggacgggaacaaaaaagatgtggaggaagagaggaaggacggtgaaggaaagagggaagatagaaaacgttggaaaaaattttatccnaatcgttaatgggaagccttttgctccggtttcaatggganggaagccgaatgggctgcttataagggaagcaaggcgggagattctgaacaaagccgcctgaaaattttatcgggatctgggtgggaaagcggtgatgatt

SEQ ID NO: 2628 - DNA, 426 bp, Arabidopsis thaliana
  unsure at all n locations
  Clone ID: LIB22-032-Q1-E1-H8
ggacacacaaaaagacgagaccgatcggcgatcagtagacttaaccaaactcgcggtgaaacagtcggaatccaccgctataaggaacgatgatgatctcccaattcttcgtcttatctcagcgaggagataacatcgtcttccgtgactaccgggctgaggtacccaaaggaagtacagagacattcttccgtaaagtcaagttctggaaggaggatggcaatgcagaggcgccacctatctttaatgtcgatggcgtgaactacttccatgtcaaggttgttggtctatattttgttgcgacaacgagagttaacgtgtcaacctctcctgttttggagcttctacaaaggantgctcgtgttaataaagattancctgggggttcngaatgaanattcaatcaaggaaaaaactttgggcccn

SEQ ID NO: 2629 - DNA, 505 bp, Arabidopsis thaliana
  unsure at all n locations
  Clone ID: LIB22-033-Q1-E1-A1
gcccacgcgtccgaagaaaacaaaaaaaaaaaagatctgagagagagagtttcgaaattctcgtgttcgtaagcaaaaatggtttgggagaaagagaagatcgtcggaagttgtatagtcggaggagctgcgttcgccgtcggagcttctttccttcatcttttccttaaaggtgagcttccgttaggattaggtttaggtttgtcttgtccatggcgcattttgagaaaacgaaaacctgttcgcgtttacatggatggttgcttcgatatgatgcactatggccactgcaacgctcttcgtcaagctcgtgctctcggtgaccaattggtcgtcggtgttgtttccgacgaagaaattatagccaacaaaggactcctgttaccccccttcatgaaagaatgacaatggggaaagccgtnaaattgggtggatgaaattanaaccggatgcnccttaagcnaataacggaaatttcatgaagaaattgttccatgagttccaa

SEQ ID NO: 2630 - DNA, 518 bp, Arabidopsis thaliana
  unsure at all n locations
  Clone ID: LIB22-033-Q1-E1-A2
gaaaaacaaaaaactagctcatcgtcgtcatgtcgtctctgtctcctccaccgattccaatggaactccacgccggtaaccggaaaaagttactagaatcaatacgccgtcagttatctagttccaatcgttctctcgatggatttgttcttctacagggtggcgaggagaaaaatcgatactgtactgatcacaccgagctcttcaggcaagagagttattttgcttacttgtttggagtcagagagccagatttctatggagctattgacattggaagtgggaaatctatcctttttattccaaggttgcctgatgattatgctgtttggttgggagaagattaagccattgccgcattttaaggaaacatatatngttgacatggtttccaagttggatgagataatcaagtctttaatggaacaatttaagggattgggaaagcccccggttgaaccccttgcaanggccttaaaaacngacagcaantaacttcccaaaaacctggcaacttt

SEQ ID NO: 2631 - DNA, 529 bp, Arabidopsis thaliana
  unsure at all n locations
  Clone ID: LIB22-033-Q1-E1-A4
cttccatcctaaagattgtaaagggaaaccgttttcgattttcagagaagatcacacatctttcgtcccttcactgccatacgtgtcgataaagatggcggctatggcggcgaagcttcagttatcggcgaaatctgatcanagcagtgtgcgattaccgagagtgatcaacctctcccgcgatccaacgactagagtctcgtttccgcgaaatggatcagtttgttccctccacaccaatttctcttctccacatctcgcgaaaccttgcgccggaggtggtggtggtggaagcaccggtaataacggcggcggaaacggaaagcggaggaagaagtggtgggtttgganggtcaaggggggtgaagcaaagtnaaagaatccatcctccaatggggaacaantangggttaatcaaccaaagggatgggggatttangangtttgcaacctgattcctcaatttccctttttaaagggtacnaaatgggaagagattgtnagggacntaaccccttggngttccccg

SEQ ID NO: 2632 - DNA, 561 bp, Arabidopsis thaliana
  unsure at all n locations
  Clone ID: LIB22-033-Q1-E1-A5
tgttttactgcccccgtagcggtaanaaattcccgggtcgacccacgcgtccgccggtttttaagcaaataagggtatatgagtttgttggacatgggtggagatatgatggaagatgattgggaatttgcgtcatcatcaaaccctaaaagaaccctagttcttgtgggccgtactggaaacggaaagagtgcgacaggtaacagtatccttgggaggaaagcttttaggtcaagagctagaactgtaggagtgacaagcacgtgcgagtcacagagagttgttcaagaagatggtgatatcattaatgttgttgatactcctggtttgtttgatttgtctactgcagctgattttattggtaaagagattgtgaggtgtataagtttggcagaagatgggattcatgcgatcttgttggnattctctgtgaggcggcttgctgaagangagcaaactgtgcttagtttctgcaagcgctaatccggcaantangatccctgactaatatgattngttggtttttaccggtggcnaaanaagttggaagaanaattgagg

SEQ ID NO: 2633 - DNA, 504 bp, Arabidopsis thaliana
  unsure at all n locations
  Clone ID: LIB22-033-Q1-E1-A6
gatccttacgtggaatgtacatanganctcaccangtcatacccttggttacagctantcaacccagcacaancctttggcgatattgttattgattatccttacgtggaatgtncatcagctgctatccaagctttgatatcatttcgaaagctgtatcctgctcatcgaancaaggaagtaaatnagtgcattgagaaggnggttaagttcattgaatccattcangcagcanntggntcatggnatggatcatgggctgtttgcttcacgtatggtacgtggtttggagtgaaagggctggtanctgttggaaaaacattgaagnactctccacatgttgctaaagcttgttaatttctattgtcgaaacaacaancttcgggcggctggggagaaagctatcattcatgtnnagacanggtcctaatcaaaccttgatggnaacancttncacgtcgtgaatacagcaaagggctaagctccactccatggngcctggga

SEQ ID NO: 2634 - DNA, 564 bp, Arabidopsis thaliana
  unsure at all n locations
  Clone ID: LIB22-033-Q1-E1-B1
tncctggcccgcagcggtccgnaaatcccgggggcgaccaacgccgtccgctcgactctgttccaagaaattcctctacttaatacagctgattctacagattcctgctacgaaatttctgggtctgggttgatctttgtctcaccaagtcaacccaattcaggactttgataaaggtggaaatggcggctttattagcttctcagagctgctgctatggcggtgagaccgcaagagtcaccaaagctattggtttcagtagctctttggagaatcatttcactggggaagccactcagtgttatggcagcaagtctaagagatttcgtattgagatgagacagtcggaattgccctctaaggttggaatcaatggacgttcagtcaaaatggttcctgcgagtgangtggtgaagangaaagatggtgtgaatggatcggctggggaaaaggtgttaatggancaagtttgggtantantaagaaacattaaagggtgccggcgtcaactttgggttaaggnancaaangaaaacaacaagaatccgtaccttcccccaaccg

SEQ ID NO: 2635 - DNA, 528 bp, Arabidopsis thaliana
  unsure at all n locations
  Clone ID: LIB22-033-Q1-E1-B3
aactctctcacaaagcaaaaaaaccaaacctaaacaaaaatctagaaagaaagatttccgaaaatctttttaatgaaaaaagagcagacaggacgagaattcgcttttctgaatcctttagagtattgttttctccgtcgaattcgcatgaacacttgagctcaacaagacggcgtggaagtggacggtgaggtagttttttttagtttttgaaagacatggcgcaaaacgggtacttggttccagcggatccttcggcggttgtgacggtgaagaagaaaacgccacaagcgtcgtgggctcttattgacgcgacgggacagagtgagccactcgatgttgataagtatgagatnatgcaccgtgtccaagattcacgctcgcgatccccggattctagaccccaatttaaccntaacccttncaactaatccttgggccganaagaaaagccaattggttcccaaantttgggnncataatccaaagggctaattaancaactttnccgaaaaaagggtttttgcc

SEQ ID NO: 2636 - DNA, 526 bp, Arabidopsis thaliana
  unsure at all n locations
  Clone ID: LIB22-033-Q1-E1-B4
gcagctttggnnnnnnnnnnnnnnnnnnnnnnnnnnnnnnnnnnnnnnnnnnnnnnnnnnnnnnnnnnnnnnnnnnnnnnnnnnnnnnnnnnnnnnnnnnnnnnnnnnnnnnnnnnnnnnnnnnnnnnnnnnnnnnnnnnnnnnnnnnnnnnnnnnnnnnnnnnnttatgacgtattcgtcgtctctttcggtgcctccttctgctcctcagtctcctaattactccggtggtctccgatcacagtcttctgtcttcgttgagcaagagaagtatctttcagagttacttgcagagcgtcataagcttactccattcctgcctgtgcttccacatgcatttcggctactaaaaccaaagaaattttgccgtgtaaccaacactgttgggagaaatgctaacaagttttaaagtcaaaaattgggcctttaaccaaccctaacccctcctggncttctgggagggaaaatttcanaaanggcaagaanctnganataaatggaatggggcctcccaantttccaaca

SEQ ID NO: 2637 - DNA, 534 bp, Arabidopsis thaliana
  unsure at all n locations
  Clone ID: LIB22-033-Q1-E1-B5
acgcggcccnggtaccggtcagnaaattcccggggtcgacccacgcgtccgttgtttcatttgcttcgtgtgcgatcgcgagaacaagggaaaattagggtttatatcctcaagctttttcgaacaccattgatcgttgatctaagatttttcttctagtcgagtttcttaaggggctttgatcaaactcaaaattgaagaccaatactttgaaggattctggtaaagctaagcaactatgagttcaaattcatgggctgatgtttctgaatcagagagggcaccatctggtggtggttggggttattctcgtccgtctcgaaccaactatgttcctccacatcttaggagccgtacaccatcttcggagtttgttgctccttcacctggtaataatgatcgtgggggatatggtggtgcaaatagtgggttatgggtggtcgangccaaaggttatgggtgggccgaaggttccgggctatggtgggtagaaggaaggtcctgttggccnggttgggaatgccaagaanttgg

SEQ ID NO: 2638 - DNA, 510 bp, Arabidopsis thaliana
  unsure at all n locations
  Clone ID: LIB22-033-Q1-E1-B6
gaattcatagtgctgcttcttcttctctctgagactctcacaaaatagaaacacaagatcgttaaaaagcttttagctccagatctgtggaaccgccatagctatggagttttatagaagttctagaagattacaaattcttggatctgtgattcttctgctctctattcatgtcgctcactctttttaccttcctggtgttgctcctcaggatttcgaaaagggagatgaattgaaagtgaaagtaaacaagttgacatctataaagactcagcttccatattcgtattactctcttcctttttgtcgtcctaagaagattgtggacagtactgagaatccttgggtgaagttcttcgtggtgaccgantcnaaaaatgctccttaattccgtttaaaatgcttgaggcgcaaatgtgtaangttcncggtcgtgttatgcctgatgcaaagtctggccaaagggttaaagagaanatggagatgantttcgagttaacagatccttgn

SEQ ID NO: 2639 - DNA, 425 bp, Arabidopsis thaliana
  unsure at all n locations
  Clone ID: LIB22-032-Q1-E1-H3
ggcaccnnnnnnnnnnnnnnnnnnnnnnnnnnnnnnnnnnnnnnnnnnnnnnnngtgtggagaattctttcttctcaataaacaacaacatgtcgtcgagcaatgaaaatgctaaggcacaagcgccggagaaatctgactttacccggagatgtagtttgctcagccgttacttgaaggagaagggtagtttcggaaacattgatcttggcttataccgaaaacccgattccagtctcgcgttgcccggaaaattcgatccaccaggtacttttattatctctttcttctttcatggccgccacttggtaatagtactttaaaaactcagttctgttactacttgcttttgccagatttactacttttgtattgtttcctcaattgtaagtcaattccctacttcaaaaataaattcccctgng

SEQ ID NO: 2640 - DNA, 409 bp, Arabidopsis thaliana
  unsure at all n locations
  Clone ID: LIB22-032-Q1-E1-F1
gcatgggtctttgtggcacatgtattaagcctataatgctgattgagaatattgctcaaggagataatgaagcggttaaggtggatttcgatgacaagcttagttgggagtatctattcaaggtatattggctttgcctgaaggaagagctgtctctaactgttgatgagcttactagagcaaataatccttggaaggaggttcctaacactgctcccaaagtggagtcacaaaatgatcataccaataacagagctttagatgtagcagtaaatggaacaaaaagaagaaggaccagtgattcccctaccttacccaacaagttggatggcaaaaatccaagtaatatcctaaagaaggctcctggagatacgaactgggcaacaaaaagaactcctcnagtttgtgt

SEQ ID NO: 2641 - DNA, 432 bp, Arabidopsis thaliana
  Clone ID: LIB22-032-Q1-E1-F10
gcaaaaaagctgctaagaggaagaagacgattcacttctttcccgccactttcactatcttctccggtggtgagcaaagatgttgtgggtcgacaagtacaggccgaaatcactcgacaaggtcatagttcatgaagatatcgcccaaaaactcaagaaattggtttccgagcaagattgtccacatttgctcttttatgggccgtcaggttctggtaagaaaaccctaattatggctcttctcaagcagatatatggggccagtgcagagaaggtgaaagtggagaacagggcatggaaagttgatgctgggagttagaactattgatctggagctcactacattatcaagcacaatcagtggaacttacccaagttgatccaggctttcaggacagtataatggtcaggagataattaaaggaatgggca

SEQ ID NO: 2642 - DNA, 430 bp, Arabidopsis thaliana
  Clone ID: LIB22-032-Q1-E1-F11
ggagaattttctctcgaatttgatcgatcacatatttcatctgtgtgttttcattttgaggatgccagcaacggaatatcaaagatcattcgggaggtcttttctgaatttacggcgagacacggcggtgaactcggttgagtcaacgacggttacccccgagttgactcagatggaagcagagcttgtttcgtttcagagaaaagttgctgagaggtttatcgatctcaatgcgtctagttgtgaagatctactgtctctcgaatgggttgggaagcttcttgattcgtttctatcttgtcaagaagagtttcgttccatagtcatcaatcatcgttcgatgattactaaaccaccgatggatcgattggttcagattacttcgagagaagtgttaaagctcttgatgttgtaacgccaatcgtgatgg

SEQ ID NO: 2643 - DNA, 424 bp, Arabidopsis thaliana
  unsure at all n locations
  Clone ID: LIB22-032-Q1-E1-F3
ncaaattctgaattgattttttttgtttataaacaaagcaaacaaaacacataattttggttcggtcttcttcaattttcaccgacacaaacccgtcttttcctcttctctctcatttctatcaatttttctctacaattccccagtcgtcgaagaagctacagcttgcaatttgctcgtgttctcttccatcattcctttgttaagagcctcttcatggcttctacggttgattccaatttcttctcatccgtcccagctcttcacagtaacctcggacttttgtctcctgatcagatcgaactggcgaagatcttattagaaaatggtcagagtcatctcttccaacaatgggcctgaactcggtgttgatgataaagagaagctagcttttttcgatnagattgctcgctaaaatcaagct

SEQ ID NO: 2644 - DNA, 418 bp, Arabidopsis thaliana
  unsure at all n locations
  Clone ID: LIB22-032-Q1-E1-F4
ttggttttggatttggtaaagcttctcggtcacttgctcggtgattgaaactgaatcgattgtgattgtgattgtgattgtgattgtgattgtgagggaattatggctcaagccgtagaagagtggtacaagcagatgccgattataacccggtcgtatctcacggcggctgtagtcaccaccgtcgggtgttcgctcgagattatatctccttataatctctacctaaatcctacccttgtggtgaagcaataccagttctggcgtcttgtcacaaatttcctttatttccgaaagatggatttggactttttgttccatatgttttttctagctcgatactgcaaactgctcgaanaaaactccttcaaggggaaagaccgcngatttcccttanatgcccctaatcgggggaant

SEQ ID NO: 2645 - DNA, 428 bp, Arabidopsis thaliana
  unsure at all n locations
  Clone ID: LIB22-032-Q1-E1-F9
cgatctgtaaagtttcaaacttgtggtcgaatttttaaatgggaagtggaagagatagagacgaccctttatccttcaccagcaatccatctacggcgtcgtctccagtcactgtatctgactatctcgacaactttctcggcgaacccacttctcgctccggtagttttcaaagcgagagcttactcggtggaggcggtggagaaagcatcaacgacgctgattttggattcgctcgtcctgatttccgatcggaacaactagctggaaccgtacagttttacgagaggcatgtcttcttgtgctacaaaaagccatctgtttggccgcaaggatcgaggctgctgagttcgattgattgcctangctactctctgctgctgtatcgggcaaaaagggtaacatgaagaangagactcgactcacaa

SEQ ID NO: 2646 - DNA, 425 bp, Arabidopsis thaliana
  unsure at all n locations
  Clone ID: LIB22-032-Q1-E1-G10
gagactctcaaatgtatccttctctcgacgatgatttcgtctctgatttgttttgcttcgatcaaagcaatggagcagaacttgatgattacacacagtttggtgtaaatttgcagactgatcaagaggatacctttccagattttgtgtcatatggtgtgaatttgcagcaggagccagatgaagtctttagtattggagcttctcaattggatttgtcctcgtataatggagttttgtcgctagagccagaacaggtggggcaacaagattgnnnnnnnnnnnnnnnnnnnnnnnnnnnnnnnnnnnnnnnnnnnnnnnnnnnnnnnnnnnnnnnnnnnnnnnnnnnnnnnnnnncnattgctccagaaagcgggcaaggactggntcntgtancagaggaggaggaactaaanctgtcgtga

SEQ ID NO: 2647 - DNA, 229 bp, Arabidopsis thaliana
  unsure at all n locations
  Clone ID: LIB22-032-Q1-E1-G3
ncttgggtagtattaggctgtagtaagaaagtgaagtactgatatgtatgtgtaagctctctcagtgatgggaagttttgtaggtttgtgtggttttaacttaatgataaggtgtttgtttgtagtagtagtctccatgtaactanatgggggaaaagtatgtgtgactttaagtttcttaaaagctcaaagaaactttancccttaaaaaaaannanaaaaaagggcg

SEQ ID NO: 2648 - DNA, 423 bp, Arabidopsis thaliana
  unsure at all n locations
  Clone ID: LIB22-032-Q1-E1-G5
gcccacgcgtccggaagaaagtccactcaagaaaagagaaatggcgtttgaagctcttacgggagtcaacggtgatctagtcaccatatcatggatggcgtcgaagggagctaaccaaacggagcactatctcaaagaagaagtaggaggaaccgtttttttcgccttccgagcatctttctcgtcggaagatttgttcgctacggagaatacatctccctttggagaaataaagatgaancgtaatcaatttccttgtatgagaagcatcggcaacgacgttgacactactgttaacgaagctttcctcaagtcacttgaagttctcattggtccaagaacctcatttcatgcttctgtgcaaaacgcggttgatagaaaacaacaagttgtgttcacaaggacattccttccgaggcgcaa

SEQ ID NO: 2649 - DNA, 468 bp, Arabidopsis thaliana
  unsure at all n locations
  Clone ID: LIB22-032-Q1-E1-G6
ntgttacttgcgcgccaggtaccggtcaagaattcccgggncgacccacgcgtccgaattacttcaccgtgaagaagctgatcaagaagaggaaaggactgacgccgcgcgagaagacggcgcttcatgactgtttggagactattgatgagacgctggacgagctccatgaaacggtggaagatctccatttgtatccaaccaaaaaaactctccgggaacacgccggagatctcaaaacactaattagctccgccattaccaaccaggagacttgtctcgacggcttctctcatgacgacgccgataagcaagttcgtaaagccttgttgaaggggcagatacacgtagagcacatgtgcagcaacgctctagcaatgatcaagaacatgactgatactgacatagccaacttcgagcaaaaagctaaaataacctcaaacaancgttagctcaaggnggagaatc

SEQ ID NO: 2650 - DNA, 415 bp, Arabidopsis thaliana
  unsure at all n locations
  Clone ID: LIB22-032-Q1-E1-G7
tctccggtaaaacaattccaacatcacgaggcatctacctgcgggagggtactgcttgcagacagtctactgagtggacaatacaagttgatccgaaattccatgaaggtgcaagtaatttaaaggaacttgtccctttcgaggaatgtcttgagttgcactccacagatgaaggagttgtacgggttcctgactatctccttctcactaataatggacgtggcttcaacgttgttgtggatcccacaaatcttggggatggtgtgcattactttgaagtttatgggattgattgcaaagcaccagancgtggtccccttttcagaatcccantnacaataataattcccaaagactgttggcaaatcaacctccagttaattcaatttcancaaatgtcttcatctcaaggcan

SEQ ID NO: 2651 - DNA, 475 bp, Arabidopsis thaliana
  unsure at all n locations
  Clone ID: LIB22-032-Q1-E1-G8
ctttacttgccncgccaggtacaggtcangaattcccgggtcgacccacgcgtccgcgaacaagaaccctagaattcgcctcctctttccaaaattcccaatttttgtaatgacgggatagaaaaattcccaatgtccgctttatctttcattctcgattagaattcttcaaccaaaggtcactctctctccgttccattgcttctggatttcgtttttaagggttttacatttttcctgccttcttttacccatcagaggaagtttcaagccattttgttaatcagctctctcataagctaagatgtcgtcatcgccttttccagtcttggacaaccgaccaattgataagtggaaggttacggaattgaaagaagagcttaaaagacggagactaacaacaagaggcttgaagggaggaattggttaggcgtcttgatgaagcacttcgtgctgagcaagaagaatctgaaan

SEQ ID NO: 2652 - DNA, 436 bp, Arabidopsis thaliana
  unsure at all n locations
  Clone ID: LIB22-032-Q1-E1-G9
gcncgtgtacgcaggctgctgaaaagcttagaattacctccaaggagctggtcaagcttaatgtagctgatggaatcattcctgtaactgatcctacctctaatctatctgtttcctcttacacttcttttctcactttggatcactgagtaactctcacatgttgtacaggaaccgcttggaggggcccatgccgatccttcatggacgtcgcagcaaataaagattgctatcaatgaaaacatgaatgtaggcatagttgttcttctcaacgctggatgtggatctaaaagagttctaacttttttttgggaacttgtaggaattcggaaaaatgagtggggaggagctcctgaaacacaggatggctaaagtaccgaaagattggagtgttcataganggcgaancaatnagagccaagttaggaaaatcaac

SEQ ID NO: 2653 - DNA, 437 bp, Arabidopsis thaliana
  unsure at all n locations
  Clone ID: LIB22-032-Q1-E1-H11
ggnggttgctactgacgccggnnaagagagatggcgagatcgtgctcnatctggacacctgttttgntctcactttcaccagtgaccggagaatcacctaaaatttcacggcgccgggtgattttagccanaagtataggatctcctcagcctttacttgangcanagatcaaggaacctcanaancttcaagtccttgattccaaagatgtttccagaagaaacactatgctgtatctagctgctggatttcttggagggatcaactttctcaatggtgaagccgcagaagctcgagtagggagaaagggagancagaanganagcattggagaagctgatggccaaagctaaagagtcanagcccaacaacaagtcaggtanccaaaaagatagagaaagagttagagaaagaagaantgtttcctctacttcct

SEQ ID NO: 2654 - DNA, 472 bp, Arabidopsis thaliana
  unsure at all n locations
  Clone ID: LIB22-032-Q1-E1-H2
cccgncccaggtccaagaatnaacgggtcganccacgcgtccgcccacgcgtccgaaaaaagagaaggcatggccgcggaagaagcgacggagttctacctgagatactatgtcggtcacaaagggaaatttggacacgagttcctggagttcgagtttagagaggacggtaagctccgttacgccaataactctaactacaagaacgatactattatccgcaaggaggtatttctcacccccgccgtgctcaaggaatgcaagcgtatcgtctccgagagcgagattctgaaagaagacgataacaattggccggaacctgaccgtgttggaaagcaagagctcgagatcgtcttgggtaatgagcatatctcattcgctacatctaagattgggatctcntgttgattgccaaagcagtaatgattctgaaaggacttcgcatccntcnaataaccctgttaaggngctt

SEQ ID NO: 2655 - DNA, 415 bp, Arabidopsis thaliana
  unsure at all n locations
  Clone ID: LIB22-032-Q1-E1-E7
ttcaaaaccccgtcaggctcatcttcttctagcaccttcttcttcccttaaagtattcaactttatctgaatttgaccattttctcttcatttctccgactaatttcccttcatttcgatctttaagcatctgggtatctccctttctccatctattcatcggaatttgcgcttagattttgaatattttgaagctttttttgggatagaggagattgaaaatggggaaatctggaggaaggaagaagaagagtggtggttcgaattcgaattcgagtcaagtcaattcatctgaaacttcaggattatccaaaccgtcaacgattgttaatggtggtgttgattcgtgcttcgatattcctgaaacgtgcacatgagcttaagggaagaaggnaataaaaaagttcaaagcaag

SEQ ID NO: 2656 - DNA, 418 bp, Arabidopsis thaliana
  unsure at all n locations
  Clone ID: LIB22-032-Q1-E1-D10
ggactatgttgaagctgctgttaaacaggcaatgacgattcacataacaagcccacctggggacattctcatttttatgaccgggcaagatgagattgaggcagcgtgcttttcactaaaggagagaatggaacagctcgtatcatcttccagtagagaaataacgaacctactcattctcccaatatactctcagttacctgctgacttgcaagcaaagatattccagaaaccagaagatggagcccgtaaatgcattgttgccaccaatattgctgaaacatcattgacagtcgatggaatatattatgtgattgacactgggtatgggaaagatgaagggtttcaatccctaagaatggggtanggatgccccttcaaagttttccccataaagtccgtgcaancctcctgatta

SEQ ID NO: 2657 - DNA, 434 bp, Arabidopsis thaliana
  unsure at all n locations
  Clone ID: LIB22-032-Q1-E1-D11
ccctcttctctccactcactcagctcttttgattcccctccaattttctccgacggtacggtcgaaaaatccaaccggagatcaaatggcactgccgtcgatctcatcaatcggcgcgacgttctcactcctaatctatttatctcttccttattcaatcacagctggtgaaaacaacctcctccaccaatctccaaccgctagatcacgacgtcccatggtgttcccattgttcctctctcaaccaaattcttcttcgagatccatatcaatcccacatcgaaaactccacaaatccgactcaaaatcacttcctcactctcgcatgagactctacgacgatcttcttattaatggggtattacactacgaggctttggattgggtacacaacacaaatgtttgctcntaaagttgattctggtaagtactgg

SEQ ID NO: 2658 - DNA, 424 bp, Arabidopsis thaliana
  unsure at all n locations
  Clone ID: LIB22-032-Q1-E1-D2
gggagaattcaccaaggacgagaacgatgctaacaaacttaaccgcattcttcaactcacaggattcagtgacccagtctatgctgaagcatatgtgacggtacaccattatgatattgctcttgaagttacagtaatcaaccgaaccaaggaaacccttcagaacttgtgcttggagttagcaaccatgggtgatctcaaacttgttgagcgtcctcagaactacagtctggcacctgaaagaagcatgcagattaaagcaaacatcaaggtgtcgtccacagagacgggagtcatattcgggaacatcgtctatgagacatcaaatgtaatggagcgaaacgtcgttgttcttaatgacatacacattgatatcatgggactatatctcccctgctgtgtgttcaaaaggtgcttnaaaaaa

SEQ ID NO: 2659 - DNA, 411 bp, Arabidopsis thaliana
  unsure at all n locations
  Clone ID: LIB22-032-Q1-E1-D7
gcccacgcgtccggccggaaagggaaaaccggttgatttcgtgttatgtattggagatgacagatctgatgaagacatgtttgaagcgattggtaatgcgatgtcgaaaaggttactctgtgataatgctctagtctttgcatgcacagttgggcaaaagccaagcaaggctaaatactacttggacgatactactgaagtgacatgcatgcttgaatctctagctgaagcatcagaggcttcaaacttttctatgcgtgaacttgatgaagccctttgatttggaaccagatcttttgccagatggctaaagaagaggttagacagacaaagacaaggaatagaaagagactggggaattttgttggtctgtatgtgtttgtcagatttgaaaagaaagaaaagaanaaa

SEQ ID NO: 2660 - DNA, 401 bp, Arabidopsis thaliana
  unsure at all n locations
  Clone ID: LIB22-032-Q1-E1-D8
gcttcttttgatgttcttgtagcgtctgtacgaaatctcacaaggtttcttcttctcagatttagaaatacttgtgtgatatcttctgagtaaccaaattcttgataaagtttctagctttattcaaacccatttgaaaaatccggtggtgaatcgccggagaaatgtgtttttcgtttctccactgagttttttttgttaagaaatctgttaaaactctagatttcaaacgaatgacattttctgagattgaggaacattgtgaatcgaggactggagtgaagattctctgatgagtgattcnnnnnnnnnnnnnnnnnnnnnnnnnnnnnnnnnnnnnnnnnnnnnnnnnnnnnnnnnnnnnnnnnnnnnnnnnnntctgcgtttcggtgaagaagtan

SEQ ID NO: 2661 - DNA, 439 bp, Arabidopsis thaliana
  Clone ID: LIB22-032-Q1-E1-D9
gctcatgtcactgatcgtctcggaggagaagaagtgtggaggttgaagaagggagaaaatgagcggtcatgattctaaatatttttcgactacgaagaagggagagatccctgagctcaaggaagagctgaattcacagtacaaggataagaggaaagatgctgttaagaaggttattgcggcaatgactgttggaaaggatgtttcatcacttttcactgatgtagtcaattgcatgcaaactgagaatctggagttgaagaagcttgtttacttgtatctgataaactatgcaaaaagccagccagatcttgctatcctcgctgtaaatacttttgttaaggattcacaagacccaaatccattgatccgggctttggctgttccgaacatgggctgtatccgtgttgataagattacagaataattggggtgatcc

SEQ ID NO: 2662 - DNA, 415 bp, Arabidopsis thaliana
  unsure at all n locations
  Clone ID: LIB22-032-Q1-E1-E1
gngcagcagcttacgaccactgacccttttgcttttgattcaatcgatagacgacggatacaagttctcgctatcgccgagccggagccggagtctgagctgaagccctgtatctgtaactcttccaacagtggacataccttgagagatgaagatcgttcgcagggattttgttcgtaatggacccggaagcgttaagatggtggcagaggactctgatgatctctggtatgcttataacttgattgctgtgggcgatagtgtaatggctgtcactttcagaaaagttcagagagagatacctggtgggggaagagactctgaacgtgttaaactgaagctggaagtacaagttgaggaagtggactatgacaaanacggatntgttttgcgcatacgtggnaaaaataacctg

SEQ ID NO: 2663 - DNA, 438 bp, Arabidopsis thaliana
  unsure at all n locations
  Clone ID: LIB22-032-Q1-E1-E10
gcccacgcgtccgaaaaaaaaaaacagattcctgatattttctgcttcgcttcgctttgctttggcctttgggtttgctttgccttttatctccacaataataatattcgttaacctctcctcgttctcgtcgctgtttcttcccgatctttgctatagttctggattcaaaatctttcttccccaatagatgtttgtctcttaatttttgatttttctgcaaaatcaaatttttaagagctatggaggaagagaatgttactagttcaccttcaacaccggtacataggcttaggcatcgaagacgttctaatgaggttgttacggatggggataaagtgaaatgcaagttcctttgttggntaatgatcnggaataagtacaaatccttcaatgggccgggactacnccaacggtaanggatgaattggggggttt

SEQ ID NO: 2664 - DNA, 440 bp, Arabidopsis thaliana
  unsure at all n locations
  Clone ID: LIB22-032-Q1-E1-E11
gaatagacaaagaaaacaacatggctgattctaagatgaagctccactgtggctttatctggggtaattcggcagctctcttttgtatcaatgagaaaggtcttgactttgagcttgtcttcgtagattggcttgctggtgaagccaaaaccaaaacttttctctctactctcaacccatttggtgaagtcccggttcttgaagatggagatctcaaacttttcgaaccaaaggcgatcacgcgatacctagccgagcaatacaaagacgttggaacaaatctattaccagatgatcccaaaaagagagcaatcatgtcgatgtggatggaagtagatagcaatcaatttcttcccatancatcaacactcatcaaagaactcatcatcaatccatatcaaaggttaaccacagacgatacaacaagttcaaggaagaac

SEQ ID NO: 2665 - DNA, 421 bp, Arabidopsis thaliana
  unsure at all n locations
  Clone ID: LIB22-032-Q1-E1-E12
cggggaatttgagtatcgtgagaagcctgacacatgttgccctaaatgcagtgagccacagacctctgatatgtccacaagtccaaatgagcttatattacttgtaaggtttgtgcaaacacttctatcagaccgatcgtcggaaagaaaaagtaacttagagtctggcaatgataagctgttgacgaaactgaaagctgatgatgatcaatggagacatgtcataggaacgatcatagatggcagtgcatcatcaacaagtacagttgattggcttctacaggaactgcttaaagacaagctggatacatggctgtcttcaagatcatgtgatgaagattacataacgtgttctttgtcaaagcangaacaaggtattatccatatggttgcaaggcttggcttcgaatgggcattttat

SEQ ID NO: 2666 - DNA, 418 bp, Arabidopsis thaliana
  unsure at all n locations
  Clone ID: LIB22-032-Q1-E1-E2
tttcctctctatatctctcactcacactttttctctatatcttctcctcaacttggatatgggtgaagccgtagaggtcatgttcggaaatgggttcccggagattcacaaagccacatcacccactcaaaccctccactctaaccagcaagactgccattggtatgaagaaaccatcgatgatgatctcaagtggtcttttgccctcaacagtgttctccatcaaggaactagtgagtaccaagatattgctctgttggacaccaaacgttttggaaaggtgcttgtgattgatgggaaaatgcaaagtgctgagagagatgagtttatctaccaatgaatgtttgattcaacccgctctccttttccaatccaaagttatgcacttaatttacntcacttacaaataaaattttgg

SEQ ID NO: 2667 - DNA, 428 bp, Arabidopsis thaliana
  unsure at all n locations
  Clone ID: LIB22-032-Q1-E1-E3
ggggatttcttctgggatgatgagtttcgacctaaatgggatttcatgcttgccaacttcaaaacgttggaggaggacactcagacaggaacaatgattgttcagtggagaaaaaagtttcctttttttctgtagtgaccgagagtatatcattggccggagaatatgggagtctgggaagaagtattattgtgtcacaaagggagttccttatccagctctaccaaagcgtgataagccaaggcgtgttgagctttatttctcaagttgggttatcanancggttgaatcccgaaaaggagatggacagcaaacggcttgtgaagtttcccttgtccactacgaaagacatggggcatcccaaaagacgtagcaanagttaggtgtccgtcatggcatgtngggaactgtcaanaagctaaactccg

SEQ ID NO: 2668 - DNA, 412 bp, Arabidopsis thaliana
  unsure at all n locations
  Clone ID: LIB22-032-Q1-E1-E4
ccgagaatttgcaagagttccaagactggaatgagtattattcctgtgatgcaaaatatcgcaactggctcaaattccagttagagaatgctgaagtcactgaactgtcagaagaggaaaatcagaaagctgttgtagcagccaaagagactctggattcttctttgtcattgcttctcagacaagacaacccctggatgacatttctcgaagaccatgtattcgaatcagaagaatatttattccttgaattgcatgcaactgcgatgctctgtttgccttctggtgaatgtctgcgcccagatgccactgtttgtgctgcactaatgagtgcactttactcttctgtcagtgaggaagttgttttagatcccagttaatgggtaaatgtatccatttcgtcaaagggana

SEQ ID NO: 2669 - DNA, 425 bp, Arabidopsis thaliana
  unsure at all n locations
  Clone ID: LIB22-032-Q1-E1-E5
ttcttgaataaaatcagaattacaaacaaaaatggttttgcaaaagcttcctctcattgggctgcttttgctcctgaccatcgtcgcctctccancaaatgcagatggacctgtttgcccgccgtcgaacaaactaagccgggcaagtttccctgaaggttttttatttggcacggctactgcggcataccaggtcaaangtgcgattaatgaaacttgtcgtggaccagccttatgggacatctactgtagaanatatccagagangtgcaataacnataacggcgatgtggccgttgaattcttccaacgttataangaanatatccaactaatgaaaaatccaaaacacangacgcccttanaaatgtctaatcgcaagggccaaagaataatttcctcaatgggaaaaaaaggggaaaang

SEQ ID NO: 2670 - DNA, 411 bp, Arabidopsis thaliana
  unsure at all n locations
  Clone ID: LIB22-032-Q1-E1-E6
ataatttgttgacgaccaaaagtaattaaacacattacacatggggaaaaagaacggctcttcttcttggctcaccgctgtaaagcgagctttccgatctccgacgaagaaagatcatagtaatgacgtcgaagaagatgaagaaaagaagagagagaagagacggtggtttagaaaaccggcgactcaagaatctccggtgaagtcttccggtatctctccaccagcacctcaggaagattcacttaacgtaaactcaaaaccctctccggagacagcaccgagttacgcaactacgacgccgccatccaacgccggtaaacccccgtccgccgtagtccccatcgccacgtcagcatctaagacactcgcaccgangcggtttattacgcaagagaaaattacgctgnt

SEQ ID NO: 2671 - DNA, 424 bp, Arabidopsis thaliana
  unsure at all n locations
  Clone ID: LIB22-032-Q1-E1-D1
gcaaaacacatactaattgtttctccttctccttcttccttgcaaatggatactttagcttcaaactcttcggatctcacgaccaagtcaagtctcggaatgtcgtcgtttaccaacatgtatctcctcacaacgcttcaagcccttgcggccctttgcttcttgatgattctcaacaaaataaagtcatcttcacgaaacaagaagttgcatcctctcccgccaggacccaccggttttccaattgttggaatgattccggcgatgcttaaaaaccgtccagttttccggtggctccacagcctcatgaaggagcttaacacggagatagcttgtgtgcgtctaagaaacactcacgtgattcctgtgacatgtcctaagattgcacgtgagatnntcaagcaacaagacgcatccttgggtn

SEQ ID NO: 2672 - DNA, 496 bp, Arabidopsis thaliana
  unsure at all n locations
  Clone ID: LIB22-030-Q1-E1-G6
atcttctnggtggctccgtaccgnnctggaaattantnngnccggtcgacgagactcantagtcggcggccgccctttttttttttttttggagttagaatgctatgaattccaaaccagagaagattcaaataaaacagagactaaaaaggctgttcaaacagtagtaattcttgcacatgaacactaaaccagaacgataacaggaaacaaagatacagtcagtactcagtagtttgagggcacctacggaaagcaagtaatactacagagggtagacgttccagtgcttaatgatgaaacatcatcagtacaagcaaacgtgtttttcatcatacaccgtatcactttcacaagtggctgcagtcattccgcaacataanggagattgacntcgagaagcagcatcaactttgcgcaaagggacaagggtaccaagagatggggaactcncattgnaanncctttcangggaaatccccttaaaanggggagg

SEQ ID NO: 2673 - DNA, 532 bp, Arabidopsis thaliana
  unsure at all n locations
  Clone ID: LIB22-030-Q1-E1-H10
nctggtttactggtctctaccggncccggaaatcccgaaatcgacccacgngnccgattgcctgatttcttcttgggagatcagttaactagccaggttcaagcgattcgaagcatcgagttctatatatgttactatggttggggagacttcagacacagaaaaagcacttgcaaagaatctgatgtctacaacactttcttcttcattgttgctgtcatcccttatgtctctcgcctccttcagtgcctgcgacggctgtttgaggaaaaaaacccggaacaagggtacaacggactcaagtatttcttgactatagtggcggtttgcttgagaacggcttacagtatccaaaaaggtcaagtcgcttgggaggggtttaactggctgtcctcccaattatagctgcaatattcctggtcttactggggacttgtccaaggattgggggccttcnaaaccgggcatccaaaaaccgtgcttcnaagataaactccctggtcctcaaaagaaagtntacctcaaagcgatg

SEQ ID NO: 2674 - DNA, 527 bp, Arabidopsis thaliana
  unsure at all n locations
  Clone ID: LIB22-030-Q1-E1-H11
gaactggtttgcctgttccctacggccccgganatcccgangtcgacccacgcgtccggatnaatcgacttgattttctcaaactggttgctcatgtatctctctgataaagaggtggaactaatggcagagagaatgattggatgggtcaagccagggggatacattttcttcagagaatcttgcttccatcaatctggggacagcaagcgaaagtcaaaccccactcactaccgtgaacccagattctacacaaaggttttccaggaatgtcagacacgtgatgcttctggcaattcatttgagctctctatggttggctgcaaatgcattggggcttatgtgaagaacaagaagaatcagnatcagatttgctgggatatggcaaaaatcagcgtggngaatgacaaggatttcaaccgttccttggacaatgttcaaatacaatccnattgggattcttccnnaagaacgtgtcctttgggnaagnattgtnancactgggnggattnggaacactaaagaat

SEQ ID NO: 2675 - DNA, 498 bp, Arabidopsis thaliana
  unsure at all n locations
  Clone ID: LIB22-030-Q1-E1-H12
cccacaatccgaatcgacccacgngtccgcgaatttctagggattatgaattatgagtcagctcaacctggcagctccagtgtcaatcctgggaccgtgaaaggtactgatctagagggcgaagttggtgaaacacaggccgtggaaaaagaaaaccttttggttggtgaagctcatcctgctatccctcacggtcattctccttcatcttcatcttcttcatttaacatggtcgacttcccaagcatgcctgctgttgaggtcttgtctggtggttcttcatctactacaaaagacgtgccagttcctcttcaggaggatatagaaaagaatgacgtggagataaccatgctcaaaggactcnaggaaatgggtttcaaaggagatananttgaacaaaggagatctnaaggataacgantncaacctggagcaatccgttgatgcnccttgtgganttancgantgggatcaatcctaaagganctcaggagatgg

SEQ ID NO: 2676 - DNA, 438 bp, Arabidopsis thaliana
  unsure at all n locations
  Clone ID: LIB22-030-Q1-E1-H2
tccaaatcctcagtttcattttcatctctctctctcgtattgatcagctactcgaaactccggtaacggattttcacaatcccggcggcgaaactcttcttcccggctaagttttcattttcttcagattcctcgtaaagttgccggtggaccaaggtccaactcttgaacaccccaaatcatgaatcccttttcttctggtactcgtttaagggacatgatccgtgccataagagcatgcaaaacagctgcggaggagcgagctgttgtaagaaaggagtgtgccgatattcgagcattgattaatgaagatgacccgcatgatcggcaccggaaccttgcgaaactcatgtttatacacatgccngggttatcccaanacaactttggggcaanatggaattgcttgnaagctaaattgaatcncccggaatttcc

SEQ ID NO: 2677 - DNA, 482 bp, Arabidopsis thaliana
  unsure at all n locations
  Clone ID: LIB22-030-Q1-E1-H3
gccacggtcacncataattcgccggtcgacgagctcantaatcggcggccgccctttttttttttttttggagttagaatgctatgaattccaaaccagagaagattcaaataaaacagagactaaaaaggctgttcaaacagtaataattcttgcacatgaacactaaaccagaacgataacaggaaacaaagatacagtcagtactcagtagtttgagggcacctacggaaagcaagtaatactacagagggtagacgttccagtgcttaatgatgaaacatcatcagtacaagcaaacgtgtttttcatcatacaccgtatcactttcacaagtggctgcagtcattccgcancataaggagattgacttcnagaancaacatcaactttgcgcaaaaggagcaaggctaacaaggaanatgggggacccccaattgcnacgccttcaaggagaactcnccttaaaagggaaaggcctt

SEQ ID NO: 2678 - DNA, 436 bp, Arabidopsis thaliana
  unsure at all n locations
  Clone ID: LIB22-030-Q1-E1-H7
ggagatttatacaacaaatcgacatagcaacaagcgagcatctcaaatctgtctccttccaaggcgttgtagacgtcaaagatactagtggaagagtataattaataagacctaagtccatctagttgacgcgatcaaatgtctaccttaatcacttttcttttttgataaggtttatatcttgtttttattaatgcagttgatattggaacaaatgatcctgatgatcataagtaacatcaaacctgagactaagagcaaactgatagagagttttagagatttcagctttgatttggttaggtccccttttgatccttctttttggaacgctctttacaatggtcttatggcacgcagcaatgtgatgaagatgctaaaaagaatgttcaaagagangagagaagaagcaacatcggatgaccaaaatatgggg

SEQ ID NO: 2679 - DNA, 406 bp, Arabidopsis thaliana
  unsure at all n locations
  Clone ID: LIB22-031-Q1-E1-A1
gaaactttgaagcttcttactttctttacttcacgatccttcttttgcctaatttctcggtttcatttccaaaattctcttttgattctttcttactctttcgctagagaagatttagactgggttttgagtatttctcggaaattttcgtgtnntttttttctgggaaagtttccgagatctcggtggagtacgttttttggcgacgaaccagtatggtttggtactcaagctgtagaattttgtttctgggtctgcttattttgttggcttcganctgggttttggataaagccaaggaatttggnaaatttgggttggaattccacaatttccncgnttaaaggtggtngggntttggcnggagaaagggttaaccaanccnnattcttccaaatantataca

SEQ ID NO: 2680 - DNA, 437 bp, Arabidopsis thaliana
  unsure at all n locations
  Clone ID: LIB22-031-Q1-E1-A12
gcataattgtctcacccgagcttcctctccagctagggtttgtttgtttgattgaagaaagaaaacaagaatggtgtatttcaatttcaataggattaagangaanaagactctaattggatttggattgggacagatcctctcgcttctctcgacttctcttagctttacatcgtctgagatcgctatgaaaagattttagcttttttttttttttcaaaccatcccatttttaaacattctcatgaacttacaaaatttgaaatctttatagggattaatgctccaacatcacagtcgtttctgggttatntgttactggnaatcgtctatggaggtatcatgctctatcgaacatnggaattaaatggtatcactatctcctccttgcgtttgttgatgttgnggcnaactttctcgtgggaaaggctatcaga

SEQ ID NO: 2681 - DNA, 450 bp, Arabidopsis thaliana
  unsure at all n locations
  Clone ID: LIB22-031-Q1-E1-A5
ggacagaagtggagatcaaagcttcggctggacagtttcatcacatgtttgccgggaagccacaccatgtctccaaagcaagtccaggcaacattcagagctgtgatctgcacgaangcgactggggcactgtcggctctatcgtcttctggaattacgttcacgatggggangcaaangtggcgaaggagagaatcgaggcggtggagccggagaagaacttgatcacgtttaaggttatagaaggtgatctgatgaaaagagtacaaagaactttttgatnacgattcaagtgacccctaaacatgggaaggcctggaaattattgtgcaatgggaaccttgagtnatganaaaatcaacgacnangttactcaaccccaaactcccctccaattccgtgttgaagtctcccaaganattcaacaacatctccttatcccaaggaana

SEQ ID NO: 2682 - DNA, 466 bp, Arabidopsis thaliana
  unsure at all n locations
  Clone ID: LIB22-031-Q1-E1-A6
gggaacttaggtttcgcggtttggataaccggagacttggtgatctcaagccatccaacctcgaagagactttcggatcatatgactcagcttctgtgatgcaacttcaatcaccaagcaggcattctcagatgaaccactatccgtcttcacctgtgaggcagcctcctcctcatggattcgaatcttcagcagccatggcagctgcagtgatgaatgcaagatcctcagcgtttgcgaaacgcagcttgagtttcaaaccagctccagtagcttctaatgtctccgattggggatcaccaaatgggaagcttgagtggggaatgcaaagagatgagctgaacaagttgaggagaattgcctcctncggnaatcaagggaaccaacaacaacaagtgngncagncctggcnaaaaacncagtggacnaaccaaaatgtttccttggtnaactcaccgggtgaaaa

SEQ ID NO: 2683 - DNA, 496 bp, Arabidopsis thaliana
  unsure at all n locations
  Clone ID: LIB22-031-Q1-E1-A8
gcctattaatcggtactgtgttttcttctgtgatcgtgagattagaaaatctacccaaatttttgattttgcgataagggtttttcttaatttcgtctacggatatagaaaatgtcttccatcaatttatcctcatcatctccttccaccatctctctttcncgctcangactaagccaaagctctactacantactccatggactacatcgtgttactttaccatctaaccatccattgtcaaccttttccattaacaccaatactgggaaaaagttaagggctgcaagtgatctctaaaanaaagattgatctggctcncaattcaacaaacggganacaatnctcctcctcaaaaatgggcccctcaattgatgatnngggncnnaaagaagccaataanaaggcngaattnggtttcaacnttggnacaacgtggcaggctgaatcctggctcccgggnacaagcnaaatgggttttgttgccgaaanatta

SEQ ID NO: 2684 - DNA, 413 bp, Arabidopsis thaliana
  unsure at all n locations
  Clone ID: LIB22-030-Q1-E1-G4
anaaaaatggagtataggtttcatatctctcgcttttctcttcatcacttcctcttcagctgagttcatcattcaacaggtcacaaagggcagaggaatagagtacaacagttcttacagtctcgaggagaatcttggagtgacaagagagttgagagaagagcgaccatcgagtaagatagtgacaataacaagcttctcagtgattaaaggcagaggagaaccctatgaatcctctgtttttgaggctgctggttacaaatggagattggttttgtacgtgaatggtaataaaaacgacggtggaaatgatcatatttccctttacgcaaggatcgaagagacaaactctcttccattaggttgggaaattgaatgttgatntcaaantccttgtccaanaatggggaaac

SEQ ID NO: 2685 - DNA, 487 bp, Arabidopsis thaliana
  unsure at all n locations
  Clone ID: LIB22-030-Q1-E1-E11
gcgtatcgaaaatcttcttcgggtcagacgatctgaagccgatcgctgtagaatcagtttcgtgctccgcagtttctcgagtttcctctcacttcagatcttcataagagaattcacttacggagagggactttttcgtagacgattctcactggatatctatcacccggtaagatcgtcttgctcgaaaagaattgaaaagtttttaagtaattgaataaggaactgtgaatcggagaggcttacttttttgaaaagatctaaaccatcgtagaagatcgtcctcaaaatatctcacaagaagttaccaattttgaaaagatnactaagagatagctacggattttgagaaggcgggttctggtccaangtccggnactggtgaaaagnagaactacactgggtttttccaagatgatatgaaancttccgtngaacgaatccgantcnaaggnactcatcnaagagaatccggggattgtnttga

SEQ ID NO: 2686 - DNA, 517 bp, Arabidopsis thaliana
  unsure at all n locations
  Clone ID: LIB22-030-Q1-E1-E12
gttgcctgncctacggcccggaatcccgaatcgacccacgcgtccgcccangcgtccgaaatcgtgtcaaattttagggttttttcttttcgtacttcatcaaattctggaatctggttttttcttagttttcttctatatacctttgaatcgcatctttgatccaaattcattttagatatcaccttgaagtcgaatttgtgattttttcttttcctctcgaattctcaaagtctcacgcaactatgaaagaagacatggaagtactatcgctcgcttcactaccggttgggttcagatttagtccaacggacgaagagttagtccggtactatctccggctcaagatcaacggtcacgataacgacgttagagtaattcgtgagatcgaaaacctgaaaatggaancctgggaatttgccgaattttccggnggtgaagacaacaaganccnaaatgggtcctcctttggnccttgggcccgggaatatccgnatgggaatccnaatggaataaa

SEQ ID NO: 2687 - DNA, 421 bp, Arabidopsis thaliana
  unsure at all n locations
  Clone ID: LIB22-030-Q1-E1-E2
agaagaaaaaaaatcatggagatgaccgaagcttccaaacagacaacagcagaaggatcagcaaatccagaaccagaccaaatcttgagtccgagaagatcgttggagctaaaacaaaagaaatggtggatctctgtttctttatgtattttcttagtcttgctcggagattctctagtcatgcttctcttgaacttcttctatgttcaagacaatcgagaagatagtgaccaagatctacaataccgaggaacatggttgcaagctctggtccaaaacgctgcgtttccactactcattcctctgtttttcattttcccttcaacaaaacaaaaccaangaaaccaccaatactcgtttctccccttttcgtccaatcttacttaaatcnccctgggggtcctgttgccggtcanagaaa

SEQ ID NO: 2688 - DNA, 477 bp, Arabidopsis thaliana
  unsure at all n locations
  Clone ID: LIB22-030-Q1-E1-E7
ccntcggtaccgaacacaaattcgcgggtcgacccacgcgtccagtgatggaggcaataaggattagttgtgctggctatcctactaggaaacattttgatgagttcttggccagatttggtattcttgctccagaagtgttggtaaagaactctgatgaccctgctgcttgcaagaagcttctggacaaagtgggactcgaagggtatcagattggcaagacgaaagtttttctgcgggctggacaaatggctgacttggatacccgaaggactgaggtcttgggaagatcagcaagcattattcagagaaaagttcggtcatatctcgctaaaaagagtttcatcgttctgcgtaattctgctaaacagattcagtcagtttgcagaggttatctcgctagaagtgtatatnaaaggcatgcgttagggaanctgctgctttaaaatccagagagacttgcgtaggtttcnggct

SEQ ID NO: 2689 - DNA, 475 bp, Arabidopsis thaliana
  unsure at all n locations
  Clone ID: LIB22-030-Q1-E1-E9
gcttgaanggacaaatatagtcttgctgctgtgacaaatgatatattcacgaaagaggatggtgagtttctggtgaagaatggggctcttcctgaggaaaggattagagctgttgaaacaggtggatgtccacacgctgctatccgtgaagatatcagtatcaatttgggtcctcttgaggagttatctaacttattcaaggctgatttgcttctttgtgaatccggtggagataatttaactgctaatttcagtanagaactanctgacaatatcaccacatcaaccgatgtatccggctgggtgataaaataccccgtaaaggcggccctggaatcactcaagctgatcttccnggtgataaccaagactgaccttgcancaactgttggggctgantnttcggccnnggnaagggnttcctngncntnctttntggggggccattttccttngcccagggttaaccatgggt

SEQ ID NO: 2690 - DNA, 437 bp, Arabidopsis thaliana
  unsure at all n locations
  Clone ID: LIB22-030-Q1-E1-F1
gcngttgccattcaaggagacactaatggtgctcttactttgaatcttaatggtgaaagtgatggcctttttcctgccaagaagaccaaatccggagccgtttgtcaggtcgaaaactgtgaagctgatcttagtaaagttaaggattatcatagacgccataaggtctgtgagatgcattccaaggctactagtgccactgtcggaggtatcttgcagcgcttttgtcagcaatgtantaggttccatcttcttcaggagtttgatgaaggaaagagaagttgtcgtagacgtttggctggccataataaacgtcggaggaaaacaaatcccgaacctggcgctaacgggaatcctagtgatgatcactcaagcaactatctcctgatactctccttgaagataccctcaatatgcataaccataccngtgattaa

SEQ ID NO: 2691 - DNA, 518 bp, Arabidopsis thaliana
  unsure at all n locations
  Clone ID: LIB22-030-Q1-E1-F10
cctggncctaccggcccgganatcccggagtcgacccacgcgtccgcccaagcgtccgaagaaatcatcgtcttcttcttcatctattnnnnnnnnnnnnnnnnnnnnnnnnnnnnnnnnnnnnnnnnnnnnnnnnnnnnnnnnnnnnnnnnnnnnnnnnnnnnnnnnnnnnnnnnnnnnnnnnnnnnnnnnnnnnnnnnnnnnnnnnnnnnnnnnnnnnnnnnnnnnnnnnnnnnnnnnnnnnnnnnnnnnnnnnnnnnnnnnnnnnnnnnnnncttgcccgttctgtgcagaatcgtatgatatcatcgggttgtgctgtcacatagatgatgaacatactttagagtcgaagaacgccggtatgccctgttgttccncttaaagtgggagttgataaccgtagcacacataacgcttcaacaagggaatttanttaagttgcagcgaaagagaaagtcacgaaaaagcggtaccaattcgacacttcacttctccggaagaactaaagagaaggn

SEQ ID NO: 2692 - DNA, 465 bp, Arabidopsis thaliana
  unsure at all n locations
  Clone ID: LIB22-030-Q1-E1-F2
ccacggtcacaaatccgggtcgacccacgcgtccnaggacgcgtggggttctagatcgcgagcggccgccctttttttttttttttttgggatccatacaacaacaactttaatatacatttcacattaattgtcaaacagataagaaaagatcatacgaaaatagagcagctgattttnnnnnnnnnnnnnnnnnnnnnnnnnnnnnnnnnnnnnnnnnnnnnnnnnnnnnnnnnnnntttaaacttgttctttcactctaaaacctgttcttctccttgcagttgcttctcaccatttttcttgtttttctcattcaccaaagttagtcaaaacgaaactacaactacgcgaagcttcactcctccacaacaccaangccantctcaacantctctccatcangggcactattaaacattcaggncctcctcanacttgggggttcccttttggnctttccaa

SEQ ID NO: 2693 - DNA, 437 bp, Arabidopsis thaliana
  unsure at all n locations
  Clone ID: LIB22-030-Q1-E1-F4
acagcgaagatgattttgttgccatacgtcctgagtggaccactgttgatcggattcttgcctgcagagaggaagatggggagctggaatatcttgtcaaatataaagagctatcctatgatgaatgttattgggagtcagaatcagacatctcaaccttccagaatgaaattcaaaggttcaaggatgtaaattctagaactcgcagaagtaaagatgttgaccataaaagaaatcccagagactttcaacagtttgatcatactcctgaattcctcaaaggcttgttacatccataccagcttgagggacttaattttttgcggttctcgtggtcaaaacagacgcatgtaatcccttgctgatgaaaatgggactaagcaagacaattcaaagcaattgccttttaacntcactttttgnggagaaccccatcc

SEQ ID NO: 2694 - DNA, 470 bp, Arabidopsis thaliana
  unsure at all n locations
  Clone ID: LIB22-030-Q1-E1-F5
cggtaccgaactcaaattcgcgggtcgacccacgcgtccagtaagacctaactcttaacgaacttttagataaaagcttataactgagagagacatagatcgacaaaagtctctataccttcttgtaacgtggtggttaattaatcatggccgatcaaatctccggcgagaagccggccggagttaatagattcgctcttcaatgtgctatcgtcgcctccatcgtctccatcatctttggttacgatactggtgttatgagtggagcgatggtgtttatagaagaagatttgaagacaaacgacgttcaaatagaagttctcactggaattctcaacctttgtgcccttgtcggatcattgctcgccggaagaacgtcggacataatcggacggcgttacacaatcgtcttgggctcaatactantcatgttaggctcaatantgatgggttggggtccgaaatatccn

SEQ ID NO: 2695 - DNA, 442 bp, Arabidopsis thaliana
  unsure at all n locations
  Clone ID: LIB22-030-Q1-E1-G1
anaaagttgcgatgatacttaaagatccgggtatgcggagtgtcttctcaagaaacggacaggttttgaaaaccggtgagacttgctataacccggagctagctcagagtcttgagactatttctgagcaaggcccgggagcgttctacaacgggacagtaggcgagaagcttgttaaagatgtgaagaaggcgggagggatcataacgatggatgatctaagaagttataaggtccgagttaccgatgcaatgtctgtggatgttatgggttatacggttcatggaatgccgcctccttcgggcggtacagtcggtttttcgatggttatgaatatcttggatagttactccaatctttacactgcttcgggaagaaaactccggctgcaccgttttgataaaaacaatgaaacatatgtttgcaacccgtaatggatttt

SEQ ID NO: 2696 - DNA, 521 bp, Arabidopsis thaliana
  unsure at all n locations
  Clone ID: LIB22-030-Q1-E1-G12
antggtttgcctgcgccctaccggccccggatntcccgnaatcggcccacgngnccgatttantcttcattcttcgntttcataccanaacaagaactctctgttttcgacaaaaacgaaaccttgagatctattttgattgacttttaagaaagagagagatctttcttagaagattttgtctcgtcggcattgaagatccagggtttgtctttcgaaattcagagagaaaatgggtgatgaggcagagatcaaggaacatttaaagccacaagcttcatctgaaacaatggacaagaaacataatgtgaaagggaagaggttatggcaagaaagtcaagtatcaattggtggagtttcattcattgcctgcttattaagagacatgggtnctcantgggcnatnccgattcngattggcgatttaacagatcctcncancaaccttacaatcncnaatggaccttggaggttnggcccctgaatngggttttnccggtttgggcncaccaaataaccgg

SEQ ID NO: 2697 - DNA, 422 bp, Arabidopsis thaliana
  unsure at all n locations
  Clone ID: LIB22-030-Q1-E1-G3
tttttttttttttggagttagaatgctatgaattccanaccagagaagattcaaataaaacagagactaaaaaggctgttcaaacagtaataattcttgcacatgaacactaaaccagaacgataacaggaaacaaagatacagtcagtactcagtagtttgagggcacctacggaaagcangtaatactacanagggtagacgttccantgcttaatgatganccatcatcagtacaagcaaacgtgtttttcatcatacaccgtatcactttcacaagtggctgcagtcattccgcagcataangagattgacttcnagaagcagcatcaactttgcgcanaggaacaaggctaccangaagatggggactctcaatgctacncctttaaggagacatctccctanaaaggagaggcctt

SEQ ID NO: 2698 - DNA, 445 bp, Arabidopsis thaliana
  unsure at all n locations
  Clone ID: LIB22-030-Q1-E1-E1
gagaaaaatgtataaatcaccattaacgttgctcacacttcttactatttgttttggattcttcgatctcagcagtgctctttatggatcttcgtcacctgtggttcagctcactgcttctaactttaagtccaaggttcttaattcaaatggagttgttttggtagagttctttgcaccatggtgtggtcattgcaaagctctaacacctacatgggagaaagtggctaatattctgaaaggagttgctactgtggctgcaattgatgcanatgctcatcantctgccgcgcaggattatggtattaaaggtttcccaacaattaaggtttttgttcctggaaaggctccaatcnaattancaangaacaaagagatgccaaatccaattgcnaaatttgccttaaaagcaaattaangggccttttaantgaccgtttggaaa

SEQ ID NO: 2699 - DNA, 531 bp, Arabidopsis thaliana
  unsure at all n locations
  Clone ID: LIB22-030-Q1-E1-B12
acggttgccgttcctacgcccggaatcccgaatcgacccacgcgncaggtaaagaagaanatgttagantcggagctaacaagtttccggagaggcaaccgatcngaacttcngctcacagtgacaaggantacaaagagccaccacctgcgccgttgttcgagcccggcgagctancttcatggnccttctgganagctgggattgctgagtttatagctacgtttttgttcctgtacatcactgttttgactgttatgggtgtgaagaggtcaccgaacatgtgtgcttccgtcggaatccaaggtatcgcttgggctttcggtggtatgatcttcgctctcgtctactgcaccgctggtatctccggtggacacatcaanccaancggttacnttccggttggtcctaactaagganccttccctcaacaacgaaccgtgtnccacaaaagggaagnaattgccttaaggaacnancctgttgagctggtgtttggncaaagggggttcancccaaagcaataacaag

SEQ ID NO: 2700 - DNA, 449 bp, Arabidopsis thaliana
  unsure at all n locations
  Clone ID: LIB22-030-Q1-E1-B2
ggcttttgacaatgggccacagacacagcaagnnnnnnnnnnnnnnnnnnnnnnnnnnnnnnnnnnnnnnnnnnnnnnnnnnnnnnnnnnnnnatgttaaacctgccggagaacgccgcggatcatccggttccggaaccgtcggatcgtcaggctccggaacaggcggatctcgttccaccacatctactcagcagaatggtcggatcttaggtcggccgatggaggaagtacggagaacctatgagtttggtcgtgagcttggtcgtggccagtttggtgtcacgtacctcgtaactcacaaagagacgaaacaacangtcgcttgcaagtcaatccctacgcgccgcccttgttcacaaaagacgacattgaagatgttcgccgtnnaagtccaaaattatgcaacaatctcaacgggtcaaccggaacaatatngaccttgaagg

SEQ ID NO: 2701 - DNA, 468 bp, Arabidopsis thaliana
  unsure at all n locations
  Clone ID: LIB22-030-Q1-E1-B4
ggtcacanatccgggtcgacccacgcgtccgaccacgcgtccgcaaaaaacagagacaaaagaatggcgcgaaaatccctaattttcccggtgattttgctcgccgttcttctcttctctccgccgatttactccgccggtcacgattaccgcgacgctctccgtaaaagcattctcttcttcgaaggtcaacgttccggtaaactccctccagatcaacgcttaaaatggcgccgtgactcagcattacgcgacggttcctccgccggcgttgacttatccggtggttactacgacgccggagacaacatcaagttcggttttccgatggcgttcacaacaacgatgctttcatggagtataatcgatttcggtaaaaccatgggaactgagcttaaaaacgccgtgaaagctgttaaatggggaacagattacctccntaaagcgaaggggaatccccgggtatct

SEQ ID NO: 2702 - DNA, 444 bp, Arabidopsis thaliana
  unsure at all n locations
  Clone ID: LIB22-030-Q1-E1-B8
anaaattcgccggtcgacccacgcgnccngaacaaacctggaatactacttgaagttgtgcaagtcctaaccgatctcgatctcactatcactaaagcttatatctcttctgatggtggatggttcatggacgtantccatgtcaccgatcaacaangaaacaaggttacngatatcaaaaccatcgattacatcgagaangtgttaggaccaaagggtcatgcttcggcttcacaaancacttggcctggtaaaanagtcngtgtccattcattangcgaccacacatcgatagagattattgctcgtgatcgtcctggtctcttgtcagaggtttcagccgtactancagacctcaacattaatgtggtggcaagctgaacatggactcacaaaccgttaggattgcntgtgtcctctangtgaatgacaatgcaaantcca

SEQ ID NO: 2703 - DNA, 515 bp, Arabidopsis thaliana
  unsure at all n locations
  Clone ID: LIB22-030-Q1-E1-B9
tggctctancggcccggacatcccggantcgacccacgcgtccggaaanaaaccctatgttattccagtcggtggatcgaactctttgggaacttggggttatatagaagcagcaagggaaattgaggagcagctgaattatagacccgatgacctgaaatttgatgatattgtggtagcatgtggcagtggtggtacaattgctggtatttcattggggtcttggttgggagctctaaaagccaaggttcatgctttctcggtttgcgatgatcctgattacttctatgactttgtccaagggcttctggatggacttcacgctggtgttaactctcgtgatatcgtcaacatccacaatgccaaaggaaaaggatatgccatgaacacgtcagaagaaccttgagttgttaaagaaagttacaaagttcaactggtgttaatcctgattccgtttacanttggaaaactccttanggttgataaatgagattaccaaagatcccaatgtttgg

SEQ ID NO: 2704 - DNA, 453 bp, Arabidopsis thaliana
  unsure at all n locations
  Clone ID: LIB22-030-Q1-E1-C11
cgtgggctcatctggttttcgagagagatagagaaagtgagacaaggttaaggaggaagaagatgactgagaatcgggtggttttggctctgcttatactctgcattgttgggtttgagccaagtttcatccatggagctacggattcatcagatacttcggcgttaaacatcatgttcagctccatgaattctccaggacagctctcacaatggacagcatcaggaggtgatccttgtggccaaaactggaaaggcataacttgctctggctctcgagttacacaaataaagttaccaagtcttggactttccggatnacttggattcatgcctgataaattgacntcngttactgagtttgatatgaacaacaattaccttggaggcaattgccttaacaacctcctccaaacttgganccaantgaatcctgctaataaccaattcactg

SEQ ID NO: 2705 - DNA, 532 bp, Arabidopsis thaliana
  unsure at all n locations
  Clone ID: LIB22-030-Q1-E1-C12
ntggttgcctgttcctacgcccggaatcccgngtcgacccacgcgtccgcccacgcgtccgggtttcttggacagaacgatcatagacgatttcaaagattacgcggatctatgtttcgagagatttggtgatagagtaaagcactggatcaccatcaaccagcttttcacagtgcctacgagaggctatgcattgggaacagatgcacccggtcgatgttcccaatgggtggataaaagatgttacggtggagattcttccaccgaaccctatatcgttgcgcataaccagcttcttgctcatgccacggtcgttgatctatacaggacgagatataagtaccaaggagggaagattggcctggtgatgataactanaatggttccaacaatatgatgacactcctanaagagcaaacnagcaactttggangggcaaaagaaatcctcctggggaatggtcaaagggnccccctaacaaanggntaatnnccnttcatcnaganggaaacctgtttggaancccggcttc

SEQ ID NO: 2706 - DNA, 426 bp, Arabidopsis thaliana
  unsure at all n locations
  Clone ID: LIB22-030-Q1-E1-C2
gattccctacagagtactttctcaatgctaccttcaggaaatcagcttcagcagccaaggccagcagcaagctcacagcctgcagtgtcctcacaaggtccatcctccggtttgccacctggaagtgcagttggatctggccattctactcctgctggaaataatcagcctccgtggccaaaaatgaaaccatccgatgttcagaaatacacaaaggtatttatggaagttgatagtgacaaggatggaaaaatcactggtgagcaggcgaggaatctatttttaagctggaggttacccagggangtattgaagcatgtgtgggaattatctgatcaggataatgatactaagctttctctgaagggagttctgcanttcaattgnatttgatggagcggtataaaaaaaggcgttctctcccna

SEQ ID NO: 2707 - DNA, 426 bp, Arabidopsis thaliana
  unsure at all n locations
  Clone ID: LIB22-030-Q1-E1-C8
aatctctctttctgtgacctttcgcaacttgtcaaagcaccacgaccttctctctacggagttgagatcaatccccccaaatctcggtgtggttcctctanggtttttgatcggaatcggaatcgataatctaaccggcatgaggccaatcctattgccggatccacccagtctatctaccggcgtccctgatattttcgaacaaggcggttcccataacgtcgtcagacgcgccgtcgtcatcggaaacggtttccctggctccgagaatcagtgtatcggtctcgttcgtgcgctnggcttatctgataatcaccttctcctaccgangtgacaaggccctnaaagggagggactaaatngaattggntggcaatgggntccccaaattgggntttcnccaagaaagtttgggnctttaatcct

SEQ ID NO: 2708 - DNA, 513 bp, Arabidopsis thaliana
  unsure at all n locations
  Clone ID: LIB22-030-Q1-E1-D11
ctaccgccccgganatcccgantcgacccacgcgtccgcggacgcgtggggaaacagagatttcgcagaggaaccatcactgattgtgtcaccgaaccattgatcttcaagttccgatccaatttcagatatgtcgaggattattggtagaaaagggattaactatatccatagactaaattctgcgtcgttcacgagcgtatctgcttcttcaatcgagaaagggcaaaatcgcgtgattgatgcttcgttaactcttattcgtgaaagggcaaaactcaaaggagagttagtgcgtcttttaggtggagctaaagcttcaacatctcttcttggtgtaccacttggtcacaactcttcttttcctcaaggncctgctttgctcctcctccgtatccganaaactaatttgggggtggtaancacaaaactnctgccactgaaanaaagggaaagganttnaaagggntcaacnggtttcnaactgaaggttgggggaattttccggtncaa

SEQ ID NO: 2709 - DNA, 510 bp, Arabidopsis thaliana
  unsure at all n locations
  Clone ID: LIB22-030-Q1-E1-D12
antggtttgcctgttcctacggcccggaatcccgaatcgacccacgcgtccgctggccttcanaagctggacatgtcaagcaacactctcagtggncctatccctgcttcgcttgggcagttanaanagcttantaacttcaatgtctcgaacaacttcctggtggggcanataccttcagacggagtgctctctggattttctaagaactccttcattggaaatcttaacttgtgtggaaagcatgttgatgtcgtgtgccaagatgatagtggaaacccttcatcacattctcantcangtcaaaatcanaagaaaaactctggtaagctgctgattagcgcatcaagcaactgtaggtgcgctactcctaagttgcactcaaggtgtttcctggggatggctttcaanataaaaaagccncggtaaatccgaaaatttaaagncctggcaanggatgtttggtggaaggttcctctaattgngaatgttccacnggggaatttacct

SEQ ID NO: 2710 - DNA, 437 bp, Arabidopsis thaliana
  unsure at all n locations
  Clone ID: LIB22-030-Q1-E1-D2
naaacacatggtgatttcttgagactggaacatacggagggatacatgaagttatctgccaagacaaagacgtttttcgctaccgctgtttccttgtgggatgcagaattctacatcaaagttgacgatgacgttcatgtgaatcttgcctccctcaagaaggctttatccgcacaccaaaacaagcctcgggtttatgttggttgcatgaagtctggtcccgtcctagccagaaagtaagtaaaaaccctactaaggtgagcattttttaggtacttaaacagcgtaagagcatcaacctttccggactttctatacttctggcaaaaaaaaaaacaggagtgtgaagtaccatgagccagagtattgggaattttggagaaatcnggaacaagtattccgccaagccactgggcaattttaggcaaaacnaaaga

SEQ ID NO: 2711 - DNA, 452 bp, Arabidopsis thaliana
  unsure at all n locations
  Clone ID: LIB22-030-Q1-E1-D9
caaaagagacgacagagaaagaagaagaagaaacgcgaagaacagaaacagctctcttaagcttttcttaattattattataattttctcttcttaatccccaaatctcctgatggattcatgaaccagatcggctgatttgagtttccgggtttgatttttttccctttttgtgaaattgggttggaatctggagatctggatcttataaagctggaaactttacgtgtgcttgatgaaccgattttgattaggtgattggttagattcggaaatttgaagacttgttaatttgggtttgggattgggattgatctgaaaatttgtagtttttggaagatatgttggaagattgattaccagaatcctgtttgatacaaggggtttcccaagctcncgtccttccgaatcaaactggtccaaccctacatgtttccagagggatgatgana

SEQ ID NO: 2712 - DNA, 482 bp, Arabidopsis thaliana
  unsure at all n locations
  Clone ID: LIB22-030-Q1-E1-B10
gcccgganatcccggatcgacccacgcgtccggttatangagtatattcactttcttcaagaaaaagttcacatgtatgaagattctcaccaaatgtggtatcaatccccaaccaaattgattccttggagaaatagtcatgggtctgttgcggaggaaaatgaccatcctcaaatcgttaaaagcttttcaagtaatgataaagttgctgcttcttcgggttttctcttggatacgtacaattcagtaaatcctgatattgactcagcagttagcaccaagattcctgaacacagtcctgtttcagcagtttcatcgtatctacgtaccgagccttcgctgcagtttgttcagcatgacttttggcaaccaaaaacaagttgtggaacaattaacngttttacaaatgaattgttaacatcctgacgaaaaaacatcagccagcttgtccacngtcngctcacaaggttaanccttcggaa

SEQ ID NO: 2713 - DNA, 461 bp, Arabidopsis thaliana
  unsure at all n locations
  Clone ID: LIB22-028-Q1-E1-G11
ccgnacggtaccgaacagaaattcgcgggccgacccacgcgtccacccacgcgtccggtagtaataatggtaacgaagaagatgatcaacaagaggaagaagaaacggatcttctgaaacgatccggttcaagtgcaagtaccggttcagcgacggttcgattaccaaccggaagaggtagttacagtagatccaccagtagtatacgcgagatcgagctgattccgatcgaatcggtgattcatctgagctggattgctcggcgaatggtctccgccggttatctccgtgaatgtattcaagtctacggaagcgttcgcaaatccgccgtcgattcaagtttccgacggttagggatcgagaaactcagcatcggagatgttcanaggctaaattgggaaacgcttgancagaaagattcgtcttggattcgaagcactaagatcgtgtganaattgtgt

SEQ ID NO: 2714 - DNA, 421 bp, Arabidopsis thaliana
  unsure at all n locations
  Clone ID: LIB22-028-Q1-E1-G12
ncagagccttactccatgctctgtggagaaccattatttttcagagaaaacatatgcaaaggacacattagatgagccgaagcggatagcaaagaagcttacttctcatgtatctggtacgggttgccataagaaagtttctgaaggaagcaatagaaaaagggataatgatttacatcggttgctgtttatgcctaatggacttccagacgggactgaattggcttactatgtgaaaacgcagaaactactacagggttacaagcaaggaagtggtatagtatgtagctgctgcagtagagagattagtccttcgcaatttgaagcgcatgctggaatggcggctagacgacaaccttatcgacatatcttcatctcttctggattgtcattgcatgatataaccatgtcactgggccaa

SEQ ID NO: 2715 - DNA, 438 bp, Arabidopsis thaliana
  unsure at all n locations
  Clone ID: LIB22-028-Q1-E1-G2
attggatcgaatttgttaaatttttcttctctcgataataaaaacaacaaatgatcgttgatcgtttttctctagattcgattccgattccaaagaactagtctccggcgtgtaatctctgatcgttgaagatccaagctacgccgcatcttactcgccggcggcttgaatcatggctgataggagaaacaggtgtaaccagatcctccttttagcataccagagttttggcttagtgtttggagatttgagtatttctcctctctatgtgtataaatgtacattctacggaggattgagacatcaccaaacagaagatacgatatttggcgcgttttctttgatattttggaccatcactctcctttcactcatcaagtacatgggttttgtgttaaattcaaatgacaatnggnaaaggagggatctttggctttg

SEQ ID NO: 2716 - DNA, 454 bp, Arabidopsis thaliana
  unsure at all n locations
  Clone ID: LIB22-028-Q1-E1-G4
accgnaggcaatcacggggcccnnccacgcgtcnaaaaaaccctaatttccctgganatttttnccaaannccaagcnctaagattcgttgtgagcaatgtcttctgtttcaagccagccacagtttcgttacacgcaacctcgttcaaaggttcttcatttgagaaacttgccatgggaatgcactgaagaggagttaattgaactcggaaagccttttggtactgttgttaatacaaaatgcaatgttggagctaatcgaaatcaagctttcattgagtttgaagatttgaatcaagctatacaaatgatatcttactatgcttcttcttcggagcctgctcaagttcgtggtaaaactgtctacctccagtactccaacaggcaagagatagtgaacaacaaaacgacagcgggatgttgtggggaatgttcctccggtgactaancaaag

SEQ ID NO: 2717 - DNA, 414 bp, Arabidopsis thaliana
  unsure at all n locations
  Clone ID: LIB22-028-Q1-E1-G5
acacactctcagtcgcacgctctttcacgcgccttttcgatttcacattcggatccgatttgttcacccgccgaagatccaccggcatcttctctaaacggctctgtcgagaaggatcggcgctattattgctggaggacgattgggtgtttactttttactagtaaacggagtaatttcccaagcgaaaggtttcatttttgagctccacgttgaacgaactaagcggtttctcggagttctcttgcttcctctccacccagcgcaatggagaaaacagacgaagagaggaagaaggctcagatgctggacgctcgggccagaaacattagccacaatgttcgctgcactgagtgtggaagtcagtccattgaagactcgcaagnaaatatcgctaatccccctaaaanagcg

SEQ ID NO: 2718 - DNA, 480 bp, Arabidopsis thaliana
  unsure at all n locations
  Clone ID: LIB22-028-Q1-E1-H1
cgtaccggtcaccnaattcccggggncgacccacgcgtccanccacgcgtccgcggacgcgtgggttgtattatagtttcagtcttgtatttttcattctattgcataacaccaacttcttcatcagcctccatccaagatcaattcataaactgtgtcaaaagaaacacacatgtttcttttccactcgagaaaacgttattcacccctgcgaaaaacgtctctttgttcaaccaagtccttgaatcgacggctcaaaatctccagttcttggcaaaatccatgcctaaaccgggattcatattcagaccgattcaccagtctcaagtccaagcttccatcatttgttcaaagaaactcggaattcattttcgtgttagaagtggcggtcacgatttcgaaggccttgtcctaagtttcacggattgaaaaaccgtttanantactcgaactgtcaaaaatggaaccaatccatggttg

SEQ ID NO: 2719 - DNA, 460 bp, Arabidopsis thaliana
  unsure at all n locations
  Clone ID: LIB22-028-Q1-E1-H11
ccgntcagtaccgaacacaaattcccnggncgacccacgcgtccngtaacancantggccaaaaccagagggtcttgttgtctcgtcaacgctctaancgctatagcttttttggcgacagcccanttgtgtgaagctggcttgtctcaanaagaacaggacanggtctcgaaattgcctggtcanaattttaatgttagntttgcacantactctgggtttgttgctactaatgagcaattgggaagagctcnctttnactggttatttgaagccgttgaagatgctaagtctaagcctcttgttctctggctcaatggaggaccatnatgttcatctgttgcatatggtgaaagcagaagagatatgancatttcacattaaggcagatgggaanactctttaccttaatcaatattcgtggaaccaagctgcaaatattttgtccntgaagcaactg

SEQ ID NO: 2720 - DNA, 463 bp, Arabidopsis thaliana
  unsure at all n locations
  Clone ID: LIB22-028-Q1-E1-H12
nccgtaccaatcacacaattcccgggccgacccacgcgtcnnctagagtcttcntttgagaatgagacaagattaggttacggtttagcataggattccaaattcattttcaatcccaaaaatacgattattcaggatatgggcaatcttctggtaagccaagcgagcaagatacgtacgcagacatagaagcagcttacaattggctaagacagacctacggtacaaaagatgaacgtatcattttgtatggacaatccgttggaagtggaccgtcgcttgagcttgcttctcgtcttccacgtctccgagcacttgttctccatagtcctttcttgtctggtctacgtgttatgtaccctgtcaagcactccttcccgttcgacatttacaagaatattgacaaaattcatctcgtgggagtgtcctgttcctgtaattcatggaacagatgacgatgttg

SEQ ID NO: 2721 - DNA, 476 bp, Arabidopsis thaliana
  unsure at all n locations
  Clone ID: LIB22-028-Q1-E1-H6
gtaccggnggccatcacgggccccccgcacgcctnnaanactagtcggcggccgccctttttttttttttttggagttagaatgctatgaattccaanccagagaagattcaaataaancaganactaaaaaggctgttcaaacagtantaattcttgcacatgaacactaaaccagaacgataacaggaaacaaagatacagtcagtactcantantttgagggcaccnacggaaagcangtantactacanagggtanacgttccagtgcttaatgatgaaacatcatcagtacaagcaaacgtgtttttcatcatacaccgtatcactttcacaaagtggctgcagtcattccgcagcataangagattgactcganaaagcagcatcaactttgcncagaggagcagggctacangagatggggactctcaattgctangcccttcaaggagactctccttanaaggaaagg

SEQ ID NO: 2722 - DNA, 476 bp, Arabidopsis thaliana
  unsure at all n locations
  Clone ID: LIB22-028-Q1-E1-H7
tccnacagcgtcggtaccggaccaaattccnggnccgacccacgcgtanaccaagatggggaaactganaaagcggattcgtccttgtgatattacaatcaacattggtaaagaggcgcctattccagaatgccctatccctggtgaaagatgganagaagttaagcatgacaatactgttacctggcttgctttttggagtgatcctatcaatccanaagagttcaagtatgtattcttggcagctagcagttcgttgaanggacanagcgananaganaagtatgagaaagcgangaagctacataaccatatagggagtattagagcagcatacaccatanattttantancaaggatgtnacaaagcggcaagatancagtggcaacatatctcatcgataagctancccttanggctggaaattgagaangatgacgatnacgcagatactgttggctggtggtcattgna

SEQ ID NO: 2723 - DNA, 442 bp, Arabidopsis thaliana
  unsure at all n locations
  Clone ID: LIB22-028-Q1-E1-H8
aaaaaatcggnggccccgaatctctcaaanccaattaacttttttccgggaagatctcaccggagaaaagctagctagggtttctccaccgtgaagattctagaagcgagaatttggaatttgctaattaagaagatgtgttacgatctttcttaantaaaaaagcattgaaattgacgaatttagggttgtgaaaaatatggatttggattcttcaatggtaccagagaatgatcaagatcctattgctacgtctgagaatcaatctcctatggaggagaaagaagaancgtctgagcaacaaaccggatccgaatccgaatcggcgtcattgacnccntctcntcctcntccttcgcagcagcaacatcancagcagcaacagccgcangtaacggcggtngttggcccgagatgtcgccaacgtaatcggttgttnatg

SEQ ID NO: 2724 - DNA, 460 bp, Arabidopsis thaliana
  unsure at all n locations
  Clone ID: LIB22-028-Q1-E1-H9
tatccagccgnacaggtaccgnacncnaattcccgggccgacccacgcgtccanccacgcgtccggtcgatttatttattcctctccaaagcaaaagcttcttcgatcgtccttgtctcgttttcaattctaaatgttttgtgcagaaaaatcatgactttggcttctccacgagtttcaaattcaaagacgactgtgttgttgtttcctcgaaaagtttcttcaattgcatttgctattggtggattaacttctttcgtcatcttcgcttctctgcttcttttcacgtatcccattggttcctctgttactgactatttctacagaacagagaccactcaaaacgtccagtttcaccatagtatccatgatcctgatcgtaacccatctcctgtttctagctcagagtcaccaccantattgacacaagatagtgatgataaaagtgctcccaanggat

SEQ ID NO: 2725 - DNA, 415 bp, Arabidopsis thaliana
  unsure at all n locations
  Clone ID: LIB22-028-Q1-E1-G10
aaaaaaatcatcttcttcctcaatttcttctgattcctcctctctttcttctacttctcaccaaatttctgttagttctctgataagtacatttcgtgcttatcaaatacttatattttaaggggttgaagttgtaattttgaagaagttgaagatcaatcaaaaataatagaagaacagagacgacgaaacgaaaccagccggagaactgagcagagaaaaacccccggcgagaatgggaaattcgaattcgtcttctgttgatcatcgcttcatttctgcttccagagcttttactcagaagaagctcgatgatctcaaatctctcttcgtctccctcgcttccaattctcagagcaatgaccaatacgtctcgtancctgttttccangttttgacgattcgtgttctgtcc

SEQ ID NO: 2726 - DNA, 486 bp, Arabidopsis thaliana
  unsure at all n locations
  Clone ID: LIB22-028-Q1-E1-D1
tccctgcgctgnggtaccggtcnccgnattcccgggncgacccacgcgtccanaacacaatcacattagccaaaaccatggcctcctcaagtctccatttcttcttcttcttgacacttctcttgccattcactttcaccaccgccacacgtgacacatgtgcgaccgccgctcccgatggttccgacgacctctcaatcatccccattaacgccaaatgctcacctttcgcacccactcacgtctctgcctccgtgatagacacggtccttcacatggcctcctcagactcccatcgactcacctacctctcaagcctcgtcgccggcaaaccaaaacccacctccgtccccgtcgcctccggtaatcagctccacatcggaaactacgtggtccgagccaaactcggcactcctccacagctaatgttcatggtcctanacacaagttacgacgccgtttgggtcccntggtccgggtggtccg

SEQ ID NO: 2727 - DNA, 468 bp, Arabidopsis thaliana
  unsure at all n locations
  Clone ID: LIB22-028-Q1-E1-D4
taccggtcacnaatccgggnccacccacgcgtccaaaaccatccgaagatattgaagacgatgacgacaaatctcagcctcactctggtggcggcgtcgatagtgctggaaagatatttgttggaggtttagccagggagacaacttcagctgaattcctcaagcattttgggaaatatggagagatcactgattctgtgattatgaaggataggaaaactggacagcctcggggatttgggtttgtcacatatgctgattcctctgtggtcgacaaagttatccaagacaatcacattataattggcaagcaggttgaaattaagcggacgataccaagaggattcatgagctctaacgatttcaaaaccaagaagatatttgttggtggaattccttcatctgtggatgatgatgaattcaaggagtccttaagcaanttggananctgaaggacacnagattatc

SEQ ID NO: 2728 - DNA, 442 bp, Arabidopsis thaliana
  unsure at all n locations
  Clone ID: LIB22-028-Q1-E1-D9
ncaaattcccgggccgacccacgcgtccnctcttcgccaacactgttcttgtctatgttcaagataatgttggctggaccttgggttatggacttccaacattaggtttggctatttccattaccattttcttgttgggcactccgttttaccgccataaacttcccactggaagcccattcaccaagatggctcgagtcatcgtggcttcatttcgcaaagccaatgcaccaatgacgcatgacatcacgagcttccatgagctgccttctcttgaatatgagcggaaaggcgcctttccgatccaccctactccaagtttacgattcttagacagagcttcactcaaaacaggaacaaatcataaatggaatctttgtactaccacagaagttgaagaaacaaaacaaatgctgagaatgttaccaatctgttcataact

SEQ ID NO: 2729 - DNA, 420 bp, Arabidopsis thaliana
  Clone ID: LIB22-028-Q1-E1-E10
accgacgcgtccgattttccggcggaaaagcaaatgtccgttaacgacagtatcgatcctcggttcgtattccacgttgaagatgaatctttgcgtttccgtgtgggagattcaggtactaagatccgggagctcgaaaccgtcggcgatcgccatttcagaacccagcaaggtttctgcggaaatagaattgagaaagatgaaaccatgtattccgatggagatgatgaagagtacgacgtttctatccgaagacgaactgctctgattcagcctggtattgattccggtaacaattatgattctgctgcagctgaagaaaccaacagagaaagtaaaaatccagttggttgggaactggttgtgagagaagatggggaaggtaattcaacgattgatcgacatgaaatgggagtttaa

SEQ ID NO: 2730 - DNA, 468 bp, Arabidopsis thaliana
  unsure at all n locations
  Clone ID: LIB22-028-Q1-E1-E11
ttgccgncccgtacgaacanaaatcgcnggncgacccacgcgtccanaatttttctcgagagatttctgaaaataaagtcgtttctttttttttttgccttggtcactcaagactctcttcttcactctctgttttttgtcctcttctaaaatttagagaaaaaaacgaaagttttcaccaaaaacagaggaggagctatgtcatcgtcgacgatgtacagaggagttaatatgttttcaccggcaaacacaaactggatttttcaagaagtcagagaagccacgtggacggcggaggagaacaaacggttcgagaaagctctcgcttatctggacgacaaagacaatcttgagagctggtccaagatcgcagatttgantcccggcaaaacagtanctgacgtcattanaccnatacaaggagccaagaggatgatgtcagcgacatcgaaacccggacttancccc

SEQ ID NO: 2731 - DNA, 481 bp, Arabidopsis thaliana
  unsure at all n locations
  Clone ID: LIB22-028-Q1-E1-E4
cgtaccggtcnggaaatcccgggccgacccacgcgtccagtttcaagtaaattaatttttgatcttttcattttatctctctctctttttcttctatccaaaacaccatttttgagatcagagcttctagcagcgtaaaaaatgcagacgaggtatatggagaggactaatagtatgagagagaagagaaaattggaggaagatgataatcagcagcagcagcaacagcctgagcgtaaaaggccagctcttgcaagtgtaattgtggaagccttgaagatggatagtttacagaggctttgttcttctttggaaccgattcttcgccgagtggtaagtgaagaggtggagcgggcattggcaaagcttggccctgcaagacttagtgaaaggtcgtctccaaaacgaattgaaggtatcggtgggaaggaatttgcagctacaattcaaggtcnaaaattgtccggtnccttgttaacgg

SEQ ID NO: 2732 - DNA, 415 bp, Arabidopsis thaliana
  unsure at all n locations
  Clone ID: LIB22-028-Q1-E1-E6
tttttttttttttggagttagaatgctatgaattccaaaccagagaagattcaaataanacaganactaaaaaggctgttcaaacagnaataattcttgcacatgaacactaaaccagaacgataacaggaaacaaagatacagtcagtactcagtagtttgagggcacctacggnaagcaagtaatactacagagggtagacgttccagtgcttaatgatgaaacatcatcagtacaagcaaacgtgtttttcatcatacaccgtancactttcacaagtggctgcagtcattccgcagcataaggagattgacttcgagaagcagcatcaactttgcgcagangaacaagggctaccaagaaatnggggacctctcaattgctaangcccttcaaggagaaatctccctaana

SEQ ID NO: 2733 - DNA, 417 bp, Arabidopsis thaliana
  unsure at all n locations
  Clone ID: LIB22-028-Q1-E1-F10
nctctactttgcttcttcactcgacttgtatctatcatccatggcttccgagaatcctttccgaagcatattgaaggcgttagagaagcctgatggtggtgaattcggtaactactacagcttacctgctttgaacgatcccaggatcgataaactaccttattccattaggatacttcttgaatcggccatacgtaactgtgatgagttccaagttaagagcaaagatgttgagaagattcttgattgggagaatacttctcccaagcaggttgagattccgttcaagcctgctcgggttcttcttcaggactttactggtgttcctgctgttgttgatcttgcttgcatgagagatgccatgaataatctcggtggtgattccaataaaattaatccgctggtccctgtagatct

SEQ ID NO: 2734 - DNA, 467 bp, Arabidopsis thaliana
  unsure at all n locations
  Clone ID: LIB22-028-Q1-E1-F11
ttctagccgntcagtaccgaacacagaattcncnggccgacccacgcgtccntggaaagttttggccaatagttcacagctatactatcttctctttggtactaatgcacattattgcagtcggattattcgggcttaaagagcttccagtggcatcttctttaacaattccccttccggttctcacggtccttttcagcatttactgccaaagacggtttttaccaaatttcaaatcttatcctacccagtgtctggtaaacaaagataaagcagacgagagagagcaaaacatgtctgaattctattcggaactcgttgttgcttaccgagatcctgcactttcggcatcacaggactcgagagatatctcaccttgagatcacctttttacttgagctattgaagtttgcttatgttgaagctgttggtttactatacctggtgcaatccatgaaagaacacac

SEQ ID NO: 2735 - DNA, 469 bp, Arabidopsis thaliana
  unsure at all n locations
  Clone ID: LIB22-028-Q1-E1-F2
ctaccggtcngcaaattcccgggnccacccacgcgtccnaancacgcgtccgtcggaaagaagagggagagagatgaagaagccggtcggagccgagaagaagagggttaaacgatcatcgggatctgcatctacttccgttagagattctggttctgattctcaacctaggaagcaagctgtgaagaaggatagttttcagttgtttgctgagaaagttagagaccacaagggattagaatccagatgggctgttatggagcaagcacgagttgaatactttagagggaaagattttgtgagctttatgaagaataaccctgactttaaagatattctggaagaagataaagaccttgacacagacgatattgccaatgttttgttgggaaagaacttttggtccgctgtgatcgtgttactaaaactcctcgtcccnggnaagaaaaagctccccaaacttggccng

SEQ ID NO: 2736 - DNA, 447 bp, Arabidopsis thaliana
  unsure at all n locations
  Clone ID: LIB22-028-Q1-E1-F5
ggtaccggnattgaattccngggccgacccacgcgtnnanccacgcgtccgcccacgcgtccgcccacgcgtccggaaagaggaagactttnnnnnnnnnnnnnnnnnnnnnnnnnnnnnnnnnnnnnnnnnnnnnnnnnnnnnnnnnnnnnnnnnnnnnnnnnnnnnnnnnnnnnnnnnnnnnnnnnnnnnngagttcggctacgaaccagagtaaacaagggaaacccaagaacaaaaacaatcctttttacagcaatgaatacgctacaacagatagatctggagctggttttaagctctctgtgctgaaagatcctacaggacatgatatatccttgcagtatgatcttggacgtgaggttggtcgaggcgagtttgggtataanttacttgtgtactgataaggaaactgggtgagaaantagcctgcaaantcatatccta

SEQ ID NO: 2737 - DNA, 458 bp, Arabidopsis thaliana
  unsure at all n locations
  Clone ID: LIB22-028-Q1-E1-F7
ngccgacggtaccggacccnaattcccgggccgacccacgcgtccnagtaagacctaactcttaacgaacttttagataaaagcttataactgagagagacatagatcgacaaaagtctctataccttcttgtaacgtggtggttaattaatcanggccgatcaaatctccggcgagaagccggccggagttaatagattcgctcttcaatgtgctatcgtcgcctccatcgtctccatcatctttggttacgatactggtgttatgagtggagcgatggtgtttatagaagaagatttgaagacaaacgacgttcaaatagaagttctcactggaattctcaacctttgtgcccttgtcggatcattgctcgccggaagaacgtcggacataatcggacggcgttacacaatcgtcttgggctcaatactaatcatgttaggccaataatgatnggt

SEQ ID NO: 2738 - DNA, 403 bp, Arabidopsis thaliana
  unsure at all n locations
  Clone ID: LIB22-028-Q1-E1-F8
cagcgactgtaccggacccnaattcccgggccgacccacgcgtncagaagaatcttgcatctgaaggcgactcaaataaccccggttcattggctggtaagaagattctcatcccaggttctggacaggagattcccgctaagaccagcacttgttgtacttcttcttgatctgtctcctactcaagcaagattcattttttttcctcctgaaatttgtgatagagaatgctactttcattgtatattctttttcgaatctggcttgtttgctagttcattaaacattggtgtgcaattggacaccgatagaaagtattggaacaaatagcttttgaatgaaatatgaaacaaacagtctttgagagttaacgtcaaaaaaaanannnnaaaaaaaaaagggc

SEQ ID NO: 2739 - DNA, 456 bp, Arabidopsis thaliana
  unsure at all n locations
  Clone ID: LIB22-028-Q1-E1-F9
gtaccgaancacacaattcccgggncgacccacgcgtccacgcttagctgggaccggtacacagatctacaccgctttatcttcgaagaaaacgtctgcagcagacatgttgaaggcttaccagacatacatgtcggtctgccctttcaagaaagctgctatcatatttgctaaccacagcatgatgcgtttcactgcaaacgccaacacgatccacataatagatttcggaatatcttacggttttcagtggcctgctctgattcatcgcctctcgctcagcagacctggtggttcgcctaagcttcgaattaccggtatagagcttcctcagcgcggttttagaccagcggaaggagttcaggagacaggtcatcgcttggctcgatactgtcagcgacacaatgttccgtttgagtacaacgcaattgctcagaaatgggaaacgattcaagt

SEQ ID NO: 2740 - DNA, 417 bp, Arabidopsis thaliana
  unsure at all n locations
  Clone ID: LIB22-028-Q1-E1-C9
naatcttaacaccaatcccaaatcagaaaaatcaaaactttttattttattttatcaaaatggcgcttatgaatggaagcatgaatctatcatcggtcaaatcatcgatgatcaaccaccgtcaaccaaacttctcctccgccgtctccagacccacttctttccggatctccgccgtgcaaaccgacccaaaaacaccagctgcttcatcggcgtcggcggcgacgacgactccggcaacgttgacgaagcccgttggagttaatgtgggtaaaggaaaatgggcaccagagagttggaggacgaagaaagctttacagcaaccggactatccagatttagctgcgcttgaagctgtgctagagacgatcgaagcttttcctccgatcgtgttcgccggagaaactanattgcttg

SEQ ID NO: 2741 - DNA, 485 bp, Arabidopsis thaliana
  unsure at all n locations
  Clone ID: LIB22-027-Q1-E1-H1
ttntcccgcccgtaccggtcaaaatcccgggcntcactcttttcctnnntctccctcnctcnctcttccattaaatctttgtggttctcttttattgttttgatactgtgctctgcttcggagagtgtagaaagagacagagctaaagtctctgtgtttcttctcagcaggactaaaaggaaaaaaggaaatcgattgctaatgtcgggtgagaaacaagcggaggagtcaatagtagtctccggggaggatgaggtggccggtagaaaagtggaagattcagcggcggaggaggatattgacggcaacgggggcaatggatttagtatgaagagcttcctctggcatggcgggtccgcttgggacgcctggtttagctgtgcatcaaatcaagtggcacaagtgctgttgacgctgccgtattcgttctcgcaattgggaatgttatcaaggaataattgcntcaaataatccaaaggggtaaa

SEQ ID NO: 2742 - DNA, 458 bp, Arabidopsis thaliana
  unsure at all n locations
  Clone ID: LIB22-027-Q1-E1-H11
ggcaccggtcagnaatcccgggncgacccacgcgtccanttaagctttatttctncgttttcgttttgtcnttctttatcgtctcggtttcgtcatcngatgtcaacgacggcgangatctcgtgatccgtcangtggttggtggagccnancctcangttttgacctcagaggatcanttttctctcttcaagcggnanttcgggaaggtctangcttccaacgaggagcatgactatagattcncggttttcaaagcgantctcaggcgagcgatgcgtcaccatnaagttggatccgtcggcaactcatggtgttacgcagttcncaaatctgactcggtcagagttncgtangaagcacttggggggttagaatgggtttaaccttcataaanatgccaacaaggctccgattctccctactggaaaatctcnctgaagattttgattggtaca

SEQ ID NO: 2743 - DNA, 472 bp, Arabidopsis thaliana
  unsure at all n locations
  Clone ID: LIB22-027-Q1-E1-H4
ncctaccggtcanaaatcccgggcccnancacgcgtccaaagagtcatcagcttgnngacgaaagcctttctaattccaatcttcttcacttgtatgacacgttcgtctactcttgcgcttggtcggttttcttaggatttttgcacaagaatgatcaacgcatgattcggattccaggatagagaatccatggctactttcaatgttctttgtagcaatcgatttagattcaatggaggttattctccggagaaatttaatagaaaggtgtcttcgaggagtagtgagcttaatgtttgtgtctctagaatcaggactcaatcgtttagttgcaggagacttggtgggtttatggaaattggtgaaaccaagattaagggttattaanagttcatggcgaatcctcgtaataaaatttcctgtataaccanattaagccacttgtgactgggtgantacggagaataagga

SEQ ID NO: 2744 - DNA, 438 bp, Arabidopsis thaliana
  unsure at all n locations
  Clone ID: LIB22-028-Q1-E1-A1
attcccgggncgaccacgcgtccnagaaaacaatcatcaggaataaagggtttgattacttctattggaaagaaaaaaatctttggaaaatggatcaaacagaggaaccaccactcaacacacaccagcagcacccagaagaagttgaacatcatgagaatggtgcgactaagatgtttaggaaagtaaaggctagagctaagaagttcaagaacagtctcactaaacatggacaaagcannnnnnnnnnnnnnnnnnnnnnnnnnnnnnnnnnnnnnnnnnnnnnnnnnnnnnnnnnnnnnnnnnnnnnnnnnncaccaggcgtaacaggtaaacctagagaaactaatgttccagcatcggaggaaattattccaccagggacaaaggngtttcctgtcntgtccttcccgantacaccaaanccactgaatccgt

SEQ ID NO: 2745 - DNA, 410 bp, Arabidopsis thaliana
  unsure at all n locations
  Clone ID: LIB22-028-Q1-E1-A10
aaatatctctttcctgttagagacaatggacggattgatcagaggtttggtcgacgtggctatcggaggaaaccaacgccgcggcggagacgatggtggtgatgatgaaggcaactcgagggacgagagatccagatctacttgggctaatgtggtttccggtgaggaagaggatcagaatcgcgcgggaggatcgtcgcacggccgtcgccagaattcagaggagaatcaatgggagaagaagggcgaaaggcttcccacaaggcattcacaatcacatgaggaggaccaggaagagaatacatatgcggctaaagtgagcgagaaacaagacttctcggagagccagcaagangaaaatgatggttgggaaactgtgggcaaaaagaaacctgcaanggaatcacata

SEQ ID NO: 2746 - DNA, 417 bp, Arabidopsis thaliana
  Clone ID: LIB22-028-Q1-E1-A11
gattctagtttctgctatcaaacacattttgacatctatccaattgctatcgtgcacatttgaacacaaactttgtttcaatttagcgtttacagtcgcagacgcaatcgcggttaagtgaagcgcatcgtcactttccacattcatagtaatatgcaacaactgagtaacagaaatttgtaatcgaactcagatttcgaagaagcagatctcacaatgtctggaaaacagcaaaatcatcgttctacttcctccagacccagatccaaaaccctaatcctcatcggctctctcttcaccgtctctctactcgtcatcctctacacctcttcttcctcctcccgagcctccatctccaatcccaacccgtcggaccgaccagagacgtccttcgttacctcgcctgagcaattccta

SEQ ID NO: 2747 - DNA, 447 bp, Arabidopsis thaliana
  unsure at all n locations
  Clone ID: LIB22-028-Q1-E1-A2
cgtaccggtcagcnaattcccgggncgacccacgcgtccnaaaaaaaaacaatttcttctagcgaagaagcagaattaatcaaagttcagagctttcactatgaatatcccaagtggaaccttctcaagatctgatcatttccatgcttcaagtgatgcttctctcttttcaagctctcttcctcttattcaacaccaaaacatcaaccctcgtgacagctaccatcagtctgttgatgaaatggcttctggcttagaccattttagtggaggcattggcaatatgcttgatgatggtgactcacatccaatcggaaacatgcttcctgatgatgaggaagagcttttctctggtctaatggatgatttaaacttaagttccttgccagctacgttggatgacttggnagatatgattaatcggtaacggaggaggtcctgaantgg

SEQ ID NO: 2748 - DNA, 449 bp, Arabidopsis thaliana
  unsure at all n locations
  Clone ID: LIB22-028-Q1-E1-A3
cgggncgccgaaccactccaaaaaanancaaagnaanggggcttttacnancgtttttggacggattagcgagaactgtatcgacgaagaaaggtaaaaaactatcggaagatgaagatggagggagagagatcgcaaaatcgatgattaaagattcgaagaagaactcgacgttgctcggtacttcaggctttgttagctccgaaagttctaagaggtttacctctatttgttctaatagaggtgagaaaggaatcaaccaagatcgtgcaattgtttgggagggatttgggtgccaagaagacataacattttgtgggatgtttgatggacatggaccatggggacatgtgatagccaaaagagtaaaaaaatcatttccatcttctctgctttgccaatggcaacaaactcctgcctccttaacaacctcccccggaaaggtnccc

SEQ ID NO: 2749 - DNA, 416 bp, Arabidopsis thaliana
  unsure at all n locations
  Clone ID: LIB22-028-Q1-E1-B11
gggctgttacagtacttccttccgtctccggtctctctgccgtcgcatcttcatcgaacctacgacgtctgacctccgcctcgaaccatcgactcacggcgataaaatccgtaacatctacttcttctcctcctaccccttctagtggtgttcaacggagacggaagaataatgatgaaaacagagccacggtggcgaaggtggtggagaatccgtattcgaaagtggaggcggcgcgtccggatttgcaaaagaggttgtcagattttttggaagaagctagagagttcgtcggagatggaggaggtccacctcgttggttctctccattggagtgtggcgctcaagctacaaactctcctcttctcctatacttacctgggattgatggaactggactaagtcctaatccccna

SEQ ID NO: 2750 - DNA, 482 bp, Arabidopsis thaliana
  unsure at all n locations
  Clone ID: LIB22-028-Q1-E1-B2
ttcntcgcaggaccgtaccggtcngnaattcccgggncgacccacgcgtccancgcaactgctttcaccaaccgtctccgatactggaaacgagctccagtaccacaacaagtcgacgagaacctctttttcaccgtcggattagggctaatcaactgtgccaacccaaacagtccccgttgccaaggtcctaacgggacccgattcgcagcaagcatgaacaacatgtccttcgtgctaccacgaagtaactccgtcatgcaagcatattaccaaggcaccccaggaatcttcacaacggattttccgcccgttccaccggtgcaattcgattacacaggtaacgttagccgcgggttatggcagcccataaaaggaaccaaagcttacaagcttaagtacaaatctaatgttcagattgtgttacaagacactagcattgtcacgccaaagaatcntcccaagcatccaaaacggtaacn

SEQ ID NO: 2751 - DNA, 436 bp, Arabidopsis thaliana
  unsure at all n locations
  Clone ID: LIB22-028-Q1-E1-B6
agggaaatttagttccagctcgtcctgctcctccgcctccacctcctttatatagttccctcacttgatttttttttttagcctttcattttgcagacatcttcagggaactgagctaatacttttttttttcctgatattttcttgaaaagcctttcttcctgctgcaattatgaatganaannanaataccacaaagcanactttantaatacanaaaaacagaacttgagtagtgggaantgagaaatagaanaaatgcagtaaagccagtgaattcacaataacattttcatttccattactggaatacattntattcagtcatctgtgaggttaatgtacctgacatgaattatgttattttgaacatgttattataatgatttcaaattaactgtattgtttcaagttttgtcattaagtgcttaaatgg

SEQ ID NO: 2752 - DNA, 417 bp, Arabidopsis thaliana
  unsure at all n locations
  Clone ID: LIB22-028-Q1-E1-C11
aaaaattttagctgaaaatgctggaaattggaagtcccaatgctctgtttttccgtacgaatactacttgtaataatcttctccgtgagcttcagaaaatatgggttgaaattggtgagactgagactgagaaagatagaatgcttatggaattagagagagaatgtcttcaaatctatcaaagaaaagttgatgaggctgcaaattctaaggcaaagcttcatcagtctgttgcatcaatagaagctgaagttgcttctttaatggctgcccttggtgtgttaaacatcaactcaccgattaaactggataaaggttcaaaatcattgaaagaaaagcctgcagctgtgacacctccaagttgaggaattgagaattcaaaaagaggagagaatgaagcagttttccgatataaan

SEQ ID NO: 2753 - DNA, 458 bp, Arabidopsis thaliana
  unsure at all n locations
  Clone ID: LIB22-028-Q1-E1-C4
ngtgaagttggggcttatgtctggatttattaaagctgctgttagcgcccttcagcatcaaccagttgtaaatgcagttattgacggggatgatatcatatacagagactatgtggatatcagtatcgctgttggtacctctaagggacttgtagtaccagtcataagaggtgctgataaaatgaactttgccgagatagagaagacgataaactcacttgccaagaaggcaaatgaaggaaccatatccatagatgagatggctggcggatcattcaccgtttcaaatggcggtgtctatggaagtctcataagcactccgattaataaaccccctcaagtccgccatactccggcatgcactccgaattggtgtcacgttccaaatgggtaantaaggaaggaaaccgtaattgcctaaaaccaatgaatgttangtcccaactttacgttaggat

SEQ ID NO: 2754 - DNA, 409 bp, Arabidopsis thaliana
  unsure at all n locations
  Clone ID: LIB22-027-Q1-E1-G9
tttttttttttttggngttannaatgctatgaattccaaaccagataanattcaantaaaacagagactaattaaggctgttcaaacagtaataattcgtgcacatgancactaancnanaacgataacangaaacaaagntacagtcagtactcagtagtttgagggcacctacggnaagcaagtaatactacanagggtactacgttccagtgcttaatgatgaaacatcatcagtntaagcaaacgtgtttttcatcatncaccgtatcactttcacaagtggctgcantcattccgcagcataacgngaatngacttcgntgaagcagcatcaacttttgcgcagaggagcaagggctaccacgagatgggggacctctcattgctacgcctttcaagagacatc

SEQ ID NO: 2755 - DNA, 391 bp, Arabidopsis thaliana
  unsure at all n locations
  Clone ID: LIB22-026-Q1-E1-D10
ttccactgatcaagggacagcaatcaattatgttaacggcagaacctcgatgacagaaccagtcaaacagacatttagctactactctgcatacaatggatcaaatgacaaagaacctcttatacctcaaaactcgggtgcgtatgttttccgtccaaatggtacattccccatcaatccggaaggacaggttcctttgactgttatacatgggccgctagtggacgaagtacaccaacagattaatccatggatatctcaagatcactagagtttataagggcaaggagcatgtggaagttgaatttattgttggtaatataccaattgatgatggaattggcaaagaagtagtaacccaaatntcaaagttccctgaaaagcaataaaa

SEQ ID NO: 2756 - DNA, 411 bp, Arabidopsis thaliana
  unsure at all n locations
  Clone ID: LIB22-026-Q1-E1-D2
aaagaagagaaagagagacgatgctgtgnnnnnnnnnnnnnnnnnnnnnnnnnnnnnnnnnnnnnnnnnnnnnnnnnnnnnnnnnnnnnnnnnnnnnnnnnntaagangaagagaaaggtaaacaaaacgccaaagaangctgaggaaggcaatgtacaacagaangtgaaggtagaagagattgangttaatacanacaataaagaacaagatggggttgttcctaacaagttatatgttgggggtantccttatcanagtacanaacatgagattcgtagctactttanaanctgtggagtcatcantaaagttgattgcaaaatggtcctgaaaatggggctttcagtggtattgccttcatcaattttggcactganagatggcgcaaaacgtgcnttggctttgat

SEQ ID NO: 2757 - DNA, 489 bp, Arabidopsis thaliana
  unsure at all n locations
  Clone ID: LIB22-026-Q1-E1-D4
ttctttcgttgggcaccggtctgtgnnntcccgggccgacccacgcgtccanccacgcgtccgcggacgcgtgggcggacgcgtgggtgattgttcccaacactaaacatctcgaggaagcagcctccaaagcaggtgtatcgaattcagatatcaaacagatgtgtgaagatcagaaacttgagaaagtggtgttacaagagctagaggctattgcagcaaccaacaaattacanaaatgggaaattcctgctgccgtcaagttgttcgcanagccatggacacctgacaatggaatgctcacagaagccatgaaattgaaacgtcatgagattggcaataagtttgcaccaagagattgaacgattgttnnnnnnnnnnnnnnnnnnnnnnnnnnnnnnnnnnnnnnnnnnnnnnnnnnnnnnnnnnnnnnnnnnnnnnnnnnnnnnnnnnnnnnnnnnnnnnnnnnnnnnnnnnnnnnnnngnaca

SEQ ID NO: 2758 - DNA, 483 bp, Arabidopsis thaliana
  unsure at all n locations
  Clone ID: LIB22-026-Q1-E1-D5
cttctagcncgctcagtaccganacnnagaattcgcnggncgacccacgcntccnctctgttgttgtcttggccggcgagcttctgagggaagcagaaaagcttgtggcttctaagattcaccctatgaccatcatagcaggttacagaatggcttcggaatgtgctcgtaatgctttactgaaaagagtcattgataacaaggacaatgcagagaagtttaggtcagacttgttgaagattgcgatgactactttatgttccaaaattctctcacaggacaaggaacattttgcagaaatggccgtggatgctgttttcaggctaaagggaagcacaaacttggaagctattcagatcatcagaaaacctggagggtctctgaaggattcgtttttggatgaagggtttaatcctgacaagaaaataagaattgggcaagctaaacgcatatagaatgcaaatatcctaagtaaccaatacn

SEQ ID NO: 2759 - DNA, 481 bp, Arabidopsis thaliana
  unsure at all n locations
  Clone ID: LIB22-026-Q1-E1-D6
atctccacgcnccacggtaccganacatnaattcgcnggctcctcatcatcatcancaagggtcttataatgtgacgcctcttagtgtcgttgatccctcgagattctgtgggcagtttccggttacacaggcagccgcatttgatgctttccggtggaaaagacgatttgggtccattagctatgcttgaagatantgtgaagaagctcaagagtcctaaaacttctcagacgcggaatctaactaaagctcagatagattctgcgttagattctctctctgattgggtttttgaatcttgtggctctgtttctttatctggtctcgagcatccaaagttnanagcttttttganncnagttggtttaccgatnatctnaaggacaaaatttgtcancggaataatggatttgaagtaagaacattcnanagcataagctgaatccangaatccaacacgcaatgttccttcangaatgg

SEQ ID NO: 2760 - DNA, 473 bp, Arabidopsis thaliana
  unsure at all n locations
  Clone ID: LIB22-026-Q1-E1-D8
ccgntcggtaccgaacttgcaattcgcnggccgacccacgcgtccaattcatttctatcttgtctccggtcaatatttttcttcgatccgtcgatcggatattttgactggagatttaagaagtctgaaattgttagatcgcagctatgtcgtactctgactccgattcgtcgtctcatggtggcgagtacaagaatttccgacagattacgcgtgaacgactcttgtatgagatgcttagatctgcaaagacagggagctcaaaatccacctggaaggtactaatcatggacaaacttactgtcaagataatgtcgtacgcctgcaaaatggctgatatcacacaagaaggagtttcattggttgaagacatatttagacgaagacaaccacttccttcaatggatgcaatatacttcatccaaccaactaaagagaatgtcatcatgttcctgtcanacatgtctgggaaa

SEQ ID NO: 2761 - DNA, 407 bp, Arabidopsis thaliana
  unsure at all n locations
  Clone ID: LIB22-026-Q1-E1-D9
ngaaaaaaacataaaaaaatattcacaaaatggccgatggttttggtgaaccgggaagctcaatgcatggagtcaccggcagagaacaaagctatgcattctctgtcgagtctccggcagttccttccgactcatcagcaaaattttctctccccgtggacaccgaacacaaagccaaagtcttcaaactcttatcctttgaagctccacatatgagaactttccatcttgcttggatctcattcttcacttgcttcatttccactttcgctgctgctcctcttgtccccatcattagagataaccttaatctcacaagacaagatgtcggaaatgttggtgttgcttctgtctctggcagtatcttctctaagcttgttatggggagcagtttgtgatctcccttg

SEQ ID NO: 2762 - DNA, 414 bp, Arabidopsis thaliana
  unsure at all n locations
  Clone ID: LIB22-026-Q1-E1-E10
acccacgcatccngaagtttaggagaggaagagagatggaggtatttagacttggagagctgagacacctactggtgacggttttcttgtcggggctcgccgaatacttgataaggccagtgatgactgacgtcaccgtagccgcggtttgctccggcctagacgattcatgttctttggccgtctatctcaccggagtacaacaagtggtaaccatatctactnnnnnnnnnnnnnnnnnnnnnnnnnnnnnnnnnnnnnnnnnnnnnnnnnncgctttaactaatctcttttcgttgggtgttgattactctttaaactttttatctttttatctgatggtgaaaatgatataaaaaaaagacggtaggaatggggacaatggtaatgatgccantgattggcaatctatcc

SEQ ID NO: 2763 - DNA, 404 bp, Arabidopsis thaliana
  Clone ID: LIB22-026-Q1-E1-E11
ggagattagtaagacctaactcttaacgaacttttagataaaagcttataactgagagagacatagatcgacaaaagtctctataccttcttgtaacgtggtggttaattaatcatggccgatcaaatctccggcgagaagccggccggagttaatagattcgctcttcaatgtgctatcgtcgcctccatcgtctccatcatctttggttacgatactggtgttatgagtggagcgatggtgtttatagaagaagatttgaagacaaacgacgttcaaatagaagttctcactggaattctcaacctttgtgcccttgtcggatcattgctcgccggaagaacgtcggacataatcggacggcgttacacaatcgtcttgggctcaatactaatcatgttagg

SEQ ID NO: 2764 - DNA, 458 bp, Arabidopsis thaliana
  unsure at all n locations
  Clone ID: LIB22-026-Q1-E1-E3
atcncgggccctctctctcgtttangcngttaagctgccataatctctcacccacctcaagcaacataacccacaaaaactcaatctttgtttcttatcttcaaaacccatctgatcattcctccggaatctttctcaagaacagagcaaatgccgcttgttaggctccaagttaggaatgtctacggtttagggcaaaaagagcttcacacaaaagtcgaccgtgaagaccctaaagcgattctcgacgacgtcgccgtttctggactcgtcgggatcttgcgtcaactcggtgatctcacagaattcgcagcagagatattccatggaatacaagaggaggtaatgataacagcatcaaagaagcaacaaattgaagatgagattgaagcaaatagaagctaaagttcctacaatccaaaagacagttgcttgcacaaacaaatcacattcatttt

SEQ ID NO: 2765 - DNA, 429 bp, Arabidopsis thaliana
  unsure at all n locations
  Clone ID: LIB22-026-Q1-E1-E4
gaacatagcactattacattgcaacactttctacaaaaacaagatgaagattgcaacgttttctgttctactcttgcttttatttattttccccgtggcattagcgcagctgaaatttaagttttacagtgaatcgtgccctaatgcagagactatcgtagaaaacctggttcgccagcagtttgctcgtgacccttcaatcacggccgccttgacncgtangcattttcacgactgttttgtccagggctgcgacgcttctctcctcatagacccaacgacgtctcaactatcggaaaaaaacgccggnccaaactttagcgtgagagggttcgagctgatcgacgagatnaagacggcactcgaagctcaatgtccctctacggtctcgtgctccgatatantcacgctcgccatacgtgacgccgt

SEQ ID NO: 2766 - DNA, 467 bp, Arabidopsis thaliana
  unsure at all n locations
  Clone ID: LIB22-026-Q1-E1-E5
taccgaacngaaattcgcgggncgacccacgcgatccnaagagtttgatcctggctcagaaggaacgctagctatatgcttaacacatgcaagtcgaacgttgttctcggggagctaggcagaaggaaaagaggctcctagctcaaggtagcttgtctcgcccaggaggcgggaagagttgagaacaaagtggcgaacgggtgcgtaaggcgtgggaatctgccgaacagttcgggccaaatcctgaagaaagctaaaaagcgctgtttgatgagcctgcgtagtattaggtagttggttangtaaaggctgaccaagccaatgatgcttaactggtcttttcggatgatcagccacactgggaactgagacacggcccggactcccacgggggggcaacaatggggaatcttggacaatgggcgaaaacccgatcagcaatatcccgtgagtgaagaaagggaatg

SEQ ID NO: 2767 - DNA, 432 bp, Arabidopsis thaliana
  unsure at all n locations
  Clone ID: LIB22-026-Q1-E1-E7
ttcattctaaatacatttcttttcactcaagaaattaaaatttcgaaaagtttgttaaaatgaatgcacacatgctcaatctccttgtcatagtcatttttgtagtttctttcgatgtccaagcactcagtcctcactactacgaccatacttgtccacaagccgaccacattgtaaccaatgcagtcaagaaagccatgtcaaacgaccaaactgtccctgctgcgcttttgaggatgcatttccacgactgtttcgtcagaggatgtgatggctcagttctcttagactctaaggggaagaacaaagcagagaaagatggacctcctaacatctcactccatgcattttaagtgattgacaatgcaaaagaangnattaagaaagaacaatgtcccggtatcgtctccttgcgccgacattccttcactt

SEQ ID NO: 2768 - DNA, 482 bp, Arabidopsis thaliana
  unsure at all n locations
  Clone ID: LIB22-026-Q1-E1-E8
aattttctagccgctcagtaccgaacacaaattngcnggncgacccacgcgtccacttccgactaaaaaaccatttccatcatcggtttcctccgatacatctcctcgtcgccgttcttcggattttcactcttctgctcnaaagggcagtgcttgagaatcattgaagaangtgatcgctggtgctgttttgataactcaaagccgttttgctgaaagagggttaccaaagttagaagctcaanaacttggagctgtgtcttctttttgtancatgccatattttattcagaggcttttcaatacttgcaagtcatctctctcacctaatggtcctgtgtctgaggaggccttanacaaggttcgcaatgtcttggagaaaatcaagccgtctgatgttggtctcgaacaggaagctcaattggtgcgtaattggcctggtcctgggaacgangcgtaatggaaaccatcattctctggca

SEQ ID NO: 2769 - DNA, 406 bp, Arabidopsis thaliana
  Clone ID: LIB22-026-Q1-E1-C9
aaaaccgggccctgctgcgtgctagagctcagtctccagcagatgttgcaaaccatcctctcatgaaggaaccatatgatattacacgcgatagagagcgcaagcgggcattgtccatggtcctatcccagagtagacatcaggagaagaaagatgctgagatacttgctgaggctaaaagaatcacagagatgcgattggccgcacgtcgtgcagaagaacctgatgtgtctgcgaatgagaacgccggtcttgataaagctgatggggttgttccagggcgtagtgtatctccaacatccaattctcaacttcctgctactgctgtggctccatcaacactaactatggcaagattatgcctctacccttgcttctctgcgcatgcttcatgtatacttgagaa

SEQ ID NO: 2770 - DNA, 400 bp, Arabidopsis thaliana
  unsure at all n locations
  Clone ID: LIB22-026-Q1-E1-A11
acaatgtctcctcattgcaaattgaactggtgccttgccttaaggataactatgcttatatcttgcatgacgaggatactggtacagttggggtggttgacccttctgaagctgaacctattatcgattcgttgaagaggagtggtcgtaatctaacatatatattaaatacacatcatcattatgatcacactggtgggaatttggaattaaaagacaggtacggggcaaaggtgattggctcagctatggataaagaccggattcctggaattgatatggccttgaaggatggtgacaaatggatgtttgctggccatgaagtccatgttatggatactcctggccacacaaaaggccatatcaagcttatactttccaaggatnacgaacgattttc

SEQ ID NO: 2771 - DNA, 484 bp, Arabidopsis thaliana
  unsure at all n locations
  Clone ID: LIB22-026-Q1-E1-A4
aattctttcgtcgncaccggtcntnnaatcccgggtcgacccacgcgtccagatngggaatcaaacatcgcctccgtctctcatttcaaacgctatctccatctccttcctccgccgccgccatggaatctccgaagaattctctgatcccgagcttcctctattcatcatcttcatctccgagatctttcctcctcgaccaggtgctcaattccaactccaacgctgcattcgagaaatctccttctccggccccgcgttcctctcctacgtcgatgatttctcggaagaatttccttattgcatctcccaccgagccagggaaggggatcgagatgtattcacctgccttctacgctgcttgtacctttggtggaattctcanctgtggncctantcacatgaacgtgantcctcccgatttcgtcaagtgcaaaatgcaaantgattcaagcgaaatncaagaacatctcgtctgggtttt

SEQ ID NO: 2772 - DNA, 489 bp, Arabidopsis thaliana
  unsure at all n locations
  Clone ID: LIB22-026-Q1-E1-A6
gccctcggtaccganacatnaattcgcnggncgacccacgcgaccanattttcacaaactgcaacaaattggatcaagttgcagaaagtaacatcatatctttcacttggaggaaaagccagatgatgtcagatgctctgaatcgctacaatgggggatttgttttggaatctttggtcagcacttgctttcctggatgtgaagtacctgcatcattcgatcaccaagcctatggagcattgttacagacgaaattacctcggcactggtgtgatagtaggcttactgggatagctttatgcgctgttanattgtttccggactaacaacatcaaangcaatccgttcctgggtgaaatgcacttgtgaagtttccggaactgaaagaattgggccaatggttatcaagncttttaagtttccaattggttggagggtttggnnccnaaaccaaggctattaagccaacgaactaatttaagntccgaa

SEQ ID NO: 2773 - DNA, 403 bp, Arabidopsis thaliana
  unsure at all n locations
  Clone ID: LIB22-026-Q1-E1-B11
gcttatcggagagatttattccggtgagaaaatgttactccttcgtcgttattccggcggaagtctttactcgatcctccctatcagagcctctattgaatctactattcgtcatttcaacagcctcgagcctttgcaaagctctgattcgactccaactaaaggcgattacttcgccgcgatcaaccacgttgtcaatatcgtccgccgcgagattcacccggagagatcattgaacagtctccgtctacctgtaacctccgaattcgtgttcagagtcctccgcgcaacttctcgttcctccaacgattctctccgattcttcaattgggctcgatcgaaccctagctacacaccaacctccatggaatatgaagagcttgctaagtcctancttcacata

SEQ ID NO: 2774 - DNA, 403 bp, Arabidopsis thaliana
  unsure at all n locations
  Clone ID: LIB22-026-Q1-E1-B12
ncccacgcgtccgcgatctatagagacgaaacaaaaagagagatcgtacgcaaaagtttccgatatggctcgctcgtttggagctaacagtaccgttgtgttggcgatcatcttcttcggatgtttatttgcgttgtcctctgcaatagaagaggctacgaagttaggatcagtgatagggatagatcttggtactacttactcttgtgttggtgtttacaagaatggtcatgtcgaaattattgccaatgaccaaggaaaccgtattacaccttcatgggttggttttactgactctgaaagactcattggtgaggctgctaagaatcaagcagctgttaatccagagaggactgtcttcgacgttaagagattgatcgggcgaaaatttgaggataaagag

SEQ ID NO: 2775 - DNA, 502 bp, Arabidopsis thaliana
  unsure at all n locations
  Clone ID: LIB22-026-Q1-E1-B2
ccacggtctggnaatcccgggncgacccacgcgtccnattttcttaccactcaaagagtgcgcactcattatcatcgtttgaaactaaacatggcgacggagaaaagcaagattctggtgatcggaggaactggttacatcgggaaattcctagtagaagcgagcgccaaagctggccactccacattcgctctcgttagagaagcaactctatccgatcctgtcaagggcaaaaccgtccagagtttcaaagatctcggcgtcacaatactacacggagatttgaatgatcacgagagcttagtgaaggctattaaacanggttgatgttggtgatatccaaccgtttgggaagcaatgcaaaatccttggggttnaaaccaaagattaatttccgccatcaaaagaancccggttatgtncaagaagaattccttggccggtcctgaagttttgggggttggatgttggataanggaccaattgccggttgaanccaacc

SEQ ID NO: 2776 - DNA, 428 bp, Arabidopsis thaliana
  unsure at all n locations
  Clone ID: LIB22-026-Q1-E1-B3
gtagtttcatttcttagagccgtcgtttcagatttcttcttccagagagagttaaaaagagtaacggtgaggtttggatctaatcgaatcaacgatggaggttgcttttccatcttcgccgccggtgaaatgcatcgccgatgaaagattaacagagatctccatggatttcaccaaattaggattcccagaagaagatgaagaaattaaaaaattggagagatcgtggagtaagctcnnnnnnnnnnnnnnnnnnnnnnnnnnnnnnnnnnnnnnnnnnnnnnngttttcgtttgcttgtgtaaacggagaaggatctccaattaccgctgatgaagcttttgaagatggtcaaattcgtcctgtgtttcctctgtttaaacgtgatcttctcttcgagtacgaaaacgaagatgacaaaaacgaca

SEQ ID NO: 2777 - DNA, 474 bp, Arabidopsis thaliana
  unsure at all n locations
  Clone ID: LIB22-026-Q1-E1-B4
ncaccggtcatgaaatcccgggncgacccacgcgtccgncanattatcacaaatcacaagcatgactcaaaacaacaacacttgacttcacaactggtttttccctcgcacgagaattgaagaaaataagaagaagaaacactaaacaaaaaagtatggtggaattggagattgtgtggttggttagaggcgcttggatcactgtttggatcgtctctatacttcctttggtgattgcttcgatacccacttcaaagctcaactcttttcgtgaactcgttttgagtttcgctggtagaggcaagattcttcacccttcttctcaaaaagtttacaattcctcaaaaatgctttgcacacttttatgttantggantggtgtggacaactcccccgcttgctgcaacttgggtggtatgcctgcaaaatggggcctttancctccgaaggagntccaattatccgacaattgca

SEQ ID NO: 2778 - DNA, 427 bp, Arabidopsis thaliana
  Clone ID: LIB22-026-Q1-E1-B6
ccagggtaaggggaggaacagtcggaagagcaaagaagggaccagaacttaaacttggagacataaccatcgtcaaggatgcgattacgcctggaagttacttcggaaacgagattcctgatagcatagcgatcatcaaatgtcaccaggacgaagtgttggtgctgcccgaaactgctaaagtgcttgcgtattccaagaactacgaggtggagatgtattcgattgaggatcatttgttctgtatccaaggacatcctgagtataacaaagagattctcttcgagattgttgatcgtgttcttgctctaggctacgtcaaggttggttttatttctcttttctcttaaccttgatcaatttacagacaacaataacattgaaaaacttggatatagtacatatgggtgggttttggattaaataa

SEQ ID NO: 2779 - DNA, 403 bp, Arabidopsis thaliana
  unsure at all n locations
  Clone ID: LIB22-026-Q1-E1-B9
ncgagttcttctctataccatatccattgtttgctagctcagcatacgattgccgtgatgtctcttgcagtgaggctactacaattggtctgatcaaaacccgagacacttatccatttggtgtggatcctgtgtggcatggtacccgcagtgagctaccattcctaaattcgcttaagatgaaaatgtcaattcttattggagttgcacaaatgaacctcggaatcataatgagcttctttaatgcaaaattcttcaaaagtgctgtaaacatatggttccagttcgttccccagatgatattcttgaactgcttgtttggctatctttcggtcctcatcatcataaagtggtgcactggttctcaagcagatttatatcacgtaatgatctacatgtttct

SEQ ID NO: 2780 - DNA, 423 bp, Arabidopsis thaliana
  unsure at all n locations
  Clone ID: LIB22-026-Q1-E1-C5
gaagctggtgatgtacagcctaattcttttgttttcagtagactcttagctggttttcgcgatagaggtgaatggcagaagacatttcaagttcttaaagagatgaagagtatcggtgttaagcccgatagacagttttataacgtggtgatcgatacctttgggaagtttaattgtcttgatcatgccatgacgactttcgatagaatgttaagcgaaggtattgaaccagatagggtgacttggaatacgcttattgattgtcattgtaagcatggtcggcatatcgtagcggaagagatgttcgaggcgatggagaggcganggtgtttgccttgtgctacaacttataacattatgatcaatagttatggtgatcaagaaagatgggatgatatgaaaagantgttgggaaagatgaag

SEQ ID NO: 2781 - DNA, 485 bp, Arabidopsis thaliana
  unsure at all n locations
  Clone ID: LIB22-026-Q1-E1-C7
attatcnaagccgctcaggtaccgaacnnagaattcncnggacgattcaccgattttnctcaaaatgctaatcaaatcccaaagattgactcttttctctcctctcttgtccaaaacaagacggatcccggttaactcccaccaaacactggtcgcagaatcggtgataactcggagaacactcggtgcgatcaccgcaactccgagttttcataaaaatccggtggtgattcgacggaggatcaaattagagagagttacgaggaactgcgtcagaattgatcggnnnnnnnnnnnnnnnnnnnnnnnnnnnnnnnnnnnnnnnnnnnnnnnnnnnnnnnnnnnnnnnnnnnnnnnnnnnnnnnnnntagtgaagttcacaggtccggcgatggggatgtggatttgtggaccgttgatgagtctcatcgacacggtcgtcatcggccaaggaagctccatcgaactcgctgctcctggaccgg

SEQ ID NO: 2782 - DNA, 386 bp, Arabidopsis thaliana
  unsure at all n locations
  Clone ID: LIB22-026-Q1-E1-C8
gagagaagaagatgtctatagaggaagagaacgttccaacgactgttgactcaggagctgccgatacaacggtgaaatctcnggagaagaaaccggcggcgagaggtggtaagtctaataagacgacganngctagtagcaacgaataagcctgtgaaagctgctgctccaacgaanaagattacaacttcctctcaccctacctatgagtgagatgattaaagatgcgattgtaacgttgacagganagaactggatcnagtcaatanncnattcagaaattcatacgaggagaancataaatcactgcctcctacttttangaancttttgcttgtgaatctcanagagacttgttgcttctgacaaattggttaaagtcaant

SEQ ID NO: 2783 - DNA, 487 bp, Arabidopsis thaliana
  unsure at all n locations
  Clone ID: LIB22-025-Q1-E1-H7
ttctacgcnttcggtaccgancagtgaattcnccggccgacccacgcgaccaaccacgcgtccgcaaagctgcttgtggtatagtcaacataccaaagattcttgatattgatgaatctgacaaagataatcatgtggctgcagtggagtatgttgatgatatgtactcgttctataaagaagttgagaaggagagtcagcctaagatgtacatgcacattcaaactgagatgaatgagaagatgagagcgatcttgattgattggttactagaagttcacatcaagtttgagcttaaccttgaaactctgtacctcactgttaacatcattgatcgattcctctatgtgaaagctgttcccaanagagagttgcaggtagtgggaatcagtgccttccaaatatgaaganatctgggncacctcaagttaacgatctggtgtangtcacgggcaatgcttacagttacaaccagatttcnaggggt

SEQ ID NO: 2784 - DNA, 477 bp, Arabidopsis thaliana
  unsure at all n locations
  Clone ID: LIB22-025-Q1-E1-F2
gnagtcaaaacatcacgggtcgacccacgcgtccacaaangacggtttggaccgcgagtgcgcatatcataaccgccgtgattggatctggtgttctatcgcttgcntgggctataggtcaactcggttggatcgcaggtcctacagtgatgttgttgttctcttttgtcacttactactcttccacgcttcttaacgactgctacagaaccgganatcctgtctctgggaagagaaactatacttacatgggcgctgtccgattaatcctaagtggctttangttcaangatttgtgggctgaatcagtaattgaatccgtttggtatcaangtcnggtacacaatccgcagcatctaaaaantatgatggcgatnaaaaaggtccaaactgtttccaacaagaancngaagggaaaaaacccgtgtcanatgtcnancaatccatacatgatcatgtttggtgtgacccaaaatn

SEQ ID NO: 2785 - DNA, 426 bp, Arabidopsis thaliana
  unsure at all n locations
  Clone ID: LIB22-025-Q1-E1-F4
taaaaatgctgatgtcattcaggaaaagaaccatatcccatttttccnatgttgcataccaaggggctttgctantggnaagcctttgatgaagatgcagcatctgtgagattatttgctgancggggaatgggagttttttgttgctcagtcatatagtaaaaatttaggtttgtatgcagaaagaattggggcaatcaatgtcgtgtgctcctcagctgatgctgctacaagggtcaagagccagttgaaaaggattgctcggcctatgtactcnaatccaccagttcatggggcgagaatcgtggccaatgtagtgggtgatgtaactatgttcantgaatggnaagcanagatggnaatgatggcangaagaataaaagacgttagacaanagctgtangatancctcgtttcaaaagacaa

SEQ ID NO: 2786 - DNA, 469 bp, Arabidopsis thaliana
  unsure at all n locations
  Clone ID: LIB22-025-Q1-E1-F5
gtaccggacagnaattcccgggncgacccacgcgtccatgttattgtggatacatatgaaagggattattctccgacttttggtcagcctgcttcttatctacgtgcaagaggagctcggtctgagcttggagaatttgtggagtatgatcttgacaatgaggatgaagactggctttatgagtttgataaggataagaaagaacttccacctgaaaagcttgagatcatcatttttaaactagaggtgttggatcacaagacgcgggaaagagcaggagttattacacctactctcggctctccagttcctgtgcttttgcagtttgatgctgcttctgatgtgctgcaagtactgtccattaattatggaaccttccaggcgatcttcaactactggaaagaaaagcgtaaaagatggcagaagcctatcttacggcgtttacagcctcccccaacggttaatgaca

SEQ ID NO: 2787 - DNA, 422 bp, Arabidopsis thaliana
  unsure at all n locations
  Clone ID: LIB22-025-Q1-E1-F7
tttttttccctttccgagcagatctgagccgaaggttaactacatgaccggcgctgagaacggcgtgagaatgacgtcaccagaggcgtcttcaacatcctccctcgccaccacaagtgtccacgtaagcgctctcganggactcgtgaacgtgaactctctcttcaccatcgccgtcttcgttggtctttccttagcgactccaggacaanacagcctctaacaacgatccagctgcgacgcaagtgctgacgtcgccaagaagctactggtcttcgaagtcntctccttcagcttcttcctcttctcctctcttgtanctcagggtcttaagcttgccttaaagcttcntaatagcaangacgtcaanganattttcagnagtcacatcattatccangtttttganaatggggaaatga

SEQ ID NO: 2788 - DNA, 423 bp, Arabidopsis thaliana
  unsure at all n locations
  Clone ID: LIB22-025-Q1-E1-F8
acgctttcttgtgctcaaaggatttcatcagtgaatgctatgtcggctctgtgtgaagcnacangcgcagatgtcacncaagtgtcttacgcggttggtacagactcaangattggtcccaanttcttgaactcgagtgttggnttcggtggttcgtgtttcnanaangacattctgaatcttgtctacatctgtgagtgnaacggactcccggaagtggcagagtactggaagcacntcatcaagatcaatgactaccagaanagccggttcgtgaaccgtgttgtttcntccatgttcaactctgtatcaanacaagaagattgcggttctcggtttcgcattcaaganagacaccggtgacacaaaggggagactccagncatcaatgtgtgcaagggtccttttagaatacaaagcaan

SEQ ID NO: 2789 - DNA, 396 bp, Arabidopsis thaliana
  unsure at all n locations
  Clone ID: LIB22-025-Q1-E1-F9
cgtgcaactcgcattcttcgtgagatcaaacttcttagactcttacgccatcctgacattgttgagatcaaacacatcttgttgccgccttcaagaagagagtttcgagacatttacgtggttttcgagcttatggaatctgatttgcatcaggttattaaggcaaatgatgatttgactcctgagcattatcagtttttcctctatcagcttcttcgtggcctcaagtatatacacacagctaatgtctttcatcgggatcttaaacccaaaaacatattggcaaatgctgattgcaaactcaagatctgtgattttggacttgcaagagtcgcattcaatgatacaccgactgcgatattctggactgattaagtanctactcgatggtacaag

SEQ ID NO: 2790 - DNA, 437 bp, Arabidopsis thaliana
  unsure at all n locations
  Clone ID: LIB22-025-Q1-E1-G1
gattncgaaaccctagtcgatttcgagatccaactaactctgctccttatctcagcttgttgaatttgcgaagtatgggagacgctagagacaacgaagcctacgaggaggagctcttggactatgaagaagaagacgagaaggtcccagattctggaaacaaagttaacggcgaagctgtgaaaaaagggtacgtgggaatacacagttctggattcagagacttccttttgaaaccggagcttctcagagctattgttgactcaggatttgaacatccatctgaagtgcaacacgaatgtatccctcaagctatcttgggtatggatgttatctgccaagcaaagtctggtatggggaagactgctgtgtttgtcctgtctactctacaacagattgaaccatctcctgggcaagtttctgnacttgtccttgtg

SEQ ID NO: 2791 - DNA, 454 bp, Arabidopsis thaliana
  unsure at all n locations
  Clone ID: LIB22-025-Q1-E1-G10
tctctcnagttcgccacggtctgncnacccgggccgacccacgcgtcnanggangcgtgggcggtatgtggctatgaatggnatcacatcattcaaaagataccaaatagcaaaggtgtacagaagggataatccatctaaagggagatacagagagttttatcagtgtgattttgatatcgctggtttgttcgaaccaattggacccgattttgaaattgtcaagatattanntgaactcctcgatgagttagaaatangagattatgaggtgaaactgaatcaccgcaagttgcttgatggaatgctggagatatgtggagtaccacctgagaaattnanaaccatctgttcnagtatccacaagctagacaagcaatcgtttgagcaantgaagaaagaaatggtgganganaanggcttgtcttcanagattgcagccagaantggcaac

SEQ ID NO: 2792 - DNA, 458 bp, Arabidopsis thaliana
  unsure at all n locations
  Clone ID: LIB22-025-Q1-E1-G11
cttattcgncgccacggtcacanaatcccgggccgacccacgcgtccaaatagcttcacaatggcatcgtctggatcagccgacgaagatttccagtctcgcgttgcgaagatcttcggatctctacccttctctcgtccttcgtcttccaagttttccacgtcgtcttctgctccggcgtcgcggcagcaatcggggtcggtgtggactctctccgacacagaggtagagaagcgggagtggaagcgagattcgtacgatagagacgagattccttgtgcttcatcctttgacgagctcttaaaacagcagaagccttccgaggatgatctcaaagatattgattgcggcgaggattttgatggtgtgtggagtatcagagcctccatgggccttgatcgcactctcgatgacgaagcagangaagatgaagtatgataaaagttgcactaagggaa

SEQ ID NO: 2793 - DNA, 389 bp, Arabidopsis thaliana
  unsure at all n locations
  Clone ID: LIB22-025-Q1-E1-G12
ttattcatcatttcatctgttcgaatcgggcaattttcgtctggagaaatctggagataggattttgatcgatttctaagctctaatctcagttttttgggtagctccggtgatccttgagatggcgggtcagaatcctaacatggatcaattcgaggcctacttcaaaagagcagatttagacggagatggtctgatcagtggtgccgaagctgttggattttttcaaggatctggtttgtctaagcaggttctcgcccagatatggtcgctttctgatcggtcacacagtggtttccttgatcggcaaaacttttataattctccgagacntgtaacagttgcacagagcaaagagagatntgacacctgagaatgttaatgcaaca

SEQ ID NO: 2794 - DNA, 470 bp, Arabidopsis thaliana
  unsure at all n locations
  Clone ID: LIB22-025-Q1-E1-G4
ctacggtcacaaatnccggggccgccccacgcgtcnacactcgtctccattttaatagtttttcttctcggaatcacaaatcttcggcttcttgttccttggcgtgtgtgtgtgttgttgaatggctcttgttcagcggattccaatttcctcctccagtattcggaattggcaacaagcgaggaccaatttgactcctatttgttgtttacattacaatactgcatcttcttcttcttcaccctttacagagaagcactctgtggagagataccaaagggatcaatggctgtacaaagcggttgaaccaacgccaccatcgactccatctccatcgccatttgaagatgaagtctttgttagggaaaacgacattgcatcgcagctgcctgagctgaagaagcttttggcagtgctgaaagagaagagagttaaaggatgcaaaggtggtgattgtggaccaggagatg

SEQ ID NO: 2795 - DNA, 391 bp, Arabidopsis thaliana
  unsure at all n locations
  Clone ID: LIB22-025-Q1-E1-G9
gacntttctaaaaatgaaaagcctttctttcttcttcaccatcctcctctctctctcgaccctcttcaccatctccaacgcacggaagtttaatgtcggaggcagtggcgcgtgggttacaaacccacctgaaaactacgaatcttggtctggcaaaaaccgtttccttgttcacgacactctctattttagctacgctaagggagctgactcggtgctagaggtgaacaaggctgattacgacgcttgtaatacaaagaatccgatcaaaagagtggacgatggagattctgagatctctcttgatcgttatggtccgttttacttcatcagtggcaatgaagataactgtaagaanggtcaaaagcttaatgtcgttgtcatatctgcn

SEQ ID NO: 2796 - DNA, 469 bp, Arabidopsis thaliana
  unsure at all n locations
  Clone ID: LIB22-025-Q1-E1-H2
cacggtcacaacatcacgggtcgacccacgcgtccagaancagctcattatctcaactgttattatgactgttggtattgctattgtgtcatgggttggcttaccgacctcctttaccatcttcaactttggaacacaaaaagttgtcaagaactggcagctattcctttgtgtttgtgttggtctttgggctggactcattattggtttcgtcactgagtactacactagtaacgcctacagccctgtgcaagatgttgcagattcatgcagaactggtgcagctaccaatgttatcttcggccttgctcttggttacaaatccgtcattattccaatctttgctattgctatcagtatattcgttancttcagctttgctgctangtatggtgttgctgttgctgntcttggtatgctcagtacaattgccactggtttggcaattgatgcttaagggcccatcaat

SEQ ID NO: 2797 - DNA, 440 bp, Arabidopsis thaliana
  unsure at all n locations
  Clone ID: LIB22-025-Q1-E1-H3
nacccggtatgatccaagtcttcctcggccacagcggaggatttgatgtcgaagggcatgagcttcctcggcttgtgtacgtgtcccgtgagaagcgtcctggttttcaacaccacaagaaagctggcgccatgaatgccctgcaaggccgtgagggaagcaatgtgttttttgatggatcctcagattggaaagaaggtctgctatgttcagttccctcaaaggtttgatggcattgacacaaacgatngttacgccaacagaaacacaatcctccttgataacaataataaaagnccaaatggaatccaaaggccaatttangttggnaactgggtgtgttttcaaaacaaaaactccgtaanggtaataaacaaccaaaagggccnaaacttcaaaagataanaaacngtggttgttgnccttgctttggggccccc

SEQ ID NO: 2798 - DNA, 386 bp, Arabidopsis thaliana
  Clone ID: LIB22-025-Q1-E1-F12
cgccggcgctcatcacccacaaaaatcacgccaatccaaagatacagagacataatcaatctacctccgagaccactgtttcatggacttctcgcatcaatctcctcacgcgcaatggtcgattagcggaggcagcgaaggaattctccgatatgacactcgccggcgtagagcctaaccacatcactttcatagctctactctccgggtgtggtgattttacctccggaagtgaagccttgggcgatttgcttcatgggtatgcttgtaaacttggtcttgatagaaaccatgtcatggttggcaccgcaattatcggcatgtactccaaacgcggccgttttaagaaggctagattggttttgattacatggaagataaaaatt

SEQ ID NO: 2799 - DNA, 470 bp, Arabidopsis thaliana
  unsure at all n locations
  Clone ID: LIB22-024-Q1-E1-D2
nccggtccaaaattaacgggtcgacccacgcgtccgaaacaactctcatcaatataaagagaagagagtggtagagttatatattacacacataaacttagatatagtagtgttatattcttgattaagtaataaagatgaaaggtggaagcatggagaaaattaagccgatattggcgataatttcactgcaatttgggtatgcaggcatgtacatcatcaccatggtctcgttcaaacatggcatggaccattgggttcttgctacataccgtcatgtcgtagccacggttgtcatggctccctttgctctcatgttcgagaggaaaattaggcccaagatgacactagcaatattctggaggcttcttgctcttggaatattanagcccctcatgggaccaagaatttgtactacataggattgaaaaacacatcagcatccgtacacttctgccctttttttaaaa

SEQ ID NO: 2800 - DNA, 461 bp, Arabidopsis thaliana
  unsure at all n locations
  Clone ID: LIB22-024-Q1-E1-D3
tagttggccnggccggtccaaaataacgggtcgagccacgcgtccgaccaaaaccccaaaaccaactaaaactgaaaaaacaaacgttgactttttgactaaccaccatcctccgccgtaaatcatgatcgccgccgtttacactcnnnnnnnnnnnnnnnnnnnnnnnnnnnnnnnnnnnnncaaagccacgatttcaatctctccccaaaccttaaaccgatccggcgacatagtcgtgatcaaatggtccggcgtcgaatcaccgtccgatctcgactggttaggaatctactcgccaccggactctcctcacgatcacttcatcggctacaaattcctctccgattcacccacgtggcaatccgggtcgggttcgatttcacttcccttaaccaatcctccgatcaaattacactttccggatcttcattggaccaatccgaaatanacccgaaaca

SEQ ID NO: 2801 - DNA, 421 bp, Arabidopsis thaliana
  unsure at all n locations
  Clone ID: LIB22-024-Q1-E1-D5
gnttcttccttcttcgtcctttgttttaattctctcatatcacttacgaaaagaagaaagaaaaaaaacaccaaaactaaagagaaatttcgttatcactctcttgccaaaactcacatacatataatcatatatcatcgcaaaatgtcttgcctagagatttataacaaagacacgatgaagaagaaagaaggagaagaagaaacaagagatgggacagtggattactatggtcgtccctctattcgttctaactcaggccaatgggttgctggcatcgtcattcttctgaaccaggggctgggctacactagccttctttggagttggagtgancttggngctcttcnnaacccgcgttttgcagcagaacaangcagacgcagtaacaactttagcaatgggccagggacngtttaaa

SEQ ID NO: 2802 - DNA, 438 bp, Arabidopsis thaliana
  unsure at all n locations
  Clone ID: LIB22-024-Q1-E1-D9
gaaagccaatgagaagctgacgaaaaaccgcgttggttaaattacatataaatgggttttgtgaattcaaataaagacgaagacaaaaagtttgagactttatctctactttgacccgaccagcgaaagtgtaaattgaaagatagatagaaagaaagagccaactttaaaagcttagcggttgatttcgaaatctcgtcgccggcgcgtggagtcttttcgtcggacaacaacaagagaaaagagatttgtggtgttcttctgcttagaattgttgttttccatctccggcagtgagatttggtggaaaaattttgatttgtgatcgatggttaaggaaacagagtactacgatgtgctcggagttagcccaactgctacagaatctgagattaagaaagcttactacataaagggcaccccaagttcatcccngat

SEQ ID NO: 2803 - DNA, 480 bp, Arabidopsis thaliana
  unsure at all n locations
  Clone ID: LIB22-024-Q1-E1-E1
ttacgttgccnggcccggtccanaattaacgggtcgacccacgcgtccgctcagcttcgtctcattctccttctcgatctctccttttactcaccattccaaattccctaaaccccgattttggggaggttttacaaaatctatcgacgtagttggatacagttcttcgattctgattcgattttaattttatgtcaagggaatttgcctagtattcgcagagtgtgatcatatgaaatctcgagcgaggcagtgtctgctggtttgtttgctctgtctttccttaacgaatctctcctatggagaaaataagttcagagagcgtaaagccaccgatgacgagctgggctaccccgatattgatgaagatgctttattgaatactcaagtgcccgaaaaaattgganctgcgatggcaaactgaaatcacttccaagcgttaagctaanccttgattgctgaataacattggaaangggg

SEQ ID NO: 2804 - DNA, 428 bp, Arabidopsis thaliana
  unsure at all n locations
  Clone ID: LIB22-024-Q1-E1-E10
gcaaagagtggctgcttatgcagcgaaacgcgttcttctatgttttcaagactgtccagatcgtcatcattgctgcaatcacgtctacactcttcctgagaaccgaaatgaacacaagaaacgagggtgatgctaatctctacataggagcattgctatttggaatgatcatcaacatgtttaatgggtttgcggagatggctatgatggtttcaagactccctgtgttctacaaacagagggatctcttgttttatccatcctggaccttctcacttcccactttcttgcttgggattccaagctcaatattagaatcgacggcttggatggtggtgacttattactccattggttttgcacctgacccagccgctttcttaaagcanttcctccgggngttccggatcaacaaatgggntgcaacc

SEQ ID NO: 2805 - DNA, 437 bp, Arabidopsis thaliana
  unsure at all n locations
  Clone ID: LIB22-024-Q1-E1-E11
gcccacgcgtccgcccacgcgtccgcggacgcgtgggttctctttgtcacaatgaatnnnnnnnnnnnnnnnnnnnnnnnnnnnnnnnnnnnnnnnnnnnnnnnnnnnnnnnnnnnnnnnnnnnnnnnnnnnnnnnnnnnnnnnnnnnnnnnnnnnnnnnnnnnnnnnnnnnnnnnnnnnnnnnnnnnnnnnnnnnnnnnnnnnnnnnnnnnnnnnnnnnnnnnnnnnnnnnnnnnnnnnnnnnnnnnnnnnnnnnnnnnnnnnnnnnnnnnnnnnnnnnnnnnnnnnnnnnnnnnnnnnnnnnnnnnnnnnnnnnnnnnnnnnnnnnnnnnnnnnnnnnnnnnnnnnnnnnnnnnnnnnnnnnnnagcctcaaaagaacaanaacttgtgaaccaagaaaaggttgagcaacccccttaaaaacnggttttcggtc

SEQ ID NO: 2806 - DNA, 494 bp, Arabidopsis thaliana
  unsure at all n locations
  Clone ID: LIB22-024-Q1-E1-E3
ttacgtttgccnggccggtccaaaattaacgggtcgacccacgcgtccgcccacgcgtccggatcatgcgaaggaatgctcctcaggcggaggatactatcgctctctgcgtcgtcgttcagaaactttacttccggtaacaacggcgacgctattccgttctctaccttcacgaaaccttcttcttcaatcgctcccggagatttcctcgtccgtgaatggaaagactggtttaagcatcgagatgtgaaacagagccaccaattaatcgatcgaatctttgacatccttcgagctccttctaacgatggagacgatagagctttttatctccacctctccaatctccgacttcgtctcactgagaaattcgtcctcgacgtgctttcacacactcgttaagaataatcctctgttgtctcaaaattcctccaattggggctgctccgtcagcctggggtttcatcacacggcgtgctaaaccnttttttttt

SEQ ID NO: 2807 - DNA, 487 bp, Arabidopsis thaliana
  unsure at all n locations
  Clone ID: LIB22-024-Q1-E1-E4
ttacgttgccnggcccggtccanaattaacgggtcgacccacgcgtccgaacacatctcatttctccgctgtttcgtcggcaaattttcccatttttgattccgaagataatagatattatcaacagaggataaggataaaacccagaacaatcattataatttagtggtgaagttgaccaaatttataaactgatccaattttaaaatctaagagatatggagaacatggacgatttctcaccggagaatgttttagcaccaccaccaccacctcctccaatgaagaagtcaagcatctgtttatgcaaagaagcaatagctttgtttctaaagctacgagagattcatgggatcgtatgttcgacgaagctcatggagcctgatgttttggattcatactgatgataatgggttggatttacgcacattctaatgtcatccggatngcttcagatgtatccagaaggaatggaaatttgggaaaa

SEQ ID NO: 2808 - DNA, 399 bp, Arabidopsis thaliana
  unsure at all n locations
  Clone ID: LIB22-024-Q1-E1-E5
gcttctggctctctctcttcctaagtttcctctctctttanaactgtagagagagaaaagcctccatttttctcaaggcaatctctctctctctgcctcatctcanaaacccattacaccaaaacctcatcgtanagagagaaacacaccaaccattgttacactctaagagaagagaagagaganggaaaaatggacggtgtatcaccaaagtttgtgttgccggngacattcgacggcgtgaggatnganatcacaggcaaactaggcatgattgggagcttgtaaaagcaccagtgatngtcccncttctnaattagcgtttanatccgtttgcctaagtctgtcaagcnttaagtgaaagggttacattgggaatcgtcatccgtctctcaaant

SEQ ID NO: 2809 - DNA, 420 bp, Arabidopsis thaliana
  Clone ID: LIB22-024-Q1-E1-E8
gcaagaagccaaaacgtcaagatgctaacaacccttgtagtctaaccactcccaagatttaagaattttcttacttttgttctagttttgttgagaaaaagatgcatccgatcttcgatgccatccttcaaaatgaccttccagcttttcttggtttggtggaagcgagagaatcttccctggaggagagaagcgaggaacagaacaccaacaacacggttttgcacgtagctgcaaagctcggtcaccgagaactggtcgccaagattattgagctccgaccttcccttctctcttcccgtaacgcgtacggagacacacctttgcatcttgctgctcttcttggagactaaacatagttatgcagatgttagacactggattggaactatattccgcacgcaataacaaggaaccaaa

SEQ ID NO: 2810 - DNA, 430 bp, Arabidopsis thaliana
  unsure at all n locations
  Clone ID: LIB22-024-Q1-E1-F11
tttactcctcttaacactcctcgaaacaaaaagaagannnnnnnnnnnnnnnnnnnnnnnnnnnnnnnnnnnnnnnnnnnnnnnnnnnnnnnnnnnnnnnnnnnnnnnnnnnnnnnnaaaattaatcttactcgccggaacttttctctctcacaancgcttcaaacaaaatttctaagtttatccgaatatgaataaactagttgtagaaatcgttgacgctagcgatttgatgccaaaagacggacaaggctcagcgagtcctttcgtagaagttgaattcgacgaacagcgtcagagaacgcaaacgcggtttaaagatctaaaccctcagtggaacgagaagttggtttttaacgtcggtgacttgaaccgtttgaataacaagacggtcgacgtcacngtttacgatgaccgccgtgataatcag

SEQ ID NO: 2811 - DNA, 430 bp, Arabidopsis thaliana
  Clone ID: LIB22-024-Q1-E1-F6
gcgccgacaccgtttaactccgatggttcccccgccgtctaatccgcagcaggttcagcagttcctctcctctgccctctcccagcgcggcccatcttcagtcccctacgaagagtccaacaagtggttgatccggcaacatctacttaacctaatctcttcttacccttccttagagcccaaaacggcatcgtttatgcacaacgatggtcgctccgtcaacctccttcaagcagatggtacgattccgatgccttttcatggagtcacctataacatacctgtgattatctggctcctcgagtcatatcctcgtcatcctccttgcgtctatgtgaatcccaccgctgatatgatcatcaagcgacctcacgcacatgtcactccttctggtctcgtttctctccgtaccttcaagaaaaaatttttg

SEQ ID NO: 2812 - DNA, 421 bp, Arabidopsis thaliana
  unsure at all n locations
  Clone ID: LIB22-024-Q1-E1-F7
gcgtcaacagatttcatactgtggaatttaacagctgaaacaaaggttacacaaatctcatgtggtggctggcgccgaccccattccttttatctcggggaaatccctgagtggcaaaactgttttgcatatgtgaaggatgatgtcattcatattcatagacactgggttggaggacagaagaccaaagtctttcctctaaatttgcatacacagtttcatggcagagaattgcattccttatgcttcatctctacagatacaaaagcgggattcgattctgaagaaagtaaaatatctgatcggtctagttggattgcaacagggtgtgaagatggatctgtgagattgagtaggtatgcatctgantttggaaattggtcaacatcagagcttttaggagaacatgttgganggccaa

SEQ ID NO: 2813 - DNA, 450 bp, Arabidopsis thaliana
  unsure at all n locations
  Clone ID: LIB22-024-Q1-E1-D12
gaatgaagagggactaacccactttgacgaaattctacaagaagcagatggcattattctttctcgtgggaatttgggtatcgatctacctccggaaaaggtgtttttgttccaaaaggctgctctttacaagtgtaacatggctggaaagcctgccgttcttactcgtgttgtagacagtatgacagacaatctgcggccaactcgtgcagaaggcaactgatgttgcctaaatgctgttttnagatgggaattatgcaaatcctccttgggtgccgaagaccctccgtgggattggaaccctggttgaaaaccaataatcaactggttgggtaaaaatccggttgtgaaggcanaaaaaantttcaaccaaaaatttgtccttaaaaaanacnggtcaantnagnttgggaaancaatggaccacttggganccaatgcttctccggc

SEQ ID NO: 2814 - DNA, 436 bp, Arabidopsis thaliana
  unsure at all n locations
  Clone ID: LIB22-024-Q1-E1-B12
gcccacgcgtccgcccaaaagcatacaatacaatgtctactcttgttttattcctccaacttttttccatcctaccattagcacttgggttgaaccacccaaattgtgacctgaccaagactcaagaccaaggctctaccctaagaatcttccacatagacagcccttgctcccccttcaaatcatcatccccactctcatgggaagcgcgtgtgctccagacgctggctcaagaccaggcccgtctccagtacctgagcagcctcgtcgccgggagatctgtagtccccattgcctcagggcgtcaaatgttgcaaagcactacatacattgtcaaaggctttgatnggtactccggctcaagccgctgctcctagccatggacacgagcagtgacgttggcttggattcctgctccggntgcgttggtgtcctt

SEQ ID NO: 2815 - DNA, 490 bp, Arabidopsis thaliana
  unsure at all n locations
  Clone ID: LIB22-024-Q1-E1-B3
acgttagctgccnggccggtccaaaataacgggtcgacncacgcgtccgctcaccatatccacaatcctcaagctatctcctttgtgtccataatcgaaacgctttttgcgatttatcctaatcttttttctatcttctgctacaaatttggttcttttttggttgaatttggataaaatcataatctcctcttcaattttcttgtgaaatggaagtttcagtgattggaaatcctcaagcgaggatctgcagagcagaattagcttacagagagcttggatttagatttggctctgatgtaatctccggtgaatcgagaaatagggttagtttctgcaaccaaagctctaaatggaaagagatcgcgatacgttgctcttcgagatctgtcaaatgtgaagccatcgtctccgatgacgcttctccgtttccaaatccactccaaaatctaaatccgctccgaagaagtggtaaaaaattttttaaaat

SEQ ID NO: 2816 - DNA, 474 bp, Arabidopsis thaliana
  unsure at all n locations
  Clone ID: LIB22-024-Q1-E1-B4
cggtccaaaattaacgggtcgacccacgcgtccgnggacncgtgggcttgaaaacgttaaatgatcttctcctccgatcattagtctctttaatctttctcagcctcttcttgttcgtgatctctcttcctccggaaaaagatgtcggccggtaacggaaatgctactaacggtgacggagggtttagtttccctaaaggaccggtgatgccgaagataacgaccggagcagcaaagagaggtagcggagtctgccacgacgatagtggtccgacggtgaatgccacaaccatcgatgagcttcattcgttacagaagaaacgttctgctcctaccacaccgatcaaccaaaacgccgccgctgcttttgccgccgtctccgaagaagagcgtcagaagattcaacttcaatctatcaagtgcatccgttaacatcgttaacgaagagantcaaggacccaaaaaaaanggggg

SEQ ID NO: 2817 - DNA, 433 bp, Arabidopsis thaliana
  unsure at all n locations
  Clone ID: LIB22-024-Q1-E1-B7
gcccacgcgtccgcggacgcgtgggcccacgcgtccgaaaaaaagaaaggaattttctctgaaacgtcacgaacgtgtgaattgggttaaaaaattcatctcattgatccaaacttgaaaccctaatttcgaatctctttgctgatttggtgagatctcaatttcggaaagaagatgacgaaggatttcgcagttccacctgtagttttcccctccggtggatcttcaggcggtgctaatgtccagcaacgaagattcccagcgacaccgtttcaaccgccgcgtccctcttcttccgcaatccctttcatgtcattcgacattggatccgcagccgcgtcttccgctacacctgccggaccattcggcgggacatcgcttcctcttcttcntttggtggaggtcaccttcgtttgaagaaatggaaaagggg

SEQ ID NO: 2818 - DNA, 428 bp, Arabidopsis thaliana
  Clone ID: LIB22-024-Q1-E1-B8
gaaaccttctttagcttcttccgtagctgacgtctctctctatctgtctcttaggtgcctctttcttttcttcaacgatttctctccccctcttgctttagctgatcgatttcgaaaaattgagcttgccaagtcaagcaaccagattttgttggttgtatttagtataggatccaaatacaatggatgaaaaccataggaatccatttgcaaatgcaagtacaagtgctagagcaagcggcagtacaagtgcgagctcaaactcgagttttagtagcagtgtggcggatacagatgatgatcagaccattgcacgtatattagctgaagatgagagcttgagaagagaaggaagcttggggaagagattatctcattggatccatccacacactcctcgggttaacagggagattaacccccccggg

SEQ ID NO: 2819 - DNA, 425 bp, Arabidopsis thaliana
  unsure at all n locations
  Clone ID: LIB22-024-Q1-E1-B9
cgtgggcgccccnactgcnccatcnaccganaacggttttacacccacacctgacatgcttaaacttgcatctgatatgatgggtaagangtcaccagaagagcgtgagaggangtttaacatggcatcntcnttgaaagcaaacgctccagcttcancatcatacggcaatgcatcaagcatctgaaccacgggaaagtttaggagcgagtgggagttcttcgggaaattcctttgtggctccaagaagcggtttcgaaccaagcatcccttctgctccgcctgctgacttacaggaacagatgagaanccaaatgaaagatccancgacgcnacagatgttcacgtctatgataaagaacatgaaccctgacatgatggctancatgagcgaacaatttgggaatgaaacnttccaaggaaaa

SEQ ID NO: 2820 - DNA, 422 bp, Arabidopsis thaliana
  unsure at all n locations
  Clone ID: LIB22-024-Q1-E1-C11
ggagaaacactattagatnatcacttctcagatttcgatattcccaatanataatagatactctcagttcttctcttctccaagaacaaaaaaaaaaggtgaantcanaatcgntagaaaatcttcacngtccattaatcgaatcatcganntcgttcgtcgattatcgtctcgagactgtgttaacagatcgagagttaccgtattttcgccggatttatctancgatgatgattgagatgacagtttcnctttcatctggcggctccggcgatctttgtttangtcatcaacaanggcatgtcanttcttagncgtatcttcgctggacacgtaggaagcttcgaactcgccgncgcttcacttggaaacagtggttcaacaatgtgnacctangganttctgcttggaatggaaagtnc

SEQ ID NO: 2821 - DNA, 489 bp, Arabidopsis thaliana
  unsure at all n locations
  Clone ID: LIB22-024-Q1-E1-C12
ttacgnctgccggtagcgagtccaaaattcccgggntgatgagaagcttcnttccgtgttccgtgaaggagtgaagtacggtgctggaatcggtccaggagtctacgacatncactctccaagaatancatcntctgangaaatcgcagatagggtcaacangatgcttgctgtcntagagcacaacatcctttgggttaaccctgantgtggtctcaagacccgtaagtacaccnangtcaagcctgcactcaacaccatggttgatgcggctaagctcatccgctcccanctcgccagtgccaantgaagaaaagcttgatttgancaaagaaacgtttttttttctctaaaatggttgtgttttatttggtttaataactttctnaaaaataattttagtctaaggtagatttgatgcatatggtttctttcntgttgatnagagagaaaggctatatcatcctttggatttgatgcaatgtttgt

SEQ ID NO: 2822 - DNA, 493 bp, Arabidopsis thaliana
  unsure at all n locations
  Clone ID: LIB22-024-Q1-E1-C3
tgttagttgccnggccggtccaaaataacgggtcgacncacgcgtccgctcaaattgttaaagcaactggagttgttacaaagactgcttgggctggagctgcttataatcttttgctatacatgctggctagtcatgtgcttggtgcagcctggtatatattatcggttgatagatatacatcgtgctggaaatcaagatgcaatggtgaagctggccaagttaattgtcagctatattacttagactgtgattcaatgtatgacaataatcagatgacttgggcaaatgtcacaaaagtgtttaaactctgtgatgcacggaatggcgagttcaagtatgggatctttgggaatgcaatcacgaaaaacgttgtgtcttcacaagttcttcgagagatatttcctactgtttgtggtggggaatgcaacaacttaattcctaatggacaaaaatttgtcccacgaacaatgttcaaaatggggggggggcc

SEQ ID NO: 2823 - DNA, 429 bp, Arabidopsis thaliana
  unsure at all n locations
  Clone ID: LIB22-024-Q1-E1-C6
gntctcccataaccgaaaccgagagaaaatatagaaaaagatgattgagacggttaaacacctgatcggctccggtggtcccagcggattcgggtcaagatccaccgccgatcatgtcacttgtaattctgatctccgttctctaactgccatcatcactggcgcgacgtcggggataggagctgagacggcgcgtgttcttgctaagcgtggcgcaagacttgtgcttccggctagaagcgtcaaaaccgccgaggaaacaaaggctcgtatactgtcggagtttcctgatgcggagatcatcgttatgcatcttgatctcagctcacttacctctgttcgtcgattcgtggacgatttcgaatctctcaaatctccactcaacatcctcataaacaatgctgggaaatatgcgcattaaaaggnccc

SEQ ID NO: 2824 - DNA, 424 bp, Arabidopsis thaliana
  unsure at all n locations
  Clone ID: LIB22-024-Q1-E1-C7
ggtattgaagctcttttcccgattcaggcttccacgtttgatatggttctcgatggtgctgatttagttggacgggctcgtactggtcagggtaaaacattggcttttgtgttgcctatattggaatctttggttaatggacctgccaaaagcaaaaggaagatgggatatggcaggtcaccaagtgttttggtccttttaccgaccagagaattggccaagcaggtggctgctgactttgatgcatatggaggatcacttgggttaagttcatgttgtctctatggaggtgatagctatccagttcaggagggtaaattaaagagaggtgttgacattgtanttggaacccctggtcgtattaaggatcatattgaaagacaaaaccttgatttcagctatttacaattccccggttttggtt

SEQ ID NO: 2825 - DNA, 432 bp, Arabidopsis thaliana
  unsure at all n locations
  Clone ID: LIB22-024-Q1-E1-C8
gcccacgcgtccgcggacgcgtgggttcatgtgcaaggaatcccgggtggggatccgtctctttttgatggattgtcgtcggttttctcccgggagctgtggaagtgtagtggttatgtgcctaagaagtttaaccttaagtatagagagtttccttgctgggatgagcaagagaaggatgaagacggtgcaggggttttgttttcgatgtcgaaggagaatgtgattgctgctcctgttagtactttggttggaatgaggaggagtcttgatggtaaaggaggaaccaatgacgtgaagcttggttgtgactctggtgaaacggatagaaaacattctcagggtgctattaagaaggataagangttgcttcgtcctaagatgacgaataaacgaaagaaaaagaattgttcggtgccttttcccnaaaaa

SEQ ID NO: 2826 - DNA, 489 bp, Arabidopsis thaliana
  unsure at all n locations
  Clone ID: LIB22-024-Q1-E1-D1
tgttatttgccnggccggtccanaattaacgggtcgacgcacgcgtccgcccacgcgtccgcatttttctctcttccataaaacccaaaagaaactaggaagaggagtaaataatatttgttttaaagaaatgattctccacaaaatggcgttcttggccgttattctcttcttcttgataagcagcagcagcgtttgcgttcatagccgtgaaacgtttgcttgcgatacaaaggacgcagcaacagctacactgagattctgccagctttcagttcctataccggagagagtcagagatttgatcggacggttgacattggccgagaaagtgagcttgttagggaacactgcggcggcgataccacgtctaggaatcaaagggtacgagtgggtggtcngangcttacacggcgtttcaaaatgtgggacccggtacnaagttccggtggggtttaccctgcaaccaacaantttttcccccccccc

SEQ ID NO: 2827 - DNA, 417 bp, Arabidopsis thaliana
  unsure at all n locations
  Clone ID: LIB22-024-Q1-E1-D10
gcaagacgcgtgggtcggtgttgataaattcaacatctggtaacgcagagagagatgcaccaccgaatctaacacttagaggattcggtttcgtggaaaggattaaggctcttcttgaaaaagtgtgtcctaagactgtttcttgcgcagatatcattgctttgactgctagagacgcagttgtcgccaccggangtccttcatggagtgttccaacgggtanaagagacggtangatctcaaataagacggaggctactaataacattccacctccaacgagtaatttcacgactttacaacgacttttcaaaaaccaaggccttaatctcaaaggaccttgttctgctctctggggctcaacacgaattggcggtctcacantggtccttccaatgaaataacgcgnttctaaaa

SEQ ID NO: 2828 - DNA, 434 bp, Arabidopsis thaliana
  unsure at all n locations
  Clone ID: LIB22-024-Q1-E1-B11
gctttttggcactcataggaataacagcgaaccaaggattttacttgttgggactggacaacacttcaccaacatttgcttcctccatgcaaaactctgttcccgccattacctttctcatggctgctcttctcaggattgagaaagtaagaataaacagaagagacggtatctccaaaatcttaggaacagctctttgtgtcgccggagcttccgtcatcaccctctataaaggtccaaccatctacactccggctagccacctccacgctcatctactcaccacaaactcccgccgtcttagcgccgctaaggaaacgccgcgcctaaaaactggacccttggttgcatctacctaatcggtcactgtctctcgtggtcaggctggcttgttttcaaagctccggttcttaagtctatccagcgangctctc

SEQ ID NO: 2829 - DNA, 430 bp, Arabidopsis thaliana
  unsure at all n locations
  Clone ID: LIB22-023-Q1-E1-G9
ganagaacataaggaaaagctacaaaggcgtgactgtgcttaaagatgtgacatgggaagtgaagagaggtgagaaagtagggttagttggtgtgaacggagctgggaagacgactcagctcaggattatcactggtcaagaagagcctgattctggtaacgtaatcaaggccaaacccaatatgaaagtagctttcttgagccaggaatttgaggtttcgatgagtaagactgtgagggaagagttcatgactgctttcaaggaagagatggagattactgagaagcttgagaaagttcagaaggctattgagggatctgttgatgatttggatcttatgggaaggttattagatgaatttgatttgttgcagagacgagctcaggctgtgaatttagattccgttgatgctaagattagtaagttgat

SEQ ID NO: 2830 - DNA, 453 bp, Arabidopsis thaliana
  unsure at all n locations
  Clone ID: LIB22-023-Q1-E1-H1
gaaaggaaagagtcaaagttgaattttctcagctctcactctctttttctctctctttacttctactgtatcaagaagctccgttttgcttagccatagtgcgtctagggtttggttggtgggaagaaggttccgatcatggcgtcggtgtcgtcgtcggatcaaggacctaagacnnnnnnnnnnnnnnnnnnnnnnnnnnnnnnnnnnnnnnnnnnnnnnnnnnnnnnnnnnnnnnnnatgttgttgtatagaggttttaagaaggcgaagaaggagagaggttgtacagctaaggagcgtattagtaaaatgcctccgtgcactgctgggaaaaggagttccatataccggggagtcaccaagacatagatggacaggtcgttatgaagctcanctttgggataagagtacctggaaccaaaaccagaacaagaagggaaaacaagttta

SEQ ID NO: 2831 - DNA, 435 bp, Arabidopsis thaliana
  unsure at all n locations
  Clone ID: LIB22-023-Q1-E1-H10
ggaaagagaagaacttgaaactcaccaaaaacattgatcattatacacaatcgtgatggagagttcttcgaattccgaccaaaatgagggaactccgacgagctctgtttcttcgccgtaccggagaacatactcagatatccccggattatctcaccggttcgacgttcagagcttttataaccggccgtcaaacactaacgctgttgtcttgagtggccatgaagaagatgtctccgaagacgccgaggaaccaaaagatgatgtcgtcaacgacgtccacggagatggagacgaagaagacagcgacattgattctgcagaagatgcagagctagagatgatgagggaaagatttgcgaagctgttgcttggtgaagacatgtcaggaagtgggaaaagganttgtactgctgttactgtgtcaaactccat

SEQ ID NO: 2832 - DNA, 457 bp, Arabidopsis thaliana
  Clone ID: LIB22-023-Q1-E1-H4
ggaaaaatcagccgagcagattgatgccgatactgctgtagttggtgacgacggtgaagtagattttaaaggtgaggctaaatttgcacaacatatgaagaagggagaagctgtgagtgaatttgccatgtcaaagaccatggcagagcaacggcagtatcttcccatattttctgttagagatgaactattgcaggtaataagagaaaaccaggtgatagtggtggttggcgaaactggttcgggaaagaccactcaacttacacagtatcttcatgaggatggttacactataaatggtatagttggttgcacccaaccaaggcgtgtacagccatgagtgttgcaaagagagttagtgaagagatggaaacagagttgggcgataaaattggttatgcaattccgttttgaagatgtaactggtccaaacactgttatcaagtacatgaccgat

SEQ ID NO: 2833 - DNA, 439 bp, Arabidopsis thaliana
  unsure at all n locations
  Clone ID: LIB22-024-Q1-E1-A10
gattcgattcagaatcaaaccatttttgaagaaccctaaaagttctcttcttcccccaaatttgaatttgttcttgcaatcggattcgaaatccgaaagtcttagtctcgaatttgagctcaacagtttcttatggctccgaagaagtctgaaggaatcgctttgctttccgtttacagtgatgaagatgacgaagagatggaagacgccgaggaagaggaagaagaggatgagaagcagagaaatcaggaagagagtgaaaaaataattgaagaagatcaggtagaagaagcgaattatatggatgaagaagagaaaggaagaggaggagaagattctagaacgccgaggctattagatggtgttggagcttcntctagtgctcatgggactcctcgttcacttgataacgatgaatcatcgagacctgattggngtt

SEQ ID NO: 2834 - DNA, 430 bp, Arabidopsis thaliana
  unsure at all n locations
  Clone ID: LIB22-024-Q1-E1-A12
gaatcgaagcaaaactctgcctctagttccgtagaattcaccggagactgaacaaaaatcccgtgagttttttagttttccgttacattctctgtctcaattctgaaacttttcacatgggttgtgctcaaatttcctttttaatggttgtcgagatttatctataaagtcaatgatctgggtttgatcaaagtctcaatctttctcttaaatttcgaatatttgatgatcccacgagttagtctctctaaatctgatctggctatgcttaatccgccacattgttgctctcaagctctggatttgattgtatcatgaaaagttatccaattgggttcnagtaagggcattcaatngcgtaactccaagaaagccggtggattttcgatttaaaaatcagggagggaactatcagaaaatcangaaaggc

SEQ ID NO: 2835 - DNA, 499 bp, Arabidopsis thaliana
  unsure at all n locations
  Clone ID: LIB22-024-Q1-E1-A2
ntgtctacgttggtccgtgnccgtgtccaaaattaacgggtcgacncacgcgtccgncactctccaccaccacccaagaagcactacgtgtacaaatctccccctcctccagtcaagcactactctcccccaccggtttaccattccccaccaccaccaaagaaacattacgtatacaagtcccctcctcctccggttaagcactactctcccccaccggtttaccactcaccaccaccaccaaagaaacattacgtatacaagtnnnnnnnnnnnnnnnnnnnnnnnnnnnnnnnnnnnnnnnnnnnnnnnnnnnnnnnnnnnnnnnnnnnnnnataccactattagatatctctatcacggagaacacgatgtacacaagaagacaaagacaagacgaaaccaagtactggtgattggtataagagaaacaaaagatgaaagaagaagaatccaagcagagaaaagctttctcatcaattttccaaaaaagggggnt

SEQ ID NO: 2836 - DNA, 479 bp, Arabidopsis thaliana
  unsure at all n locations
  Clone ID: LIB22-024-Q1-E1-A3
ctgttactttgccnggcccggtccagaattaacgggtcgagccacgcgtccggattactttctcaagactttcaatagtactcagttccccatttgataagctccttaacatgagtgagctcaccancagcttcgtatttagcactatattcaatggggaactgattactttctcangactttcaatagtactgctgattccattgatgatcttgtgtcacaggttggatcagggaatactgatgatggaaatacagatcctaatgaccattactgttggatgcgacctgaggatatggactataaaaggcccgtgactacttgtaatggtggatgttcggatctcgctgcagagatggcagctgctctggcttcagcatctattgtattcaaggataacaaggaatattctaaaaagcttgtccatggtgctaacgtggtgtatcagtttggaaggacgaaggagangggagatataa

SEQ ID NO: 2837 - DNA, 460 bp, Arabidopsis thaliana
  unsure at all n locations
  Clone ID: LIB22-024-Q1-E1-A4
ggcccggtccacaaattaacgggtcgacccacgcgtccgagcgactcactcagatctatacacnnnnnnnnnnnnnnnnnnnnnnnnnnnnnnnnnnnnnnnnnnnnnnnnnnnnnnngatctgtgagtgccnttatcgttgagagattatgttgacaaagttcgaaaccaaaagtaacagagttaagggactgagttttcaccctaaacgaccatggattcncgcgagtttgcacagtggcgtgatccagctcngggattatcgtatgggtactttgatcgatagattcgacgaacacgaaggacctgtncgtggtgttcatttccacaattctcagcctctcttcgtctccggaggggatgattacaagattaaagtgtggnactacaattnccacaaggtgccnttcactcatcaanggcatcntgatatatccgcacggttcagttcaatcatggn

SEQ ID NO: 2838 - DNA, 452 bp, Arabidopsis thaliana
  unsure at all n locations
  Clone ID: LIB22-024-Q1-E1-A5
gaactctctccgtagtctgagactcgccggaaaagcttgtattggcttctcttcgatttctggcggaagcaaggatatcacgtgagctatgaagttcctcatgcaatccatttctgggaggaatcgatctctggttcgagctctagttagtcggcgttacttcgcttcatcgccggaggaaatcgcaaagatgaaattacgccancgatctgtcngaatacaacaccgctgtcaactccgtcacagctcancgcaggcactatttgctganggatgtttatgatgatatgaagcttgatggtgtgcagcctacagctgatatcttccattcaatttgtcctggggaacgatgaaaggtgctccggttaaancgatncggtcctttttccngggaaagaaaatntaaagccatgggggaattgccccaaaatgttgaaaaccccntttttggg

SEQ ID NO: 2839 - DNA, 431 bp, Arabidopsis thaliana
  unsure at all n locations
  Clone ID: LIB22-024-Q1-E1-A6
gnacttctcaagatctctctctgtctttgtcatcaccactctatcgtctactagagggaagagatcatcattctacagtttcaagaagataccatttccaagactatctgattatctgcacttgtagtgaaactgtggaagaagcaaaaatggggactttgagtaaggtgctatgtctcatgctgctttgctgtatcgtggctgctgctgagggtactttgaagtacaaggacccaaagcagcctttgggtgcaagaatcagagatttgatgaaccgtatgactctacaagagaagattggtcagatggttcagatcgaacgcagcgtcgctacacctgaagtcatgaagaaatacttcattgggagtgttttgagtggtggaggaagtgtgccctcggaaaaactactcctgaaacttttgggggggggg

SEQ ID NO: 2840 - DNA, 435 bp, Arabidopsis thaliana
  unsure at all n locations
  Clone ID: LIB22-024-Q1-E1-A7
gatggtacggcaaattcaaaccatctcaaagagcaatcatctccgacttcattacctcactcacacacacttctcctacgtccaaaactctccaccaaccatctgttgccacgtggtggaaaaccacagaaaaatactacaaactcgcaacacccagcaaaaactcatcacctctgtctctaactctcgggaaacaaatcatcgacgagtcttgctctctaggaaaatctttaaccgataaaaagattcaaaccctagcttcgaaaggagaccaacgcaacgccatcaacgtcgttttgacttcagctgacgttacggttacaggatttggtatgagtcgttgcgggactcacggacacgctcgtggtttangtaaacgtggctccaagtttgcttacatttgggttgggaaactctgagacacaaaattgggtt

SEQ ID NO: 2841 - DNA, 430 bp, Arabidopsis thaliana
  unsure at all n locations
  Clone ID: LIB22-024-Q1-E1-A8
gagcaaagcgtttctatcatttccttaatattgaaatggtgacagacttcaaatccctactaccagttatcgacatcagtcctttactggccaaatgtgatgatttcgacatggctgaggatgcgggggttgtggaagtagtcggaaaactggacagggcatgtcgggacgtcggattcttctacgtgattggtcatggaatatcngatgatcttataaataaggtgaaagagatgacgcatcagttcttcgagcttccttacgaggagaaacttaagatcaagattactccaactgctggatacagaggataccanataattggagtaaattttacgagtgggaaacaagatatgcacgaagccattgactgttacaggnaagttcaagcaaagggaaacatgggganatccggaaangggcccttttt

SEQ ID NO: 2842 - DNA, 434 bp, Arabidopsis thaliana
  unsure at all n locations
  Clone ID: LIB22-024-Q1-E1-B10
gcncacgcgtccgctctagctcacactcacaacactctctctctcctgccataactcagcctgagatgtctccggaagcttacgttctgttctttaacagttttaacctcgtaaccttcgaagcctttgcttcagtctcacttatcatagccacagttgctttcttgctctcaccaggtgggctcgcatgggcctggaccgggtcatccaagagtcgggtttcgattccaggaccatctggttctctttccgtcttctccggctccaatccccaccgtngttctcgccgctcttgctaaacgcttcaaggcctctccgttgatggcgttctcagttgggttttcgcgttcgttatctctagtgaaccggagacggctaaagagattttgagcagctctgctttgctgaacgggccggttaaggaatcaacntaa

SEQ ID NO: 2843 - DNA, 453 bp, Arabidopsis thaliana
  unsure at all n locations
  Clone ID: LIB22-023-Q1-E1-G4
gcccacgcgtccgtgcagagtacgtagtaattcttgatcaatgttcgtgtggtgaagccaatggacaactgctgctggtttgttaattgccgggtaccaatcgcctgttagaggatgtctattggcttcaccacacgaacattgatgcagagtacgtagtaattcttgatgctgacatgatccttcgtggacccatcacaccttgggagtttaaggcagctcgaggccgaccagtttcaactccttacgactatcttattggatgtgataatgaccttgcaagacttcacacgcgtaatcccgaggcttgtgataaagttggtggagtcattataatgcacatagaggatctccggaaatttgcaatgtactgggttgcntaaaacccaagangtcgagcagacnaagaacactacggggaaggagttaactggggatatatatgaatccngt

SEQ ID NO: 2844 - DNA, 442 bp, Arabidopsis thaliana
  unsure at all n locations
  Clone ID: LIB22-022-Q1-E1-C9
gaaaagctttaagacatttgcaccaaaaagatctcaaattcacgttcacatagaaaaattaacaagaggcagaaggaaaaaaaatgtggaggtcattcgcaagaagcttcaaactcattaatgtaccaaatggtttgatatccaagccaattcgctctactctcctctattcaacttcttcaagaaagttagaaggaaaagtagcggtcataaccggcggggcaagcggaatagggaaggccacagcggaggaatttgtgaagccaaggtgcgcaagtgattatcgtagatatagatgaagaaggctggtcatatggtcgcgaccgaacttggctcagccgcacatttcntaagatgttgatgtcactgangaagaacaaatccctaaggcgttgagaacgccgtgactcctcatnggnaactcgacgtaatgcnaatatgc

SEQ ID NO: 2845 - DNA, 496 bp, Arabidopsis thaliana
  unsure at all n locations
  Clone ID: LIB22-022-Q1-E1-D1
ntggttacgcctggccgtaccgggtccggaaattcccggggtcgacccacgcgtccgggttaatcgaagaacctcaccgtaagtccactgagggattcaagttcttgctttggtttannnnnnnnnnnnnnnnnnnnnnnnnnnnnnnnnnnnnnnnnnnnnnnnnnnnnnngtcaaaccaacgacggagctggagctggagctgttacgacggtagaatctgttcctcctcagcctcaatctcagcctcagcctcagccgcagcagcagagcaacgagatggttctgcatacgggaagcttgagttttagtagtcatatgtcgagagaagacgaagagatgactcgttctgctctttcggcgtttagagctaaagaagatgagattgagaagaggaggatggaagttcgtgaacggatncaagctcaattgggtcgggtcgaacaagaaancaaacgtctctctactaatcgtgaaggagcttgagtccaaggna

SEQ ID NO: 2846 - DNA, 458 bp, Arabidopsis thaliana
  unsure at all n locations
  Clone ID: LIB22-022-Q1-E1-D2
gcccacgcgtccgcccacgcgtccggttgattttggaatctccattacgatggaaggtgcggctgatcaaactacgaaagcgttatctgaattagccatggattcttctaccaccttgaatgctgctgagtctagcgctggtgatggagctggacctcggagtaaaaatgctttgaagaaggaacagaaaatgaagcanaaagaggaagagaagagacgaaaggacgaagagaaagctgaaaaggctaaacaagcacctaaagcaagctcccaagaaggcagtggcagcaagatgatgaagagatggatgcaacgcaatactatgagaacagattgaaatatcttgcggctgagaaggctaaaggggaaaatccatatcctcacaagttcgctgtgtcaatgtcgattcctaaaatacatttgagaacntatggtagtttgaacaatggggatnaagt

SEQ ID NO: 2847 - DNA, 471 bp, Arabidopsis thaliana
  unsure at all n locations
  Clone ID: LIB22-022-Q1-E1-D5
tttatcactgcactgtacggacactggatggtgtagttgtggaatctacgaggtcagaatctggagggagaggtgtaccgatcagagatgtcttgggaaacagcaaaatgattcttggattgctcgaaggaattcccacgatgcacaagggtgaaattgcaatgttcaagatgaaacctgaaatgcactatgcagagattgattgtccagtctcagctccagaaaattttccaaaagatgatgagcttcattttgagattgagttgttggatttttctaaagccaagattgcaagtgatgatctgggggtcatcaagaagattctaaatgaangtganggctgggaatctcccaaganaaacctatgaaagttgaaaancagaatatccngctaaatccggtgattgncacgtgattcttctctcacacaggaaagaacccttaatttccttcacatttgggaaaatcctg

SEQ ID NO: 2848 - DNA, 474 bp, Arabidopsis thaliana
  unsure at all n locations
  Clone ID: LIB22-022-Q1-E1-E1
gcaaaggtcttacctcattgctacatgttgatgtctccaacaatcagttcacaggtccaataccagataacttggagggtcagttgttatctgagccgtcgtcgttttcaggaaatccaaacctctgcattccacattccttctctgctagcaacaatagccgcagcgcgttaaagtactgtaaagatcaatctaaaagcaggaagagtggccttagcacctggcaaatcgtgctaatagcggtcttatcgtctttattagtcttggttgtggtccttgctcttgttttcatttgcctacgtcgtcgcaaaggaagaccagagaaagatgcttatgtcttcactcaggaggaaagnccatctttgttgttgaacaaagttcttgcagcaactgacaatctaaatgaaaagtacancatttggnagaaggagctcaagggaattgtgttcaanagncttcctttaggctcccgga

SEQ ID NO: 2849 - DNA, 429 bp, Arabidopsis thaliana
  unsure at all n locations
  Clone ID: LIB22-022-Q1-E1-E10
gcttcttcttcgtcttcttctctgaatagtcacaatgcgagnnnnnnnnnnnnnnnnnnnnnnnnnnnnnnnnnnnnnnnnnnnnnnnnnnnnnnnnnnnnnnnnnnnnnnnnnnncatcaactcaagatctcaacgccgacagaaccgctcttctctctctccgctccgccgtcggaggccgtacatttcgctggaacatcaaacaaacctcgccgtgtaactgggccggtgtcaaatgcgagagtaacagagtcaccgctctccgcttanccggcgttgctctctccggtgacattccagagggtattttcggtaacttaactcaagctccgtacacttagccttcgtctnaatgtctctcnggntaaatcccnaagatttcaagaactcttccaaatctccgaaaactttacttaaaanggaaaaa

SEQ ID NO: 2850 - DNA, 398 bp, Arabidopsis thaliana
  unsure at all n locations
  Clone ID: LIB22-022-Q1-E1-E11
ctgttctgggcagagagatttggtaagcagtttctaggtatgaatgatctgtgggtgaaacactgtgggattagtcatacaggaagtttcaaggatcttggaatgactgttttggttagtcaagttaatcgtctgagaaagatgaaacgacctgtggttggtgtcggatgtgcttccaccggagatacttctgctgctctatctgcttactgcgcctccgctggaatcccatcgattgtgtttttaccggcgaacaagatctctatggctcanctggttcagccgatanctaatggtgccttttgttttgagtattgacactgaattttgatgggtgtatgaaaccngattaaaagaaaataacggccgggaattgcccaattaatttggggnaaatc

SEQ ID NO: 2851 - DNA, 450 bp, Arabidopsis thaliana
  unsure at all n locations
  Clone ID: LIB22-022-Q1-E1-E2
agatcatcatccgaccaaataagatatatttggggttaagctcgagtctctccggttttgagtttacttgagtttgttagtatttatggctgaggtgggaaaagttctggctagtgatatggagttagaccattcaaatgagactaaagcagtggatgatgttgttgccactactgataaagcggaggtcataccagtggctgtaactagaactgaaaccgttgttgaaagtttggaatctactgactgtaaggagcttgaaaaacttgttccacatacggtagcttcgcagtcggaagtagatgttgcttccccggtatccgagaaagcaccgaaggnttctgaaagtaccggtgcaatancnttgcagtctggttcngaaaggaataatccctttaatcntgagaaaggtatggaagacggtacaactggcgggaatatngacagaaa

SEQ ID NO: 2852 - DNA, 468 bp, Arabidopsis thaliana
  unsure at all n locations
  Clone ID: LIB22-022-Q1-E1-E3
gcggacgcgtgggtgcgtgcggggtttaaaaagcttgttgtctcactgtttagaaaggaaatgatggatgtttccagcagatttgatgagctgctcgaaaggatccttgtggaacatgaagataaactggacatgcatcatcaaggtacagacttagtggacgcgttgttggcagcttgtcgggacaaaaatgcagagtataagatctctaggaaccatatcaagtcgtttttcgcggatctcttatttgcaagcactgacacctttgtgcaaacaacacagtggacagtggcggagatcattaataaccctaatgttcttgagagattgagaggagaaatcgattccgtggtcngggaaagcaangttgattcaagaaactgatttgccaaanctcccttatttgcaagcggtggtcaaggaaaggctaagactgcatccgccggggcctcccctttgcaaggttcn

SEQ ID NO: 2853 - DNA, 466 bp, Arabidopsis thaliana
  Clone ID: LIB22-022-Q1-E1-E4
gctaaaaaatcaccgtgtctctcgtccctggtttggtccttcgagaagtgtgaacaaaaatgggttttctctttggtttgttcataggaatcgcggtttctttcggtttggtcgtcgcatttgctcgctactctagtgtcagatccactcgtcgagctgatttggcaaagaccattgctgcatttgcaagaatgacagttcaagattcgagaaaacttctcccgggagatttttatccttcttgggttgtgttttctcagagacaaaagttaaattggcttaatcttgaacttgaaaagatctggccttatgtaaatgagcttctgagctgattaaaagcagtgtggaaccagtacttgaacagtatacaccagctatggttagcatctctcaaagttctctaaattcacacttggggaccgggggccctcaagttcacaaggagttccaacctaaaaagtgaaag

SEQ ID NO: 2854 - DNA, 465 bp, Arabidopsis thaliana
  unsure at all n locations
  Clone ID: LIB22-022-Q1-E1-E6
gcccacgcgtccganacagtgacatttttctacaanaagctgttgctanatataaggggtttctctatctgataaagatgaacagagaaaggtctttaaaaaggttttgtgttccgacttacgatgttgaccttatctggcacacacatcagctgcacccagtttcttactgtgatgatatggtgaagctcattggtaaagtgttggagcatgatgacacagattctgaccgaggcaaaggtaagaagctcgataccggtttttctaagactactgcacaatgggaanagacattcggtacaaggtactggaaagccggtgcaatgcatagaggcaagacactgttcctggtcacaaattctccttatgcttctgatgttttggtcaaagacccaactgcaaaagacgatttccagaanttaatccaaattcccaagnggtggaanttgttgaaggtccccctgg

SEQ ID NO: 2855 - DNA, 519 bp, Arabidopsis thaliana
  unsure at all n locations
  Clone ID: LIB22-022-Q1-E1-E7
cagaaccaacaatgctccaacctttctcttcctcctctgttttctcgagaatcctctggactttcttggtttaagaagattcgttgttgaatcagagagaaagaaagcatccatttttctatcattgcttgcttgctatggaattgggtaaatctcgattctacttatgttgcaattgcttttctcctgttagattttccgattattctttagctggaagtgattatccagacgccatctccatcactttcaattgtattcctataccttcttctgaagattcttcgtatttctcgattcgatgtttataaacttcaaaattctcttccaaatcttgaaaacgaaatttctcccaaaaaaatctcctggtttcctcaacaaggnnaacaanaanaaacaatggttggtggtggcaatcaaccntccgccttggctccntttgggggtccctcccttccttcaannctaatggggtgaaactaaagggncttccttcaaacaaagtggtccaaanaattt

SEQ ID NO: 2856 - DNA, 463 bp, Arabidopsis thaliana
  unsure at all n locations
  Clone ID: LIB22-022-Q1-E1-E8
tttgtgagctcagatctgaccagagagaaagaaacaaccggagaagaagaagatgactgaccgagtcttcccagcttccaaaccaccaaccgccactaatggagctccaccagttggttccataccacctcctccagctccggcgactgtaaccagcaacggaacaacaaacggaatggctaatcagaaacctcaagtctacattccagctaaccgtccggtttaccgtccacagccttacagtcgccgtcatcaccaccaatctcgaccaagctgccgacgaatttgctgttgttgctgtttctggtcgattctgataattctgatcttagctctcatgactgcaatcgccgccaccgcgatgtacgtgatctaccaccctcgtccgccgtcgttctccgtcccgtcaataagaatcagccgcgtgaacctaacaacctcctccgaatcctccggttntcaa

SEQ ID NO: 2857 - DNA, 461 bp, Arabidopsis thaliana
  unsure at all n locations
  Clone ID: LIB22-022-Q1-E1-C6
ggaaataagagacactctcttactcttactcttcctcttgctcattttcgtaagagacgatggcggaagtatcagcaaaatcggtgacggttgaggaaatggcggaagaggacgacgctgcgattgaggagcggtggagtctttacgaagcttacaacgagttacacgctttggcgcaggaattggagacgccgttcgaagcaccggcggttcttgtggtgggacagcagaccgacggtaaaagtgcgcttgtggaagctcttatggggtttcaatttaaccatgtcggcggcggaaccaagactcgtcggccgattactctccatatgaagtacgatcctcagtgtcaattcccgctttgtcatctcggatctgatgatgatccttccgtttctcttcccaaatctctctcacaaattcaagcataatattgaggctganaacatgaaggctggancaag

SEQ ID NO: 2858 - DNA, 465 bp, Arabidopsis thaliana
  unsure at all n locations
  Clone ID: LIB22-022-Q1-E1-A7
gaaatgatcttctcctccgatcattagtctctttaatctttctcagcctcttcttgttcgtgatctctcttcctccggaaaaagatgtcggccggtaacggaaatgctactaacggtgacggagggtttagtttccctaaaggaccggtgatgccgaagataacgaccggagcagcaaagagaggtagcggagtctgccacgacgatagtggtccgacggtgaatgccacaaccatcgatgagcttcattcgttacagaagaaacgttctgctcctaccacaccgatcaaccaaaactccgccgctgcttttgccgccgtctccgaggaggagcgtcagaagattcagcttcaatctatcagtgcatcgttagcatcgttaacganagagtcangaccaaaggtggtgagaggagatncggcggagaaaaagaacgatgggtcaactactccggcgtacgctcaa

SEQ ID NO: 2859 - DNA, 460 bp, Arabidopsis thaliana
  unsure at all n locations
  Clone ID: LIB22-022-Q1-E1-B1
ggatgattcgaacggcgttagtgttcgttgtcttcttcgtcggaacagtcgtacaagcgcagctgatacctccggcgaggcgtgatggatttttgtatccaccgggtcggaaaatcgaccgggatacgatacttatcgaggcgtatattgacccggtttgtccggattgtagagacgcttgggagccgctaaagctagcgattgatcactatggatctcgcgttgctcttgttcttcacctcattcctttacccttccatgacaatgcatttgtagcatctcgggctttacacatcgttgataccttaaacgccaatgccacgttcaatttgctggaagggatcttcaaagcatcagacattgttctacaactcgcaaacacaactcaagtcaagacctgcagttgtgggaagaattaatcaagccttggaacantacgttaggaaactcatatcaantc

SEQ ID NO: 2860 - DNA, 447 bp, Arabidopsis thaliana
  unsure at all n locations
  Clone ID: LIB22-022-Q1-E1-B11
tgcaatgcttaaaggtacttctgatgtcgaaggagttgttactttgacccaagatgactcaggtcctacaactgtgaatgttcgtatcactggtctcactccagggcctcatggatttcatctccatgagtttggtgatacaactaatggatgtatctcaacaggaccacatttcaaccctaacaacatgacacacggagctccagaagatgagtgccgtcatgcgggtgacctgngaaacataaatgccaatgccgatggcgtggcagaaacaacaataagtgggacaatcagattcctctgactgggtcctaattctgttgttgggaaaacctttgtggttcacgaacttaaaggatgacctccnggaaaggggtggccatgaagcttaatcctgaccactgggaaaacgcaggcgggaanaattggcatgttgtgtgaattggc

SEQ ID NO: 2861 - DNA, 460 bp, Arabidopsis thaliana
  unsure at all n locations
  Clone ID: LIB22-022-Q1-E1-B2
gaaacggagcctattggcaaaggaaagaatggcaaggacgtcttcttaagagatatctggccaaccacggaagaaattgctgaggttgttcaatccagtgttttgcctgacatgttccgagcaacgtacgagtcaatcaccaagggtaaccccatgtggaataagctgtctgttcctgagaataccctctactcatgggatcccaactcaacttacattcacgagcctccatacttcaaggacatgaccatggatcctcctggtccacacaatgtgaaggatgcttactgtttactcaattttggggacagtatcaccactgatcacatctcaccanctggggaacatccaaaaaggaaatcctgctgcaaatttctcaagggagcgtgcgttgaccgttangncttcaactcatatggaagtcnccgtgggaatgatgaaataatggcaanaggtactt

SEQ ID NO: 2862 - DNA, 465 bp, Arabidopsis thaliana
  unsure at all n locations
  Clone ID: LIB22-022-Q1-E1-B3
tcgaagatccaaccaactctgctccttatctcagcttgttgaatttgcgaagtatgggagacgctagagacaacgaagcctacgaggaggagctcttggactatgaagaagaagacgagaaggtcccagattctggaaacaaagttaacggtgaagccgtgaaaaaagggtacgtgggaatacacagttctggattcagagacttccttttaaaaccggagcttctcagagctattgttgactctggatttgaacatccatctgaagtgcaacatgaatgtatccctcaagctatcttgggcatggatgtcatctgccaagcaaagtctggtatggggaagactgctgtgtttgtcctgtctactctacaacagattgaaccatctcctggccaagtttcctgcacttgtccttgtgccatacaaagagagctagcttaccaagattttgcaatgaantttgtgg

SEQ ID NO: 2863 - DNA, 472 bp, Arabidopsis thaliana
  unsure at all n locations
  Clone ID: LIB22-022-Q1-E1-B4
gcgccaaggacccgcctgttctcatggccgccggatctgacccggccctgtggcaacgacccgattcgttcggtcggtttgggaagtttggtgggaagtatgtacctgaaacccttatgcacgctctatctgagcttgaatccgctttctatgctcttgccaccgacgatgatttccagagagagttggctggaatcttgaaggactatgtgggtagagaaagtcctctgtattttgcagagaggcttacggagcattacaggcgcgaagaatggcgaagggcctcttatatacttgaagagagaagacttgaatcacacaggagctcacaagattaacaacgctgtggctcangctcntcttgctaagcggtttggggaaaaagaggattattgctgagacaagaaccgggtcaacatggtgttggctacanctancnggttttgcccgttttggggttggattggtataa

SEQ ID NO: 2864 - DNA, 463 bp, Arabidopsis thaliana
  unsure at all n locations
  Clone ID: LIB22-022-Q1-E1-B7
agagtgaccggaactctctcggcggcatcatctccagcggtggcggcggcgtctttctccgccgctctaagactttccataactcccactctcgctatcgcctctcctccccatctccgttggttctcgaagttttctcgtcaatttctcggcggacgcatctcttcactccgaccacgcattccttctccgtgcccgattcgactctctggtttcccggctctcaaaatgagagcttcgtttagcagtgggagtagtggaagtagtgcaagtagagagattctggtgcagcatttgcttgttaagaataatgatgttgaagctctttgccgaactccaaaagaaattcttggatggagaagagatgaatgatcttgcggntgagtaatccaatttgtccctccaaaaaaaggacggtggnaatacntgggatnggtaaaactggggtcaaatgggnacaaga

SEQ ID NO: 2865 - DNA, 463 bp, Arabidopsis thaliana
  unsure at all n locations
  Clone ID: LIB22-022-Q1-E1-C1
gctttagtaagtcttttaaacaagctatctagataatgaaaacacaaaccaaagtgatgggaggacatgtcttgcttactgttttcactctttgtatgctttgttcaggggttagggcacagctaagccctgacatttatgctaaatcgtgccccaatctagttcaaattgtccgtaaacaagttgccatcgccctgaaggccgagatacggatggctgcttctctcattcgtcttcatttccacgactgctttgttaatgggtgtgatgcgtcgttattgttggatggagctgacagcgagaaactcgcgatcccaaacattaactctgctagaggatttgaagtaattgatacaatcaaagccgctgtggaaaacgcatgtcctggtgttgtttcctgtgctgatatcctcactttgggcgctcgtgactccgttgtattgagtgganggctgggtggaaa

SEQ ID NO: 2866 - DNA, 470 bp, Arabidopsis thaliana
  unsure at all n locations
  Clone ID: LIB22-022-Q1-E1-C10
cgccttgccgtngcccgtccgnaattcaaagggtcgaccgacgcgtccgcccacgcatccggtcgtcgtcgcgatcttcgttttttaggcctaagcttcgaatcgatccaagcttgaccttaattccaggcttatccaacgacgtcgggagactgattctctccttcgtcccttaccctcacatctctcgtatcaaatcaacctgtaaatcatggtacgctttcctctcttccaaaaccctaatttcactccgccatagcaganacaacagcancaccaacaatctctcgcatctcctttgtatcttccctcangatccttcgatttcgcctccttttctcntcgattccgtgactcactcttggggatcgcntcctcctatgccttgtaancccncacgatttacnggnactggaatttccgtagcngtanacangggancctanagtcaagtcccncgggtgggtctg

SEQ ID NO: 2867 - DNA, 439 bp, Arabidopsis thaliana
  unsure at all n locations
  Clone ID: LIB22-022-Q1-E1-C11
gaaatcttaaaactttgctgattgattgattttcgattccgggagaagaaaaatggtatctgggttgattaatgagaaccctatcatttacccaaagaaagagaggcgtcttcgtactgatacaagcattactgatgagcttacaccagaaccaattgatcaacttgagatttttgatcatataagagatatcaaagatccagagcatcctaatactctggaagatctcagagtagttacagaagactcagttgaagtggatgatgagaacagttatgttagggttacgttcactccaactgtcgaacattgtagcatggcaaacgttatcggtccttgtgtccgtgtgaaacttctacgaagccctccctctcatacaagantgatataaggggtacaactggttcncaatgcacnagaagatgcattggataaacaa

SEQ ID NO: 2868 - DNA, 448 bp, Arabidopsis thaliana
  Clone ID: LIB22-022-Q1-E1-C12
gcagagactaaagtactcaaggggccacatgaggacctggaaagttatctggatgcaattgctcaactcagaaagattattcgttattttatgagcaacaaaagctttaagagtagtgatggagttctcaaccacgcaaatagtttgcttgctaaagcacagtcaaagctggaggaagagtttaagcagttgctagcttcttacagtaaagcggtggagcctgatcgcctatttgatggccttcccaactcactgagaccatcctcagacggggatggaggtggaaaaccccacggaggacatcacaatgatgacgcggaaactgctgcttatacacttccaatcctcattccgtcacgggtgttgccacttttgcatgacttggcacaacaaatgggtcaaggctgggtcaccaacaacagtttgcctacaaaatttatagggacac

SEQ ID NO: 2869 - DNA, 442 bp, Arabidopsis thaliana
  unsure at all n locations
  Clone ID: LIB22-022-Q1-E1-C3
catactatttatgtaaaaggaagcaacgggtgagaagaattaaaaagccgcaattttgggatcataagagttctcttcttcatctgtgattcattccgttgttacccgccaggcaccagccaccgtactttttctctctccggcaaaatccgagtctaaaaatgacgagtaaaagcaaaatcctgttcatcggaggaacgggttatatcgggaaatatatagtggaagcgagcgcaagatctggccacccaaccttagttctcgttcgaaattcgacgctcacaagcccttcacgatcctccaccatcgagaatttcaaagaacctcggcgttcagtttctcctcggagaccttgacgaccatacgagtctcgtggaattcgataaagcaagcggatgtggtcatctctactgttggggcaactccctccntggggacatca

SEQ ID NO: 2870 - DNA, 528 bp, Arabidopsis thaliana
  unsure at all n locations
  Clone ID: LIB22-022-Q1-E1-C4
ctgttacgcctggccgtaccgggtccgnaaattcccggggtcgacccacgcgtccggggagagaccaccgccgccgaagaaaagggggcggcggaaggaggaggaaggtgaggctgaggaaattagttggtctgcggcggcgccttcgttggctgtggcggaggaggaatttgaggaggagaattgggcttcggtggtggataatgaagctggagagaggttgagaaaaagagaagcagaggaagaanaananangaggatgaagagaaaggagaagaaagttagctactttagtgatgagagtgatgatgaagattancttcttagattcantttatggtttgtgaatactgaaaganagagattgatcaaagttcaggaacaaattacaatcttcnggtttccgtcntcgtatgtgatcatgtttgatgactccgggttgttccgtcctgagtgatatanttcctngggnttgaanaatacattgntggttcaacaangnaatttttaactcccttgattttaana

SEQ ID NO: 2871 - DNA, 461 bp, Arabidopsis thaliana
  unsure at all n locations
  Clone ID: LIB22-022-Q1-E1-A4
gcttttttatctctcgaaattcctctctctttctctctgcatcaaaacagcaactttacttctgcgtttttgtttatctctctgtattatccgattaatttaaaggagttctttgaaggcagctgcttctatgccatattgccgagaaaatgggcgagtctaaggggtgcgggaatgttggacgaatgatttcgaagaataagtctgcgaattcttataacctctctcttcanttgtctcctgttgtttctttctgggattgtattgtccgcaccatgaggtattcctatataccanagtgggtgtagttcttgagttcctctacaacatcatcgagtttaagtgcaattttttaagttagaaatttatagtcaagcantaaagggatnacacggggtgcaagcaagttcagccagtcgttaaggaaagcgaaagaaaaaacaatggtaaaagatgaantt

SEQ ID NO: 2872 - DNA, 514 bp, Arabidopsis thaliana
  unsure at all n locations
  Clone ID: LIB22-021-Q1-E1-E2
gaactgtttcgcctgctcgtaccggcccgaaaattcccggntccacccacgcgtccggtgatctcgtctcgaggctaaccatagacgagaagatctcgcagctggtgaatacagctccagggataccgcgtcttggagttccggcgtacgaatggtggtcagaagctttacacggcgtagcctacgccggtccaggaatccggtttaacggaacggttaaagctgctaccagctttcctcaagtcatcttgaccgctgcttcattcgactcctatgaatggttccgcattgctcaagttataggaaaggaagcaagaggagtgtacaacgcagggcaagcgaatggaatgacattttgggcaccaaacattaacatatttagagattcacggtggggaagangccaagaaactcccggcgaaggattcgatgatgaccggaacttacgcggtggcttacgttagaaggactacaangtgactcctttgacggtccggaaaacactctccaatca

SEQ ID NO: 2873 - DNA, 508 bp, Arabidopsis thaliana
  unsure at all n locations
  Clone ID: LIB22-021-Q1-E1-E3
taccctgccngtaccggcccgaaaatcccggatccacccacgcgtccggatttttgatataaggtttgaaatcatggaggtcgttgatattgatgcccgagctgctaagttagggattgattggtctcaggttaattttgattccatccaacttcctcctggagaagactttgggatcgagagtgatgatgaagctgtttaccaggatgaccagtctgaattcgacactggattcggtaacattatcgtggtcgatcacctccctgttgttcccaaggagaagtttgagaaacttgaaggtgttgtcaagaaaatttacaaccagttaggtgtgattaaggaaaatggactgtggatgcctgttgatcccgataccaagatgacattgggctactgttttattgagttcaacactcctcanggaagcacaaaacgctaaggaaaagtctcatggctacaaattgggacaaatcctcacaatctttgctgtaaacatgttccgatgaat

SEQ ID NO: 2874 - DNA, 445 bp, Arabidopsis thaliana
  unsure at all n locations
  Clone ID: LIB22-021-Q1-E1-E8
gggaaaatgatagtgaagttaagaaagtatatatgtgaaaattaaattcagttgagcgtaaatagaaaacccttacaaaaaaccaaatccctttcttatttttatttttgtgccattttctatatatattaaaaaaaaaacattcttataatctgaaatcggaaaaattcacttcactctcttcgttttgcgtttttttgtgtgtgtgttttaaatatcaaagccatgttttgggtaaggaattaaagagcaaaaacctcgattccgatttcaaatattcgaaggtgaaatttcttcattttctgcgaatttggtagctatcacgttctcaatctggtgaattanggcttttgttgagctgtggaagctaatgatgggtgtacccaccgctgangaaggtggggtttctctttgttgctatgtcttgaaaccttagtttgctttt

SEQ ID NO: 2875 - DNA, 457 bp, Arabidopsis thaliana
  unsure at all n locations
  Clone ID: LIB22-021-Q1-E1-F3
gcttgaacactcctgttgaaaagccttatattactgctgctgcttctgttgttgttactcctaacaccactcttcctatggaatggctgcggattactctccctgactttatgaaagaagcgaggaatactcaagaagcgatatctggtgatgatatcgctgttgtctcgggtttgtttgttgagcagaatgtgtctaaagaagagagagagcctttgcttacttggaaccgtttggaaagtcttgttgataatgcacagagtttagttaatggagttgatgctattaaggaagctggcattgtttgggagagtcttgtgtctgctgttgaagctaaagaaactaattgatgttaatgaaaatcagacgangaaaggaaaagaagagctttgtcctcagtttccaagcaaaatgaatgctactgaagctgatgggaataatcctgaaattgcaaatt

SEQ ID NO: 2876 - DNA, 527 bp, Arabidopsis thaliana
  unsure at all n locations
  Clone ID: LIB22-021-Q1-E1-G5
canacgtccggagctttttcgtttcccatcgggaagaagaaactcatatataccttccaaaaaatccatacgtcaagtatttgttctctatcctctctttgttgtcttataaattcttcaagcaggtttcgagatttcctcgaatctgttttgttcttgttcctcaaaaatgctgggtttttgaacgaacgaggatgacgatgctcaaagtccgaagcagagatggattgggagaagagtgagttgtagatggacctcatatcaaaagtctcccanctcaaaaccctaatcccaaggattangctttcaggtttccctatcccacaaaccnaaancctttnntccaaccaaattagnaaacccttnctcccttcgcctaaaggaaggcccctttcnggaattttccctaagcggtttttaaanccgnacaaatggggcccggatttncctnaaacccttcccgggaaatcctccgggttctcctccaaattccctaannctttnnaggggggttnccaaatgggggc

SEQ ID NO: 2877 - DNA, 483 bp, Arabidopsis thaliana
  unsure at all n locations
  Clone ID: LIB22-021-Q1-E1-G7
caancgtccgcaaaaatctcccaaacttttaaaaagttaaccaaaacccccaaacaaaaaaatgagaaacaatttcgtccctataattctctccttcatcatcttcttgactccatnaatcgcagaacaagaaccttcaattctttctcgcgtcgatcaactcctcaacaaaacaagctcatacctcgatttttcaacaaaattcaaccaaccaagaatcgaactaacaacatcaacgatcatcgccggcttactctctttcctagcttcatcaatctcaagcgccggtggaatcggcggtggaggtttatatgtttccgataatganaatcgtggncgggtctcgattctanagaacagctttaaagcntctcangcttttaaggggtaactgggtggatttaagagcctanacgtggggatgnaantcctaattcngtttaggaaacccctaaanatctggggggggaagaaacccntaat

SEQ ID NO: 2878 - DNA, 474 bp, Arabidopsis thaliana
  unsure at all n locations
  Clone ID: LIB22-021-Q1-E1-G8
gtccgaagantcccgggtcnacccangcgtccgttgtaacattagtttaagcattaagcttctttatgtcgaataataataattctccgaccaccgtgaatcaagaaacgacgacgtctcgtgaagtctcaatcacattgcctacngatcaatctcctcaaacctcaccaggatcatcttcttctccttcaccgagaccttccggtggatcaccggcgagaagaacggcgactggattatccggcaagcactctattttcagggggattcgactacgtaacggaaaatgggtatcggagattagagagccacgtaaaacgacaagaatttggctcgggacttatccggtaccggagatggctgccgccgcttacgacgtggctgcgttagcnttaaaagggcccgacgccgtttgaatttcccgggttaaccttgacttacgttggtccngnttaaactcggctgcgggtataa

SEQ ID NO: 2879 - DNA, 411 bp, Arabidopsis thaliana
  unsure at all n locations
  Clone ID: LIB22-021-Q1-E1-H10
aaacttcattcatagatctttgaaatgatgagctatcactacataaacaccttatgcattgtaatttctctcttgtcttgtctcttcatcacctcttcttttgcaggaccagttccaaaccaggaaaatggatctcagaaaattttccccactcagatatcatcacgtgatagtaaggtttctctatcgagcacggtgaagggtctgagagaacgtcctccatcgtcttactctctcaagatggagtctttcaacacactcatgaagtctgtttacactgagagatacgaatctcgtccttttagggtcggtagatacaactggacgcttgttgtgtatccgaagggaaacaagaacgataacggtacagggcacatttcgctatacgtcgtcctagacaactcaactcnc

SEQ ID NO: 2880 - DNA, 483 bp, Arabidopsis thaliana
  unsure at all n locations
  Clone ID: LIB22-021-Q1-E1-H12
tatttcgacncgctataggngcccgtaangggtcanagccntctcgggtcgacccacgcgtccggacgcttttagctctctcttcttctctgtcttctccttccttcttctgccgcaattctcgtattcgtttctctcctgtgtcgcgtatttcttctcttaatggtgataataagcttacaaattctccgccacagtttttaaatgccggcgcgagtctccgtcgttttgtggctccggggaagtttccaagtgtgagacttagggttttgacgaggtgcgagaaagaaaatgcacccaaaggtgggattgaagatgacgcggagcgatttgcgagacgagagagcacgatgcctgatagattcagatatttgaccaaagaagctccagatagtccaattatatggccatggtttgttgcgctggggtttctcgtttatgcgtggaganctgttttgtttgagctatccaactggagaaaan

SEQ ID NO: 2881 - DNA, 510 bp, Arabidopsis thaliana
  unsure at all n locations
  Clone ID: LIB22-021-Q1-E1-H4
tgcaatgtttacgcctggccgatgattcccggangccccccacgcgtccggaaagaattagaatctccacacaaatggtgctccaacaacaaacgcattttctcacannnnnnnnnnnnnnnnnnnnnnnnnnnnnnnnnccttctcatgatttcattttccgatctaagcttcctgatatcttcatccctaaccacctccctctcaccgattacgtcttccaaaggttctccggcgatggcgacggagattcctcaacaacctgtatcatcgacggtgccactggccgtattttgacctacgccgatgtacaaaccaacatgcggaggatagctgccggaatccaccggctcgggatccgccacggagacgtcgtaatgcttctcctcccgaactcgccgggagtttgctccgtctttcctgccgttgcntaacttgggagccgtttccactaacgcgaatccgttctaaaatcaagccggagatngctaaacaaggctaaaagcctcc

SEQ ID NO: 2882 - DNA, 454 bp, Arabidopsis thaliana
  unsure at all n locations
  Clone ID: LIB22-021-Q1-E1-H7
gaaataatgactactacattcgaatttctgcaaccaagaatccacggatttgcaacttgttgtagtagtaatagtctattgtactcgaaagcttcgagatttttcaacgatcgttgtagggtttatcgccaaaatccgaatcggtttgtctccaattcaatcacgcttcctctgcagaagaaacaagttacagtgttgagaaatcacgaaaggtttaatctttgggatgggttttcaagaaagaagagtagattagttgtgaattgtcaagaagatgatcagaacgagagttctagtgaggaggaagaaagcagtcagagtactccggcgaagtcggagaggaaaagagagaagaaagaagataaggtgtggtggtcaaagggcaaagaaatggcantggcagccaataatccaagcgcaagggattgggagttttgttgttgcaattgagtgt

SEQ ID NO: 2883 - DNA, 512 bp, Arabidopsis thaliana
  unsure at all n locations
  Clone ID: LIB22-021-Q1-E1-H8
ctgccggaacggtccgaaaattcccgggncnacccangcgtccgcncacgcgtccnnnnnnnnnnnnnnnnnnnnnnnnnnnnnnnnnnnnnnnnnnnnnnnnnnnnnnnnnnnnnnnnnnnnnnnnnnnnnnnnnnnnnnnnnnnnnnnnnnnnnnnnnnnnnnnnnnnnnnnnnnngataatgggagcctatgaaacagaaaaaccaactaaagatgcggcggctctagagacacagtcgccggaagatttcgatcaaccatctccgcttcgtaaaatcatctccgtcgcttccatcgccgccggtgtacagttcgggtgggccttacagctctctcttcttactccgtacgttcaactcctcggaatcccctcacaaatgggtcaatctcccaatttgggctcctgtggtccaagtctcccgggaatggattggttcaaaccaaatccntcgggtttcccacaagtggaccggatgtaaggtccaaatttggtcgccggtcgtcctttc

SEQ ID NO: 2884 - DNA, 446 bp, Arabidopsis thaliana
  unsure at all n locations
  Clone ID: LIB22-022-Q1-E1-A2
gcccacgcgtccgggggttgaagccttaaaggcgttttcacataagttcttgacgccgtaccatcctaccactagcaggagcaatgtanaggagctggagaggaaagtacacacattgcgtttgcagttaaaaacagctgaagaagaactcgaacgggtcaagagtggctaaagataaggctctgttcttccctttaattgtaaagtttctttcctcgccatattcttggaactcacttgctttctacatgggggtcttctggatctgcgttgtcatttgggtttantgttgtttatgttttgaacaanttatangtggaaaattaaaactgaatccttttccccccaaattctcatctancaacaactcntaaaggacatggaagaaatcaacagatctctttgctgttttatgtancattgatttgtttaaattgtaaaacagn

SEQ ID NO: 2885 - DNA, 518 bp, Arabidopsis thaliana
  unsure at all n locations
  Clone ID: LIB22-021-Q1-E1-D6
gaactgtttcaacgctcaccctggcccgtaacggtccgaangtncccgggtccacccacacgtccggatgcttctaacaaacagngggttgccactgtagttgctcatgaactggcccaccagtggtttggcaatcttgttactatggagtggtggactcatctatggctgaatgagggttttgctacttgggtcagctacttggctactgatagtttgttccctgaatggaaaatctggacccagtttttagatgaatctactgagggtctaaggctanatgggcttgaggagtctcacccgatagaggtggangttaatcatgctgctgaaattgatgaaatatttgatgcaatnagctacagaaagggtgcatctgtcatcngcatgctacaaagctatcttggtgctgaggtttttcagaaatcctcttgctgcatacattaaaaaatcacgccntattcagacgccaaagacagaatattatggggctgccttggaaaccgggattccggaga

SEQ ID NO: 2886 - DNA, 455 bp, Arabidopsis thaliana
  unsure at all n locations
  Clone ID: LIB22-020-Q1-E1-D5
gcccacgcgtccggtcttttagagactcgttagatgcgttttacaggttttctaggcctcatacagttattggcacagtgcttagcattttatctgtatctttcttagcagtagagaaggtttctgatatatctcctttacttttcactggcatcttggaggctgttgttgcagctctcatgatgaacatttacatagttgggctaaatcagttgtctgatgttgaaatagataaggttaacaagccctatcttccattggcatcaggagaatattctgttaacaccggcattgcaatagtagcttccttctccatcatgagtttctggcttgggtggattgttggttcatggccattgttctgggctctttttgtgagttcatgctcngtactgcatacctaacaatttgccactttacggtggaaaagatttgcattgggttgcagcaatgtg

SEQ ID NO: 2887 - DNA, 462 bp, Arabidopsis thaliana
  Clone ID: LIB22-020-Q1-E1-D6
gcactcttggttttttgctaaaaacagagcattttctctctagctctcactgtttctttaccataagtttcgtcatattagtacatgcaagtgtaagggatggtgatggaggaaggaagaagcatagaagaagggcttttgcagctcaagaacaaaaacgacgattcagagtgtcgtattactgcttgtgttatccttagcacttttgtcgccgtttgtggctccttctcttttggtgttgctactggttacacttcaggtgctgagacaggagttatgaaggacttggatctttctatcgcgcaattttcagcttttggctcattcgccactttaggagctgcaattggtgcactgttcctgcggtaatctggcaatgggtcattggcagaagaaggacaatgttgggtctccgaatttcctaagcaacactgggttggctctccatcgcttttgctaagg

SEQ ID NO: 2888 - DNA, 478 bp, Arabidopsis thaliana
  unsure at all n locations
  Clone ID: LIB22-020-Q1-E1-D7
ggagctcgcgaagctctctcatcagaaatcaaaaaccctaaaaaaagtcctttctgattcatctatacagacacatactgtattctcaaaacaatggagattccttctctgaataagcagcaagagttcactctcgcctccgtcactgatctcacttctccttcctcatctctttcgtcctctcctgttgtagctacgttttcatgcgttaatgaagtcaaggaactccgatttcaggaatcgaaatcgtctgatggtttcagttttgatcttagttcgactcagttgttcaagttggggccacttcagttcacttgtgtatctgatggttcgatttcttctgcaaaagggagaaatccgtcattttctccgaaggagttggnaataaaaatttagaagaatgaagaaaggatagcaaagggagttttgntgatccatttgaggggaatgtaaaaaaggatgatgccggttaaacnaa

SEQ ID NO: 2889 - DNA, 451 bp, Arabidopsis thaliana
  unsure at all n locations
  Clone ID: LIB22-020-Q1-E1-D9
ccgtccggnacgtcaaatcttcaccacagacgatgaagcatttgagtattacagtacattcgctagaaagagtggtttctcgattcgtaaagcacgatctacagagagtcagaatctangtgtttanagaagagatttcgtttgttatcgttctggttttaatcaacctaggaagaaagctaatgtagagcatccaagagagcgtaagtctgttagatgtggttgtgatggtaagttgtatttgactaaagaagttgttgatggtgttagtcattggtatgtttcacagtttagtaatgttcataatcatgagcttttggaagatgatcaagttaggttgcttcctgcttataggaagattcagcaaaagtgatcanganaaggattcctttgttgtccaaaagcggggtttccggttaatccggattgttaaanttgttggagttaaaga

SEQ ID NO: 2890 - DNA, 507 bp, Arabidopsis thaliana
  unsure at all n locations
  Clone ID: LIB22-020-Q1-E1-E1
ngtttcctgccgcacggtccgaaaatccgggtcgacccacgcgtccgttgtctttgcagatgcgacacgcaaaacgacgattctgatctcgcttgtctgatttcaaaaacaatgagaagatagttctgattatataacacacaaaccctacttcattccttcatcatcgtctccaatcattacccaaagatccgtctttttctttacttcatgtcgaagcaaacgtacaaagtgtgtttctgctttcgccggaggtttcgttacactgcatcggaggnaccgcgtgagatnaagaccattttcgaaaagtactcagagaatggagttatgancgttgatcatctccacangtttctgatcgatgttcaaaaacaagattaagccaccaagagaagatgcacagtcaattatcaattcggnancttcccttcttcancgtaatgggccccaacttgaagctttcttcaagtacccctttggggagaaaaaaccccccctggcccccaa

SEQ ID NO: 2891 - DNA, 498 bp, Arabidopsis thaliana
  unsure at all n locations
  Clone ID: LIB22-020-Q1-E1-E2
acgttatcctgccgcacggtccaaaatcccgggtcnacccacgcgtccgcnttctcagtcttcttctagaatcatctttgctctttctcgtcgactatttgctcgccggagaatctctctcagaatggctaggtcaccgagcaaacacggccgcgatcaaactcaggattgggaactctcattgaaggataaagacaagaagattaagcaacaacctgctaattcgtcgaatccgagtagtgagacgttcagaccaagtgggtcagggaaatatgactttgctaaaaagtatcgttccattagggatttgtcgagtagtttgattggagaaagtctattgggattctagttcagagaaaggagcaaggtaatgaattcctcaaccagaagaaattcaatgaggcgattgatgttacccccggagcattgctttaccgcaaatgccgtgacttatgcaaatccagcatngnttaccttaaatcaaaanattcaaaggcg

SEQ ID NO: 2892 - DNA, 514 bp, Arabidopsis thaliana
  unsure at all n locations
  Clone ID: LIB22-020-Q1-E1-E3
aactgttttcctgcccgccaccgggtccgaaanancccgggtcnacccacgcgtccggncgccggagaagtgaaaagacgttgatggtgattatgaagaagatgaaagattcagtcttgttcctcgtcgtaggcctcttctctttatctgttttggtctctcagtcgatcgcagggagagtcaaagctccattgttgcagagcaatactggtggattagttttcagcaaatccttcaattcgatctatgatacttctatgtacggacgcttgcagctcaacaatggccttgctcgaactccacaaatgggatggaatagctggaatttctttgcttgcaatatcaatgaaactgtcataaaggaaactgctgatgcctttggttcacctggcctggctggattaaggatacatacattcaataattgatgattgcnggccaaatttgtacccaatcaaaagggcaattggttctcaancctgaaaccttccaacaaggaataagcttcttgcgg

SEQ ID NO: 2893 - DNA, 456 bp, Arabidopsis thaliana
  unsure at all n locations
  Clone ID: LIB22-020-Q1-E1-E7
gggatcttctgctgcattggtcttggatggacatgacttgaagctactttctgtcaaggttgaggggaagcttcttaaggaaggggattaccagttggactctcgccatctaactcttccttcgcttccagctgaggagtcctttgttttggagattgatactgagatatacccccacaagaatacttcacttgaggggctttacaagtcttctgggaatttctgcacacagtgtgaagcagaaggtttccgcaaaattacattttaccaggatcgtcctgatataatggctaagtacacgtgtcgtgtggaaggtgacaagacactttatcctgtgttattgtccaatggaaacctcatttctcaaggagatatanagggtggtcgacactatgccttatgggaggatccattcaagaaaccgtgctatcnatttgctttggtggctggacacta

SEQ ID NO: 2894 - DNA, 420 bp, Arabidopsis thaliana
  unsure at all n locations
  Clone ID: LIB22-020-Q1-E1-E9
cgaaaatactgtgttctttgtttcttccatcgaaatcgaaaaaagctaagatctttgcgttttgaaacgatggcggaagaacataagcatgatgaatctgtgatcgctcctgagccagctgttgaggttgtggagagagaatcgttgatggataagatatcggagaagatccatcacggtggtgattcttcttcgtcttcttcatcttctnnnnnnnnnnnnnnnnnnnnnnnnnnnnnnnnnccctcttctccttcgtcttctatgaaatcgaaagtttaccgcttgttcggacgagagcaacctgttcataaagntctcgggngtggaaaaccggctgatataatcatgtggaagaacaaagaagatgtccgggggggtncntgggggggctacaactgcctgggttgtgtttgaant

SEQ ID NO: 2895 - DNA, 515 bp, Arabidopsis thaliana
  unsure at all n locations
  Clone ID: LIB22-020-Q1-E1-F1
aactgttattcctgccgccaccggtccgaaaancccggggtccacccacgcgtccgcacttacatcgctctcggaagttaccaagcttgtcatcaagtgagatcgatgaagccgctgctactcctctacaggcagtgaaactccttgctatgtatctatcgagtcctgaaaacaaggaatcaaccatttcgagcttgagggaatggttggcagatccaactgtaggaaacaatgctattatcaggttgattgctggtactatattcatgcatgaggaagactataatgaggctctgaagcacactcattctggaggaaccatggatctgcatgctttgaatgtccagatattcataaagatgcacagatcagattttgcggagaaacaactgagaagtgatgcaacaagattgatgaagaacaacaacaatcaatcaactccccaaccccttggttgaaccgggaaatnagggggttccanatacaaggaanctaaccnaaccttcaaggatttc

SEQ ID NO: 2896 - DNA, 434 bp, Arabidopsis thaliana
  Clone ID: LIB22-020-Q1-E1-F10
cccttttcgatttcattgataaaacgcaaatcgatctctcgtgtggaagaagaagaagaacacgatgggaacaatgggtaaagcattctacagcgtaggattctggatccgtgaaactggtcaagcacttgatcggctcggttgtcgcctccaagggaaaaatcatttccgagaacagctatcaaggcaccgcacactcatgaatgtttttgacaaaacccctaatgtggataagggggcttttgtggctcctaacgcttctctctctggtgatgtccatgtgggaagaggttcttccatttggtatggatgtgtcttgagaggagatgctaacagcattagtgttggagctgggaccaatattcaagacaacgctcttgtccacgttgctaagaccaacttaaagtgggaaagtcctacctactgtcattgga

SEQ ID NO: 2897 - DNA, 440 bp, Arabidopsis thaliana
  Clone ID: LIB22-020-Q1-E1-F11
tttttgcgggctataaacacagatttcgataggattattgcaatgtgcaaaaactggcaggacgataatggggacttttcagcagtgaacatggatactgctgttgctattcgcactctcgaggcgacttataaatcatctgcagatgctgattctgtcgaagctatgataataaaacttaccgaaagggagggcacacagcttaaatccaagggaaaggccggtgctgctacacgtgttgcagtgctcacatggcgatcacttttagttatgtcaagagaatggaaatactattggctccgacttatcctctacatgattcttacacttagtattggcacattatattctggcttaagtcactctttgtcctctgttgcagtaagtcctctaaaccattctcagcatgtcacatttgagtaccaagagatcaattatcg

SEQ ID NO: 2898 - DNA, 493 bp, Arabidopsis thaliana
  unsure at all n locations
  Clone ID: LIB22-020-Q1-E1-F2
gcacggtccaaanatcccgggtccacccacgcgtccggnagaaaccatttggagttggagctttggacgacgacaatggccccgaagaaaggagtgaaggtagctgctaagaagaagaccgcggagaaagtttcaaaccctctattcgagaggaggcctaagcaattcggtattggtggagctttacctcctaagaaggatctctctcgctacatcaaatggcccaaatccatccgtcttcaaaggcaaaagaggatcctgaagcanaggttgaaggtccctccagctcttaaccaattcaccaagactcttgacaagaatcttgctaccagcctcttcaaggtccttctgaagtacangccagaagacaaagctgccaagaanggacgtcttgtaaagaaagcccaagctgaanctgagggaaagccttctgagtctaanaagccaattgtnntcaataacggctcaaccaagtgacctaactcattgagca

SEQ ID NO: 2899 - DNA, 456 bp, Arabidopsis thaliana
  unsure at all n locations
  Clone ID: LIB22-020-Q1-E1-D4
ggnggagatgtcgacgatttcgatccatcggactgagactctacgagtcactcacgctcggtcacgaatcttccggcanagatatcggagaactatccctctttggaaattaacaatcanttcgagatcttctgatacatctaagaaggaagaactctctgtacaaatatcaattcctcctcaagttgatcaatcaagacctgaaggtttgacattcgatcgtttacaanctccggagccagagtttggtcatgangatagatttgagtttggtaaattcgtagctacganaagctatgcttgatgaatnaatattggggtaatgtcactcccantgaaagatatgttngattactacaannnggaanttggcagagcangatttaatgccantaaaagaaagatgttaaaggggatccangncagaaatgctcatgtaccgttgcngtaagaagg

SEQ ID NO: 2900 - DNA, 477 bp, Arabidopsis thaliana
  unsure at all n locations
  Clone ID: LIB22-020-Q1-E1-B5
aacctccaaatcgtgaggaaatccagagttccatcagatctaactctcttagatctgattatcatggattactctttccttctaatcattctcttactcacaatctctacttcatgttgtgctgctccttcttcttatgtggaagaacaattgagagacagaatcagtaacttacctggacaacctagtaatgtcgattttagacagtactcaggctatgtcactgtgcatgaagaacgtggaagagctttgttctactggttggtcgagtctccgttggcccgtgacccaaagtctagacctttggttctgtggctcaatggtggncctgggtggtccttccggttggcttaanggtgctgctgaaagaaaattggnccctttttcgtggttnggntccngaatgggcaaagaactccntcaattcccaaaacttttaangccttgggaataaaatttggnaaaaactttgccaat

SEQ ID NO: 2901 - DNA, 455 bp, Arabidopsis thaliana
  unsure at all n locations
  Clone ID: LIB22-020-Q1-E1-B6
gcnctctgaagaatccgtcatggcgtcgtcaagcgatccttcaaaaccagtaatggagaggaagaagaaaggagctccgatcaaattcttagtacctctcatctacgcacctgcgcttcctttgattcggttgtctttaaggcataagccagttctaagagatcgtctcttcggtcttgtcctcgtcggtgcttttgctcatggcttctatcttgtaacggatatatatgatgcagagagcaaatgaaaaactgggagttgcagtcagtcaacaagatctcaatattttctcagattgtctttcagataaataatttttgccttttgggtttaaacctatttgacacatgaactaanggatttttccttatgaaaccatttagtcatcctggaaatggtaacatcctttttacaatttttcaatccccggtccttggattaaaaacaaacaagcc

SEQ ID NO: 2902 - DNA, 452 bp, Arabidopsis thaliana
  unsure at all n locations
  Clone ID: LIB22-020-Q1-E1-B7
tttntcttccttttaactttgattctctccctcaggatctcatttcccgaccaaactcatcgaactaagaactcactgtaataaaacttttaaaaggtgtaaacaccaatggcagtttattacacaagtaatgtcggttgttaccagcaagaaccaatctttctcaaccatcaacaacaaaaccaacaagcttcttcttcatccgccgccgcttctttcaccgtcaccggcggcgatactgttcgaaacgagatggtttttatcccaccaaccaccacaggagacgttgtaacaggaaacggtaccgtttcaagcagcgatctaagctttcacgatggtcaaggactgtctttgagccttgggtactcagatctctgttgctccgtttcactttcacaataccaattgggggttacnancagaatccctcaattcagtcaaggaaangtcac

SEQ ID NO: 2903 - DNA, 456 bp, Arabidopsis thaliana
  unsure at all n locations
  Clone ID: LIB22-020-Q1-E1-B8
tcgtttgcgtttgcgagacaataaagacgctactgatatactagaagtttcaccagcaaaggatcttgaagaaacaaacttaacttgtgaagcatcatcctttttgtctattgatatgaaannnnnnnnnnnnnnnnnnnnnnnnnnnnnnnnnnnnnnnnnnnnnnnnnnnnnnnnnnnnnnnnnnnnnnnnnnnnnnnnnnnnnnnnnnnnnnnnnnnnnnnnnnnnnnnnnnnnnnnnnnnnnnnnnnnnnnnnnnnnnnnnnnnnnnnnnnnnnnnnnnnnnnnnnnnnnnnnnnnnnnnnnnnnnnnnnnnnnnnnnnnnnnnnnnnnnnnnnnnnnnnnnnnnnnnnnnnnnnnnnnnnnnnnnnnnnnnnnnnnnnnnnnnnnnnnnnnnnnnnnnnnnnnnnnnnnnnnnnnnnnnnnnnnnnnnnnnnnnnnnnnnnnntctgaaaa

SEQ ID NO: 2904 - DNA, 431 bp, Arabidopsis thaliana
  unsure at all n locations
  Clone ID: LIB22-020-Q1-E1-C10
ttcttcccttgtaaaccactcaatcaatcattgatcatgcctcgtaacttcaacttgttgttagttctggtgatcattgctctgtttattactaaaaactcacttggcaggcttcttgagggatccactggtattatcaatggtttcctgacgtggacaaacaccaagaagcccgtggacgctgaaagctgtgtcgaggtcggttgtgcaattatatatgacgttgttgctctatatattttatgttgttcattgtattgaatgtatcgtgtggtctgttatctactcaagtcggctgtaacattgtgaactactttatctgtagaagctattactttatcttcggattttggtttgggaactgctctaacatgcgctgttaccatcangcgcctggacaaaacaaagcagacatgatgccagattcccaa

SEQ ID NO: 2905 - DNA, 572 bp, Arabidopsis thaliana
  unsure at all n locations
  Clone ID: LIB22-020-Q1-E1-C2
aactgtttctcctgcccgcaccgggtccgaaaatcccgggtccacccacgcgtccgggaataccaaaagttgtgagccttgaattaaatggggaactagttgaggggaatattatcaagggtcaagcagtggttgcatggtgtggtgggacaccaggaaagtgtattaccagttggttgaggagaaagtggaatgggagccctgtggtgatcgatggagctgaagatgaggaatatatgttatctttagatgatgtgggatcaagtatggttttcatgtacacaccagtcacagaaggaggtgcaagaggagaacctcagtataagtacacagagttcgtaaaagcagcgcctccatctgttaagtaatgttccgaatttactgggaagaatgctgtttgaaaggctgccgttcctcaaaggggggtttgggagaattaatttttggganggcaaanggnaaaggtccctaaaccaaagttttccaaaattgggnttaccgggaaagaaaacaaaggggaaaaccanggaagaaaactcctccctttgaataatcccgggcttgggnaaacc

SEQ ID NO: 2906 - DNA, 527 bp, Arabidopsis thaliana
  unsure at all n locations
  Clone ID: LIB22-020-Q1-E1-C3
ngttatcctgccgcacggtccaaaatcccgggtcnacccacgcgtccggaggatctcgctctctctcgattggtatctctcgctccgtccttcctcagatctgatcgtccgccggttttcacgatgccgtcttcctcctccgccgccgtcctcgtgttccttcttctcgtttcccttctcactcctacgttcgcatccgattcagatcacaagtatcaagccgaggagcaggtcaccctatgggtaaacaaagttggcccatataacaatccacaagaaacatacaactattacagtcttccattttgccgcccatctggaaacaatgttcacaaatggggtggtcttggtgaagttctangtggaaatgagctgattgacagtgagantgcgataaaaattcaatgaagaaatgtcgaagagaaagtgtcatcctgtccgccttgaactccaatgaagccnaaggtcaagcaattttaaaagatggccaattgaatccaanctaactgggttcgaaattttttaan

SEQ ID NO: 2907 - DNA, 465 bp, Arabidopsis thaliana
  unsure at all n locations
  Clone ID: LIB22-020-Q1-E1-C5
ggaagaatccacacacacacagaagaagaatctcatcacgaattttagctatgggttcaatccaacacagagcacacagaagaggatgtgacagaccagatggtgggaagatccgctcttccgaatcagtttgaggataaaaacccgctaaacttcccgggactccgcagagatgtagacgccatcgaacgccatttcttgagcggaatgaagagtttctttgatgcggctgaagagatgacaagcagcttatttgatatcatgggagaccatcacccaagcaccaggagaggagggatacccattgaaaaccatcccaaggtagaggagcaccgcaatgacgaaactgccctacacgaccacactcctctggcgagattgatttctccgggccttggccaaggacgttttgagaaaagncntctgcntcntcctcctccttccttttttttttcacaaaggtcg

SEQ ID NO: 2908 - DNA, 456 bp, Arabidopsis thaliana
  unsure at all n locations
  Clone ID: LIB22-020-Q1-E1-C9
ccacccgtccgtcnccttagccctcgttttttttcngttctcgtctttcgttcttcacttttagacaagcanatatganacccccagttacaggaggacgtggtggtggaggattcagaggtggaanagatggtggtggaagaggttttggaggtggaagaagctttggaggaggccgtactggtgacagaggccgtagtgggcctcgcngcagaggacgtggtgcgcctcgtggtcgtggaggaccacctcgtggaggaatgaaaggatgaagcaaagtgattgttgagcctcacagacatgcnggagtgtttattgctaagggtaaagaagatgctcntgtcactaagaatttggttcctggtgaaactgtttacaaatgagaaanagaatcncctgttcaaaatgaatattggaactaaangttgaatacagagtttggaatccgtttaaatc

SEQ ID NO: 2909 - DNA, 519 bp, Arabidopsis thaliana
  unsure at all n locations
  Clone ID: LIB22-020-Q1-E1-D1
aactgtttatcctgccgcacgggtcgaaaatcccgggtcnacccacgcgtccgcncacgcgtccggaagtgagagacactgagacttgtagttgaccggatcattctcacttcgccggccgacgttcttccttccgccgtcggtatctatatttacgatccacgatctctcttgctgtttctgtcttcatcgtgacgaaaatggctgctcgtatcgggatcttctccgtcttcgtagctgtattgttatctatttctgcattttcctcagctcaggatctccagatcgtaaatgccgagcgaaggattgatttaagctcacatatcgtgaaggccttcttgactctcaaggttgaaaatattgggaaagatcctgctgcagaaatgcttcctgctttcccaactacccagatnaagaaattggctaaggtacaagcccctggcaactaactggcaaagaaagaagaagaaaacttaatttgccaataagatttaaaaccaactgaaacaacctgaagca

SEQ ID NO: 2910 - DNA, 456 bp, Arabidopsis thaliana
  unsure at all n locations
  Clone ID: LIB22-020-Q1-E1-D10
ccacncgtccgtcaatataaatctctctttctctctcttcatttgatagatttgaagatttgagaggagagagaggaagaaaaaatgggagagatgaagagtatgcaaatgggtgtgattggagcattgtttctatcagttgcatcttctgtctccattgtcatttgcaacaaagctttgatgaccaatcttggtttcccttttgcaacaacacttactagttggcatttgatggtaacatattgcacacttcatgtggcatataaactaaacttctttgagaataaaccaatagacatgagaactgttgttctctttggcctcctcaatggcatttccattggtctcctcaatctcagcctcggctttaattccatcggcttctatcaaatgaccaaacttgctatcataccattcactggtcnttaaaaacctcctcctcaacaaagaaattca

SEQ ID NO: 2911 - DNA, 441 bp, Arabidopsis thaliana
  unsure at all n locations
  Clone ID: LIB22-020-Q1-E1-D11
ggcggattaggagcttctttcatattcggagattctctagtcgatgccggaaataataattatctatcgacgttgtctagggctaatatgaagcctaatggtattgatttcaaagcctccggaggaactcctaccggccggttcaccaatggacggaccatcggtgatatcgttggggaagaactcggatcagcgaactacgcgatcccgttcttggcaccagacgcgaagggaaaagctttattagccggagtgaactatgcatctggaggaggaggaatcatgaatgccaccgggagaatctttgtgaatagattaggtatggatgtacaagttgatttcctcaacactacacggaaacagtttgatgatctacttggaaaagagaaagcaaaagattacatagccaagaaatcnatattcctcaatcactataggagc

SEQ ID NO: 2912 - DNA, 485 bp, Arabidopsis thaliana
  unsure at all n locations
  Clone ID: LIB22-020-Q1-E1-D2
gcagatttgcatttgtttttttttggtttggttatggagcgtgcaaggagacttgcttacagagggatcgtgaaacgtctcgtcaacgagacaaaacgccaccgtaacggcgaatcctctcttcttccgacgacgactgttactccctcaaggtatgtctcctccgtctcctcctttctccatcgccgtcgtgatgtctctggatcggcttttaccacctccggtagaaatcaacaccagacacgatcgatctccgtcgatgcgttgaagccaagcgacactttcccgcgccggcacaactcagcaacaccggatgaacaagctcanatggcgaaattactgcgggattcgataatcccaaacaacgttgattgattccaactgttcccgaaaatccgaattcggttaanattcnaattgaaantttttccgggaataatttngatnaaagggnttaancgggngaattcaaaatgaattganca

SEQ ID NO: 2913 - DNA, 503 bp, Arabidopsis thaliana
  unsure at all n locations
  Clone ID: LIB22-020-Q1-E1-B3
cacgcgtccggactttttcgggagactgttcggggaataaaaaaaagtctgataaagctgcttcgtcgagagataaacggaggtggagcttcaccaccagatcttcaaattccagcaagagagctccggcggtgacgtcggcttcggtggttgagcaaaatggtttggatgctgacaaacatgcgatagctgtggctgctgcgacagccgcggtggcggaagcagctcttactgctgctcatgcggcagctgaagtcgtgagactaacaagcggaaacggcgggagaaacgtcggtggcggtggaaactcgtcggtgtttcaaaataggaagaagtaaccgtcggtgggctcaaggagaatatcgccggcgatgaagattcaatcccgcttttccgtgggttatcctgggcganggagaagcaatttacgangcaactaaaagggcanttanntgaaagccttcaaagcaattaanntgaanaagggacacaatanttgaaga

SEQ ID NO: 2914 - DNA, 505 bp, Arabidopsis thaliana
  unsure at all n locations
  Clone ID: LIB22-019-Q1-E1-H2
gtancggtccgatattcccggggcgccccacgcgtccgggaagaagaagaagcggtagagagaaaaccgatgctcacagcgtttgcaagtcacgcgcgttctcacgttttcgcgtttgttaccgtcccaacaatcacgcgccgcctccgtatanatatcttacgccaatcacctctctcctcttctcttctcctaaacgaaaccttctctaatcgacccaattctgtttctcgtcgttgttattgttcgagctctgcgataatgggttctttcggtgtttggcgaagcaattacagtatcctgcgactcggcgtgatgattccgtcgtccgatgactatcaaggggtcaagatnggagatncgtaccgttgggtagaggattctgatgctgaagaagtgaaagagttgttcaagaagcaagtnaaattgacaaaatcctgtacttgaaaaagtgtgaaacaaaaggataagctccgtcangaatataacgaaaacttattggtna

SEQ ID NO: 2915 - DNA, 476 bp, Arabidopsis thaliana
  unsure at all n locations
  Clone ID: LIB22-019-Q1-E1-H5
ggcagaagaaaacgcggcggggaatgcaatttgttcaatctgctacgaagatcttaaaccggtggttgagaatctgcaatcaatctccgcttgtggccatgtctttcacgaactttgtttgcagcaatggtttgagtattgcccgagtacgaacaagcgaaattgtccgatttgtaagcagaagtgctctctaaaggatccttgtcgactttactttcagtcttctgggaatcaaaccgattcgattgcctcggataaggttgttggaatcgaagaagatccggttttgttgagaagagaagtgaagcggctttgaagggaaggtacagaatcttacttcggctctgggaaggcgaagaaaaaaggagaatgtttgaagtcccctgataagttgcatcaatgcaatgaagcaanttgaanggaggataaagttgaaaangtggggaaggtccttcaaagaaatatcaacgaatcaa

SEQ ID NO: 2916 - DNA, 438 bp, Arabidopsis thaliana
  unsure at all n locations
  Clone ID: LIB22-019-Q1-E1-H9
cattttgaagacgaaactcatcatcatcttcttcctcagacaacaaaaaaagcttttcactttctctccacccttctctctctccttctgaaagtctctctctttgccgtcgttagcctcttcctacacttggggctgcgattcttccaatcctccgatttcaatttcatcctctcaatcatagtttgaaatcatcgagcttttacggtgctgttggtgtttgacgccgtaaaattcgatccttttttatacatttgatgttgattttatcgatagttttgtgagatcgattttttagggtttcgagtttggcgctgacttgagggtttgattggatgagaataaggggttatgggacttgagtcaattgggtttgtccccctaatcatcgcaaattcctgaattctcaactccttgggaagggantaaggatccgtt

SEQ ID NO: 2917 - DNA, 537 bp, Arabidopsis thaliana
  unsure at all n locations
  Clone ID: LIB22-020-Q1-E1-A1
ccctgccgcacgggtcgaaanccgggtcgacccacgcgtccgcaagctctgaaattccacgcccacatctcctccgtcctcttgagatccttctcttcattcattttcttgctcaacttgagttgcttccaacatcttgcaagattgtctttgagttcattcaggtcttgaagaagagcactcttttaagctgtgtgaaacttgcgccgttcctgtgaagaactacttttggcattgcagatttcagagagctgtgatttgtgctatcttaaaaacggacaagttctatgttgtggcggatgagatgagggatgctatctgggttgatgaattttctgaatgcctgtctctgggcacgggcagatnagcangctccgtcctgcctcagantccgggtgggccgccaaanaaggggtttggctcccngggttcaagaanactccggggncaacaacgntcntttgggngaacntcctcccaatgggccgttcgnttcaaaggccaaacaaggctttgccaanaagggaccaaaaagcc

SEQ ID NO: 2918 - DNA, 446 bp, Arabidopsis thaliana
  Clone ID: LIB22-020-Q1-E1-A10
caaagcctctctaaataaaaacaaaaagctaactgaataagaagaagtagtgatgcatatcacaaaaccacacgccgccatgttttccagtcccggaatgggccatgtcatcccggtgatcgagcttggaaagcgtctctccgctaacaacggcttccacgtcaccgtcttcgtcctcgaaaccgacgcagcctccgctcaatccaagttcctaaactcaaccggcgtcgacatcgtcaaacttccatcgccggacatttatggtttagtggaccccgacgaccatgtagtgaccaagatcggagtcattatgcgtgcagcagttccagccctccgatccaagatcgctgccatgcatcaaaagccaacggctctgatcgttgacttgtttggcacagatgcgttatgtctcgcaaaggaatttaacatgttgagttatgtgttta

SEQ ID NO: 2919 - DNA, 497 bp, Arabidopsis thaliana
  unsure at all n locations
  Clone ID: LIB22-020-Q1-E1-A11
gttagcnttcccgtagccgncngaaattcaaagtnccacccacgcgtccggttcgttangagtactgtggagagtagcaaaccgaagatcatcaatggctcttgtggttatgttctagaagatgtaccgcatctctccgattaccttcctggtcttcctacttatcctaatccattgcaagacaatccagcttactcagtggttaagcaatactttgttgatgctgatgacagtgttcctcaaaagatcgttgttcacaaggatggtccaagggggattcattttagacgagccgggccacgtcagaaggtatacttcgaatctgatgaagtgcatgcttgcatagttacctgtggaggtctttgtcctggccttaataccgtgattaagagaaatagtgagcagtctatccttatatgtatggagtgaagagaatactggggaatanatggtggatatagangcttttatgcctaagaatactgtcncccttggac

SEQ ID NO: 2920 - DNA, 484 bp, Arabidopsis thaliana
  unsure at all n locations
  Clone ID: LIB22-020-Q1-E1-A3
gggccnccacgcgtccggaatcanatcaacncngacaccaatcattacacacaggttgatactatggngagaaagcctcttgaggntgagccatctactacgacgactaacaccgatgtggtcgattctttcgaggaagagcagagaaaaatcgtttatagaggatggaaagtcatgccttttatcattggtaatgagacatttgagaagcttgggatcatagggacattatcaaaccttcttgtgtacctaacttctgtattcaaccttaagagctacacagctgcaactatcatcaatgcctttagtggtacaatcaatttcgggacttttattgctgcctttcctttgcgacacttactttgggtcgctacaagactctcaattgtcccctggtcatcgcttgttttccggggatcgtttgtgatacnaacttactgctgcaattccgtcgttgcacccccgttgcntgcgggaacaaaat

SEQ ID NO: 2921 - DNA, 505 bp, Arabidopsis thaliana
  unsure at all n locations
  Clone ID: LIB22-020-Q1-E1-A4
aactgtttatcctgcccgcacggtcgaaaatcccgggtccacccacgcgtccgcactctccttctgaaagtctctctctttgccgtcgttagcctcttcctacacttggggctgcgattcttccaatcctccgatttcaatttcatcctctcaatcatagtttgaaatcatcgagcttttacggtgctgttggtgtttgacgccgtaaaattcgatccttttttatacatttgatgttgattttatcgatagttttgtgagatcgattttttagggtttcgagtttggcgctgacttgagggtttgattggatgagaataaggggttatgggacttgagtcaattgggtttgtctccctaatcatcgcaaattcctgatttctcagctctttggaaggaattangattcgttgatttcgagttttgngttgtgttgggtgatgaaganattgggtttggncaaattgaggggttaanggtgttggtttactggtttgaatccnga

SEQ ID NO: 2922 - DNA, 489 bp, Arabidopsis thaliana
  unsure at all n locations
  Clone ID: LIB22-020-Q1-E1-A6
ttcccgggnccacccacgcgtcngcactctctctctctctgcctcctttcggattcaaatctcagatctagctcaaccatggcgttgctcgtcgagaagacctcaagtggccgtgaatacaaggtcaaagacatgtctcaagccgatttcggtcgtctcgaactcgagctcgccgaagttgagatgcctggactcatggcttgtcgtaccgaattcggaccttctcagccattcaaaggcgctagaatcaccggatctcttcacatgaccatccaaaccgccgtactcatcgaaaccctaactgctctcggtgctgaagtcagatggtgttcctgcaacatcttttccactcangaccacgccgccgcaagcatccgctcgtgactccgccgctggttttcgccctggaaaaggtgagactcttcaaggggtactggtggtgtaccgagcgttgcccangattgggggtcangttggtggcctgatctg

SEQ ID NO: 2923 - DNA, 470 bp, Arabidopsis thaliana
  unsure at all n locations
  Clone ID: LIB22-020-Q1-E1-A8
gcggacgcgtgggcggacgcgtgggcttatttcgaaagggtaaaaaccaaaagcgacgcaaagggcaaaatcggaaaaagtgttttatttatggccgccgttagtagttcgtcggagaccggagactgcggcgttacgggaaagagagatgagatcatgttgttcggagttagagtcgtggttgatccgatgagaaagtgtgtgagtttgaacaatctctctgattatgaaaagtcttctccggaggatgagatccctaagatagtcaccgccggagctggagatggtgaagataagaacgaaacggatgcgacggtgattgtcgctgacggttacgcctccgccaatgacgctgtccagatttcgtcttcctcccgccgggaaggaaaccaagggggttccatgggcaagagaaccaancataanaaggttcttgattgggntgccacaaaatnagggaaaaggagatt

SEQ ID NO: 2924 - DNA, 492 bp, Arabidopsis thaliana
  unsure at all n locations
  Clone ID: LIB22-020-Q1-E1-B11
actgttagcttcccgtagccgtcnnaaaattcaaanngnccacccacncgtccgaagatgatgattcaagagattttgatttttcaagaaaactctgtttttcctctttttgtttttgcctcttggggcatttggagagcaatggcgacttttgctgaacttgttttatcgacttctcgctgtacatgcccttgccgttcattcactagaaaacccctaattcgtccccctttatctggtctgcgtctccccggtgataccaaaccattgtttcgttccggacttggtcggatttctgttagccggcgtttcctcacggccgttgctcgagctgaatcagaccagcttggtgatgatgaccactcaaagaatgtggaagataagcagaagaaagcaagccagcttaagaaaagagtgatctttggtattggcattggtttanctgttggatgtgttgtgttagctggaggatgggtttcactgtagctttaa

SEQ ID NO: 2925 - DNA, 570 bp, Arabidopsis thaliana
  unsure at all n locations
  Clone ID: LIB22-020-Q1-E1-B2
aactgttattcctgcccgccaccgggtccgaaaatcccgggtcnacccacgcgtccgcgttcttgtaatggaaatctacaccatgaaaacgaattttcttgtactggctttgtctttgtgtatccttctttcaagcttccatgaggtttcttgtcaggatgatggtagtggtttgagtaatttggatctaatagaacgtgattatcaagatagtgtcaatgctcttcaaggcaaggacgatgaagatcagtctgcaaagatacagagtgaaaaccagaataacactacagtgactgataagaacactatttctctatctctatcagatgaatctgaggttggatctgttagtgatgaaagcgttggacgttcgaagtcctgttgggattaaaatcaaaccttgaantccgaagctcaatcacaaataagtaattnanccaaagcctgggattctggaatgggtggtccaaagggcttgnaaatcccaaagggaatggaatggaatgaaanaaanttatcctggccccaataggaacaagaaaaaatggttttgggaaggaaaatccnaaa

SEQ ID NO: 2926 - DNA, 474 bp, Arabidopsis thaliana
  unsure at all n locations
  Clone ID: LIB22-019-Q1-E1-H12
gnccatccacgcatccggaaatcttcagcgngatgatgataaggttgacgtggtttcgggttctagaagatatggatctgagaactggatgtcctcagccaggcatgaacctacttacacagatttgctctccggctttgggactaacatagatccatcccatggtcagcggatacctttttatgaccattcatcatcaccttctatgcctgcaaagagaatcttgagtgattcagaaggcaagtttcgattatcttgctaaccagtggcagatgatacactcctggtctctccctgaagttacatgaatcncccaaaggacctgcaagcaactggatgcctctctccaaagggcgatgcaatgtttaatacaacgaatatccnggtcctaangggccaaccaacggaaaatgcctggggggaactngggcaataagtccanctgccttgaantaataaganggaatgggccat

SEQ ID NO: 2927 - DNA, 517 bp, Arabidopsis thaliana
  unsure at all n locations
  Clone ID: LIB22-018-Q1-E1-G6
aattcnacgcggacggtaccggaacnaaattcccgggccgacccacgcgtccacggacgcgtccgcccacgcgtccgttctcaactaacttagttagggatatctccggtcatggatctcaggcggagacagtggttcttgtcggctattttgctgtcggcggcgttgctgattgacccgcaattctcgacggcggcgacggcttcggagaatttggtatttgaagttcgaagcaagttcgccggaaaaagagtaaaagatcttggagctctcagagctcacgacgtccaccgtcactcaagactcctctccgccatcgatattcctctcggcggcgatagccagcctgagtctattggtttatacttcgctaaaatcggactcggaactccatcaagagacttccatgttcaagttgatacaggaagtgatatcttatgggtgaattgtgctggttgcatcaantgtcctaaggaaaaatgattctggtaaaaccgaaaacctaatgaagttgggt

SEQ ID NO: 2928 - DNA, 502 bp, Arabidopsis thaliana
  unsure at all n locations
  Clone ID: LIB22-018-Q1-E1-H1
ccgcccntaccggtccaaaatcccgggnccncccaagcctncgtnacnttnatnganggaaaaaaanctttngacaatgggcacagacacagcaagnnnnnnnnnnnnnnnnnnnnnnnnnnnnnnnnnnnnnnnnnnnnnnnnnnnnnnnnnnnnnatgttaaacctgccggagaacgccgcggatcatccggttccggaaccgtcggatcgtcaggctccggaacaggcggatctcgttccaccacatctactcagcagaatggtcggatcttaggtcggccgatggaggaagtacggagaacctatgagtttggtcgtgagcttggtcgtggccagtttggtgtcacgtactcgtaactcacaaagagacgaaacaacaagtcgcttgcaagtcaatccctacgcgccgccttgttcacaaagacacattgaagatgttcgccgtgaagtcagattatgcacatctcancggtcaccggaacatatggacttgaaggaa

SEQ ID NO: 2929 - DNA, 459 bp, Arabidopsis thaliana
  unsure at all n locations
  Clone ID: LIB22-018-Q1-E1-H12
anatggagaaangattttggtactgacaccattttcgaggattttgaatttgaagagtttgatgaagttctgnaatactaccctcatggntatcatggtgttgataaagaaggaaggcctgtttacattgaaagattaggactacttgatccggccaagctcatgcaagtcactacagtggaaagattcataaggtatcatgttcgagagtttgagaaaactgtcaacataaagcttccagcttgctgcattgctgctaagagacatattgactctagcacaacaattctagatgtccaagggcgtgggggttcaaagaaatttctccaaagcctgcgaaggggattcccataatccaagctgccnaaaagaattgatnaccgattaactaaccctggaanacactttcaaccggaangtttcaatcaatcaatgggtgggctccnggggtttaaacct

SEQ ID NO: 2930 - DNA, 500 bp, Arabidopsis thaliana
  unsure at all n locations
  Clone ID: LIB22-018-Q1-E1-H2
ctacggtcacncatcccgggnccnctctcccnattaaaaactngttttttttttaccggtcaccggtttatggaatgactgattaccggctacaaccaacgatgaatctttgggaccaaccgacgacaaacgcttctaatgatgggaagctttcatgaagctcttccgatatctcaactttatggcctccggcgtcgacgacaaccacgacggcgacgactgaaacaactccgacgccggcgatggagattccggcacaggcgggatttaatcaagagactcttcagcaacgtttacaagctttgattgaaggaacacacgaaggttggacctacgctatattctgggcaaccgtcgtatganttctccggcgcctccgtgctcggatggggaaatggttattacaaaaggtgaagaaagataaagcaaacccgagacggagattgaattcgccgccgttttctactccggcggttaaggatncaggaaaaaattttgaa

SEQ ID NO: 2931 - DNA, 515 bp, Arabidopsis thaliana
  unsure at all n locations
  Clone ID: LIB22-018-Q1-E1-H3
cgccncgtaccggtccaaaaattcccgggnccaaccaagccgncgggaacaacagagtancgagtttacctggtactcctcaaaggtttagtattccgcagcgattagcttctttgggtcaagatttcgagagaaacggaaaggaaggaattttgataagaagattcggtatacagtccgcaaggaggtagctttgaggatgcaacgcaataaaggtcagttcacatctgccaagtcaaacaatgatgaagctgcatctgctggatctagctgggggtcgaatcaaacctgggccatagaaagtagtgaggctcagcatcaagagatctcatgtcggcactgtggaattggcgaaaagtcaactccaatgatgcgacgtggacctgccgggccaaagaacactttgcaatgcatgtggacntatgttggcaaacaaaggtgcctttaaggacttatccaaagcctctcctcaaacagccaanaatcttcctttaaataagaatgaagatgcaaat

SEQ ID NO: 2932 - DNA, 442 bp, Arabidopsis thaliana
  unsure at all n locations
  Clone ID: LIB22-018-Q1-E1-H5
gcaacacaaaaaaactcaaaaccatcgngaacatcgaagaatcatctctcaacaattctccgataattctttggactgatgaattaaagggaaacgctgagtgtaaatcatacaacagttctaagtcgtgaaaacaaaaaaaagatggcttgtagaggttgtttggagtgtttgttgaagttactcaactttctcctggctgttgctggacntggcatgattggttatggtatctatttattcgttgagtacaagagagttaccgataattctgttacattcgatttgactaatggagatcaaagttacntttcgtttgggaggcctattcttaaggctgtgtcacngtcttcaaanaacctttganaatcttcccaaaancgtgggtcaaanacttgtcatgggaattggngtgggncccctttgtaanttcttgccgtgg

SEQ ID NO: 2933 - DNA, 511 bp, Arabidopsis thaliana
  unsure at all n locations
  Clone ID: LIB22-018-Q1-E1-H6
ccgtaccggaaacagaattccngggncgacccacgcgtccncccacgcgtccggcagtctcccactgattcagcagctctttgaactactcttcgacaatggccgaacgtggtggagaacgtggtgttgagcgtggtggagaacgtggtgatttcggacgaggattcggaggccgtggaggtcgtggagatcgtggagggcgtggacgtggaggccgtggtggtcgtcgtggagggcgtgccagtgaagaagagaaatgggttccagtgaccaagcttggtcgtctcgtggcggctggtcatatcaagcagatagagcagatctatcttcattcactcccggttaaggagtaccagatnattgatatgctcatcggtccaacattgaaggattaagtaatgaaaaatcatgccggttcaaaaacaaaccaaaggctggtcaaaaggactaaaattcaanggcctttgttgtccttnganaatggtaaaggtcaatgttggggnttgggaat

SEQ ID NO: 2934 - DNA, 492 bp, Arabidopsis thaliana
  unsure at all n locations
  Clone ID: LIB22-018-Q1-E1-H8
caaattcccgggncgacccacgcgtccntttactcacacaagaaaacaaaatcatgtctcgatttgctatcttagtaaccttggcacttgccattgccactgtttcggtggttatagctcaagtccctccggagaaacaattcagagtcgtcaacgaaggagaattcggtgaatacatcactgagtacgacgcaagttacagattcatcgaatcatcaaaccagagcttcttcacatcaccattccagctcttgttttacaacactacccctagcgcctacatcttagctctccgagtcggactcaggcgtgacgagtctaccatgcgttggatatgggacgcgaatcgcancaaccccgtcggagaaaacgctacactctcactcggccgtaacggcaacctcgtcctcgctgaagctgacggacgaatcaaatggcagactaacacaagtaacaaaaggngtcaacggattccaaatcctaaccaacngg

SEQ ID NO: 2935 - DNA, 422 bp, Arabidopsis thaliana
  unsure at all n locations
  Clone ID: LIB22-018-Q1-E1-H9
natggaactgctggaaagagaacgactcttcatgatctatatgagaaggaaggtcagagtccttggtatgataatctttgccgtccagtcacagatcttctcccgttgattgctcgtggtgttagaggtgttactagcaaccctgcgatcttccaaaaagccatttccacttcaaatgcttataatgatcaattcaggacacttgtggaatcgggaaaggacattgaaagtgcgtattgggaacttgtggtgaaggatattcaggatgcctgcaaactttttgagccaatctatgaccagacagaangtgcggatggctatgtccctgttgaagtttcanctangcttgctgatgataaccaaaggaactggtgaaagctgcctaaataacctaacaaaggtttcaaacntccttaagtcca

SEQ ID NO: 2936 - DNA, 431 bp, Arabidopsis thaliana
  unsure at all n locations
  Clone ID: LIB22-019-Q1-E1-A12
accgataactcaattaactctcttctcttggcttctgcaacgctgagccaccatcgtcctcttctcttcctcttcgatctctcctgaatcctcaaaccctggagagagagagagagagtgacgggggaagaagatgacttctgctttgtatgcttccgatttgtttaagcagctcaagtcaattatggggacagattcgttatccgacgatgttgtacttgtgattgcaacgacgtctttggcactagtagctggatttgtggtgttgttatggaagaaaacgacggcggatcggagcggggagctgaagcctttgatgatccctaagtctcttatggctaaggacgangatgatgatttggatttgggattcgggaagactanagtctctatcttcttcggtacgcagactggaacagctgaaggatttg

SEQ ID NO: 2937 - DNA, 433 bp, Arabidopsis thaliana
  unsure at all n locations
  Clone ID: LIB22-019-Q1-E1-A7
atatagagaaagagatttgagagatatatgtgtaggtgttagggttttcattacttgtgaattgtggctgtggcattgaatagaggtgtttggggttttgtccctttggtaaaggatgagtgttctctagtgtgaagctaaattggtcttctaagccatctgtgtgagggatggaagtgtagaaggtgctgaaacaactcatttggattagggattggaattggattcgtcttgtggcctttaccgtggtagggatttagatggtagagaaagctagggtagattaaattttttgtaagaagagcttctctgttgttgttggtggggggttaanaaaggttanagaaaatgtgtgttccttcctggaanctgatgaagtacagcttcctaatgggacaaaggtgaacactcctttaactnccggaatgggttg

SEQ ID NO: 2938 - DNA, 462 bp, Arabidopsis thaliana
  unsure at all n locations
  Clone ID: LIB22-019-Q1-E1-B1
ggaaatttgtaaaagatatgagaaattagtaaattccagaaacttattanaagcggcggatcgaattcgcgacgagcgttccattagggtttcgaatcaacatcaacaaacgacgagagaaaactttttaaaacatgtacggaggcgattttgacggcaacgctgctttcgccggnggcggcttcatgccttctcaggcgactacgcaagcccatgaatcctcatcttccctcaagaaccgcgatgtacgtaccttgcttcccctgacactgaagcagttgagcagcgcatcaaccactggcgaatcaaatttctctattgatggcgttgatattangactgttgtaatcgttggacngatttcctagaatggagaacagaatcactcanggtcnaatttgttggttgatgacggtacaggctggggttgattgtgtcagatggtgtcacgccccggcaaga

SEQ ID NO: 2939 - DNA, 464 bp, Arabidopsis thaliana
  unsure at all n locations
  Clone ID: LIB22-018-Q1-E1-G5
gcatctcaaaaaatctcagctatggctacctcctccgcttggaagctcnatgancaccccaagctccccaagggtaagaccatcgccgtaatcgtcttacatggttggggtgaatctgnccctgatcagtacaactgtatccacaacgctccaactccagccatggattctcttaaacatggngctcctgatacttggactttgatcaaagctcacggtactgctgtaggacttcctantgaagatgatatgggaaacagtgangttggtcataatgctcttggtgctggtcgtatctttgctcaaggtgctaagctttgtgaccaagctcctgcntctggcaaaatcctttgaaagtgaangttttaaatacgtttctgaatcctttcaanaagaatactttgcaacctggttggacttctcaattaacggtgganttcaatccccttcccgattaaacaaaa

SEQ ID NO: 2940 - DNA, 462 bp, Arabidopsis thaliana
  unsure at all n locations
  Clone ID: LIB22-018-Q1-E1-E8
ncccacgcgtccgcccacgcgtccgcccacgcgtccgctcatcttctccgccgtttctccttctttcgccgcttcttcctccgacgacgttgacgatgaggatctcagcttcctcgaagatctcaaagaagacgacgttcccggcgctgactcactctcttcctcaactggatttnnnnnnnnnnnnnnnnnnnnnnnnnnnnnnnnnnnnnnnnnnnnnnnnnnnnnnnnnnnnnnnnnnnntttttccgatctaggtaatccggattccgatccgttaccgacgccggagattgatgagaaagacgttgtggttatcaaggagcgtaacttcactgatgtgattgagaataatcaatacgttttgggttgagttttatgctccgtggtgtggtcattgtcagtctcctgctcctgaataagctgctgctggcacggacctaaaggaanatggtgttgttt

SEQ ID NO: 2941 - DNA, 467 bp, Arabidopsis thaliana
  unsure at all n locations
  Clone ID: LIB22-018-Q1-E1-E9
ggtaccggtaacaaattcccgggcnttatctgatcgcaacaaaccagttttttcgcatcggcttcttccttttgctactagctctcctctcttctccgaaaatggcgttacaaaacaaagaagaagagaaaaagaaagtgaagaagttgcaaaagagttacttcgatgttctcggaatctgttgtacatcggaagttcctataatcgagaatattctcaagtcacttgacggcgttaaagaatattccgtcatcgttccctcgagaaccgtgattgttgttcacgacagtctcctcatctctcccttccaaattgctaaggcactaaacgaagctaggttagaagcaaacgtgagggtaaacgggagaaactagcttcaagaacaaatggccgaaccctttcgccgtaatttccggcttactctcctcctaaccntcctaaaagtttgtctaatcgccnttacgttg

SEQ ID NO: 2942 - DNA, 549 bp, Arabidopsis thaliana
  unsure at all n locations
  Clone ID: LIB22-018-Q1-E1-F1
acggtcanaaatcccgggtcgnccaagcgtncgaatcacggcctngccgatctctctcaatctccgatcaaccatgagcaaaggtccaggactcttcaccgatatcggcaagaaagccaaagatctgttgacgagagactacaattccgatcagaagttcagtatctccacttacagtgcctccggcgtggcccttacgtctactgctctgaagaaaggaggagttcatgctgctgatgttgccacccaatacaagtacaagaatgctttgtttgatgttaaaatcgacactgattcnatgttttgacaacaagtcacactttaccgagattctcccatcaacaaaaagccattggcctcccttcaaaagtccctggattataaattccggccaaagctccgaanggtggcaaataacnttccaacgaaccaacgccaacaagtttaaccggctggctggcaagccttttgaaaacaaaaaacccaactaaattgacaattaacaaagctaactcccttgggttccgccaagtcaacctcaattttggg

SEQ ID NO: 2943 - DNA, 468 bp, Arabidopsis thaliana
  unsure at all n locations
  Clone ID: LIB22-018-Q1-E1-F10
cagtaccggtnacaaattcccgggncgacccacgcgtccnatcgattttcacggcgagaaatgttgtcggcgcttggctttgctttactcagcatcttcgcgatcctcttgtcgttatcaaccttgtctaatggattacttcaacctcgtaggatttctcatggcttgacggaaagtagcaagtacttgacgagggatgagctctggttcaatcaaaccctagatcattactctccttctgatcatcgcgaattcaaacagcgatactatgaatatctagaccatttacgagttcctgatggacctatctttatgatgatctgtggcgaaggaccttgcaatggaatccccaatgactatataactgtgttagcaaagaagtttgatgcangcattgtttcacttgagcatcgttattacggaaagagctcaacgtttaagtcattagccactgagaatctcaagtat

SEQ ID NO: 2944 - DNA, 489 bp, Arabidopsis thaliana
  unsure at all n locations
  Clone ID: LIB22-018-Q1-E1-F3
anncacgcgtccgaaaagaagagggaatttaaaagggggaacaaattccctccaaatgattgggccataaaccagagacaaggctcaagccaactctgcttctatctatctctcactctactcataaaaatctccatatacgcttcttcttcgttctctgatttgctggtgcgcttctccgtcatcgttcgccgatcatagtcgatcccgccgcttccagatgcttattccttggcctgatgggacacaagtgatatcagtgttaccgttgatagagtggtgttttggttctgttttggtgtgagcgtatgcctggaaataagtncaactgcaattcctctcatatcccantctctcgaacagaaagcctccttgagaaatagaagaaccttanaagaagaaagaaggaagaagcaaaccgaacctccgtaaatccctaatggacnttggctgggcaantttccgaaaaactcctgaanaattgacttt

SEQ ID NO: 2945 - DNA, 505 bp, Arabidopsis thaliana
  unsure at all n locations
  Clone ID: LIB22-018-Q1-E1-F4
ctaccggtcaccaaaatcccgggtccccccaacgccttcnaanaaagcgttttactcgggcagatggaaaatgttttgaacgtgacacatggagagaaataaaggaagacattgaacgtgatangtctgagaatgccagctcctctgatgcagttgttatatctcaagaaatcacagaaaagaagcctgtagaaataagagaggttgaatcgaatgcacctcgcgccagtgattgtaccgagaaagtagatgtcaacaaggaacgtcttcttaaagtccccatagatagggctctatatcagaaggcactaacatcacttgttgattccaaaattccacaagaagaagtcttggagatcaatgaaactaataagctagatgaggaagcactagctagtgctgaatttgtgtcctttgtggactgtactcctgaaanggtcaaatctatctttgagaaaggcaaattggtgaanggttgctggctaaggatttcctttgacataaa

SEQ ID NO: 2946 - DNA, 499 bp, Arabidopsis thaliana
  unsure at all n locations
  Clone ID: LIB22-018-Q1-E1-F5
cgacgagtcgctaatcaaataaacctaaaccctagatcgtgatcggcaacggcacctcctcgtcggcgatagcttctcttccactaaaagaaaatcctcttcggtgagaatggcagagcatttagcttcaatctttggtactgaaaaggatanagtgaattgtccgttttactttaagattggtgcttgtcgtcacggtgaccggtgctcacggcttcataaccgtcncaccatctcgccgacgcttctcctctcgaacatgtaccagagacctggacatggataactccaagtggtgggattctcaaggggaaaagccgtttagacccganttangattcaaagaacaacttttganggatttcnaacnaacnataatttttccnaagaaactnaaacaaagnttttggngnaanttggnaaaagttccccaatggttttggtgaaaaanccnttggcnggattaatttngaattggggaaatggggtaangttccgg

SEQ ID NO: 2947 - DNA, 469 bp, Arabidopsis thaliana
  unsure at all n locations
  Clone ID: LIB22-018-Q1-E1-G10
gtaccggtnaccaaattcccgggncgacccacgcgtccanccacgcgtccgcccacgcgtccgcccacgcgtccgagcaatctgggcatgacaaagtccatgaatttctttcagaacatcattaaacctttcaaacgcagctccaatcgaggtaagatccgtttgatttgttgattcttagtgtaagattaggtttttgtgaaatttgactaactttttcttcgttgacttaaaggtcttgaagatgatattgagcgaattgctgctatggagcaaaaagttttcccatttcaagttttagtttccgctaccaaagattttcacccgacccataaactcggtgaaggtggtttcggtcccgtcntcaagattacctgacgggagagacatancagtgaagaagctatctcaagtttcaaaggnaaagnaaaaacnagtttgtgaacgaaggtaagttgttggctaaaat

SEQ ID NO: 2948 - DNA, 507 bp, Arabidopsis thaliana
  unsure at all n locations
  Clone ID: LIB22-018-Q1-E1-G2
cgnggtctaccggtcacacatcccgggnccccccacgcgtcnagantgctttcacggcggttactgtttctatcctttttagatcagctcttgcggagccaaagtcgattccttcaacgtctatgtaccctaccttggacaagggtgatcgcgttatggcggagaaggtctcatactttttcaggaagccagaggtttcagatatagtaatcttcaaggctcctccaattttgctggaatatccggaatatggctacagttccaatgatgtattcataaaaaggatagtggcaagtgaaggtgactgggttgaagttcgtgatgggaagctctttgtgaatgacattgtgcaagaagaagattttgtcttagaaccaatgtcatatgaaatggaactaatgtttgtccccaaaggttatgtctttgtccttggtgataaccgcaacaaaaagcnttgactcccataactgggggtccactttcaataaagaacatccnttggaaatt

SEQ ID NO: 2949 - DNA, 488 bp, Arabidopsis thaliana
  unsure at all n locations
  Clone ID: LIB22-018-Q1-E1-G3
acggnatctgaaatcccgccgttgtcgtcatcaaccgccgcagcggaggaatctgganagaagaccagcaagaangcggctaagaaggaagctgccaagctanagaagttaagacgtcgtcaagaacaagaggaagcaacgcgtcnaacagcttcgatctctctggaagagaatgacgagttttccaataactacggcnacgtgactcttaccgagttgcaatcgtcggcggatccgaaagccgggaagtggatanaggctgttgagggaaangagtggaccgatgtnagccattttggtggaaagagatgttggaatcaaaagttctgatnaaaaggccgagttcacacgaatcgtccaacgtctaacaaaanttgggggtttgtngtccntgaagggaaaaccggattaaactgttcaattgcgttggttaaccaatccagngaaagaccaaaagttaggtngccaacaatgggttaaattacctc

SEQ ID NO: 2950 - DNA, 523 bp, Arabidopsis thaliana
  unsure at all n locations
  Clone ID: LIB22-018-Q1-E1-G4
anatccctacggggtctacggtcacgnatcccgggncccaccaagccttcnanaaanncgtccgatttacacggcgtctcgggccatcacgagcctaattccgaacctccaattccgacaggttcgtcgagtccgaagctgaagattagtcccaaattgaatcggtggtctangggccgagctttaagatctggtgttaagcttgaccgtccaattccccgttccgataactcacctcgccgtcaagtaacggaagcccaaccgaccgatgaggctgataagaagacgacggcgatcgacgtggaggtaacggcgggaaagtctatatatttggtttccgacggaactgggtggacggcagagcattccgttaacgccgctttgggacaattcgaaagatttttccgttgaatcgtggctcctctggtgaatacccatctcntctcctggggtgaaggattaagganaaggctaancgagaattattaagcaaagcggnaaaaggaaaggggaaatgtntttc

SEQ ID NO: 2951 - DNA, 502 bp, Arabidopsis thaliana
  unsure at all n locations
  Clone ID: LIB22-018-Q1-E1-E5
natggtgctaaggtggtgtatcagtttggaaggacgaggagagggagatatagtgcaggcactgcggaatctagcaagttctataattcaagtatgtattgggatgagttcatttggggtggtgcttggatgtattatgctaccggaaatgtaacgtatctcaatctaatcacccaacctactatggccaagcatgctggtgccttctggggtggcccttactatggtgtatttagctgggacaacaagcttgctggtgctcagttgctgttgagccggttgaaggttgttcctgaatcctggatatccaatatgaaagaaaattctaaaggaccttccaacaatcaagancaagcaataantccatgttgctcaataactttgcccaaattttcaaacaaaattttaacaagaaaccaaatgggagggtttaataanaantttgaatccattgganctccaanaagccgcctgcaataattccggtaaaatgcaanccttt

SEQ ID NO: 2952 - DNA, 487 bp, Arabidopsis thaliana
  unsure at all n locations
  Clone ID: LIB22-018-Q1-E1-D3
aattcctgcgtanctaccggtcatcaatccggggcnnccacgcgttcnaaaaaacacaccagaacagaactcagccatggnnnnnnnnnnnnnnnnnnnnnnnnnnnnnnnnnnnnnnnnnnnnnnnncgctaatctcaccggcgatttcacaacaggcttgcaaatcacagaacttgaactccgccggtccgttcgatagttgcgaagaccttccggtactcaattcctacctccattacacctacaattcctcaaattcatctctctccgtcgctttcgtcgccactccatctcaagccaacggtggctgggtcgcttggggctattaaacctacgggggactaaagatgggtggttccaaagcctcccccgcttacaaattcgggcggtggtgccggtccggtcgtgaagacgttcaacattagcanctacaggaantctcgtccaaagnaaacttgctttgattttggaaccnacgcgccgat

SEQ ID NO: 2953 - DNA, 530 bp, Arabidopsis thaliana
  unsure at all n locations
  Clone ID: LIB22-018-Q1-E1-D4
aattctctgcgnggtctacggtcanacatnccggggncccccaacgcgtccanaaaccgcagacanagaaacaaattcgcagacaatagtcgaaaatggctgaaatctcggcgannnnnnnnnnnnnnnnnnnnnnnnnnnnnnnnnnnnnncgtagctcccanaatggtagcttaaaatgtcagaatgtagctgttccaaaaactacttcccagttccaagagttatctctgaaacgaagccagcttgttggcaatgccgttgttaccggtcatgttaccggatcccgcagctgcaagaatcaagctattcgagctgttctatccggtgatggaaccgccttgactactgattcaaaggaagctgggacttcgtgggaaactgaaaaagggtcgttctaancttacaattggaaggcttagacaactctgtcaattgngcccaatgggcttaaagggagaaactnatnggnttgtgaaanttggtgttgcttcaactggccngatgntttggtcaagggcaataaaaan

SEQ ID NO: 2954 - DNA, 459 bp, Arabidopsis thaliana
  unsure at all n locations
  Clone ID: LIB22-018-Q1-E1-D5
agaagcggacaaaccaaagaatccaccggagctagtgatatgggtggttccagagagttccgagctgaggaacattcaaatcaattccactctatcatcgccatggccatctggcttggcgccattcacttcaacgtcgctcttgttctctgttctctcattttccttcctccttctctatctctcatggtcttgggcttgctctctctgtttatctttatcccaatcgatcatcgtagcanatatggtcgtaagctcgctaggtacatatgcaagcacgcgtgtaattatttccccgtctctctgttacgtcnaggattacgaaagctttcaagcctaatcgtgcctaagtctttggntatgaacaanattccggtggctaccgaattggaatttgttggcnctttgtgattcncacangggttaangcccaattcctaacattaaagtttcttgcaa

SEQ ID NO: 2955 - DNA, 443 bp, Arabidopsis thaliana
  unsure at all n locations
  Clone ID: LIB22-018-Q1-E1-D7
gcttcttcttattccatttgatctaagtttctcgaaataggtacaaagttcgagtctttttcttgtaaccgcntgaaaccaccaanaaacctatagtaagagtttccgcanatgtgaattaaagacagctcatcactctgtcaaacttctanagtattaagttaacgaagcangtacagccaaactaaaataacgcggagttatgggaatcatcgacggttctttgcttcggcggttgatttgtctctgtctctggtgtcttctcggtggaggagtgacngtggttacggcnnangatgataaagaantggacataaacacttaatcaaaaccccgacttgggctggttgctgcngttgtacttcctcancgtggttccggtcctccttgaaaactctnacaaaagttggaaaggtcnaagggatcggacaaganactctctg

SEQ ID NO: 2956 - DNA, 462 bp, Arabidopsis thaliana
  unsure at all n locations
  Clone ID: LIB22-018-Q1-E1-D8
nattcttgtgatcttgtcttgacgaaaaaatggacgatgtgaccgtgatttcttcgagcattgttcaacccggaaacgccaggcattcgggtcgggaaaagatccatctcactccatccgatcttagccttctctatcttaattaccctcaaagaagtctcctcttccccaaaccctacccggaaacccggttcatctctcggttaaagtcctctctctctacgtctctagagatctacttccccttagctggtcgtcttgtcaaagtcaacaaccatgaagacaatacggtgtcgttttacatcgactgtgacgacggccgtggtgtcaaatttgtccatgctatagccgaatctgtctcggtaagcgatatccttcaacctcaaggctctgttcctgactttttcaaggctttccttcccaaggaacggtgttaagaagcatcgacgggtcctcaaaanc

SEQ ID NO: 2957 - DNA, 436 bp, Arabidopsis thaliana
  unsure at all n locations
  Clone ID: LIB22-018-Q1-E1-D9
ncttctcgaaatcgtctcctgtttcntctgctttcatggatgcttcaaatcccaattcttctagaaaatctaatgtctcttccttcgctcagtccantcgaagcggtggtagaggaggaggatatgagagagataacgatcgacggagacctcagggtcgtggcgacggtggaagcggaaaggatagaatcgatgcacttggacgactcttgacgagaatattgcgacatatggctactgagctgagantgaacatgagaagtgatggntttgttaaagttgaaagaattacttaacctgaatttgaaaacttctgcaaatatcaatttaagtcacacacgattgatgaaanttagagaaggctgtgaaaaaggacaataagcaacggtttagtccncatccattaagaaatggganaactccttgattcgcgcca

SEQ ID NO: 2958 - DNA, 512 bp, Arabidopsis thaliana
  unsure at all n locations
  Clone ID: LIB22-018-Q1-E1-E1
tgcgnccgtacggtcaaaaatccggggncgacccacgcgtccngnagnnnnnnnnnnnnnnnnnnnnnnnnnnnnnnnnnnnnnnnnnnnnnnnnnnnnnnnnnnnnnnnnnnnnnnnnnaaaatccgacagtaattttgaccgttgttttctccaacgtctctctctctctctactgtgtatccctcacgnnnnnnnnnnnnnnnnnnnnnnnnnnnnnnnnnnnnnnnnnnnnnnnnnnnnnnnnnnnnnnnnnnnnnnnnnnnnnnnnnnnnnnnnnnnnnnnnnnnnnnnnnnnntccttttgacattttcacaacaacaaatccaaagatttacaacaattctcanccggggttctgttaattctgagtacaatctcaacccttaaataanaaaacaaagcaaaaatctcctcaaaggggttttaaaggactaaaagaagcnttgtcctggtanaataaagcaaaagaatccttcctaatggncctttttcccaagtttaanggcga

SEQ ID NO: 2959 - DNA, 470 bp, Arabidopsis thaliana
  unsure at all n locations
  Clone ID: LIB22-018-Q1-E1-E10
ggtaccggtaaccaaattcccgggncgacccacgcgtccagtcatcggtcgcctcatcggaatggtggtggtggtagtggttgtcctagccgttctcatactaggcatgcttcttatgacacgattgacttaccaaatgaggagctgagaaagaggagtgagttgcagccaaccaagattgttgttctgaaacctaacctcggggagccacgttatgctgctagaacttttgcatcgccaagctcttcttccgatgagttcagagcagatcgtaggcttccatgcaccaccactcatggcaggcagaaaagtaatgaagatgtccgcctgtcaagacagaattcaagagattgtggagaaatggccaaaataatgtctaagcaaaggaangtgagctgtggcaatggtcgtgccatgagttttgagacttcangatttaaangatatgcangggatgaaagctcatcaag

SEQ ID NO: 2960 - DNA, 477 bp, Arabidopsis thaliana
  unsure at all n locations
  Clone ID: LIB22-018-Q1-E1-E11
ggtaccggtnacaaattcccgggncgacccnnnnnnnnnnnnnnnnnnnnnnnnnnnnnnnnnnnnnnnnnnnnnnnnnnnnnnnnnnnnnnnnnnnnnnnnnnnnnnnnnnnnnnnnnnnnnnnnnnnnnnnnnnnnnnnnnnnnnnnnnnnnnnnnnnnnnnnnnnnnnnnnnnnnnnnnnnnnnnnnnnnnnnnnnnnnnnnnnnnnnnnnnnnnnnnnnnnnnnnnnnnnnnnnnnnnnnnnnnnnnnnnnnnnnnnnnnnnnnnnnnnnnnnnnnnnnnnnnnnnnnnnnnnnnnnnnnnnnnnnnnnnnaggaacaacattgctacaatgtggaagaggggatcacattttccttactcatgttggtattcctcaagaanctccgaaataacataacttcctggtcaatcaatttcaggttaataaagctccggctccgaagttaatcaaaggcgtccagaaatgaagaaa

SEQ ID NO: 2961 - DNA, 434 bp, Arabidopsis thaliana
  unsure at all n locations
  Clone ID: LIB22-018-Q1-E1-E12
nctctgttttgctttccgacantcaaaccctaggggttgctaaagggaaaggagagagatgggtggtgaagaggaagttgtttctgttgagctaccagcaccttcttcatggaanaaattgttttaccccaacanagtgggttcagtgaagaaaacagaggttgtgtttgtggctccaacnggtgaggagattagtaacanaaatcanctggnncagtatctcaaatcgcaccctgnaaaccccgcgatcgcagagtttgattggacgactagtgggacacctatgagatctgcaagaatcagtgagaagactaaggctacgccgtcaccaagataaagagccaccaagaaagcgaggtanaaacaaatcnccattgtcaaagaaaggatgcagaaggtgagaaatcanagggaagangacaaggaaactctca

SEQ ID NO: 2962 - DNA, 518 bp, Arabidopsis thaliana
  unsure at all n locations
  Clone ID: LIB22-018-Q1-E1-E3
ttctgccgnacctaccggtcacaaatccgggtcnnccaagcgtccgggaantccatttngcaaaaacgcgatgaccacagtaaactgagggatatatggaagagatggctcagattacaggaagtcctgatgccgctatgaaagctctcacgcaagtaatcttgcgattaagagctaactctttcgacatggatcatggacttgtcttgctaccaacatcttttccatatatccctcaagtgactgaaagttcgagcaaatccaaatacgcannacgcgatgaccacagtaaactgaattcgaattctaaganaagaaaccatgtttcttaaatcaanaaaaacaatccttagagaaggaanattganaatgttcagaactcaatgttgatgcaaattttatacaatagtaagttacntgttaggaaaaaataatttgccnaatgcaattcacaataagaaatgtaacatgagatggggtgtttcaaccttggnccttttttccttttacgttgggaa

SEQ ID NO: 2963 - DNA, 508 bp, Arabidopsis thaliana
  unsure at all n locations
  Clone ID: LIB22-018-Q1-E1-E4
cgtaccggtccaaaaattcccggggcccaaccaacgccgtccagtttattgagaaatatggtactcatgttgttgttggagtgactatgggaggtaaagatgtcattcatgtgaaacagatgcgtaaatcgaatcatgagcctgaggaaattcagaaaatgttgaagcattggggtgatgaaagattttgtgttgatcctgttgaaagtaaatctcctgcttctgtttattcagggaagccaaaggaggagaatcttctacaatggggacttcaaccgtttggtacctcggttagctctgctgttgtcatgcataccaagaacgaggagattatgagggtttgtatcagaagaggangtgttgatctggggcaaaagtcatgaacgatggctctcaacagtatcacaaagcacccaaacgtttatatcnangtgtttggttccnataacttcactcntgaaccggtctccaagaacaggattcctaanccatncattgaacttaacct

SEQ ID NO: 2964 - DNA, 457 bp, Arabidopsis thaliana
  unsure at all n locations
  Clone ID: LIB22-018-Q1-E1-D2
ggtnagttaaaaaaaaaaganaancnttttttggttctnctncttcntcttcttcggacaaaaaggaagatggtgttgactgattcttaagatgggtttgtgttaagtttgtgagtatagttgaaagtttcagttcaatttcaatggagcctccaatangatttcgagcttctttattccaattcttactcttccttccttatttcattggattgctatttctgggtttcatcaaaggtattgttttgtgcccactcgtatgcctcgttgtgactataggcaactccgcggtcatactgagtcttctaccagtccacatcgtttggactttctattcaatcgtgaagtgccaaacaaagtaggaccaatccttgaaagatcttccatgcctaagtccttcctgctggcancaatcctctggnctaatggttggaatttaaggaantgttttgggaaa

SEQ ID NO: 2965 - DNA, 449 bp, Arabidopsis thaliana
  unsure at all n locations
  Clone ID: LIB22-017-Q1-E1-A9
ngccgcccgtaccggtccaaaaaatcccgggtccanccaagcctncgaaaanaanggaaaagaanncaaannggtcctggaaatcngtgtgaaagctgctgttggtgctcctgatcatctcggcgactgtccgttcagccaacgggctcttctcacactcgaggagaagagtcttacctacaaaatccatctgattaacctctctgacaaaccccagtggttcttggacattagtcctcaagggaaagtaccagtgcttaagatcgacgacaagtgggtgaactgattccgacgtcatcgttggtatactcgaggagaatatcctgattcaacactcaagactcctgctgaanttgcctctgttgggttcaacanttttgggtacttttgggacaatccttgaanaaccaaagactcccaatgaccggtttgaacattnccttgcctgt

SEQ ID NO: 2966 - DNA, 475 bp, Arabidopsis thaliana
  unsure at all n locations
  Clone ID: LIB22-017-Q1-E1-B10
atcccggggcccaccaagcntncgaannnnantcnaaanaattncgtnaattacnaanttgcaaanaggaaaaaaaaatgggncaagctttgggttgtattcaagttgattcagtcgaatggtagcaaatcaaagagncttttggggaaattcgacgaagttcttgagccggggttgtcactgtttgccatggtgtttgggaagtcaagtcgctggtcacctttctttacgtgttcaacagctcgatgttcgctgcgagacaaagactaaggataatgtgtttgtcacggttgttgcttccattcaataccgtgccttancggagagtgctcaagatgctttttacaagctcaacaacacgaaggaatccagattcaaagccttangtcctttggatggtgattccgaagcaaagtgttccctaaactgggttctaaaacccaaccttttgagcaaaangaatgacaattgcaaa

SEQ ID NO: 2967 - DNA, 471 bp, Arabidopsis thaliana
  unsure at all n locations
  Clone ID: LIB22-017-Q1-E1-B11
gcctacggtcaanattccgggncccccacgcgtccagnagcccgccgaagcttggccttcatactttgtatgaggggtaggggagcgttcccgtaacagtgaagcgcccgtggcaaacgttggcgtggagtggcgggaagtgaggatgccggaatgagtacgcgcaaatccaagtgaaaaccttggacaccgtaaacccaagggttcctgcgccatggcaatcagcgcagggtgaggcggagcctaaggtgaggccccagaggcgtagccgatggtaaacgggttgacattcccgtcccgtcttgcagtgtcnaagcattcaaggacaccggaacgaaggancaaccggctgtgttgattggccgttctaaggggttaagcatcnccccaaggcaaccnaaacctcatgganaaaatgccgggccaacccaaggtcaattgttctggaatccacgggcaaaaaaaactgaa

SEQ ID NO: 2968 - DNA, 455 bp, Arabidopsis thaliana
  unsure at all n locations
  Clone ID: LIB22-017-Q1-E1-B2
aaaaatcctcggatctgttgcattctctccaaagcttgaatcagaagaaagcttttgaagatcagcctaaaagtgatctctcataactgcttaaaagattgttgaaactcgaagatgtctttggccgagataaacaagaatgaagtcgacattgttattggggctcttaatgctgaccttacacagtttttgaccagctggaggcctttcttctccggattccatctgattgttgtcaaagatcctgagctcaaggaggaactcaacataccagaaggctttgacgtagatgtctactctaaagactgacatggaaaanggttgtgggcgcatccaaatccaacaagttcccctgggctaattcctgcagataattccggttaaccccgtaacctaaaaaagaanttcaattgtcctcnaatttgatgaatgaattgtgttccctggctaaaana

SEQ ID NO: 2969 - DNA, 489 bp, Arabidopsis thaliana
  unsure at all n locations
  Clone ID: LIB22-017-Q1-E1-B4
ccgntcccacggtcacaaatccgggncgacccacgcgtccattactctctctctgatcgtcgtctttttcttttgattctgcttttttccgctaggtttctgagatcttccattcgtctcgaattaagttgctacgatgaaaacagcanaggggaaagataaagttaagaccacaaaggaagccttgaagccagttgatgacagaaaggtgggaaagaggaaggcaccggctgagaagcctactaaacgagagactcgtaaagagaagaaggctaaaaaggacccaaacaaaccaaanagagctcctagtgccttctttgtctttctaaaagattttagggtcacgttcaagaaaagaaaatccaaatgtnaangccgtctctgctgttgggaaagctggagggcanaaatgggaantcaatgtctcaagcctgaaaaagctccatatgaagagaaaagctgcaaaaaggaaagctgaatatganaaag

SEQ ID NO: 2970 - DNA, 488 bp, Arabidopsis thaliana
  unsure at all n locations
  Clone ID: LIB22-017-Q1-E1-B7
gccgntcggtaccgaacacanattcgcgggtcgacccacgcgtccnaacaaaaagaaaacacctaaatcgatctgtgaagtcaaaacactttccagtttcagattctgattatggcaacaccggagactcgtggcgttgattccgatttagagacagcggagaagataatactccggtgggattcaacaacatctgaagaagctaaagagaatctgattttccaaagcggtggtgatcgagaagaagtagatcggtacttgaaagctgtagatgaagttcaaagacacatctcttcaatctcaatctccgatgaagtcaaagcaacgattcaaatcgccatggctagactcgaggacgagctaagaaatatcttaatctctcagacnnnnnnnnnnnnnnnnnnnnnnnnnnnnnnnnnnnnnnnnnnnnnnnnnnnnnnnnnnnnnnnnnnnnnncgtacggagcttgaagatgacacttgcgatga

SEQ ID NO: 2971 - DNA, 431 bp, Arabidopsis thaliana
  unsure at all n locations
  Clone ID: LIB22-017-Q1-E1-B8
ncggacgcgtccgcccacgcgtccgaacagagcaatctctaaaaaatctcaagaaacctcactaaaatgggttcaacggnagagacacaattaactccggtgcaagtcaccgacgacgaanctgccctcttcgccatgcaactagccagtgcttccgttcttccgatggctttaaaatccgccttagagcttgaccttcttgagattatggccaagaatggntctcccatgtctcctaccganatcncttctaaacttccgaccaaaaatcctgaagctccggtcatgctcgaccgtatcctccgtcttcttacgtctactccgtcttaacctgcncanccgtanacttccggtgatggcgttgaacggattacnggcttggtccngttgcaagtattgccaatnacgaagatggggttcaatgctgcnct

SEQ ID NO: 2972 - DNA, 439 bp, Arabidopsis thaliana
  unsure at all n locations
  Clone ID: LIB22-017-Q1-E1-C1
aagaaaagggaaaattaccagacaagagtnnnnnnnnnnnnnnnnnnnnnnnnnnnnnnnnnnnnnnnnnnnnnnnnnnnnnnnnnnnnnnngaaaatctagaagaagagaaagctacaaaaatctcaacatcgaggtaagagttttggctacagagcaaccatgctaacttgcgccttctcccaaaatcttatccactaatctcggtaaggaaagtgatgttggcaaaatggtgaagaaaggaagttggttttctgctatcaaaagggtttttactccacattccnnnnnnnnnnnnnnnnnnnnnnnnnnnnnnnnnnnnnnnnnnnnnnnnnnnnnnnnnnnnnnttttgggaagctaangnatggcgagaccaattcaattcttcccatcttcagagagcctantagtatcgaaaagatnttgggcgaagctgag

SEQ ID NO: 2973 - DNA, 480 bp, Arabidopsis thaliana
  unsure at all n locations
  Clone ID: LIB22-017-Q1-E1-C12
ttntagccggcccgtaccggtcaaaaatnccggggcannaaaaggaaanaaaaannnnannnanacaanncnaaanggngatgattacncgcaanaccgccacgcgcctccctctcctcctccaatctcaacgcgccgtcgccgctgcctcggtctctcacntccacacatcccttcccgnnnnnnnnnnnnnnnnnnnnnnnnnnnnnnnnnnnnnnnnnnnnnnnnnnnnnnnnnnnnnnnnnnnnnnnnnnnnnnntaaagcggccgaatttgtgatctccaaggtcgatgatctcatgaactgggctcgtaccggatcgatctggcctatgacctttggtctcgcttgctgcgccgtcgaaatgatgcataccggtgctgctcgctacgatntcgatngattcggtatcatcttcaggcctagtcctcgccagtctgattgtatgattgtcgccggtaccttaacaataagatggc

SEQ ID NO: 2974 - DNA, 517 bp, Arabidopsis thaliana
  unsure at all n locations
  Clone ID: LIB22-017-Q1-E1-C2
ttccttctgnccccacggtccanaaatcccgggtccacccacgcgtccgaacangcgtccgcagaaaatcgttgttgtggacagcgagatgccaagcagaggaggatcagaaatgaggagaattgtgagttttgttggcggtattgatctttgtgatggaagatacgacactccgttccactccttgttcaagacattggacacagtccaccatgatgacttccatcaacctaacttcactggtgctgctatcactaaaagtggtccaaagggaanccttggcatgacantcactccccgttcttgaaaggnccaattgccttgggaagtccagtncaaacttcnaaccaaanatgggnccaanccagggtggtaaaaaacattcccgggttaaattnanaaaattnttaagggaaatttattaacaaccccttcnccggttaagnttccaaaaagggcccccaatttttggaaagttccaattnttaaggcccatngatngaggacccccccctgg

SEQ ID NO: 2975 - DNA, 493 bp, Arabidopsis thaliana
  unsure at all n locations
  Clone ID: LIB22-017-Q1-E1-C4
cccacggtccaaaaatccgggtcnaccacgcgtccgncggcattaatttgagtggtgggcaaaagcaaaggatacagattgcacgtgctctctaccaagatgctgatatctatctgttcgatgatccttttagcgctgtggatgcacacacagggtcacatctctttaaggaagttctactggggcttttgtgttccaaatcggttatatatgttactcatcaagttgagttcctaactgctgctgatcntaaaccggncntgaaagatgagaatcngccnagcnggnaaattccaatgananccncaatccngganctgattccanggaccttaaaggtgcacatcagggaggctcttncaatatttgacctgtagaatgcnaatttcngtttctgaaaaaatcaacntttaggccaaanaaaatgttaattgtnaaaaanatcctaancccctgtttgattaaaaaacctaaaaaagtccagggttttgaa

SEQ ID NO: 2976 - DNA, 441 bp, Arabidopsis thaliana
  unsure at all n locations
  Clone ID: LIB22-017-Q1-E1-C5
ttttttttttttttttttttagatcaacggaagcttaaaaaaagtcactaaaaaattaattaagatttctgttaaagaaaatacaaaatggaccccaacagcaaaaacaaagacaacatagtattaagagattagtcgacatagcaaaagtacaacaanaacaanaanacaccangaaaagaacacatccccttctcttacccagaatcctcctcttggcctcagttcactcattagattcaccancaaaaagaagagtaaagaccgaaacaagccggattcaacaactatacaatgttgcaggtgttcgttttccttcagcttcttttgttacctaaaccttttttcgttttaagagatgttcgatnacaagaacacgcagcggttcntggtccttttcttcctcctctgtntccgtgggctgaaancaccacttttatg

SEQ ID NO: 2977 - DNA, 491 bp, Arabidopsis thaliana
  unsure at all n locations
  Clone ID: LIB22-017-Q1-E1-C9
anattttttccgcggcctacggtccaaaaatcccggggcccaccaagcntncgnaagggtttngtncctccttcctnaacgggnccnnaanctagtggggganctaacncatcaacctttgcacaaggagaagatgatccttggtttgctgcactggggaaggagggtgcattcacattacttggaatgaccgaggagcaatctctttggagggtctagatctaaatgttgtggagaatgtggaagaagctgactttgttttagcgcacggcactgaagccctangacttccttcaggcantgtatctccaaggactattgatgagctagagaagattttggagaaatctgcagctcnangacttcccatgatcgtagctaatccaaattacgttgactgttgaaagcaaatgtttttcanatcatgccaagtacactancttccaaagtntgaaaaactgggaaggagaaatgaatccatnggaaaacct

SEQ ID NO: 2978 - DNA, 500 bp, Arabidopsis thaliana
  unsure at all n locations
  Clone ID: LIB22-017-Q1-E1-A7
ttttagcccggcctgtacganacatacaattcgcnggtcgacccacgcgtccnagtatccaccaggtggtccaccaatgggtcagcaactcttctatggtcaagggcctcctgctatgattcctcagcctggattcggatatcaacaacagcttgtaccgggtatgagacctggtgggtctccaatgccaaacttcttcatgcctatgatnnnnnnnnnnnnnnnnnnnnnnnnnnnnnnnnnnnnnnnnnnnnnnnnnnnnnnnnnnnnnnnnnnnnntcttccacaaccacaacaaccttctcctatgatgcagcagcagatgcatccaagaggtcgaatgtatcggtatcctcagcgagatgtaaacacaatgcctggtcctactcaaaacatgctttctgttccatatgacgtctcaagtggtggtggtgtgcatcatcgtgactcgcctacntctcaaacctgttcctattgtanctttggctacacggcttggc

SEQ ID NO: 2979 - DNA, 475 bp, Arabidopsis thaliana
  unsure at all n locations
  Clone ID: LIB22-016-Q1-E1-H5
aattctaccgnacggtaccggtcntaaattcccgggccgacccacgcgtccangacaatggtaccggtatggtgaaggctggatttgcaggagatgatgctcccagggctgtttttcccagtgttgttggtaggccaagacatcatggtgtcatggttgggatgaaccataaggatgcatatgttggtgatgaagcacaatccaagagaggtattcttaccttgaagtatcctattgagcatggtgttgttagcaactgggatgatatggaaaagatctggcatcacactttctacaatgagcttcgtattgctcctgaanagcaccctgttcttcttaccgaggctcctcttaacccaaaggccaacagagagaagatgactcanatcatgtttgagacctttaactctcccgctatgtatgtcgccatccaagctgttctctccttgtacgccagtggtcgtacaacccggta

SEQ ID NO: 2980 - DNA, 417 bp, Arabidopsis thaliana
  Clone ID: LIB22-016-Q1-E1-H7
catcttgttgcttcggagcgagcgagaattatcgtcggagaatttatcgtctctctctctgaaaattctgatcggtgaagaatcgtcggatcgaaagttcgtttatcttctcgtttacgtttccgtgatttaaatcctttggggtttttttttcttgatttcagaagaagaagagaagaaacaatccgtaatctagacccttgaattgacctaataataggatacatatgatgactatgaagcagtctttgagtggcagggttcttaggggggtctttggtatctatctgtaggagggcttttaggtgctgtttcgggagattaaagccagattcaaggtgagtctgagagcttggttcttgtatcttcttgtttaccaatgggaatctaggtcactgagaaaccatccttcttgtt

SEQ ID NO: 2981 - DNA, 470 bp, Arabidopsis thaliana
  unsure at all n locations
  Clone ID: LIB22-016-Q1-E1-H8
gcccggtagcggttaaagaattcccggcncgacccacgcgtcancccacgcgtccgatcaaaaaaaacttgcacatcttctcagatcttcaagtttctcctctggtttctcatcatgaccgttgatattatgcgtttacctaagatggaagatcaaacggctatacaagaagctgcatcacaaggcttaaaaagcatggaacacttgattcgtgtcctctctaaccgtcccgaagaacgtaacgttgattgctctgagatcactgatttcacagtttctaagttcaagaaagttatctctcttcttaaccgttccggtcacgcccggtttagacgtggtccggttcattcccctccttcctcctccgttcctccaccgggtgaaagtgacaactccggctcccactcagatntctgctccaagcaccggttagcttcgttcaagcaaatcaacaaagcgtgacgttagat

SEQ ID NO: 2982 - DNA, 407 bp, Arabidopsis thaliana
  unsure at all n locations
  Clone ID: LIB22-016-Q1-E1-H9
ttttgtcattgcttttggaacgatttacgaatccagatttgttgaatcgtcacaagcagactccgttaatgttggctgcgatgtatggaagaatctcttgtgtgaagaagctagctgaagttggngctaatattttgatgtttgattcngtgaatcgaanaacatgtttgcattacgctgcntantatggacatgcnaantgngttcaatctattctctctgctgcncaatcaagtcctgttgcngtccantggggatatgcgagatttgtgaacataanagatgataaaggagcgactccgttgcatttagctggcncgacagagacgacctgaatgtgtgaatgttttgttggatactggttctcntgtttgtgcatcaactatgtaaangggtctcaaggaaac

SEQ ID NO: 2983 - DNA, 494 bp, Arabidopsis thaliana
  unsure at all n locations
  Clone ID: LIB22-017-Q1-E1-A1
cgggtcanacaatcccgggncgacccacgcgtccnngaactgannnnnnnnnnnnnnnnnnnnnnnnnnnnnnnnnnnnnnnnnnnnnnnnnnnnnnnnnncagtccccgatttccgctttatccgatcggccgccgccgagattctagataaacctatggcaatggaggttacgcagttgctcattaatgctcagtcgattgatggaactgtacgtaagcacgcggaagaaagtcttaagcagtttcangagcaaaaccttgcgggtttcntgttgtcgcttgctggagaacttgcnaatgatgagaanccagtagatagcaagaaattaactgggttaatccctaaaaatgctccttgaagctaaaggaacaacacangaaatatgaaccntggtcaaaaatnggttngctccaagacatgtcaacaaaagtccncaaanttananncttttcctggtttgaanaaaactgtccngggaacctgtggccctg

SEQ ID NO: 2984 - DNA, 494 bp, Arabidopsis thaliana
  unsure at all n locations
  Clone ID: LIB22-017-Q1-E1-A10
ttttcgccgcccgtaacggtccaaaaatnccgggncccaccaagcnttcgaaatcnnnnnataaaaaacnaanaanaanaagaanacaatacagttcacaacgccatggggtttaggcatcttaagcttctccgaaacaattcgaccaagcttcacgtcttcttcnatctcaaacctccaatttcttcctccgcacaatcgtctcaaaaccagagctccaatctcctgaatccgctgctgtctctgagcctgagccgccgacacagattctccctcctagaaaccctgtaggtggagcacgcgtccacttctcgaatcctgaagatgcgatcgaggtctttgtcgatggttacgcggtcaaagtccctaaangattcactgntcctcaagcttgttaaggtccctggaattgataanccgaaggtttggtaacaatcctcgtttaaccnantggctggaaatttgcaaggatgttgtccttgttgaaggttgaa

SEQ ID NO: 2985 - DNA, 421 bp, Arabidopsis thaliana
  unsure at all n locations
  Clone ID: LIB22-017-Q1-E1-A11
cggtttaccacagttgagttttgggttactactagtattgagcccaactctgtgtcctggagcaagtttttgacagtggatatgagaccattggcactcactggtgttcggtttgacaatgatatgggtgccaccttcttcattgacgaggatgagaaagtcgctgtgggttttcgatctagacggatacctaagcaccgagagcgctcgttaccacaccgcttttatcagtggaaaggatggattcnttaaacctgtgactctaggagtagctcccaatgtcngggaaccttgtcccagaaccgggcatattccgactacatatcgtcccccgccttgtcctgctcgtctacttaccttccgaagtttantgcaagtcaaccaacagcgcaaaanggaagaaagacatgtttanttttcc

SEQ ID NO: 2986 - DNA, 476 bp, Arabidopsis thaliana
  unsure at all n locations
  Clone ID: LIB22-017-Q1-E1-A12
cgtaacggtccaaaaattcccggggccnaccaagcctncggnaaaaaattaccnacngangttncaaanatgttaaatagtttcacaccatcaagagattttgacgggttagtagggatgagagctcatatggatatgctggaacaattgttgcgcctagatttggatgaagtaaggatgatcgggatttggggaccgcctgggattggtaagacaactatcgccagatttctgtttaatcaagtctccgacagattccaacttagtgccatcattgtgaatatcagaggaatctatccaagaccttgtttcgatgagtacagtgcacaattgcaactacaaaaccaaatgttgtcccagatgatnaatcataaagatatcatgaattcccaattaagaagtggctcaaagaacngtttgagagacaagaaagtgtttcctggtccccatgaaattgatnaaattaagacaactaa

SEQ ID NO: 2987 - DNA, 451 bp, Arabidopsis thaliana
  unsure at all n locations
  Clone ID: LIB22-017-Q1-E1-A2
nngcaaagaattggcagcgacaataacaatgtggaacaacggcctcagattatatatgaggacgatgaaggtgataaggttttgattacatcggatagcgatttggttggtgctgttactcttgctaggtctacaggacaaaaggttttgaggctgcatctggacttcactgagtcaacaaggagcttgagctcagaaaccacccaactcaagaaaggtgattctcgagacagaggaagcggatgggtttcatggcgtggtggtgtggtggttacaagagctgttgtcccaacaaagcatanccataagtttgttaanttaancgttcaaanaactgatttttgctgaaacaaactgtttgggaatgcaanaacaaaaactccttttcccctnaattttttgggnaattttcataaaantttgccccttgtccttttggggtcaaatgttt

SEQ ID NO: 2988 - DNA, 445 bp, Arabidopsis thaliana
  unsure at all n locations
  Clone ID: LIB22-017-Q1-E1-A3
ggatgatgtcgataaactttttgaagtttttgcttcgggcaagcccgttcaattcacggctgagtctcttgcaccggagtttaacaatgctattccctctagcctaacaagagagagcccttatctgacccatccaatcttcaacatgtaccacacggagcatgagttgcttaggtacatccacaagttacaaaataaagatctatcattgtgccacagcatgattccacttggatcttgtacgatgaaattgaatgccaccactgaaatgatgccagtcacatggccaagtttcaccaacatgcacccttttgctcctgttgaacaagcccaaggttatcaagaaatgtttacgaatttgggtgagctcctaagtacgatcactggattcgactccttctcaatgcaacctaaatgccggtgctgctgggcnagtacgcccggg

SEQ ID NO: 2989 - DNA, 485 bp, Arabidopsis thaliana
  unsure at all n locations
  Clone ID: LIB22-017-Q1-E1-A4
gagaacaacttcttcaggttctataaagagattccgaagaagaatcttttccagaaacagtgtaagtcttatcttcttctttaggctttaagatgactgctgaagttaaggttgaggagaaacaggtggagtcagaggttgttattgctcctgctgttgttcctgaggagactactgttaaggctgttgtggaagagactaaggttgaagaagatgagagcaagcctgagggtgtggagaagagtgcttccttcaaagaagagagtgatttctttgctgattttgaaaagaatcctgagaaaaaaggcactggagttgatctcaagtcctaaagctttgaaggaanctattggtttgacaacaactcctccttannnnnnnnnnnnnnnnnnnnnnnnnnnnnnnnnnnnnnnnnnnnnnnnnnnnnnnnnnnnnnnngttgttgaaaaccctgaaagcctgaaggtttgagaaagaaagaaagg

SEQ ID NO: 2990 - DNA, 479 bp, Arabidopsis thaliana
  unsure at all n locations
  Clone ID: LIB22-017-Q1-E1-A5
ngtaccgaacacaaattcgcgggtcgacccacgcgtccatttcttgttcctttgtgtcgccggagatatatatcttcgacatcggtgaagaatggggtaccgtcgttttaccgatggttggccgagaagtatcctcttttagtggcggatgttatcgaggaagagcctgttgaaatcgaaggcatcaagattcctgtggatactagtaaacctaaccctaacaacctcgaatacgataatctttatctcgacatgaacgggattatccatccttgctttcaccccnaagataggccatctccaactacctttgaggaggtgtttcantgtatgtttgattacattgataggcttttcgtgatggtacggccaaggaagttactctatatggctattgatggtgttgctccaagagctaaaatgaatcaacaaaggtctaaacggtttaaatctgctaaagatgcatccggtgcactgct

SEQ ID NO: 2991 - DNA, 447 bp, Arabidopsis thaliana
  unsure at all n locations
  Clone ID: LIB22-016-Q1-E1-H4
cacgcgtccnatactatcttcagagcttcgagaatgtcgatgttaatggcggccaaatccacttcactctttagctcaaaccctacaatttcagctaaaatagggcaaaaccctcgcggcgtcagatcggtttatccgacggtgagaatgcagtcacgtgttcaccgtctgattgaagagcaaggtgctgtgcttattcccggagtctacgacgcattatctgcggctattgtgcagcagaccggattctccgccgcattaatctccggttacgccctctccgccgtaactttgggaaaaccanatttcggtttgataacacctccgggagatggcagcaaacggcgaaattaatgttgtgctgcgggtccaaaagantccaatcantgcaagatgcanatactgggtggagggaaatggctctcaaatgttcaaaagaancgtcca

SEQ ID NO: 2992 - DNA, 450 bp, Arabidopsis thaliana
  unsure at all n locations
  Clone ID: LIB22-016-Q1-E1-E9
gggtcnacccacgcaatccgcaattttctcaaactctaaaatcaatctctcaaatctctcaaccgtgatcaagatgcagatcttcgttaagactctcaccggaaagactatcaccctcgaggtggaaagctctgacaccatcgacaacgttaaggccaanatccaggataaggaaggtattcctccggatcagcagaggcttancttcgncggaaagcatttggaggatggccgcacnttggcggattanaatatccaagaacgantcnatcctccacttggttctcaaggctccgtggtgggtatgcaagatttttcgttaaaaccctaacggggaaagacgantactcntgaaggtgganaagctctgacancattgacaacgtcaaggccaanatccaagataaggagggtattcctccgggaccagcaganggttgatcttcgccg

SEQ ID NO: 2993 - DNA, 431 bp, Arabidopsis thaliana
  unsure at all n locations
  Clone ID: LIB22-016-Q1-E1-F11
gcggacgcgtgggaatcgatttcattgattttttccatattcacagcgaaagaatcgatccttaatacaaaattccttcaagatctcacatctcttataagnnnnnnnnnnnnnnnnnnnnnnnnnnnnnnnnnnnnnnnnnnnnnnnnnnnnnnnnnnctgccggatcttcaaccttgtctgaagaagacattttctagggtttctagagattggtcgggttttcggttcaagtaaatggtggatcagcctatcgtacgctccacttcattangttatcaacgacaatattcatcatctaataatcatcatcaaaggtcntgcttcgatcctgaatcctctngctggctgctgccttcgaataantggtccttcgacaatcaaccaagtggttattgaaaaagcaaatgctgaagcgtgattcggagtgc

SEQ ID NO: 2994 - DNA, 420 bp, Arabidopsis thaliana
  unsure at all n locations
  Clone ID: LIB22-016-Q1-E1-F3
gngtgaacctctcccaggcaccgaactgaaagaggtatggaaactcgctgatgtgccaaaggatgacaaatatcaatacactcactttgctcacaagattaatagcttcgacactgccccgaaaaagctgttgccctctgattcacggttacgacctgatanatacgcacttgagatgggcnacatgtccaaatcaggctatnagaagagcancatggaagagagacanagagctganaagagaacccgcgaacanaaaggccaagcctttactccaaaatggttcgatgtaacggaagaagtcacngctacaccatggggtgatctggaagtttaccanttcagtggaaagtactccagnacatcntgcanctgcggataactctgaagatannaccgaccctaagtccatncaaatca

SEQ ID NO: 2995 - DNA, 478 bp, Arabidopsis thaliana
  unsure at all n locations
  Clone ID: LIB22-016-Q1-E1-F7
cttctacgcgctcggtaccggtcannaattcccgggncgacccacgcgtccgtctttctcctctgtttcatcaaactcttcatcagtgcttcttattttcttcaaagcttcaaatttctttttttccttcttgcaatggcaaaatcgaagaaaatttctacaggtcaaatatttggttgtgagagtctccttgggtgcattttccagagctggagccctcgccgtcgaaaaccctctttaccggaaaaggatcatcgggcaaaagataacttgtcttccaagtcatcaacaaccgttacaaaccctaaaatcctcccaagaaaatccaccgatacttcttctcaaccaaagaaatctgactcccagaaaccccaacaaaagccaaaaccaagatgagaatcacccgcgaaaatcatcggaatccgccaagaaaatcatctgantccggcaagaaaaacganttcgtcaaggctcatca

SEQ ID NO: 2996 - DNA, 409 bp, Arabidopsis thaliana
  unsure at all n locations
  Clone ID: LIB22-016-Q1-E1-F8
angcgtgatcattggaggagagttatgcaagggcatgctggagctaacgtggtacctctagtagcctcaaatcgcatagggaaggaaataattgaaactgagcatggacctagtcagatcactttctacggaacttccttcattgccggaccaacaggtgaaattgtggccgaggcagatgatnaatcggaagctgttcttgtatcacagtttgatcttgatatgatcaagtcgaataggcacagctggggattgttccgtgaccgtcgtccatatttgtanaangtgcttcntactatgtatggtaatctcnaactcntttgctgttggaagctttgatcntttgtttaagatcacactgnnggaaatccattanncancaattantactggcntaaccttaaacggt

SEQ ID NO: 2997 - DNA, 414 bp, Arabidopsis thaliana
  Clone ID: LIB22-016-Q1-E1-G10
gaagaagccaaaacgtcaagatgctaacaacccttgtagtctaaccactcccaagatttaagaattttcttacttttgttctagttttgttgagaaaaagatgcatccgatcttcgatgccatccttcaaaatgaccttccagcttttcttggtttggtggaagcgagagaatcttccctggaggagagaagcgaggaacagaacaccaacaacacggttttgcacgtagctgcaaagctcggtcaccgagaactggtcgccaagattattgagctccgaccttcccttctctcttcccgtaacgcgtacggagacacacctttgcatcttgctgctcttcttggagacgtaaacatagttatgcagatgttagacactggattggaactatattccgcacgcaataacaagaa

SEQ ID NO: 2998 - DNA, 391 bp, Arabidopsis thaliana
  unsure at all n locations
  Clone ID: LIB22-016-Q1-E1-G11
nnnnnnnnnnnnnnnnnnnnnnnnnnnnnnnnnnnnnnnnnnnnnnnntctttacacgcttgaaaccctagcaatttcaatttcgtttcctctaatagaatcttcatctttttatggcgtaacgttacacgaatttcaacgatttaggttttttttttttttttttgaagaatcaaacacaaagatagaaacaatgtcaacggagactaccacgggaaattcctcgttaattccagcatnatcatcatcgtcatcctccgacgcaatcgatccaagctccgttgctttttaacggcgacgataatganaggaaacaacggaggangaggtggggaacggagatntgtcagggagacaagggntgagagaagctgcganggttccttagtcg

SEQ ID NO: 2999 - DNA, 426 bp, Arabidopsis thaliana
  unsure at all n locations
  Clone ID: LIB22-016-Q1-E1-G2
gcccacgcgtccgggtgaattctggggagaagctgaaattctttcaaagcttcatcatccaaatgtggttgcattttatggtgttgtaaaagatggacctggtgcaacattggctactgtaacagagtacatggttgatggttctctgagacatgttctagtcaggaaagatagacacctggatcgtcgtaagagactaatcattgccatggatgctgcctttggaatggaatacttgcacgccaaaaacattgttcacttcgatttgaaatgtgacaatttacttgtgaacctcaaagatccttctcgcccaatctgcaaggttggtgatttcggtttgtcgaaaatcaaaagaaatacattggtatctggtggtgtacgcggaaccttaacaagggatggcaacaaagcntctcaatggtaaca

SEQ ID NO: 3000 - DNA, 419 bp, Arabidopsis thaliana
  unsure at all n locations
  Clone ID: LIB22-016-Q1-E1-G5
antttagatttgcaaagttcgtcttctccaatctacagttctacaccaaatctcagtttattcgctttgaggacctttttttgtagatttagaagctcagtgctcgttttgatttaatctagatccagaaagctgaagtctttgatctacgaaacgaaatggttgctaacttcaatccatcagtggggtcatttgtgtgggtggaggatcctgatgaagcatggattgatggtgaagttgtacaagttaatggtgatgagatcaaagttctatgcacttcaggaaaacatgttgttacgaaaatctctaatgcttatcctaaagatgtggaagcaccagcctctgggagtggatgatatgactagacttgcttanttgcatgaacctggaagttcacagaatttgcnatcaagatatga

SEQ ID NO: 3001 - DNA, 428 bp, Arabidopsis thaliana
  unsure at all n locations
  Clone ID: LIB22-016-Q1-E1-G6
ncccacgcgtccgggttacagcagctagactcccgtacttcgatggtgactactggccaggtgcagcagaggatatcatatcccaaatgagtcaagaagatgatggtagaaagggaaataaaaaaggaatactcaagaaacccattacaaagagggctcttaaagcatctggccagtcggatttctctgggaatgcttccaaagacctgctactaatgcataaacttggtgagaccattcatccaatgacggaggattttatcatggttcacttgcagcatagttgcacacattgctgtacgctgatggtaactggaaatcgttgggtttgcagccaatgcaaangatttccagttatgtgatggatgttatgaggctgagcagaaacganaagacagagaaagacatctgttaatcaagaanagata

SEQ ID NO: 3002 - DNA, 408 bp, Arabidopsis thaliana
  unsure at all n locations
  Clone ID: LIB22-016-Q1-E1-G9
tttctgccttctatgaagtatgcaaaggattagaacttgcaaggaatttccagtttcctgttttaagagagcctccacaatcttttcttacancaatggaggaatatatgaganacgcacctcagatggtcgacgtcacatctgggccactgcttctgacctatacgcctgatgatggtcttacttctgaagatgttggnccttcacatgaagaacatnaaacatcatcgccttcanatagtgccgttgttccctctgannaaacgcaactttcttctcagtcncctccttcagtaganaactcgacanaacttcantgatactgatgatttaatgngtcngcatgatgatacacctgattcgtttancaatcctggnccaanatggaataacctttgggcttaantt

SEQ ID NO: 3003 - DNA, 475 bp, Arabidopsis thaliana
  unsure at all n locations
  Clone ID: LIB22-016-Q1-E1-H1
accaggttcngtaccggtcncanattcccgggcccacccacgcgtccaaanatttcatgctgtcatcttatgcaccagtcatctcagccgccaaggcttaccacgagcagctatcagtccctgagatcaccaatgccgtttttgagccagctagcatgatggcaaagtgtgacccgagacacggaaagtacatggcctgttgtttgatgtaccgaggagatgttgttcccaaagatgttaatgctgctgttggcaccatcaagacaaagaggactgttcagtttgttgactggtgcccaactgggttcaaatgtggaatcaactaccaacctccancaagttgttccaagntggtganctcgctnangttcagagagctgtatgtatgatcangtaacaacncancagttgcagangtgttctcacggatngaccacangtttntcncaanttgcgangatgggcaatttgtcac

SEQ ID NO: 3004 - DNA, 470 bp, Arabidopsis thaliana
  unsure at all n locations
  Clone ID: LIB22-016-Q1-E1-H10
ttctacttgntccggcaggtacanatccggaattnccgggtcgacccacgcanccgtttctctttctctctctctcagaaactctttctccaataatggcagaggcaagtttctatatcggagtcataggaaatgtaatctccgtactagttttcctctcaccagtggagacgttttggaaaatagtgaagcggagatcaacggaggagtacaaaagcttgccgtacatttgcacgttgttaggatcatcgctatggacatattacggcatcgtcactcccggagaatatcttgtctccaccgttaatggctttggtgctcttgttgaaaccatctacgtttcactttttctcttttatgcccctcgacatctcaagctgaaaacagtggtaatggtagcgatgttgaacgtgttttttccaatcgcggcgattgtggcaacgaagaagtgcgtttgaagatgagaagat

SEQ ID NO: 3005 - DNA, 430 bp, Arabidopsis thaliana
  unsure at all n locations
  Clone ID: LIB22-016-Q1-E1-H2
ttctcttcgtgtcctgaatctgtgcaccaaaggttatcgaaaatgtcagtgcgagttctgaatcctaatgccgaggttctcaacaaatctgcggcgcttcatatgaccatcaacgccgccaagggtttgcaagatgtactcaagtcgaatctcggtcctaaaggaacaatcaaaatgcttgttggtggttctggggatattaagcttaccaaagatgggaacacgctattgaaggaaatgcaaattcagaatccaacagccattatgattgcgaggacagctgttgcacaggatgatataagtggtgatggtactacttccactgttatcttcattggtgagcttatgaaacagtctgaaagcctgcatcnatgaaggtatgcatccacgagtcctaatttgaatggtttcnaagaattgctaaagaaga

SEQ ID NO: 3006 - DNA, 425 bp, Arabidopsis thaliana
  unsure at all n locations
  Clone ID: LIB22-016-Q1-E1-E5
ncccacgcgtccgcaagccctttcttctgcagtaagtgacatcggatctgttgtaagcatggttgatcggatagctggttcagcaccaggaaacggttcaagagcttccgttggtgaagacttggttgcaatgactaagtgccgtctccaagcaagaaacttcatgacccaagagggaatgatggcgactaagaaaatgaagcgtcacacaaccgcaatgccactaagcgttgcttcactgggaggaagtgttggtgataactacaagcagtttgctggttcagaaacatccgatctanaatctactgcgacttcggatggcaagaaggcaagaactgagaccgagcatgcccttttgggaggaaatanaggaaataaaccagcgggctgatanatacagttgttgagataagttgtgatgaaga

SEQ ID NO: 3007 - DNA, 480 bp, Arabidopsis thaliana
  unsure at all n locations
  Clone ID: LIB22-014-Q1-E1-F3
nttctgccgcacggtccgacatncccgggtcgncccacgcgtccggcaagctcttcagggtttcccttcagcttccgccgcctccgtcgataagaagttggatagtctgaaggatatggtcgctggggtttggtccgatgaccctgccttgcagcttgagtccactactcagttcaggaagcttctctctattgagagaagtcctccaatcgaggaagtgataagtgctggtgttgttcctaggtttgttgagtttcttaagaaagaagattaccccgccattcagtttgaggcagcttgggctctaacaaacattgcatctggaacatcggatcacactaaggttgtaatcgatcacaatgctggtccaaacctttgttaacctncttgcttccccnaccaataanntncntnaaaaggctttangggctttggttaacntnncngngaatcnacaacggggccttantctggtcctgg

SEQ ID NO: 3008 - DNA, 464 bp, Arabidopsis thaliana
  Clone ID: LIB22-014-Q1-E1-F4
agttacagtagattgagatttgaacgtgaaattctccgagtccagaaacattcctctccttccgtcgtcgtcaagaagatcaatttcattgaaatcgaaagagtgtgcttgaatcacagcttatgcagacgctacaccagtcccaacttctccagaatccggccgaggcggcgaacaatcagtctgaatcggacgcgccgccgaaacaggtggctcaggccatggaacgactcaatcaagcggctagggttatcgccgatatccgcctcggcgctgaccgtatccttgaagctatgttcgtggcttcgcaacctcgtcacacagacatgcctccttcaactcttctcaagaagaaaacgcctccatgcgtcaacatcctcaagggattcttccgccttaataagggaaagaaaattgggaagaatcctgggagtgtttaactggaatccacttaaggtcaaaga

SEQ ID NO: 3009 - DNA, 488 bp, Arabidopsis thaliana
  unsure at all n locations
  Clone ID: LIB22-014-Q1-E1-F5
tcgtaccggaacacaatccggggcgncccacgcgtccgaaaacacacatataaacatctgaattctcttacaggaaccgaacatggagtcatcatcgtcgacttttctcaccacgacaagcttagacaagaaaaaaccatctccggtttcaagaaaatcaccaaagcaaaagaagaagacgacttcgacgaataaacccatcaaagttcgttacatctcaaaccccatgagagttcaaacttgtgcttctaagttcagagagctcgttcaagaactcacaggccaagacgccgtcgatcttcaaccggagcccatctattccccttcctccgacgaccacaacctttctccaccggcggagaatcttgcgccacgtgttcttcatcaggagccgttcggtgagagagacagtgattgttatgagccgttgaatgcggaagacatgtttttacctgatcagatgtcggaaggtttttcngggtttttcc

SEQ ID NO: 3010 - DNA, 483 bp, Arabidopsis thaliana
  unsure at all n locations
  Clone ID: LIB22-014-Q1-E1-F6
gtancggtaaacaattcccgggnccacccacgcgtccgctcatcctaagagagctgaaaaatggaggttggattcaaggcattgctcgatgatcttgacgttctcgagaaatctctctcagatccggctctgatcaacaaggtctgcgatcacatgttgagaatctagccactctgtctaaatgtaatcctcaccggcgttccaaagtcaaggaactaagctcggaagtggtagatagtaatccttacagtaggcttatggcacttcagcggatgggcattgtggacaactatgagagaattagagagttttccgtcgccattgttgggaattggtggtgttggaagtgttgcggctgagatgcttaccagatgtggtattggtcgtcttttgttgtatgactatgacactgtcgaactagctaacatgaacagactgttttttaaaccggacaagnttggtatgacaaagactgatgctgcc

SEQ ID NO: 3011 - DNA, 501 bp, Arabidopsis thaliana
  unsure at all n locations
  Clone ID: LIB22-014-Q1-E1-F7
attttagccgccgtaccggaagaaattccgggtcgacccacgcgtccgggaagcagcagttgagaaccgcgtaacagatcttcttacccgttacaatgggaaatttagacactatgatgtgaacaatgagatgctccacggatcgttctatcgagatcgactagactctgatgcaagagcaaacatgttcaagactgcacacgagttagacccattagcaactctgtttctgaatgaataccacatagaagacggatttgactcgaggtcatcacccganaagtacataaaactcgtacacaagctgcaaaaaaagggtgcacccgtgggaggaatcgggattcaaggacatataaccagccccgtcggtcacatcgttcgttctgctttagacaagctaagcacactcggattaccgatctggttcacagaacttgatgtgtctcgactaacgaaacatataagaaggggatgatctaaaggtgatgctatgggaacctt

SEQ ID NO: 3012 - DNA, 442 bp, Arabidopsis thaliana
  Clone ID: LIB22-014-Q1-E1-F8
gcaacaatatttttctctactcaattcactcacactccaaaagcggtagcaatgtcagccaccgccgccgcctcctcctcgatcgccgttgccaccaactctctcaggaacgtgactctgtcttccagatcgccccttccatcagccatctccgtggctttcccttcccgtggacgcaatactcttcagcgacgcctcgttctcgtttcctgcagtactggagacggatctaagcctacgattctcgtggcggagaagctcggtgacgctggtattaagcttttggaggatgtcgcgaatgtcgactgttcgtataacatgactcctgaggagctcaacattaagatctcgctctgtgacgccttgatcgtgaggagtgggactaaggttggccgtgaggtgttcgaatcgtctcacggacggtcaaggttgttggcccgct

SEQ ID NO: 3013 - DNA, 478 bp, Arabidopsis thaliana
  unsure at all n locations
  Clone ID: LIB22-014-Q1-E1-G11
gncccggtccagaataaccgggtccanccacgcgtccgcncttncccttaacctcaaaagccatttagacnnnnnnnnnnnnnnnnnnnnnnnnnnnnnnnnnnnnnnnnnnnnnnncacgtagagcacaaacaagccaagaaccatctctgctctttctttcaccttcagcaaccaaagatgatgaacagctgtggaatccaacaaaacgcttttgaagagatgaggagaaacgccgccgtttctgatcggagagacgccgtgatttgtcctaaacctcgtcgtgttggtgctcttaatcaccactcttctcgatctctccgttggcaactcaagtaagatactttttgtaataaagttcaaaacttttttgaggcaaatcactttgaagcaatcagatttaatggnttttgaatttggtagcatcaagatggnaataatgtgaaaccgaaatcaaggaagttgagatttggggatt

SEQ ID NO: 3014 - DNA, 487 bp, Arabidopsis thaliana
  unsure at all n locations
  Clone ID: LIB22-014-Q1-E1-G2
acggtccacaancccggggcccccacgcgtccgcganacgcgtgggcggacgcgtggggtttgaaaggtgaaactggagatagcaaaccggttcgagaagctgaaagaatgtatggaaaacaaatccataacactgctgctacctcatcaagctctgccactcacactgataatttctcaaggtgtagggacacacccgttgctgcgactaatgcaatgagcatgatcgaatcattcaatgcagctcctcgtaacatgattccttcaggtatgtgtgtctaatatcaacatcaaaacaaaatataatcaagatttttgcttcctcaaatcatatgtctaaactcgaaaattgcttttttccagtccctcaagctcggaaagcatccttggctccgttccttgggagaaagcgcaaagaaaaggttggatttggtaatttttttccttaaaagaaaaattttganggttttcnattgaatccaaaaag

SEQ ID NO: 3015 - DNA, 498 bp, Arabidopsis thaliana
  unsure at all n locations
  Clone ID: LIB22-014-Q1-E1-G3
gtnttctgccgcccggtccgaaaaccgggtcgncccacgcgtccgggntatgcaaatatgctcgatatagtaagtttgaaactcggggtgtgctgaggaccagtgagttgaacaacacttcaaatgtgatttgttctctgggttttgatcgggacgaggattattttgccacagctggtgtgtcgaaaaaaattaagatatatgagttcaattcccttttcaacgaatctgttgacattcattatccagccatagaaatgccaaatagatcaaagcttagcggcgtttgctggaacaactacattaggaactacctagcttcctctgattatgatggtattgtcaagttatgggatgtgacaacaggacaggccatttcacatttcatagagcatgagaagagggcttggtctgttgacttctctgaagcttgtccgacaaaattagccagtggaagcgatgattgttctgtgaagctatggaacatcaatgagaaga

SEQ ID NO: 3016 - DNA, 471 bp, Arabidopsis thaliana
  unsure at all n locations
  Clone ID: LIB22-014-Q1-E1-G4
ngccacgcgtccgcaacaaccananaaaacacagaccttaaaaaaataaaaatggttgatatgggattgggaagaggaagatggtatcatcaagattttaccaaaactcacctaagctttcttcaaaagcttcacgtaactattccatcaccgttcaaaatcgtccctgtttcatctccgatctcatgttcagcacctgctctttgctctgcttacgagctttaccttcgtctccctgagctaagaaagctctgggtcatctcgtgattttcctcaatggacatcaagagccgattctcaaaccaagctcttcaagctttgggagatcagtttcaagattagttttcgccgtttgttctgatactagaccgtacatcaaccaacggtgaatggaaccggaggctaaattctctcatcacgaagcanattcaaccttgtaacaacgatttgcaagatgaagaaagaagaaag

SEQ ID NO: 3017 - DNA, 439 bp, Arabidopsis thaliana
  unsure at all n locations
  Clone ID: LIB22-014-Q1-E1-G6
gcggatctctctcagtgcacagtggttgtcactcttctcctttggtcgaaactctttcttggaaagagcattttgttatcaagactctgaagagctcttttgggaggatagtaaggttggatgatgagagggagatctgatggaggcctaaagaagcggcttattgcttcggtctgtgtcgtggctctattcgtctgtttcttgtttatgtactatggttcctctanccaaggtgcatcagcattggaatatggaagatctttgagaaaactcggatcgtcttatttgagtggagatgatgataatggtgataccanacaggatgantctgtggctaatgcagaaanaatcttgttgtcccaaaagtttccctgtttgtgatgaccgggaanccggnaacatcccttgcttanataaggaatttaactacaaattnagg

SEQ ID NO: 3018 - DNA, 476 bp, Arabidopsis thaliana
  unsure at all n locations
  Clone ID: LIB22-014-Q1-E1-G8
cgtacnggaacaaaattcccgggctttgttgcgtgtcgtcntctctctctcataattcttgagtttcacgtctcaagatttgatcacttctgccaattttccagattgatctctctaattatggcttccatgagtttcgccttgaatcgcttctctggactctcctctaaaaccaccttatcagctgacttcgatccatcctctcgccggagttttctaccgccgactagagttggacttaagatctcttccgccgccgaatcggagcctgatctcagtgtcactgtaaatggcctgaaaatgcccaatcctttcgtgatcgggtcgggtccaccgggtaccaactacaccgtcatgaagagagcctttgatgaaggttggggggccgtcatcgccaaaaccgtatctttagatgcatccaaagttatcaacgtgacacctagatatgctcggctacgaaccggattcaatggntc

SEQ ID NO: 3019 - DNA, 482 bp, Arabidopsis thaliana
  unsure at all n locations
  Clone ID: LIB22-014-Q1-E1-G9
tactcngccggccccggtccaaanaacccgggtcgangccacgcgtccgcccacncgtccgcccacgcgtccggtttttgggttttgggtataaagcttgttactttgatctttattttgtgaattcgaagtggaaatggaatcgttaccatctccatttggcgatccagctcctaatttatccaattcggagctccgagaaactgcttacgagatcttagtcgctgcttgccgtagcactggaagtcgtccgctgacttacatccctcaatcgccgaaatctgatcggagcaacggtctgacgacggcgtcgttatctccgtctccgtcgcttcatagatctctgacttctacagctgcgagtaaggtgaanaaggcgttagggatgaagaaacgaatccggagacggagacngaggaacgggagaatcgtccaatcaaccggatncggacaagaaatccgtcacggtggttaattggtnc

SEQ ID NO: 3020 - DNA, 435 bp, Arabidopsis thaliana
  unsure at all n locations
  Clone ID: LIB22-014-Q1-E1-F12
cgtccggaggcnagtctctgaaccgctttcttagcaccgggaacttccatttcctccagagattgaagataacgatcagctcctaaaccaatcaacttcgtcctcgccgcataacttccacctgataaaatcgccgtcacaaccatcaccggaagctctttattattcatcctctcattcctcggatccaacatttgcaccaatcgaatcacactcttctcatctctcatcaactccttccgatttgatctaacggtcaacaacgacttcgccgcctccgtcgccgcttcttgtaaccccgccggtttcggcgattccattaaccgaatcaacgagcttaaacaatcagcgacggctcgtttgttaccgtcgctgatgntaaattcgataaaagagaagttgagatntgttgaaggattacgtttccgtgtttaa

SEQ ID NO: 3021 - DNA, 442 bp, Arabidopsis thaliana
  Clone ID: LIB22-014-Q1-E1-D8
tttttttgttctttcctctgactggaaaaagcttcctcagatcgtttcatcgtccaagcggaagaagcgtctccttcaatcaccgtggacacctccgagactgtctccgattgaatgggaattgaagacatgcattcaaaatctgacagtggtgggaacaaggttgattcagaggttcatggtacagtatcgtcgtcgataaatagtttaaacccttggcatcgtgctgctgctgcttgcaatgcaaattctagtgtggaagctggagataaatcttctaagtcaatagcattagcattggaatcaaacggttccaaatcaccatccaatagagataatactgttaacaaggaatcacaagtcacaacgtctccacaatcagctggagattatagtgataaaaaccaagatctctgcatcatggatcacacaacctcctctc

SEQ ID NO: 3022 - DNA, 496 bp, Arabidopsis thaliana
  unsure at all n locations
  Clone ID: LIB22-014-Q1-E1-D9
ctatctggtcggtcngtaccagacanacntgntcngcccctttccanaatcnactctcgcttcccaacgcaatcttcttcacccaatctctaaatctctcctaaattccatgtctctcgcttccattcgccgtttagctgccggagctgccgtaattgccgctgcatccggtggcgctgtctacctgtctccgtcggttgcctccagcgacaaaggaggtggtccgattctagattcgttgaggcgtaagcttggtgatcccaccgcttctgtaccgtctcgatctgctcaagagtctgctctgattgcagccaccgcttctgattcgctcgatgttctcgtcattggcggtggaaccaacggttctggagttgctccntgacgctgttaaacgttggcctccgttgtttggtttggtggaancgcnaaggattttctcctcctgggaantttcttccgcaatttacaaaagctggaattcaanggaagggggttc

SEQ ID NO: 3023 - DNA, 468 bp, Arabidopsis thaliana
  unsure at all n locations
  Clone ID: LIB22-014-Q1-E1-E1
ctgnacgccacggtccacataacccgggtngccccacgcgtccgcaaattcttctctgaactccaaacatcgccatgtccgagattctctcttcgttgaggtcactaatggcctctcactctcctcctcttgatgctttggttgttccttccgaagactatcaccagagcgagtatgtttctgcacgagacaaacgccgtgagttcgtgtctggattcagtggaagtgcaggtttggcacttatcacgaagaaggaagcaagactttggacagatggtcgatacttcttgcaagcattgcaacagcttagcgatgagtggacactaatgcggatgggaaaaaattctccttgttgaaatttggntgtcctgataatccaactgaaaganggaaatataaggtgttgattcaaggggtgtnccngtnaaaaatgggaatanatgggggaaatcntttggcaagaagaat

SEQ ID NO: 3024 - DNA, 485 bp, Arabidopsis thaliana
  unsure at all n locations
  Clone ID: LIB22-014-Q1-E1-E10
aacttccattgntcggcccggtccacaatacccgggtccacccacgcgtccgcactacatcaccggtaaaaatggcgatgtgggtattcgggtacggatctttaatatggaaaacgggttttcctttcgacgaaagcctccctggtttcattaaaggctatcgccgtgtcttccatcaaggtagtactgatcatagaggaactccggattttccgggaagaacagtgacattagaagctgctcatgaagaagtttgttgtggagttgcttacaagataactaaagaggaagataaaagagatgctttattgcatttggaagtgagggagaagcaatatgatcagaaagagtatcttgatttcttcactgactctaatgcttcggaaccggctgtggcaggagtaatggtgtacatagcttcacctgacaagaagagcaacaacaactacttaggaccagctcctcttgaagatattgccaaacag

SEQ ID NO: 3025 - DNA, 492 bp, Arabidopsis thaliana
  unsure at all n locations
  Clone ID: LIB22-014-Q1-E1-E11
cggtccaagactatacgggnccaggcncgcgtccgnacccnaattggcgcgtgttgtcttcatcttcttcctcctctcgacgacnaagagattaaaaagagacggccttttctcagtttctgctccgattcgtatatcttctgtttcgtncgagtgttgtaagangtttgttttgcctgagactatacgtttgtcatggatatagatcttcgactacattcaggtgacctttgcaaaggagatgatgaggatagaggacttgataatgtgttacacaatgaagaagatatggatattggcaaaattgaggatgtttctgttgaggttaaatactgatgacagtgtangcattgggtgtccaactggggaagttgggntgaattacacctgaggggtaatgaatccttggaaccctccttaatnggtaatgganttttganttacaacggtggaaagcgttattcngttttaaccaagnaggtaatccccgaa

SEQ ID NO: 3026 - DNA, 450 bp, Arabidopsis thaliana
  unsure at all n locations
  Clone ID: LIB22-014-Q1-E1-E12
taccgggnccagcacgcgtccggatacaaccatggcgnnnnnnnnnnnnnnnnnnnnnnnnnnnnnnnnnnnnnnnnnnnnnnnnnnnnnnnnnnnnnnnnnnnnnnnnnnnnnnnnnnnnnnnnnnnnnnnnnnnnnnnnnnnnnnnnnnnnnnnnnnnntctccttactcaaatctccacttcccgtctctttacgccggagatcatcaactctcgttaaagcctcttccaccgtcgcttcagcttcctcttctccaactcctcctttggttccagctccggttccatggcaaggagctgccattaagcctcttctcgcttcgatcgctactggtttgattctatggttcgttccagtccccgaaggtgtcactcgcaacgcgtggcaattactcgcgatcttcctcgccaacatcgtcgggatnatcactcagccgctctctcggtg

SEQ ID NO: 3027 - DNA, 415 bp, Arabidopsis thaliana
  unsure at all n locations
  Clone ID: LIB22-014-Q1-E1-E3
gcggacgcgtgggtttcgatttctgaagttgagagacgactatggcgacgaacaatggtgatgtcttgatgttggaggcgacgccggaggctgcgaggccctgggctagtgcggcgaatgcagaagttatcgatgcgcttccttatatagacgacgactatggcaatccattgattaagtcggaggtagaccgtttggtggaggaagagatgcgtcggagctctaagaagccagctgactttctaaaggacttgcctcctcttccgaagttcgattttaagaactgccctgttcttggcaaaagaagtatgagccgtgtttagaactgggaaancccctgttccgggtaagattccaatccccgatacaaaacttngaaatngncaacttgccaaattaagaaggaatgaatgaa

SEQ ID NO: 3028 - DNA, 522 bp, Arabidopsis thaliana
  unsure at all n locations
  Clone ID: LIB22-014-Q1-E1-E4
tactgcgccacggtccgnaaaacccgggtcgncccacgcgtccgccataacttaatggataatctaattcttgaagataacgttggtgttctgcgtggagccgctaaacgcgccgctacttctgcttggcatctgcgccacaacagcgttcgtaagcatgtggatgcataacgtagcagctgcagtcatgatgatgcctgtcgctacggggatacttcagagactgccctcgtcatcatcgacgacggaagtggtgcatccggccgtggggaagtttagcagggcggtggtgttaggtgtgatatactctgcggcggttggtgggatgagcacactcactgggaacaggagtgaaatcctgaatccttgttggaaatgttggaaaaagctactttccctgaanggctgattccgattaagttttnagccaaatgggttccttccttttggcttcccaattgggcntttgtgcaataattccttggtggctttgggtgttgttcctttggggttaaagtaatt

SEQ ID NO: 3029 - DNA, 440 bp, Arabidopsis thaliana
  unsure at all n locations
  Clone ID: LIB22-014-Q1-E1-E6
cgatccggcgactaaatcctactgagagaataatccggtcnctcanagagagaaagggtttcnagttttctggtgtgtcgccgatcanttttcanttaccaactggcttatttgtgctttgatctgaggcgaangtttgagttctaaggagtgtatcgtttaatcatcaagctctgttttccttctttcccgaggaagctctaaggctttttcggtggatcaagacggacgganggaggattancacgtnnataagatttaacaggaatttgcggaattttgattatatcagtgagtagaagaaatgagcgcagtctcgggtgtaatctcnangcaagttttgcctgttggtggtaacctttgaattctttgcctgcgcttcgtgcaaggtcaagacancctgtgaagaaggtacaagaacctaattcctgaaatttttc

SEQ ID NO: 3030 - DNA, 438 bp, Arabidopsis thaliana
  unsure at all n locations
  Clone ID: LIB22-014-Q1-E1-E9
gggtccaggncgcgtccgcaaccgacgtgcaaccaatgttagtgctaggctagatgctcagcagaagaagctcaatctcccaatcctaccaaccacaaccattggatccttcccacagactgtagagctcaggagagttcgtcgtgagtacaaggccaaaaaggtctcagaggaggactacgttaaagccatcaaggaanagatcaagaaagttgttgacctccaagaggaacttgacatcgatgttcttgtccacggagagccagagagaaacgacatggttgagtactttggtgagcanttgtctggttttgccttcactgcaaacggatggggtccaatcttaaggatctcccctgtgtgaagccaccagttatctatggtgatgttagccgtcccaaaggcaatgaccgtcttctggtccgcaatgggntcaaa

SEQ ID NO: 3031 - DNA, 488 bp, Arabidopsis thaliana
  unsure at all n locations
  Clone ID: LIB22-014-Q1-E1-F10
aanttccactcgcacgggcnccggtccacactnaacgggtccacccacgcgtccgcaagacgcgtgggcggacgcgtgggcggacgcgtgggtgttaacattggaagtggtcaagaagtgactattagagagttggctgagttggtgaaagaggttgttggttttgaagggaagcttggatgggattgcactaagccagatggcacaccgaggaaacttatggacagctcaaagctcgcgtctttgggttggacacctaaggtttctcttagagatggtctgagccaaacttatgattggtatttgaagaatgtttgcaaccgataagttaatggtttctcttctcatatatacacaactattgagtctcangtaaatcagcttatcaccacattgtgatttaaacctttctttgagattccaagaattgcttttttttttaacaaaattgattcatttagagataagacttgcttctttaaacaaca

SEQ ID NO: 3032 - DNA, 470 bp, Arabidopsis thaliana
  unsure at all n locations
  Clone ID: LIB22-014-Q1-E1-F11
gcccggtccagaatncccgggtccacccacgcgtccgcagacgcgtgggtaaatcgccagtattcgccgcaagaaagatgtctccggcgaagaagagccgaagttttcctccgataagcgagtgtaaaagcagagagtatgattcgatcgctgcggatctcgacgggactctgcttctgtcaagaagctctttcccttacttcatgctggtggccattgaagcaggtagtctcttccgtggattgatccttcttctttctcttcccatcgtcatcatcgcttatctcttcgtctccgaatctctcggaatccaaatccttatcttcatctccttcgccggtatcaagatcaagaacatcgaactcgtctctcgcgccgttcttacacggttttacgcggcggatgtgaggaaagataattttgangtgtttgataaatgtaagaagangaaagtatggtgactgcgaatc

SEQ ID NO: 3033 - DNA, 489 bp, Arabidopsis thaliana
  unsure at all n locations
  Clone ID: LIB22-014-Q1-E1-D4
tttctctggcncccagcggtccgaaaanncccgggtcgncccacgcgtccgatntcacgcctatatcgacgccgtctaattcctatcatttctcgttgctccaaaaccctaactttactaccgtcggtcattattttcactttctcggctcgatttggtgttggaggttggtaatcagttatgggcgctccggaaaagtctcaatctaataccaattcgatgcagagagtgaaagtctatcatttgaatgaagatggtaaatgggatgatcgaggaactgggcacgtaagcatcgactttgtggagcgatctgaagaactcagtctatgtgtaattgatgaagaagataacgagacgttacttgttcatcccatcaaccctgaggatatttacaggaaacaagaagacacaataatctcatggagagacccanaacggctcaacagaattggctttaagcttcaagagactgcagggtggcnctaagtt

SEQ ID NO: 3034 - DNA, 488 bp, Arabidopsis thaliana
  unsure at all n locations
  Clone ID: LIB22-014-Q1-E1-B4
ccacggtccatgaaacccgggtcgccccacgcgtccgcaantccataatttcaattcctctcgacgtttcacggcgaagcttcagatctacttttccccagctcagtatggagacggttgattctcggaacaaattgcattcccggttacgtttatgggaattccccgatcagtacatcatcgagccagctgatggctcaggctcttcatgtttggatattagtcgtgttgatgcttccatgaagctcatcgatcaagtcccagaaagcaattccgtgcgtgtccctaaaatccgttccatttttggtgtggttgggatgttgaagctccttgcaggatcatacttggtggttgtaactgagagtgaacgtgttggatcgtttctggggcatcctatattcaaagttacaacgcttaanggtcctccctgtgatnaatcacttaaaaactcgcctgaagaacagaaaaagatggngaacgagtttccc

SEQ ID NO: 3035 - DNA, 510 bp, Arabidopsis thaliana
  unsure at all n locations
  Clone ID: LIB22-014-Q1-E1-B5
ttnattaggctcgccgtaccgganagaaaattcccgggctttctctctctcaatcacaagtttcagttacacagctgaacccaaagtatctcacattctgatctaatcagaacactgttttgtctgtgtaacataaacaaacgatcctgtttttatggaaaatttaatgaaacagtgacgattcttctacacttctttataatgacaaacatttcatagtaccaaaatacacaaataccttttctttattcttctcacccttctctgtttctttatcattcatggctccaaattcagtancagtgacaatggagaagccagacaacttctctttactagagatcaacggntcaagattcatcctcattccccgacaaacgtaaatccatcaagtccaaaacaattctcatggntccttcntctcaaaagctcatanactcatcccgtgtctctcgtggctantcccntcggttaaaaagcgaatcncgttctccgcgaaagaacattaac

SEQ ID NO: 3036 - DNA, 428 bp, Arabidopsis thaliana
  unsure at all n locations
  Clone ID: LIB22-014-Q1-E1-B6
aatcaaaaaaccaaaaatccaatctttggattcttacttctacgatttgtgtgtttcctcaaacccaaatgtctcgtctcccgattttaatcgcttcgtgtctcttcctctcttcactcaccgccgccgtcgtcaccgccgccgaatccgatactccgacggcttattcactcctccaaagctacaacttccccgtcggaatccttccaaaaggagtcgtagcttatgatttagacacaataacaggcaaattccatgcgtatttcaacgattcatgtagcttcaatcttgttggttcttaccaattgaattacaaatcaacaatcagtggttacatctccgagaacaagctcaagaaattgactggtgttaaagtcaaagtttgttcttgtggcttaacatcgtcgaggtattaagaacgggtgacn

SEQ ID NO: 3037 - DNA, 492 bp, Arabidopsis thaliana
  unsure at all n locations
  Clone ID: LIB22-014-Q1-E1-C1
gggtccgaacanaacgggtcgagncacgcgtccgaacttcaacacagtgacggtttatgaaaagggagctgaggtcgtcaggatgtacaaaactctactaggaactcaggggttccgaaagggaattgatctctattttgaaagacatgatgagcaagcagtgacttgtgaagacttctttgctgctatgcgtgatgcaaataatgcagactttgctaatttcttgcaatggtactctcaagctggaacgcccgttgtcaaagtggtatcctcttacaatgctgacgctcgtactttctctttaaaattcagtcaggagatanctccaaactccaaggccaagccaacaaaaagaacctacatttaatccaatgggttggtggncctttggacccaaatnggaaaaacaatantccttnctccggtcaacaagaanggacaatncaaaccaattnaaggaacaacacaatactccagttgccaagaaagaaa

SEQ ID NO: 3038 - DNA, 479 bp, Arabidopsis thaliana
  unsure at all n locations
  Clone ID: LIB22-014-Q1-E1-C11
ccatctgncggcccggtccannaaaccgggtccacccacgcgtccgaatctctctctttctctctccatgagaactctaatctctcaccggcaatgtgtgacgtcaccgtttcttatctccgccgcatctccaccgtttcctggccggtgctttaagttatcctcctttactcctccacgtcataggcgtttttcttctctctcgatcagaaacatttcgcatgaatccgccgatcagacttcttcttctaggccgcgaactctttatcctggtggttacaagcgtcccgaactcgccgttcccggtttacttctccggctagacgccgacgaggttatgagcgggaatcgtgaagagactcttgatttggtcgaccgtgctttagctaaatcggttcaaatcgtcgtgattgatggcggagccaacgctggtaagctctaagaagcggcttgtttgctgaaatcacttgtcaaanggc

SEQ ID NO: 3039 - DNA, 433 bp, Arabidopsis thaliana
  unsure at all n locations
  Clone ID: LIB22-014-Q1-E1-C12
gnncagatctgttattctctgttgaagtctgattgatctgatcggagctattgcggaggaggggtttactgcaattgcacggtggtaatggctgcggttccgcctnnnnnnnnnnnnnnnnnnnnnnnnnnnnnnnnnnnnnnnnnnnnnnnnnnnnnnnnnnnnnnnnnnnnnnnnnnnnnnnnnnnnnnnnnnnnnnnnnnnnnnnngccacgtctcaaatatcagaggatgggtggcaacgttcctgcgttgctatctaacgatgctgcttcctgcatcgctgttgctgcgangatgatcgcgcttggtacgcacgacggtaccgtgcgtatcctcgatttattggggaatcangttaaagaatttcgtgcccacactgctccggttaatgacatcaactttgacactgaaggagagtatatccgaaact

SEQ ID NO: 3040 - DNA, 504 bp, Arabidopsis thaliana
  unsure at all n locations
  Clone ID: LIB22-014-Q1-E1-C2
ctgcnccacggtccacaaacccgggtcgncccacgcgtccggtnttactctctcttctgagttctgacctgagcacacacacagagattttgattgtgtcactcatggaacccaatatttaccaacttgccctcgcggctctattcggagcttccttcgttgctgtttctgggtttttcatgcatttcaaggcactgaatctagtccttgagcgtggtaaggagcgtaaagagaaccctgatggagacgagcctcaaaatccgaccttggtgaggcggcggagccaagttagaaggaaggttaatgaccaatatggtcgcagtcctgcttctcttccagatgccactccttttaccgatggtggcggcggcggcggcggtgatacangacgggacaacggtcacgtttatgttgatgaaattcctcctggtctccctaaggcttcaataacgccatcctgaaagggaaaagcttccggtacaatggaagctaagtaantatcaa

SEQ ID NO: 3041 - DNA, 467 bp, Arabidopsis thaliana
  unsure at all n locations
  Clone ID: LIB22-014-Q1-E1-C5
gtaccggaacacaatccgggncgncccacgcgtccgctnttanacaagctatctagataatgaaaacacaaaccaaagtgatgggaggacatgtcttgcttactgttttcactctttgtatgctttgttcaggggttagggcacagctaagccctgacatttatgctaaatcgtgccccaatctagttcaaattgtccgtaaacaagttgccatcgccctgaaggccgagatacggatggctgcttctctcattcgtcttcatttccacgactgctttgttaatgggtgtgatgcgtcgttattgttggatgggagctgacagcganaaactccgcgattccaaacaataaactcctngcaaaaggatttgaattatttgatacatccaaanccgctgtggaaaacnaanttcctgtggtggttcctngtgctggaaanctnnactttggcggcccttaacccnttt

SEQ ID NO: 3042 - DNA, 444 bp, Arabidopsis thaliana
  unsure at all n locations
  Clone ID: LIB22-014-Q1-E1-C6
tttattaccgacaagattctgccacacaattattacatatttttgttcccatgaagcaattgttcctttcaagcatgtttacgagcaaaagagtgaaagggtagcttgatttttgtctactctagcttcattttctggcgatctttacttgagatttaaacattttgctctcggattgataataaagaagaatttggaatatcagtaggtttggttaggactctcggattctgttgtcggttagatatttgttttgtttaatccctagatttagcagagaaatccctcaaatctcacacaatccatgtaaggaagaagatgacctccagtatcaaatcaagtctgctaaatctagggctccttattatatttttcgtcttcttcttcctggtgattaactgtcnaggggaatcttctacgtgtttggcggtttacaaacaaggc

SEQ ID NO: 3043 - DNA, 450 bp, Arabidopsis thaliana
  unsure at all n locations
  Clone ID: LIB22-014-Q1-E1-C8
ggcngagtaggaggagacggtggaggaactggaaggtggccgagacaagaaaccctaactctgttggaaattagatctcgtcttgatcataaattcaaagaagctaatcaaaaaggacctctttgggatgaagtttctaggattatgtccgaggaacatggataccaaaggagtgggaagaaatgcagagagaagtttgagaatctgtacaaatactataggaagactaaagaaggcaaagccggaagacaagacggaaaacattacagatttttccggcagctcgaagcgctatacggggattctaataacttggtttcttgtcccaatcataacacgcagttcatgagcagtgctcttcatggtttccatactcaaaaccctatgaacgttactacaacaacgtccaacatccataacgttgatagtgttcatggtttcatcaaagcc

SEQ ID NO: 3044 - DNA, 465 bp, Arabidopsis thaliana
  unsure at all n locations
  Clone ID: LIB22-014-Q1-E1-D1
gnggccggtccgagaaaccgggtngngcacgcgtccgganaaattgcagacgtggcatatagacgaaatacaagattcagagataataaatacgtcaccaaaagttatcacccacaacgaatcttcttcttccatcgccattgccatggctaagctctcnnnnnnnnnnnnnnnnnnnnnnnnnnnnnnnnnnnnnnnnnnnnnnnnnnnnnnnnnnnnnnnnnnnnnnnnnnnnnnnnnnnnnnnnnnncatgtgcagagatctcataagccttccctcttctcctcccacaacaactggcacgtctctctccttcgctctctcccttcctccccccaaccaagcaacggtggtccaatcctaatnaacgcgccgttcaatgggttntccgntcgtctctnccctaancaaaccgncgncctccgncgtnanccttcantnanctccgttatacctgatnaagc

SEQ ID NO: 3045 - DNA, 481 bp, Arabidopsis thaliana
  unsure at all n locations
  Clone ID: LIB22-014-Q1-E1-D10
ttccattagcncggcccggtccacactaccgggtccanccacgcgtccggnggaacacgctgttgttcatggatccaccgctgtagctgccgccattgatctctacacttacgttactctccgctttcctcttccatcagctgagaacaatgataggcttacacttcagctcaaggacatttccttggagttttcatggtccttagccagaatcaaagaagcgattccttatgattcaagcactctctgccgttctacgccggcttcatgttcagaggagacccttaaatcaattgcagttttggttgaagagcaaaatcttccaaaggaaaagatgtggctctcctctgggatctccacgtttctctggttatacaccagaattatagggttcaatccggctacaagtagtcattaactctgagcttccatacgggtctggcctcggttcatcagcagcttaagtgtactctcacaagct

SEQ ID NO: 3046 - DNA, 494 bp, Arabidopsis thaliana
  unsure at all n locations
  Clone ID: LIB22-014-Q1-E1-D11
ccttccgctcggntcggtccanggcanacgggnccaggnncgcgtccgganggaaactgtggaatacaagaacattagtttcaccgtgtgggatgtcgggggtcaggacaagattcgtcccttgtggagacactacttccagancactcaaggtctaatctttgttgttgatagcaatgacagagacagagttgttgaggctcgagatgaactccacaggatgctgaatgaggacnagctgcgtgatgctgtgttgcttgtgtttgccaacaagcaagatnttccaaatgctatgaacgcctgctgaaatcacaagataagcctgggcttcantccctccgtnaagcgtcattgggtatatccaaaagcacatgtngcacttnaaggtgaaagggccttnatgaaaggcctngactggntctncaanaacatccctggcaaagcnttatgaaggaaaaaattgcctttcctccaaatgaatcctgtcngccgtg

SEQ ID NO: 3047 - DNA, 496 bp, Arabidopsis thaliana
  unsure at all n locations
  Clone ID: LIB22-014-Q1-E1-B3
ctgntcgcccggtccacgatacccgggtngccncacgcgtccgctncgatctctcctgaatcctcaaaccctggagagagagagagagagtgacgggggaagaagatgacttctgctttgtatgcttccgatttgtttaagcagctcaagtcaattatggggacagattcgttatccgacgatgttgtacttgtgattgcaacgacgtctttggcactagtagctggatttgtggtgttgttatggaagaaaacgacggcggatcggagcggggagctgaagcctttgatgatccctaagtctcttatggctaaggacgaggatgatgatttggatttgggatccgggaagactagagtctctatcttcttcggtacgcanactggaacagctgagggatttgctaaggnattatccgaagaaatcaaagcgagatatgaaaaancagcagtcaaagtcattgacttggatgactaagctgccgatgatgaccant

SEQ ID NO: 3048 - DNA, 458 bp, Arabidopsis thaliana
  unsure at all n locations
  Clone ID: LIB22-013-Q1-E1-B5
aaacgataggttagacaagaggacatggacttatatatttggggcttgctgtgccacgaccgttttcataccatctttccacaattaccgtatttggtctttcctcggccttggcatgaccacctacaccgcttggtacctcaccatcgcctcttttctccatggtcaggcggagggtgtgacacattccggtccaaccaagcttgtgttgtactttaccggagccaccaacatcctctataccttcggtggacacgctgtgaccgtggaaataatgcatgcgatgtggaaaccaaggaagtttaagagcatcctaacttgatggcaactcctgtacgttcttcaacaattaaacgccttccgtnaagctccggccgttctaactggggctttccgggngaaccaacttnctcaaaccaactccaaaacgccttttctcctcctcctcccctaaaaac

SEQ ID NO: 3049 - DNA, 458 bp, Arabidopsis thaliana
  unsure at all n locations
  Clone ID: LIB22-013-Q1-E1-B7
tctgtccctctctctagcggcggactgatgcacatacctttgtattctccgccgtaactaacttacataatggggtgcatgttctcncacctcgccgccaaattcgccttcttcccaccctctcctcccacttaccacctcaccaaaacccccgacggcaaactnnnnnnnnnnnnnnnnnnnnnnnnnnnnnnnnnnnnnnnnnnnnnnnnnggagacccatctctcgacgtcaaagtagtaaagacaagacgcggcaacaaagtcacagctttttaccttagaaaccctaacgcaagactcaacacttctctactcctcatgggaaaatgctggcagaatttgggaacaactccttcgattccctttggttcaaactcaaaaggtcaaatcctccggangtcaatcctcaatngggggtaatgaattaaattcaagggctaatggaagccttctaa

SEQ ID NO: 3050 - DNA, 550 bp, Arabidopsis thaliana
  unsure at all n locations
  Clone ID: LIB22-013-Q1-E1-C1
ccanaaattcaagggtccacccacgcgtccggatgttttgttgtgccacaggcgtaacaggctttccgcttcaaccacctcttattccttaccgttaaagaagcttagagtctttggtagctatcaagcttcatatcatcatcttcttcttctcaggtcaagagccattctatggtttaaaggatgctcctggctaatctcagcacttagtttctctccctctgctctaaaagctaccccattttatggaatttggaggtggctttttaagcagatcccaatgggatctcctgtttcagatggtgatcatgtcgtaatttgtcatctcctcaaccttccttgcaaattgcatccttccccgaagaagaaatggggnttcctcntttggaagaagaataattggccnaaatggggagcaatcaatcaatcaatcaaaatccaaatccaaggttgcccaaatcctcaaaacccggaatgcaatgttttcaaaccnttaaatttanntttaaaggtttggnttttaacccctaaagggatggggctaaatcca

SEQ ID NO: 3051 - DNA, 440 bp, Arabidopsis thaliana
  Clone ID: LIB22-013-Q1-E1-C10
ggagagttttaaagtctattgtgctattaatgatggaatcatcaatctcattgacaagttctttgaaatggcaaaacatgaagccatcacttcccttgaaatatacaagcgtgcgggtcagcaggctcgtagcctttctgatttctatgaagcctgcaaaggattggaacttgcaaggaattttcaatttcctgttctaagagagcctccacaatcttttctgacaacaatggaggagtatattaaagaagcaccgcgtgttgtcgatgtcccagcggaaccactgcttctaacatataggccggatgatggactgactaccgaagatactgaaccgtcgcatgaagaacgtgaaatgttaccttcagatgatgtcgttgttgtatctgaagaacagaaccttctcccccgcctctccttcagccaacgctcagaacttc

SEQ ID NO: 3052 - DNA, 423 bp, Arabidopsis thaliana
  unsure at all n locations
  Clone ID: LIB22-013-Q1-E1-C5
gaatccatatactgaatatggactcattctacttctgtatatacacatgggatccaaacttaaactttaccctctcttaaatcactcatccgtttttcacccagacagtcgttnccaatcggcccctacaatggaggaagagcaacaacaacttcgtgttctcttcgcgaaatacgagatgggaaggttactaggcaaaggaacattcggaaaagtttattacggcaaagagataacaaccggagaaagcgttgcaatcaaaatcatcaacaaagatcaagtcaaacgtgaaggtatgatggaacaaatcaaacgaagagatttcaatcatgagacttgtccgtcatccaaacatccgttgagtttaaagaagtcctgggtacaaaaacaaagattctccttaacaagggaatacgttaaang

SEQ ID NO: 3053 - DNA, 487 bp, Arabidopsis thaliana
  unsure at all n locations
  Clone ID: LIB22-013-Q1-E1-C7
gcaacaattgaaaatggcaagaatcgggagctttctcattcttctgtctctcacttacgctcttactctctgcatctgtgacaacgcgagtaactttggcggcaacaaaaggaacctcttcccagatttctacaggagctcgtgccctagagcggaggagatcgtgaggtccgttgtagccaaggcatttgaaagggagactcgtatggctgcttctctcatgaggctccatttccacgattgtttcgttcagggttgtgatggatcgttgcttctagacaccagtgggagtatagttactgagaagaactctaaccctaacagcaagattggctcnccggttttgaaagttgtttgacgaagatnaanggcaacattaagaagaatgaaatgccctaaacaactgtcctccntggtgcctgaacgcccnttaaactcctaagctggctaanaagaactccctcccggttcccttaaaanggtgggg

SEQ ID NO: 3054 - DNA, 430 bp, Arabidopsis thaliana
  unsure at all n locations
  Clone ID: LIB22-013-Q1-E1-C8
gnaacacgcgtccgagcgctttttcatcttcctttgttctgggtttctctccaaaaatcgccggagaaattcaaatcgtcatctctaattcgtcggagaatccaccgttaggtatataaacacggtttgtttctgaaattagggtacgaaaaaatgcccttgtttatgcctgacgaagagctggcgcggctatctagcgacgccgcgtcggtggttgcggagagagccgacgagtacatacgaaagatatacgccgagctggatagtgttcgagccaaggctgacgctgcttccatcacggcgggagcagacgtgttcgcttctcgagcagaagtacctctcgctgtctcaaggatttctccttcccttgaatctcaanaacgcnaaagcttcantctgattccgatgattcgtttaanctgaccttgga

SEQ ID NO: 3055 - DNA, 505 bp, Arabidopsis thaliana
  unsure at all n locations
  Clone ID: LIB22-013-Q1-E1-D1
ctngtcgtgccgtcacaatcaagggtccacccacgcgtccggnttaacttgggctcgctctgagtttgagggtctgctggagaagactcccgctgaagtgaatgcatatctttctagcccagttgagtacactaactcaatgatgagtgctggtgatgctcaggcgagggacacattggagaggattgttgagtgccttgaaaaggagaagtgtgagaccttccaagactgcttaacctgggcacgactgaggtttgaggattactttgtgaaccgtgtcaagcaattgatatacacatttcctgaagatgctgcgactagtaccgggagctccaatcctgggtctgcccaaaaagaatccctccgtccaatccaantatcctccgccgaaccaaatcccccttaaacnttaacacaagcgaacngcaatttaccaacaaanacattttgggattccgaanacctganttgactaagaaaccaaagggaacaacaaaaactggtt

SEQ ID NO: 3056 - DNA, 364 bp, Arabidopsis thaliana
  unsure at all n locations
  Clone ID: LIB22-013-Q1-E1-D12
gcncacgcgtccgggcggatcatcggtttcgaggttagactcgttccggaggattttgacaagggaaagatcttcgaacaggcgggatcattctcgcgttgaccaagatcgtgaattggatattgaaagacagtgaattcagtatatagtatatacacacatacgccggttaaaaaaaaaaaagtataaacacacatgcatccataattaatccttaattcatgaaccataatacttcttcttccttttaactttttattcttgtactgaaatcttttgtatgtgtaaatatgaatggcacactttttgtatgttacagtaattacaaaaacattgttgcttaaaaaaaancataaaaaagggc

SEQ ID NO: 3057 - DNA, 517 bp, Arabidopsis thaliana
  unsure at all n locations
  Clone ID: LIB22-013-Q1-E1-D2
aacgtctagcttgcccgtgccggtccanaaattcacgggtccacncacgcgtccgcacacgcntccgcccacgggtccgcccacgcgtccgcgcgtttcttctcctagggttagggttcgacgaacgcagctgttccacgcgtttagtttcaattctccatcgaagaagccataatccgattcctaaagagcttacatttgttactcaactttaaagttttgacgctagagattactatcctcttgctgggaactcaacgtgaccagactgtgtttgaaagatagcaatggctggagtattagctggggattgttcattcggtgagagtggtgtttcatcttactccaggaattccaatgaaaagcaggacganggttgcccgctggtaattttggaagaaaaagaaanttgaagaaaantcacctcnaaggttggataataattgaccttaaagaaaggaacataactccgcaagtccaaactggncaattttgcaaggattaagcatnagaatta

SEQ ID NO: 3058 - DNA, 463 bp, Arabidopsis thaliana
  unsure at all n locations
  Clone ID: LIB22-013-Q1-E1-D4
gtgccggtccacaataacgggtccacgcacgcgtccgaacacttctctctagctcacactcacaacactctctctctcctgccataactcagcctgagatgtctccggaagcttacgttctgttctttaacagttttaacctcgtaaccntcgangcctttgcttcagtctcacttatcatagccacagttgctttcttgctctcaccaggtgggctcgcatgggcctggaccgggtcatccaagagtcgggtttcgattccaggaccatctggttctctttccgtcttctccggctccaatccccaccgtgttctcgccgctcttgctaaaagcntcaaggctctccgttgatgggttctcagttggtttccgttcgtatctcantgaacggagaanggtaagaatttgagcactctgctttgtncggccgttaagatcnctacaactttgttcacgtgcat

SEQ ID NO: 3059 - DNA, 474 bp, Arabidopsis thaliana
  unsure at all n locations
  Clone ID: LIB22-013-Q1-E1-D5
gacagtgatttgtcacaattgagcgagaagattagtttactacttttcgagaacgatgaccaattggatcaagatgctcatgaatgaaatctcccaagaaaatgatgaanggcaaccttttgcaggaattctgaaagaaagcttacactcatgggcttttacaaaagatagcagaaaggtggaaaaggccaagttgttttggttgaaggtggccaaggngtattacattttgcnaccttcccttgggtaaaactgggccttananccaacaataancccgggggtaaccttnattttcccaaattaaaaggttgggcccacattccattgggggaaactttccntngggaaggnaaaagggaaatttggtccaaacccaaacncnttgggggcnggcccccgggaacttttancggncccnaaccccaaantttccnaccncgggancccaacctttccggttttaacccaaag

SEQ ID NO: 3060 - DNA, 447 bp, Arabidopsis thaliana
  unsure at all n locations
  Clone ID: LIB22-013-Q1-E1-D6
gcaagacgcgtgggcaagttgcgaacatgtatctctggcctaagacccttgtagttccaatccttgaccctgcaaaggcgttcagaaggcctgttggaattgtccatgtgaaagttgtgagggctgtggggctgaggaaaaaagatctgatgggcggggcagatccattcgtgaaaatcaagctctctgaagataagattccttctaagaagacaacagttaaacacaagaatttgaatcctgaatggaatgaggagttcaaattctcggtcagagatccccagactcaggttctagagttcagtgtgtatgactgggaacaggttgggaatcccganaagatgggtatgaatgtatnactctgaaagaatggtgcctgacgaacataaagcatcaccttggaactgcntaanactctggacggcggtaaaatgggcaccccctgan

SEQ ID NO: 3061 - DNA, 474 bp, Arabidopsis thaliana
  unsure at all n locations
  Clone ID: LIB22-013-Q1-E1-B4
aacgtctagttgcccgtgccggtccanaaattnacgggtccacgcacgcgtccgtatcaanttccctatcaaagtgaatgactttcttctccaaaatcgatttctgaaacatcccatttcttgatttccctctttgtcgcaaacccaacaaagtagagcaaaaccctaaaacggaaaccttccatggcgattatctctgaggtagaagaagaaagcagtagcagccgacccatgatatttccctttagggcaacactcagttctgcaaacccattagggtttttggagaaagttttcgactttctcggagaacagagcgattttctcaagaaaccctccgcggaggacgagatcgtcgtcgcggttagggcggcgaaggagaagttgaaaaaggctgagaagaagaaagctganaaggaaattttgaaccccgtgganaanaanncnaagaaggaaattgttaacctgttgnaa

SEQ ID NO: 3062 - DNA, 491 bp, Arabidopsis thaliana
  unsure at all n locations
  Clone ID: LIB22-012-Q1-E1-H10
ggcgntcggtagcgcgcaaaaatcccggggccncccaagcntncgnaanaaacctnctttcnanacaanacaaaactatatataaagatcatacatgtaataacgtcctgcaactattacaatcattctcgctttgaattaacgtggacgtcattgtttttggattgttaatcaaaggcggcgttacttttttttaatataattgtttctttaggatctttgtctctggaaaatgaaggaagacgcaggaaaccctttgcatctcacgtcactgaaccatgtctctgtcttgtgccgatccgtcgacgaatctatgaatttttaccaaaaggtgttagggttcatcccgatacgaagacctgaatccttaaattttgaaggcgcttggttgtttggtcacgggattgggaatacacctccctgtgtgccccagaaccagagaaacttccaaagaaaactgcgantaatcccaanggttaacacatctcttc

SEQ ID NO: 3063 - DNA, 448 bp, Arabidopsis thaliana
  Clone ID: LIB22-012-Q1-E1-H12
gcaaagacttaagtaagtcaaacagaaaaaaatggatctcttattgattatagccggtttagtagcggctgcagccttctttttcctccgtagcacgaccaagaaatctctccggttacctccgggaccaaaaggtcttcctattataggaaaccttcaccagatggagaaattcaacccccaacacttccttttccgtctctccaagctatacggcccgattttcacgatgaaaatcggtggccgtcgcctcgcggtgatctcctcggccgagctagccaaggagctactcaaaactcaagacctcaacttcaccgctcgtcctctcttgaaagggcaacaaaccatgtcgtatcaagggcgtgagcttggtttcggacagtacaccgcgtactaaccgttagatgaggaagatgtgtatggggaaactcctcagcccgaaccgtgt

SEQ ID NO: 3064 - DNA, 458 bp, Arabidopsis thaliana
  unsure at all n locations
  Clone ID: LIB22-012-Q1-E1-H3
ggnctttttcactcccacacgttctgctccagcgatactgtgagagaatctctgtgtggttctgaattcttaggctggaattgaattctgaaatggcggaggagtacaaggaagcgttgttggagaagcagaactatcacgacggatgtcccggctgtaangtggagcagatgaagcagctccggcgaggatatccttacctcgagctttccttcgtttgggattatccgtcctctccaacttctctaacaatttcctcaactcctatcccttcctcctaactaatatgaattganggattttggtgtcccaaananggngaaaganantgggttttaagctggttttgttggttgcncctttatgcntgggaaaacactgaattcngtgttccggggaantgtggctgattgttaaggnagaaaacccattatactcctgggaactatctcaattgc

SEQ ID NO: 3065 - DNA, 457 bp, Arabidopsis thaliana
  unsure at all n locations
  Clone ID: LIB22-012-Q1-E1-H4
nnttgtttaagtaggtangattcaaggccatgacaacagaatatcaacctagctagtttgatatattctgatgaaattagtttgcctagcnnnnnnnnnnnnnnnnnnnnnnnnnnnnnnnnnnnnnnnnnnnnnnnnnnnnnnnnnnnnnnnnnnnnnnnnnnnnnnnnnnnnnnnnnnnnnnnnnnnnnnnnnnnnnnnnnnnnnnnnnnnnnnnnnnnnnnnnnnctaatttaantttggtgaagtgangccttaatggtttgaagccttgacaagatngagagtancaaaaagaaaccatggatgcctttgacgtaatatnatgattagaaagggtcactcnatatgttaaaanaccaaagacctggaaaccggtttaaaattggnttttggnnttggttccggcaaantcnagcncttgaatgtnaatncctacctttttanggtcccctta

SEQ ID NO: 3066 - DNA, 442 bp, Arabidopsis thaliana
  unsure at all n locations
  Clone ID: LIB22-012-Q1-E1-H8
gnaagagtcttgcttcagttgaatcaaagattggtcctttttttttcgttttctctttcctgcttttttttgtttgtagtttctgatctctcaggaaggctttttataaatttgccctcaatttctccgtccctactactctttttgatcaatttctacgggaaaaagcaccaatctttaaacccgggcatgtccttgtaatcgagtatgttgtgtaagtgatgaatttgtggtgagatctggtgagaagtttcctcttttttctcanattgcggtaaaaaaaaagagtttttaataaggaagagattgagattagattttatcgcttttgtttgtgtgatatgggtaacgtgaacgcgagagaagaagcgaatagtaacaacgcttctgctgttgaagacgaagacgctgagattgttctcgtgaagctatgtctgctgcn

SEQ ID NO: 3067 - DNA, 435 bp, Arabidopsis thaliana
  unsure at all n locations
  Clone ID: LIB22-013-Q1-E1-A11
gccaaaccctaataatctagtggcaagtacaaccttctactctgaaagtacaggagccattctctgtttggcaagaatagaaacagacccagcggacagaacccaattgcgaatgacagtaggcacgggagatcctacccttacatttgagttgaaagaatttatcaaggaacaactaattactgtcccaatgggatctcgagctttagttccagcagcaggtccagcaccacctgtagctcaaccgccaagcccagcggctttagctgatgatccaggagctatgctcgctggcttactttaaattcattgggccttcgtgttgagagagtctaatctaagtcataacggggggaaattgcaaaaacacatcccaaacgcatagcatttcacttgtaaaaacctgaactaatttgangtgatatattctagaga

SEQ ID NO: 3068 - DNA, 518 bp, Arabidopsis thaliana
  unsure at all n locations
  Clone ID: LIB22-013-Q1-E1-A4
ctgtctngcttgcccgtgccgtccanaatcaagggnccncccacgcgtccggnaataaaagaaaagtgagtttgntgnttgtatcgatnanaaaatggngacgtcgatgatacagaggatgttcaagcaagggacgaagatcgtctgcgtcggccgtaactacgccgctcangccaaagaactaggcaacgccgtccccaaggaaccagttatattcttgaagccaacatcatcatacttagaaaatggaggaacaattgagatnccacatcctttggattcacttcaccatgaagtagaactcgctttagtgattggacagaaagctagagatgtacctgaatcaatagccatggattacattggaggatatgccgttgctcctgatatgactgctaaggaactccaagcttctgctaaagnatctgggtctcccaagggccggttgcgaaangncaagataccntcaatccctaacanctcctgttctgccaaaaggngatggtgccttattccca

SEQ ID NO: 3069 - DNA, 475 bp, Arabidopsis thaliana
  unsure at all n locations
  Clone ID: LIB22-013-Q1-E1-A5
ggaattaagagagcaaaatgagcataaataggaatctgttgaatatcataataatcctttgtatatgtctcaatttgggttgtaacgatggagctcaagaaagagagactgattctcatactatccaagtcagctctctcctcccttcatcatcatcatcttgtgttctttctcccagagcgtctactacaaagtcttcactgcacgtgacgcatagacacggcacgtgttcgcgtctaaacaatggcaaggccacgagtccagaccatgtcgagatcctaagactcgaccaggctcgcgtaaactcaatccactcaaaactatcgaagaaactcgcaacaagattaacgtcagttgaaaagcaagntcaacgggattctaaccgggctaaaagacnggaagcacactccgggttcaaggtaactacatccgttgacggtccnggcctccggggacaacaaaggaacgattntaa

SEQ ID NO: 3070 - DNA, 459 bp, Arabidopsis thaliana
  unsure at all n locations
  Clone ID: LIB22-013-Q1-E1-A6
ggctttcttcaccattcaggatcagagattcgtgacctgagaagacactcaatatgagtaagcttcagagtgaggctgttagagaagccataacgactatcaagggaaaatctgaggagaagaagcgtaactttgttgagacagtggagcttcagattggtctgaagaactatgacccacaaaaggataagcgtttcagtggatctgtgaagctcccacatattcctcgcccaaaaatgaagatctgtatgcttggagatgctcagcatgttgaggaggcagagaaaatgggacttagtaacatggatgttgaggctttgaaaaagcttaacaagaacaagaagccttgttaagaaancttgctaaagtcctaacaagccttccttggnnttctgagtccgtcaattaancaaantcctcctccttccttggncccggtccttaacaaaggnaaggaaa

SEQ ID NO: 3071 - DNA, 440 bp, Arabidopsis thaliana
  unsure at all n locations
  Clone ID: LIB22-013-Q1-E1-A7
gatgaacatcccatcgaagaagatcgtaccggtaccgacaccgagtgagaaagttgtctctttggtatctcgaaccggacgagatctccaacgttacaacaccgcagggtatcgtcaagtcgtcggatgtgtaccatatagatacaagaaacacggaggaggagaaattgaagtgcttttgataagtgcacagaagaaagggaaaggaatgttattaccaaaaggaggttgggagattgatgaatcaatagaagaagctgctttaagagagacaattgaagaagctggtgttacgggtcagcttgaagaatcacttgggaaatggcaatacanaagcaaaagacatactatgaatccatgatggtcaataatgtttcccttgccttggtaatcagcaatttgagataagggcctgaatcctgaantcaagacaacgcaaa

SEQ ID NO: 3072 - DNA, 453 bp, Arabidopsis thaliana
  unsure at all n locations
  Clone ID: LIB22-013-Q1-E1-A8
gctttctctctatctctctctatctctctcatttcttcctgcgtcaatggcgactcaaggtcaggttatcacttgcaaagctgcggtggcttacgagccgaacaagcctctggtcatcgaagatgtgcaagtggctccacctcaagctggtgaggttcggatcaagatcctctacactgctctttgtcacaccgacgcttacacttggagcggcaaggatcctgaaggtctctttccttgtattctaggtcatgaggctgctgggattgttgagagtgttggtgaaggagtaactgaagttcaagctggagatcatgttatcccttgttatcaagctgantgtcgtgaatgcaaagttttgcaaatctgggaagactaacctttgtggcaaagntganatntgcnactggtgttgggaataangatgaattgaccgtaantcaaggttcccgt

SEQ ID NO: 3073 - DNA, 517 bp, Arabidopsis thaliana
  unsure at all n locations
  Clone ID: LIB22-013-Q1-E1-B1
gtgccgtccagaanttcaagggtccacccacgcgtccgcagaaaaccctaaacacagataaaccccaaaactcaaaaaccaaatctttccaacaatggcgtctcatctctttacccgatctcgaatctctctcctcaaaaccctaaaacccaatccttttacctcagcttcacccatcagagccatttccggtacaccattcctctctcaagatcctctgctcgcaaccgaatcaacagatcacgacccatcaaaccatcaatcaacctccacgccgcttccaccgaatccagcaacaggaagtcctctttaccaagagaattggcgtagtccgattccaaacactccttccttcaaacaaatctctagtttcaattaagggatttcnaatcaaggctcctggtcctcgtatcaagagctctctcctggagaagccnttganatngaaactcgcctngctngaataatgtttgccggantgggantgntttcgcaancggttgggnccggaaatgaa

SEQ ID NO: 3074 - DNA, 455 bp, Arabidopsis thaliana
  unsure at all n locations
  Clone ID: LIB22-013-Q1-E1-B2
cggntcagtgacttctgcaaaccgtctagacccattttttgtttatctctggacacagagatcgcaaattcttttttcttaaatggaaggttccatgaacaagcgaggatacgaatgcagtcaagaggatactgacaagctgccagaatcaaagagacaaaaagtgcctgctttagcaagtgttattgtggaagctgtcaaagtagatagtctgcagaggctttgctcgtctttggagccgttgtttcgcagaattgttagcgaagaagtggaacgagccttatcaaggttgggaaacgcaaagttaacctcgangtcaccaagaaccaaaagaggattcaagaccgcaatggaagaaacctgcaacttcactttaggacccaaatgctcctcacttatcacaaggcgggaaanttnaaggaaaaccaagntccggaaatcaagttggtcctaaa

SEQ ID NO: 3075 - DNA, 458 bp, Arabidopsis thaliana
  unsure at all n locations
  Clone ID: LIB22-012-Q1-E1-G9
aaaaatatcttcgttgaagtgagggtgacgagaagtttctgctttcatcaattaaaggtttacgcgtgaagcagatcatcagcaatggcggcgtcgcaagataagttggataagatgaaacttaggcaagattaccggaatttatggcactccgatctcatgggcaccgtcaccgccgacactccctattgctgcatctcgtgtctgtgtggaccttgtgtgtcatacatgcttcggagaagagcactttacaatgacatgtcaaggtatacttgctgtgctggatatatgccctgtagtggaaggtgtggagaaagcaaatgtcctcaacttttgccttgccactgaagtcctccctttgcttccggnaaactcctgttggnctccnacccgcttccttctgcaaggattgaaattcaacaatccaagaccaacaacaaatggcnaacaaatttgca

SEQ ID NO: 3076 - DNA, 475 bp, Arabidopsis thaliana
  unsure at all n locations
  Clone ID: LIB22-012-Q1-E1-F10
atcccggggccacccaagccttcngaaaagaatanaagacattcttcagaaatggagcgatgttgacgaaatggatctcattcttacacttggtggtactgggcttcactccaagagatgtaacacctgaagcaacgaaaaaggtgatcgagagagaaacacccggtctcctctttgttatgatgcaagagagcttaaagatcactccatttgcgatgctctcgcgctctgcggcaggaattagaggctcaacattgataatcaacatgcctggaaacccaaacgcagtggccgagtgtatggaggctctgttacctgcattgaaacacgcactgaagcagatcaaaggagacaagagagagaaacatccgaagcacatacctcacgcagaagccacctaccgactgatacatgggaacaaaagctataantcaancctatgagacggggaganaaagaaggaaaaggctgggtt

SEQ ID NO: 3077 - DNA, 496 bp, Arabidopsis thaliana
  unsure at all n locations
  Clone ID: LIB22-012-Q1-E1-F11
cttgccgntccctaccggtccanaaaatcccgggtcnacccacgcgtccggnnnnnnnnnnnnnnnnnnnnnnnnnnnnnnnnnnnnnnnnnnnnnnnnnnnnnnactaatcagcaccgtccatttttgtcatctaattctttcttacttggccgcaacttccaaccacatcacacactctttctattcccttatatattcccatctcaaaagttcttgnnnnnnnnnnnnnnnnnnnnnnnnnnnnnnnnnnnnnnnnnnnnnnnnnncgccaatcgcaactttcttgtctttcaatgggagagaaaggtttgaagcggtctggtgttgcggtggtggttgcattactagccatggttcatgtctctgtttcagttccgttcataatgcttcatgggatccaagctcaatgttccaaatgctaagggatgctaacttcaacacaagcttctcactaaactcctctggntctcctggctttgcttaaaaaattgga

SEQ ID NO: 3078 - DNA, 499 bp, Arabidopsis thaliana
  unsure at all n locations
  Clone ID: LIB22-012-Q1-E1-F12
ttgccgncccctaccggtccanaaatcccgggtcnacccacgcgtccggatttcgagaaagccttcgacattgcacagctcaatcctcacaaaaccttgttctttgacgacagtacccggaacatccaaaccgggaaagccgttggtctccatacagtcttggttggtaaatcagagaaaatagatggaagcgattacgcgttagaaagcattcacaacatgaaagaggcattccccgagttatggtcggaatccattatcaacaacaaagaaactgaaagaattgattacgcttcacagatctcgattgaaacttctgttcaagcttaactttatttagtactaaatatgatgatatttacatatcattgaatgtttcaataaaatatctatgtacctttttttgtcgtctatccatgtaccgtttatgggttgattccgtatttataagtctataaattgtattttaatcaaccctcctttggtcatatcaataaat

SEQ ID NO: 3079 - DNA, 451 bp, Arabidopsis thaliana
  unsure at all n locations
  Clone ID: LIB22-012-Q1-E1-F5
ganccggatctttaatgtccccatcatcctcgtttcatcggcttcagttgcagacgaggtcttcaggatccacgacatgaacatctcctctcgcggtgctgctgcgatcgangagtccctcgtgtttggatcttctggtgtcgtctacgctccctatggagattacttgaagttcgtgaagaagatcattgccactaagctgcttcgacctcaggtgttggagcggtcacgaggtcttcgtgctgaagagctacaacgactttacaacagaattcttgataaggcgaaagatgaatgagaacgttgagatnggtaaggaagcgacgatgctcaatgaacaacatcttctgtaggatgaacatgggaaaggagtttctcaaaagganaatggtgaagcanananaatcaaangctttggtggctgaatcataagccttggngaagaagattt

SEQ ID NO: 3080 - DNA, 439 bp, Arabidopsis thaliana
  unsure at all n locations
  Clone ID: LIB22-012-Q1-E1-F7
ccacgcggctacggtaccggtattaattcccggggcngcttcactctccaaatgcaaagagaggtctctgcgatttctgcaactcacccctgaaaccttcttaatttacttcaactgccgctatacctaaaaacttcatctttctcctctgagctatgataaggattgnagatttcactctcttcttctttatcttcgtcttctctccctcgttgcctctagctcaatctcagcttcccgatctcgacccacaagacaaagcttctttattgatattcagagtttcgattcacganctaaatcgaagcttatcgacatggtacggctcatcgtgttctaactggacaggtctaacttgtcagaatcccgaccgggaaaagttctctcctcaatttaatccggtcngaatctctccagtcaagattcaaccaacnccttg

SEQ ID NO: 3081 - DNA, 444 bp, Arabidopsis thaliana
  unsure at all n locations
  Clone ID: LIB22-012-Q1-E1-F8
gtaccggtanttatttcccgggtccnacccacgcgtcanaaacannnnnnnnnnnnnnnnnnnnnnnnnnnnnnnnnnnnnnnnnnnnnnnnnnnnnnnnnnnnaaaccaatcaggcagaggaggaaggtcgtttgatggtggtcgatcanctangcnggaaaacagacaatcaacaaaacacttggaagagcgaccanagtggtggatcanactggaaaaaaggttggggacaggattcaaacaatagcaaaccatccggttcgtctgctggtggttgtgctggaaactggcctacctgggatactaactcaaagaaagaaaccaatgacaaaccgggagacgatancaaatcagcttggggaaccagtaacgatnaggtgaataccgataacaacaatgacagttggnacaaaaagccaaacaatgatgtttggacangtgg

SEQ ID NO: 3082 - DNA, 488 bp, Arabidopsis thaliana
  unsure at all n locations
  Clone ID: LIB22-012-Q1-E1-F9
cttccttgccnctcctaccggtccacaaatcccgggtccacccacgcgtccgcaaatttctaactaaagcattcatagtctctcgaaagcctcttttcagaaccgaagctctttactttcgtccaccgggaaatatgccagtcgacgtagcctcaccggccggaaaaaccgtctgcgtcaccggagctggtggatacatcgcttcttggattgttaagatacttctcgagagaggttacacagtcaaaggaaccgtacggaatccagatgatccgaagaacacacatttgagagaactagaaggaggaaaggagagactgattctgtgcaaagcagatcttcaggactacgaggctcttaaggcggcgattgatggttgcgacggcgtctttcacacggnttctcctgtcaccgacgattcggaacaaaatggtggaaccgggcgtgaatggancaanttgtaataaagctgccgctgaggcaagtca

SEQ ID NO: 3083 - DNA, 552 bp, Arabidopsis thaliana
  unsure at all n locations
  Clone ID: LIB22-012-Q1-E1-G1
gggggnggaacttcctgccgnacntaccggtccaanattcccgggtcnncccacgcgtccganatcctttttatttctccctttactttttttataatcgcaaaaacaaatttcaatagttcttgtaagcgcaacgtgtaagtagagacatacacacatttgtagtgttttgtnntgtataataacatcatcgcatatagagaaaagaagttaagacgaccgtatatatcgttttgaaaaccgggtcggataaaaaaaaaccggtttctttaaccgagtcggcgcgcatggagctatgcaatcaaaacaatcacatcaccgccgtctcgggcgattccgttgaactgggaacccgacgggccgaaacctttgaaaangggacccacctgggaatgaanggtgaaaccgaatgggtgaaaagaatntaaggaaanaagggcggttgaaattttaaggaaggtgaaaaccttngaccaaatggggcaaagttacccnccgttgggctaaaaaggaaggaaggaaggattttaacngggtggaacctaaaccgga

SEQ ID NO: 3084 - DNA, 481 bp, Arabidopsis thaliana
  unsure at all n locations
  Clone ID: LIB22-012-Q1-E1-G10
ctanggtccacaatcccggggccncccangcntncgnanacgcctngggccctncngtcngangnnnnnnnnnnnnnnnnnnnnnnnnnnnnnnnnnnnnnnnnnnnnnnnnnnnnnnnnnnntctcatcgatcactctctccaagatctantcacgcatcgtcgggaagaattttcgcttccgacgacgtttctctcgtctgattttgtctccgaacatcctacctaatcgtattcggtgctggatttgaatccggtgaactgaatctgacaatttcgttcccggaggtgtttaaaaatggccgggatcttgaataaattgcggaatctagatgcatatcctaagatcaatgaagatttttacagccgtacattatccggcggagttatcactctcctctcctccgttgttaagttccntctcttcttctcccgagctccgtcttancctcatacagtcaccgagacgaagcttatagta

SEQ ID NO: 3085 - DNA, 488 bp, Arabidopsis thaliana
  unsure at all n locations
  Clone ID: LIB22-012-Q1-E1-G11
gcctgcncctaccggtccanaantcccgggtcnacccacgcgtccggagaaagagcttgaagttgaaactttgcttaaggcttctgcttacattttaggagccactggttcgagtataatgtacaagactgttcttgaggacggtacggttctcgcggttcgtcggttaggtgagaatggtttgagtcaacaacgccggtttaaagactttgaggcacatattcgagctattggtaaattggttcacccgaatttggtacgtcttcgtggattctattggggcaccgacgagaaattggtcatttacgattttgttcctaacggcagtctcgtcaacgcccgttacaggaaaggagggtcttcgccgtgccatttaccgtgggagactcggctcaagatagtaaaanggttggctcgtgggcttgcctaactccacgacaaagaaacatttgcacggtaacttnaaacctaataacataacccttggg

SEQ ID NO: 3086 - DNA, 510 bp, Arabidopsis thaliana
  unsure at all n locations
  Clone ID: LIB22-012-Q1-E1-G2
ggtgggnggaattccctgcnggncntaccggtctnanatcccgggtccacccacgcgtccgaacacgcgtccggccaattttagaaaacttctgacggaaaataaaaagagaggatttatttttatctttctgtgttaccggagaataaagacggtaccttttcactgttgangtaanggngaagatggcgactgttccggagataaagataatganaagcgagagcttaggtcatcggagtgacgtgtcgagcccggaagctaagctagggatgcgtgtggaanatcctgggatgancagaaaccacagctcagtcctaacgataagctcaacgcttgctttgaaaagcatccctgtcccctgctttccctctctcctcctgttcacaagataatgagataagatttagacacaagtttggctgaanctgttcanacactntcgaaattcaaggncctgaangcgcctgttgtagatgttgatgcgcctgaanatgccaatttggattg

SEQ ID NO: 3087 - DNA, 459 bp, Arabidopsis thaliana
  unsure at all n locations
  Clone ID: LIB22-012-Q1-E1-G5
gancacgcgtccgaaaaatccggtttacttatggactctaccgatatttcacgctaacggctggagctatccatggggaatcgccgccgtcggaggaactaacgtctgtttgcgtaaattcgacgcgccgttaatctaccgtttgatccgtgatcacggcgtcacacacatgtgtggagctccggtagtgctcaacatgttgtcggcgactaacgaatttcagccgttaaatcgtcctgtcaacatcttaaccgccggtgctccgcctccagcaaccgtactcctccgagcaagaatcaattggattccgtgataaagtcacggatacgggttaacgggaaaccgccgggattaaaacgtgtcaatgcgccttggaaaccacaattggaatcgtttaacgggcgaagcgatngaaccaaggtnaaaacacggnaaaggagtganaaacgtcggatttac

SEQ ID NO: 3088 - DNA, 447 bp, Arabidopsis thaliana
  unsure at all n locations
  Clone ID: LIB22-012-Q1-E1-G7
gatttcttctgctttcatggatgcttcaaatcccaattcttctagaaaatctaatgtctcttccttcgctcagtccagtcgaagcggtggtagaggaggaggatatgagagagataacgatcgacggagacctcagggtcgtggcgacggtggaggcggaaaggatagaatcgatgcacttggacgactcttgacgagaatattgcgacatatggctactgagctgagattgaacatgagaggtgatggttttgttaaagttgaagatttacttaacctgaatttgaaacttctgcaaatattcagttaaagtcacacacgaatgatgaaattaaagangntgttanaaaggacaataagcaacggtttantcccatcgatgaaaatggagaactcctgattcccgccaaacaaaggcaatcgattacganggttgagtcaaaagaa

SEQ ID NO: 3089 - DNA, 465 bp, Arabidopsis thaliana
  unsure at all n locations
  Clone ID: LIB22-012-Q1-E1-E9
ccggacntaccggtccacgaatcccggggtcnacccacgcgtccgnaantctctgtcttcgtctccnnnnnnnnnnnnnnnnnnnnnnnnnnnnnnnnnnnnnnnnnnnnnnnnnnnnnnnnnnnnnnnnnnnnnnngaaataaaaaatggctcacantaggactttcacttccagaaaccgtagcgtttctctctcaaacccatctttctccattgacggatttgacaactcaactgtgactttaggctacacgggtcctcttcgaacccagagaataagacctcctttagtgcaaatgagtggtcctattcactctactcgcagaacagaacctctcttctctccttctcctcaagaatctcctgattcctctctaacgttgatgttcaacctgaagatgattcgtcctcaaaaacgcaatccccttgagatcgggaaattagggagtgaatgttctaacnga

SEQ ID NO: 3090 - DNA, 591 bp, Arabidopsis thaliana
  unsure at all n locations
  Clone ID: LIB22-011-Q1-K1-E7
actnaatcggggggctccgctattagcggnngctaattggcaccgttcggacatcggcnacggcgcgctctatatcgcgttaactcatnagggccctctcnccttcnacgttacttcttgcccgattccgtcggatgngattccatcgaccattctacgaagacttccatagagagaggccatacgcctattataatantagatgggaaaccgcaagagataccaaggagaagtctcttcccgncgtcgccgatcatgagtangagacggaaattctanagattagtcnccntactgagaagaatcacgaaccatttgacgggtaagctactatgaccggcgtcgacagacctanacgtttanaactccgccntatttctgaccgcgggaacggaagtcgtcggaacttatgagatattcacnatctaactacgaacgcgacgcggacactaaggaaggactcgcttggnaataccgggttctaacggcggnattttcaccgcctctaaggaccgtcgantgcccgagttaaagaaaactataatntccgnttaagttantacggaaaaaccaaaggttgccgtntttatt

SEQ ID NO: 3091 - DNA, 665 bp, Arabidopsis thaliana
  unsure at all n locations
  Clone ID: LIB22-011-Q1-K1-E9
gctgactcctcctcgattccttcttctcaaactgactgcactcttccttctttcttctgctnnctgaaaattagggtttagggtttttgattttcgttctctattagtttctccccctcactctcatggcgatgaattttcaatttatgtgagattttattccacaatcggaataattttcctggcaatggcgacgaccaatgctccacctgagctagcttcaggaaacccttgctgcctcgcttggcaagggaagtacataggaatgaagaagaggcgagatgcttttaaagaaggagtaactcttctccagaaggctatagaaaatgttaatgctgaaaaatccaatctcgagagaaaatttggggagatggcgactgacggagatactaaggaaaatggttcaactgtgaaagcatctttggagaaagaaatatctcgtttgaagtttgagatagtgtctttgcaacaaaaactggagcggaaccttaaagaaaaaagtgaagaaacaaagcttcttcaggatcaagcttctggtcgagaaaaggagatcaatgaactgagggatctccttaagaaagaaacattaagggcagatagttctgaagaagaaanggacatgctttaaggactgacaaggcaaagctctgatagtaaaagatgag

SEQ ID NO: 3092 - DNA, 706 bp, Arabidopsis thaliana
  unsure at all n locations
  Clone ID: LIB22-011-Q1-K1-F10
accggtccatattcccgggncttcccacgcgtccgcnaacgcgtccgttgatccgtcgtcttctctcagctctccatctccgtcttccaagttttactgtcaggtagaagaatccatgtcgatttacgtcgcgtcgcgacggctctccggcggaacaactgtgacggcgctgcgttatgccacctctctgagatcttattcgacctcgtttagggaggagagggacaccttcgggccgattcaagttccttccgataaattgtggggagcccagacgcagagatcgctgcagaacttcgaaatcggtggtgagcgcgagcgaatgcctgaaccaattgtccgcgcttttggcgtcttgaagaaatgcgctgccaaggttaacatggaatacggtcttgatccgacgattgggaaagcaattatgcaagctgctcaggaagtagctgagggaaagctcaatgatcatttcccccttgttgtctggcaaactggtagtgggactcagagtaatatgaatgctaatgaggtcattgctaatagagcagctgagattcttggtcgcaaacgtggtgagaaatgtgtgcacccaaatgaccatgtgaaccagatcacaatcttctaacgacactttttcctaccgtcatgcacattgcannntgcnaccgagattaatcgaggcttaatccctagtttaaaaactttgctt

SEQ ID NO: 3093 - DNA, 687 bp, Arabidopsis thaliana
  unsure at all n locations
  Clone ID: LIB22-011-Q1-K1-F3
aggggagnnaggacttcccgnccgaaaacccggtcngcccagcgtccgncaaacctttctccanaatagtaggtttgntgangccaatgagggtgttaaannaaaggggggaacangaatcgcaccagacatattttgctacaattcccttataattggcctttcaaaagctaaaagaaatggacgaagcaaggtcttttctggttgaaatggtcgagaacggattaaagcctaatgctttcacctatggggcttttatcagtggatatatagaggcaagtggaatttgcatctgcagataagtatgtggaaagagatgcgggaatgtggcgtacttccaaataangttctttgcacgggtttgatcaatgagtattgcaaaaaggggaaagtaatagaggcgtgttcagcatatagatccatggttggaccaanggatcctgggggatgctaaaacatacactgttcttatgaatggtctttttaaaaatgataaagtagatgatgcccgaggagattttccgcgaaatgcgtggggaaggtattgcacctgatgtattctcttatggggtctcattaatgggatttctaagtggggaaatatgccaaaagcttctaatatttttgatgaaanggttgaaaaaaggttgactncctaaggttatcatattccaaaatgttaccttg

SEQ ID NO: 3094 - DNA, 695 bp, Arabidopsis thaliana
  unsure at all n locations
  Clone ID: LIB22-011-Q1-K1-F5
ctggcttggaanctttgggctgnttntgtgcttggttaggnggaantctcggcggaatttgtagtggacatcgatgcgtnaaactgcctgctcgaacggggcacaggggtggaaagatcaactgattactcagcagtcggcctttcttgaagccctttctaggacagtcggagtctggatgtgagcctcactgggcaaagttaacgaccagaggtaccgggggtgtaatgtttctgattcacctctaaatcccaaacaggcaggatgcgctggtcgtcccgccgagttgctatatggaactgagagtcttaagcgggttacccccggcaagtagaatcggtgacgtgggacgaattggaagttgggccatggcgtttaatcgtgtgtcaattcagaatttataaagggcgccggctgaccaagatagtaggatggcggctacggaagctgaaacttgtcaaggagcgcgcaataatctattcgttgaactaatcattttgaaaacggacggtgtcccaagtgtgtgattcacatttggttgctggggtaagaatttaggttccgacgagcanggaaggttgtggtggctgtccgtaaaaattcaaggtgttgagttttgggttggaattgggttgctggcgttaaactcccggcgggcagcagttaaacnccttaaacgagaattcccgnaaggt

SEQ ID NO: 3095 - DNA, 679 bp, Arabidopsis thaliana
  unsure at all n locations
  Clone ID: LIB22-011-Q1-K1-F7
atctcctgttngccgcttggttggaacctttgggctgnttatgtgcttgagactcctccggttacgggatccccggctaggccgtcaaacgtcgggccttcgagataaatagtcccgccgtcgcaaaagcaacaaaaaattagtccgtacatcactagtaggtaccggccgaagcactcaccccgataatgtcaaataagaagcacgacttcgaggacaagaattacactgcctgtacacatgatcatcctccatactaaagctacccgcgtacacgtcccgaatcctcagatacgaactcgcacgagtctacaaagacaaactaacctagaggttcactaccaagtacagctaagtctcctctcaagtagactccatccggcccggtctccccgaaagacgtcggtacaacttaccgcgactcgaagttagagaacacctcctcgcgtgttagcgcgaagttaatcgaaaccaagacaaccgatcccggactagtgcgtacggaagacaaaatcggccactacacacctagagctgncatcatagactggttggaagctccatccnggcatttaacntatccttagncacccgatacgcgggttccccggtcggancggcggttnaattcggccntccggaaccggttatccncccnttaggagggctaaaaacccgg

SEQ ID NO: 3096 - DNA, 626 bp, Arabidopsis thaliana
  unsure at all n locations
  Clone ID: LIB22-011-Q1-K1-F8
ctccccgngactccttcaccctcgatgtcaaccngaacttngggtctcctaaaccgacnncnntatggactaaataaaccactcgagagcattgaccggcaagactcgagtcccatgtcacgaacncnccnanacntgctcctatggangattcaccacttcttagaaattgaacttgaacttgacctattgnaaatatagtnaagagtacgaatacttagagtaagaatacttanagtaactcgaactcnatgatcatngcggacggagtcctggcggctcgacgaaaatctcagttattagacttgaacttgcgaccgaaattcattgatgagactctgaagaacccggtataggcccgaagaaagagactgaggcggtctacggactgtccggcatggcgggatacgtgaccgacgagtccgggaatatggcgtcaaaaggcatggtcgagaccaccgtctaaggcaaggaatgaccccagttgtcggcaacgaactcgacctcctcgacaataacaccagctanagccccggctgctgngacagtcctagcctgaaattacacagctgccctgacgtctanaactncgtcgctaaggagactccaatatccatcgcgaagag

SEQ ID NO: 3097 - DNA, 407 bp, Arabidopsis thaliana
  unsure at all n locations
  Clone ID: LIB22-011-Q1-K1-F9
ggcaaacaacaaacttaaccccgaggatgtgattggtggaaccataactctgagtaacattggagcaattggtggtaaattcggatcccctcttttaaacttaccggaagttgcaatcatcgctcttggaagaatcgagaaagttccaaaattctcaaaagaaggaactgtctatcctgcatcgataatgatggttaacattgctgcggatcatagagttctagatggggcaacggtagctcggttttgctgccagtggaaagagtatgtcgagaaaccggagctgctgatgcttcaaatgagataagaaggaaaggttcatgtttatttgtgaatcattatgtatgaaaccttcatgttcgaataagatcaagaactgagctagcaaaaaannannanaanaaaaa

SEQ ID NO: 3098 - DNA, 692 bp, Arabidopsis thaliana
  unsure at all n locations
  Clone ID: LIB22-011-Q1-K1-G1
aggggggacgcaaggtancccgctttggcttggaacctttgggctgnattatgtgcttgtttccctacaattccgcaaattaccaagaggtcccgtctaaccataagaaagaagaaaaaacgtccgctgatgggaaatctgctcgtgctattggagttggtggtcataccgtcctccggactgccaagccatctccagagagaggtcatattgccagaggaattgcaaggaatttaatcgactttaagaataattactctagagagtcctaaggagttaaggaaagatctatctcctatagcgtagactcctctgatcatgaagtctctcgcgttataactgatggccgtgacggtgccccttatatcgttctcttgacgattgatgactttgagataacgccggagttggtggcgaatggagttaagcctgcgaccgatgtagtggtcaaagttaaggctaagtgtgcggcccctatgctactaaccggcgtagcccatacgaatttcaattgcgatatctaagttaccgccgatgaaaatcgtcggaacgactccgaccctcgtaaaaatatcaagaaccggnaccgtcattggaagacgccggtggaataactggtacgggaaatgggtaaagtaaaangcgcggatccagcggcgtcaaacttggcccgggctccggataatggccta

SEQ ID NO: 3099 - DNA, 652 bp, Arabidopsis thaliana
  unsure at all n locations
  Clone ID: LIB22-011-Q1-K1-E6
ntgtgcttggaaaagctccgcctgcccttagagtntcagaatagataagagaagtctggaaaacctctggntcggaactcgcatatgccgcgcctgatgaaccgacctagagagtcctcccccgtaccgtcctctttaatagtattattgtcccgttctggctcgccttggcattggtgttggccgccctcctcgacgagaccttccctaagctaaaggaaaccactctgtgcgatgacatgcccgcgaagaaagtcaaactcctgccccacagcgacgggccgccagtcttcagcaagttttaggcctcggacctaatatcctactaggtcaagaatgccgtaggtaacgacggggagaagccgagctctacaaaatccgtcagcccgaccgaggcactcgttaagaaagtcatctaagatcaaacccgtagtataggtcgacggactagtctgaacggtccttggacctctcaggtaagccactgagctccgctaggtcagactcgctcgagaaccgcactacggcatcattggtaattacaggagggtccaccctcccgatgaggtccgacccgtacctgaacagaaccggctaatctttcgagctcacaggagacccgtcaatccggctaattcgaactccancggaa

SEQ ID NO: 3100 - DNA, 679 bp, Arabidopsis thaliana
  unsure at all n locations
  Clone ID: LIB22-011-Q1-K1-D11
gctgnnnnnnnnnnnnnnnnnnnnnnnnnnnnnnnnnnctctgtagaagaagcacatgaatnggtctggttttatgatagctttctcttaagaagaagaagaagaaagataaattaaaagggtggttctgagttttaaggattattgtttgannnnnnnnnnnnnnnnnnnnnnnnnnnnnnnnnnnnnnnnnnnnnnttatctgattgctctaatgaatatgagaagctcgttgttcggatgaacatgcccagggtcgtaattgacaatggagtttgccctaattcaactgtcgtcaagattgatagtgcaagaagcccaggaatattgcttgaatctgtacaacttctcactgatatgaatctctggatcaaaaaagcttacatttcctctgatggaaaatggaatatggatgtttttcatgtgagcgatcttaacggagacaaattaaccgacgagaacctaatccgttacattgaaaagtctattgaaaccgtctcattactgtaaaacggaagggtatacgggtttaacccgctctagagttaacccggaaccagaccagagtccggtttactctcaaaaggttttccccggntctagctgatccttgnatggtgatggtggttgaagcttaaggcatggaccccntaacgggcagggattgcctccnatgaat

SEQ ID NO: 3101 - DNA, 643 bp, Arabidopsis thaliana
  unsure at all n locations
  Clone ID: LIB22-011-Q1-K1-D3
gaacaatatcaatgtctttcagatcatgccatctcgttcacataatgcacctggtgacctaagttatgagtgggaatcttctcatgtgcatctcttcaaactgcatagagggatcacttcagctattgtccaggacatttgctttagtcagcagagtcagtgggttgctattatttcatccaagggtacttgccatatatttgttttaaactcttctggtagcgacgctgcgtttcaaccttgcgagggtgaggagcctacccgactaccagcttcatccttgccatggtggtttactcaatcgttgtcaagtaatcagcagtctttatcgccaccaacaagctgttgccctttctgttgtaagcagaataaagtatagcagttttgggtggcttaacacagtaagcaatgctactactgctgctactggaaaagtttttgtaccatcangtgcccgtggctgctgtttttcataaatctgtcactcatgaccctttaactgaactnccggactaacgcnttggagcatatcttagtctatactncatcaggccatgtgggngcancattgaacttntgccattaagtttggcncagaattnaccctggaaaatgggtttngaaaagtgcaaaaaaacattcc

SEQ ID NO: 3102 - DNA, 662 bp, Arabidopsis thaliana
  unsure at all n locations
  Clone ID: LIB22-011-Q1-K1-D5
actnggtccgaacttgggtgnttagtgcttggggagtcctgttggngnctacatgctgctgctgctcccagcactcgcactgctaaggangccgncgaagctccctacngacgccggtctagatctgtatcctttcacttagaactctttccacggcgctcctaaattggaactgaatctaatcttctgcttcgttgctgtcactggtgacccggcctcggattctcttgtcactctcgaagtcgggtcccctgacggctcgacttccaaggatgtagaccgtccctcctagttcaacccgaacaagcctccggttacgggatggttcgtgcggaaggaagtgtgcctcatgtcgtaaagaactccgctactcaacgaattcactccgtgagataacgacgccccgaggagaaaactaccttactagacgagcaaagcggaaacgaccgccttcacggcgaccggggatcacatagatcctcccgtactcacgtactatgtgaagaatcgtggatccacgccttgcgggttcganaacgtgacaatttaaaccggcccttgtcctttacgtacactacggatnggtactactcacggtactctccgggatcgataccacctganttaanaggtagggttacntatanggaaatccccgatta

SEQ ID NO: 3103 - DNA, 684 bp, Arabidopsis thaliana
  unsure at all n locations
  Clone ID: LIB22-011-Q1-K1-D6
cncttggcttggaacctttgggctgnttntgtgcttgntatatattaaaaaaaatntnagattccaaaaaaacaaaaacggccgacacggaccggaagaggaagacggcactactagacccattaaatctattcaagtccctcctaaagtcctatgcaatcaccttactattgcctaaaactgctttcgccctactcttgactctacgcctagtattcgtctcccgtctcgtccatgagtcccattcctgctctttcgagtcaagaaagtctcggctactctgcgaccccttctaacggatactagagttgacctctaaattagtctcctaagtcccggagactagccctagaccagcccctgttgcccgcctcgacatcagattgcatactaattattgcgaacggaattggaggtcagacctctctactatgaagtagacttagtccgcagtagtgactcgtgaagacgaagaagaagaaggcacactagtggagtcttggctggtggcggatggagcctgccgagcccggcatttgtantcagtcatgcggaagagactanangtcccggggaaagaagatncacaccttgactgacattgaagacggaactngcgcnagcatattgtccnggatctgggggaattaaaataccggttnggaaaatttaaacnccttggct

SEQ ID NO: 3104 - DNA, 710 bp, Arabidopsis thaliana
  unsure at all n locations
  Clone ID: LIB22-011-Q1-K1-D8
ccaccgncaccggggggggggngaagcagctctggcttggaanctttgggctgnnttatgtgcttgtgtagtcggcgnaacatagtcttagggacattgtgctccggagccttggtgctgaacgnngggctanaagtcccatatggngcagttcatgttggcttaggaacttggcccaatggaatggccaaagtcgtcattagtcccttctaagctactccgattgtcgtcctacctgatcttcacgaacggccttgtaccgtctaagccacaggaaaggaagtaagaggagcgcataatgtagggtaagtgaacggaacgataccccgggtattaaataccaatacacccagagacttatggcggggaagaggttaagaaatctttggtgaggacttgacgacgattggaatccatgtggcggtccatgccagaggatcataaggcgatctccccgatggctggaaaatatctcttaactactcttaagttcntgtccgccgcaagtaccccatagtgcatgactccgactgccggaagggcaccatctgtcatgctcctaacgtctaagcgagcccggtcgatccggtggagatgcattaattattgcctaagaaacgtacagaagaaggctgattagcggtactacgcgcgtccacattgagctaatggtaccttcctccgtgtcgatttgaactccccgatctgaa

SEQ ID NO: 3105 - DNA, 731 bp, Arabidopsis thaliana
  unsure at all n locations
  Clone ID: LIB22-011-Q1-K1-D9
cgcaaggntcgacggtggggcatttctgaggaaatacagaggaaaacgagtcatgttcgtcggngactcactgagtttaaacatgtgggaatcgttggcctgtatgatccatgcgtcggtaccaaacgccaagaccacttttctcaagcgtaccccactctctactctcactttccaggaatatggagtaacgttatatctatatagaacaccatacatagtagatatatccaaagagagagttgggcgtgtgcttaaccttggagctattgaaggaggtgctgatgcttggaaaaacatggacgttcttgtcttcaactcttggcattggtggactcacaaaggccaatctcaagggtgggattatattagagatgggtcgtctttggtgagagacatgaaccgtcttgacgctttctacaaaggactcagtacttgggctcgatgggttgatcaaaacgtcgataccggncaaaactcgagttttctttccaaggcatttcttccacttcattaccaaggggaaaggggaatnggaaccgagccccanggnaagaactttgtaantgggggccaaaatggcaanccccntttggggttggggaatccaaaggtttancccccaaagtggggtccaaanccctttccaattcccnttaaagggaaattnnntggggncccaaaaaaggggggtttngaaanttttccnnattggnaaaaaaaaaggcccc

SEQ ID NO: 3106 - DNA, 690 bp, Arabidopsis thaliana
  unsure at all n locations
  Clone ID: LIB22-011-Q1-K1-E1
aactctttncagtttccaccggtccaaaattcccgggtnnacccacgcgtncgagccctttctcttttctctctctctctatatattgctaaacaaaaccctacttattctaaaaatggaagccacgatcttcgagaaaagaagaagctcgttatcaagcatagcggtgcacaaacagtcatactcgataaccaaatcaaagccaaagatccgtataattcacatatttgctccggagatcatcaagaccgacgttgccaacttccgtgagctcgtccaaagcctcaccggcaaaccagacgaccagagaacttccaaggcaaaacctagaagagatatgcatcgtcttcatcgtcaagtccaagacatgatcaacacggagaaactaagagaacccgagcattgtgatcaagagttctgcttaaacgcagaagagctctcgatgacttggaacggtaataatggcgctggtgaaagctctggagggttcttgaatggtttgggagatttcgaagggtttattcaagaacttggtgaatttccttatttgcccttgtccttccattgatgcttctgcttcttctaacttctcttcttnctctcatttacatggtggatcaagttttctcaagatcaattcgcttaacttgggcttnttaaaaggatgtgtacctttttcatctttttatt

SEQ ID NO: 3107 - DNA, 700 bp, Arabidopsis thaliana
  unsure at all n locations
  Clone ID: LIB22-011-Q1-K1-E10
gctnaataattctccggggcttnnccanccgctccgaatccgcccctgnngcntattatgagtcanttgntccccttnnttgntaaacntccanaggggggattctaaacctttntcanttctcctggtggtctcttcantgcaccatggctatttacgatgtggttcagcttgtgagagctgatgtttcgacgattgctcttggcattgctgcatcaacagcttcgattattcttggtgcgggaactaaaggcaagcgctttgctatgcccaacacgaggataatgattcatcaacctcttggaggtgcaagcggtcaagctatagatgttgagattcaagctaaggaagttatgcataacangaacaatgtcaccagcattatcgcgggatgtactagtcgatcgtttgagcaggttctgaaagatattgatagggaccggtacatgtctccaattgaagcagttgagtatggtttaattgatggagttattgatggagacagcattattcctcttgaacctgttcctgatagagtgaaacccgagagtaaactacgaggagattagcaaggatcccatgaaattcttggcttccgagatcctgatgatgagactactaaagcccaactcgtctagaagcnnggatcttcaaatggggcttanactagccgttccaggaaaactcaatttcttctgcg

SEQ ID NO: 3108 - DNA, 683 bp, Arabidopsis thaliana
  unsure at all n locations
  Clone ID: LIB22-011-Q1-K1-E5
gcagcttggttngaactttgggctgnttngtgcttgtcctntcatgatctcacggtaagcacaaagtcaaggccccgccgctcgtgcccgacgnatgctanggataagaagacggacatcacgccgccgccggagggaccatcttcatcttctccggagaaggtaagagcatcattatcgcccggatcccgttaagttccaggtgtccattctgacaagaaggccgccatccgctcctgttaattgctataaggatttattcccggaactaaaggaggcgtagtcggcggcgggcacagctaggcgaccttcacggacgagcctaactcctactctatcggagacacctatgtgaccattgtccttaataattctccatcgtcgtaactgatatctggaccccttacgagatgctctaacttgataaggtctcccccaacaggtcgcgtttcttgaacaaagaagggaagtgcagccctagcgataccacgcctangagaccgataaagtcccgggacacttaanantagcttcgaggagtccatcnttgaggagacaaagaagcccgttangtccggacaccgantttcgtcctcactatcccggaagaanaacggacggacggcnaaggactggctnccgaggaagaacatcaccggctagggntcgaaggaaaaggggac

SEQ ID NO: 3109 - DNA, 610 bp, Arabidopsis thaliana
  unsure at all n locations
  Clone ID: LIB22-011-Q1-K1-D1
ccagtttncaccggtccgaaattcccgggcttcttcttattttatcatagctaagctcaaaaacaatcgatagatggagaagaagaagagcatgttcgttgaacagagcttcccggagcatgaaattggcgatactaacaaaaactttgacgaggatggccgcgacaaaagaactgggacatggatgaccgggagtgcacacataataacggccgtgatagggtcgggagtgttgtctttggcgtgggcaatcgcacaacttggatgggtggcaggacccgccgtactaatggctttttctttcataacatattttacatcaaccatgcttgccgattgttaccgttcccctgaccctgttaccggcaaacgcaactacacctacatggaagttgtcccgatcctatctaggaggaagaaaagtgcaattatgtggattggctcaatacgggaatctgattgggataacaatcggnttcccaatcacagcttnaattagcatggtggcagtgaaaaagtcnaattggttccccaaaatgggcataatggtaaatgggcccctttaaacacttcctttatgancatatttggaatcttccaantattctta

SEQ ID NO: 3110 - DNA, 659 bp, Arabidopsis thaliana
  unsure at all n locations
  Clone ID: LIB22-011-Q1-K1-B8
cgtnagcaccttggcttggaanctttgggctgcnttatgtgcttgtcgagcgaaaaagtccactgtggtgaccagcctttggtgaagaagaagaagagagacnggaaaacggtgatcaacggactcgtcagtctagtgtagtctctctagaaggaagtcgacgctaggacgacgcgcgttgtcgaggcctactccggaattaagaaccgtaaccattagacggagtgccatgctcctaagagatgtaatgacggcacccatactcctaattccggtaaaatacgggaaaagtcttagacggtcgtcagagccaccgccgttaccgagaatttataggatactactgcttagctagtcaggtttcacggatagagagtcgcgccgaagcccgtctagcatatcggagttaacgttaccgtcggaagatatatcttcggcattcctattaactagacgtagatacttcctagcgaattaaggtcgccgacctccatcggtttaagaatcgattattattcactaaggaaggcgtcccgggaaataccttaactaccgnccctcgcgattanatctcctaacgagaaccggcggtaccggcacttantaatattagggaaagtatataccgggcgtcccctcggtcctcggtctgtacggnt

SEQ ID NO: 3111 - DNA, 660 bp, Arabidopsis thaliana
  unsure at all n locations
  Clone ID: LIB22-011-Q1-K1-B9
ttcttgctctcgatgggaaagctccaacatggatctcatgagtgcgagttgacctcgcgggggatcgtcgcaaacgggatctgcaacatctgcttcaaagatgaacctgttgaattcgcctgtgacccttgcaatttcgatctctgcaaagcttgctcagatcttccccagaaaatgtcacaccatcttcatccggagcaccctctagaatttcgtataggcgaagatgatcagaagactaaacacatggtgtgcgtcgtgtgcggaaacatgtcttctggagccaaatactattacgagtgtagcaagtgtgagatctacctcgatttgggctgtgcacttcagaagaacatagcgacgagttgggaagccaaagaaatgctccattacagccatgaacacttacttaaaaggtgtaggccaggaccagattccaaagactcttgccttctctgtgagcaacctctctccttcactgcaatatgttacggttgcgttcattggtacttgntttttcacgagcgttgccttgatctaccaacccgagattcaacatccgtgcattctatgcaccctntnaaacgccttaattatatcaaacttttgacngtgagaaatcttgtaatgcctgtcacgggcaatttgtggtgtccatttggt

SEQ ID NO: 3112 - DNA, 610 bp, Arabidopsis thaliana
  unsure at all n locations
  Clone ID: LIB22-011-Q1-K1-C1
tggttgnacctttgggctgnttatgtgcttgcgtcctccgaagagctttagagccctaaagctataagtactagtctctcgtacttccgagaagaagattcacaatataagcccgaacagcaagactatcccaccatactcacggacttcgagatccacagggtagcggccacgggcaaggcctaagagcccgaaaaggccacggaggagaacgaaaccttcgcctccgactaggctatcccctaggggaacatgacctcgtactccgtagtcacccacggctacgattattcagcgtggtgcacttccgttcacgagtcaaatacctccagaaaccggaaatgcggtccaaaccgtaatcctgctttaagccctctctaccactagatctccccggcgagatgaaatcataagggagattccgtctcttacgcantaatcgtcgtaggatataagccgacagccggttcctccaccgaccgttcaaagtaagcccttgtaagacacaatcacggggaacggactanaataaacggcaaaccggaaatacccctagaagccctnattacggagggnactcggaccggatccccttcgnaagggaaatttc

SEQ ID NO: 3113 - DNA, 666 bp, Arabidopsis thaliana
  unsure at all n locations
  Clone ID: LIB22-011-Q1-K1-C10
gcgtttgttcccaaatcatcaaaccctaattttctgttaatttcaattagcttagttcgtcgggctccagagaagtcgaaatgatgggctcagagaatgccgatggattcgaagaaactaatctcaatgcgcaaagggatgatatggagaatctcgacctaggagtagatggtggtgaccatcctctgaagataagcgatgtcaacggtgatacatcgaactctggttaccgtagcgccatgtcaacactctncaacgtccgtgacccgctctcgccgccaccgaccgttatgattccagctgattctgatccactccttgcgccatcctcctacgaagatttccgcagcagcttcagctctaagccgatcagcagcgataactcctacatcgagcctccgtcgtatgcagatgttatcttcagtccctttgatgagaactcagatagcgagattaacggtaccgaggataatagccttcatagtcaattctcagattcactatcgagatctcttcttcttcaagctctgattacatcaagatcactgnatctaaccctnagaaagagcaggagatttcaaattccattggtggaggaaacacttacattacctaccaaattcgaccagaacgaatttcctgcttttggcgggccatcggagttta

SEQ ID NO: 3114 - DNA, 718 bp, Arabidopsis thaliana
  unsure at all n locations
  Clone ID: LIB22-011-Q1-K1-C5
acgccncccgttggttngaanctttgggctgcnttatgtgcttgtaaagagccacgaatcctcgtgtagtagtcaaattctaatgcggaagtagcacccgttttacnacgaaatctaaaaagagcggaaactatatcccggtaaaagacgggaaatacccgtatagaggaaataagttcatgatttctcagtgacctcagtattcggttaaagaacaccttaaaagataataggaaaaccactctttacttaatctgtaaagctaaaggtaataggaagcttctaaaggcattaccatgtactaacatcgttgaaattcagaatcgcacaaaagcccttcgcgcttgcttccgcaattgtctaggtcaggtagtaagaaagcgaaaaacctccctccccccgccctccccggcgaataataaaccccatagctcgaaatagaccgggataaccgcacaggactcttacaaaaacttcatgtagcgctaccaaaaaaaaaaaaaaaaaagggtggntgtctcanaggacttaagtccatgcatgtgcgtaccgttgaaggtncaatcccccccacaggggtattcnaacctaaccnatccgggttgcngnccccattaatgcnnnngatccggggaaaaattttcgggtgcccattttaatcccaaactgttcccggnagnaatacctttttnccccngtttaanccgggtgcaaacaa

SEQ ID NO: 3115 - DNA, 661 bp, Arabidopsis thaliana
  unsure at all n locations
  Clone ID: LIB22-011-Q1-K1-C6
ttgggctgnttatgtgcttgtctcgtatatcaaaacaaccgcattgatctctctctctctctctcttgcaataaaangggggttaacggtaaaatancantctcccgcatcttctctaactcttcactctccactatcggagtctatggtggttattgtagttctatagattggagtccttaaaaaagttacaaatcctacttaactcctccgtaaaattattatacatttcgttccacgcgcttatctatctcttgctcatgtaaatgatacttaaataagtttcaaatgcccagtcgagattgtcacagttgcgatatcaagttgagtttaacttatgaagtctcctgctctgtgctcaatatgcacgaagggctccaagaagtgtgaggctgaagttactaaagaccgtgctgaggagacgaatgacattgccgattgcccgattaaactcgcctaagatcgaagccgcgcgggagcgttaaagactaagattagcccgtgcattatacgagcaacgtctagatccggatcancgtggtcccgatcgatgagaatatccgtcttgacgggcctctgggctgggccacggacgggaggactaagaatctggcctgggtcagactacgaatgcgggatacgaaattagtatgtccccgct

SEQ ID NO: 3116 - DNA, 636 bp, Arabidopsis thaliana
  unsure at all n locations
  Clone ID: LIB22-011-Q1-K1-C7
ccngggccctagagatggtcgacccctatacttataaagcacggtgatctaaactaggggggaanagaaagcccgcagtggacggcgcacctcatgtcgaaccgaacgaggcctctataagagagtcagtanaggacggccatctcggcgccgaggccagggccatcttaacgaggatcgagaccactactagagtcatctgcatctanaacgcctccggcgagaaggggaggagaaccagggaaccgatactctccgcttagaagagacctaagccttagccgatagcgccgagtctcacgtcgagaaggccaataatagaggctctcgcgttaccgtctantcgagctctcatgccataagtcctctggcggctccgtcgcctgtagggttcgccacggcgccccgagacccgccacggagagcggagtcaanggacgcgaggctactgcgagcggaaagtcntgcgtcgtatgcgtcaagcttacgaagcctaaggacggncattcgggcctactcggctaatttatccaaggaacatactgacgtcnancgaaatacgccccgtctanatanggggcgccgggaactaaggcgaaantacttccgatcgggatttcctggtaaactaggatt

SEQ ID NO: 3117 - DNA, 663 bp, Arabidopsis thaliana
  unsure at all n locations
  Clone ID: LIB22-011-Q1-K1-C8
tggttcgaancttgggctgnttgngtgcttggnaaagaggaggagaaatggtgtnanatgcggtggcgattgcggcgatcctggntgcgggcctnctngcngatgcggaggcggttgcggttgcgactgcggcttaagaggttgcggaagatgcggaggttgcgttctggaagaaatgaaacgggccttagcgattaatcaggctgctcagcggtcgataacaaaacaatgaagtcagagtagactcactcctacctctctttagcaaaggagcattaaactacagactactccgccggcttcatgccgaaagatgaggccacgaagactacgttcgcctacaaataaattanagtcggctaaaggatcagacctaaggttcccgccgccgccggcgacggaaacggctacgccggcccgggcgctaagcgcctcaaggaagccgtcatcgttaccagaggagtcaccacctccgtcaagtcactaacggccntngcgaagagaggccaccgggggaacaagaccgggaaattatatatccgcgttcccgcaaggccatcggcaaacgcgggctccgcatccgngaanaacggncntccgtccttnaaaaggcctccggcaccggncgtcgtccanggcccttcaaanaaggcctccctaaac

SEQ ID NO: 3118 - DNA, 673 bp, Arabidopsis thaliana
  unsure at all n locations
  Clone ID: LIB22-011-Q1-K1-B7
cncttggcttggaaactttgggctgnttntgtgcttgccttctcctctctagactatcggaagtctcatctgaccctctataacttgttacgaatctataagtccgctcctcctcctagaaatagtccaaagactcccgcaagtacttcgcagacggacctctcgtcggcccagccgacgagaagaacacacctgaacggagtgcaatcaccaccggattcttcgacatctctcacgaaggaggaccccctcacgttaccacgctacctttataaaatcacttcaacagtttattcatggcgtggcccatcctagacacccggtacttcaatgcccactttgacggttgtgcccgcacactcacctcatacttcttcggcgacgacttaagcggacacgagtccgtaagcgagtgccggatgttcgcctatatagccgagagcactacgccgagcaccacactaacgtctctcggctttaatgatgaactcttagtaaatgccgaggtcgtcaaagaacggagagagaagagagacgagcctaagaagaaagcgagttgccgcgctagaaagctctaagaaacggcccgactaaagaatatccctatatcntatattactcctcacggagcctaaaagtctacccactccactgaaaaaaaccttcccggaaa

SEQ ID NO: 3119 - DNA, 484 bp, Arabidopsis thaliana
  unsure at all n locations
  Clone ID: LIB22-010-Q1-E1-D5
ccggtcacggtntcccgggtcnacccacgcgtccggncattgtttgtggttgggctcctcaagttgaaatcctagcccataaagctgtgggaggattcgtatctcattgtggttggaactcgatattggagagtttgggtttcggcgttccaatcgccacgtggccgatgtacgcggaacaacaactaaacgcgttcacgatggtgaaggagcttggtttagccttggagatgcggttggattacgtgtcggaagatggagatatagtgaaagctgatgagatcgcaggaaccgttanatctttaatggacggtgtggatgtgccgaagagtaaagtgaaggagattgctgaggcgggaaaagaagctgtggacggtggatcttcgtttcttgcggttaaaagattcatcggtgacttgatcgacggcgtttcataagtaantanaaatgcgtcattttcatgtaattgggcatgtggcnacaa

SEQ ID NO: 3120 - DNA, 353 bp, Arabidopsis thaliana
  unsure at all n locations
  Clone ID: LIB22-010-Q1-E1-E1
gcntccggtccgcaggcacngggtnggcccacccgtcggccaaaacgtcngatcncttctttgtcaacatgaaaacatccaaaaagaaatcgaaacaaaaaacaaaagaaaattaggattggacaatggagctttcaaatttggcaaaagcaggattgttttaaattattttaatattgggttaacgtctttttttgtttgtttccctctattagctaagttttggtttagactttagatcgaattgtggagtttttagtttttgactttgtttacatcagcttttgtttnnnnnnnnnnnnnnnnnnnnnnnnnnnnnnnnnnnnnnnnnnnnnnnnnnnnnnnnnngggcg

SEQ ID NO: 3121 - DNA, 467 bp, Arabidopsis thaliana
  unsure at all n locations
  Clone ID: LIB22-010-Q1-E1-E10
ggtcgacccangcgtccgaaaatggatcagttcaaaggtgagcctcgtctacccaagttcgccgtccccaagcgctacgatctccgcctcaatcccgatctcatcgcctgcaccttcactggaactgtagccatcgatctcgacatagtcgccgatactcgtttcatcgttctcaacgcagctgatctctccgtcaacgatgcctccgtttccttcactcctccttcctcctctaaggcgcttgcagctccaaaagttgtcttgtttgaggaggatgagattctcgtgcttgagtttggtgagattcttccccatggagtgggagttctgaaacttggtttcaatgggagtactaaatgacaaaatgaagggattctacagaagtacttatgaacataacggtgagaagaanatatgggcanttacccattttgaacaanccggatgctaggaaatgctttcaangt

SEQ ID NO: 3122 - DNA, 499 bp, Arabidopsis thaliana
  unsure at all n locations
  Clone ID: LIB22-010-Q1-E1-E3
ctggngtncgcggtccgagtancccgggtngnccccacgcgtcngcaaaaaaacacatcganantanagatactacaaagtatacgacaacttctttttttgtttgtagtaataattatagccaaaaatagacaaacaaaatggagagaaagcctcttgaacttgngtcgacggataaccaccagaatccttcctccgccgtatacggtggctctgttacggcggttgactctgttgaagaagatgttcagaatcagaagaaagtcgtttatagaggctggaaagtcatgccctttattattggaaatgagacatttgagaagcttgggatcattggaacactatcaaaccttctggtttatttaactgcagtcttcaacctgaagagtantacagctgcaaccatcattaacgcctttagtggcacaattaatttcggaactttcgttgctgcttttctctgtgacacttacttcggtcgatacaagactctaantgt

SEQ ID NO: 3123 - DNA, 438 bp, Arabidopsis thaliana
  unsure at all n locations
  Clone ID: LIB22-010-Q1-E1-E4
naaagaaggcaggaaggtgaagcagccaatttaatttcgatggatgttgatgagccaactactaaagtgaagggtaaatcaaaagttggtgagccggagaaagcagaacttgggtctgaaaaatctgaagaattggccagggtaacttttattttgaagttgttgagtgatattgttctcatgtacctacatggtaccagtgtcatactgagacgggatacagaaatatctcaacttcgagggtccaatctacctgatgattcacctggaaatggagggttaatttaccatgtcattcatcgattgcttcctatatctctcgaaaagtttgttggacctgaagaatggaaggagaaactgtctgaaaaggcgtcctggtttccnggttgttttgtgcagtccttccaatgaanggcgtaaaagaataatcaatgagct

SEQ ID NO: 3124 - DNA, 437 bp, Arabidopsis thaliana
  unsure at all n locations
  Clone ID: LIB22-010-Q1-E1-E5
tncgaatcatcagaaaatggatttcgagcttagatcagcgaaagagaagcttgaaagagagcagagagagaggaagcaaagagcgaaactgaaactcgaacgcgagaagaaatcanaggaagctgcgattaagcaacgcgaagccattgaagctgctcaaagagctagaagacttgacgccatcgaagcccagattaaggctgatcaacatatgcaagagagtttagtatctggagatggaatagtgtttgaacgagtcttccaagctgtttcttttcaaggaaatggagataagattaaactaccaccatcatgttttactgagttgtctgatcaaggagctttcgataaaggtcctttgtattttgagctctctgttgttgaccatccggataatannnagacaacacattctggtgttcntgagtttatgctga

SEQ ID NO: 3125 - DNA, 416 bp, Arabidopsis thaliana
  unsure at all n locations
  Clone ID: LIB22-010-Q1-E1-E9
tgcttcatccaaggtcttgaagatgggtataaaagtttcatcaaagatcaaaagaattctcgcatccacagcttcaggtagttcaaatcccaaagatggtgctgacgtggatgtccgagaggaatatgcaaacgcctttcgtacggaatcatacaatcacttttggacacgtgtcgtacagctaagccgcaaaaagtccgcagtgtcttcttcttcttcttctccaccaatcgaatcatcctccacgtcagctcgtctcatgtcttatcgcctattcgcgcacaatcttctagacccggatctgaataccattactcggatactanatgtatcccgggtcgggcnaaacacccgaaactcttcncncngattacttcttggaaacggnaaangctttcttgctttgcacgcantta

SEQ ID NO: 3126 - DNA, 469 bp, Arabidopsis thaliana
  unsure at all n locations
  Clone ID: LIB22-010-Q1-E1-F1
accgggtcgacccagccttcggccaaancgtccgcggacgcgtgggcaagaagatatgttgcagcagcagattttacagcagttgatccagcgtcaggaccccacggggaggaatccgcagatgcaagctttgcttcagcagcagagactgaggcaacatcagcagatgcttcaatccatgtcaccctctcagagactccaacttcagcaacagcagcagctgagacagcagttacagcaacaaggaacccaacagattcctcctaatgtacgtccttatgaagttggcgtctgtgctcggaaattgatgatgtacttgtatcatctgcagcaacggcctgctgaaaattgcattacctattggaggaaatttgtggcagaatacttttcacctcgtgcaaagcagagattgtgcttgtcacaagtacaaaagtgctgggcaccatgcgcttggcatgttcccanaggc

SEQ ID NO: 3127 - DNA, 417 bp, Arabidopsis thaliana
  unsure at all n locations
  Clone ID: LIB22-010-Q1-E1-F12
gaggtatttgtgtttggatcctttacagaacatgaaactaggtcattttttgagcagaaacccactaaggatcctcagaattctaaagacaagtgtgtgggaagtattcaatttggctccttgaatcttgctgcggaaaattcttcagtaaatactaatggcgagttgaagaaaggtgaggctgatgggacagttaaatctgctgggtctcaagagagacttgatgcttctagacctgccagctcggataagaacaatgatagtgatgcaaaactcccaagaaagaactctttgagagttccagagcatgtggtacaaaatggaatcataaangagatctctgaaagcaacaaatctctcaacaatggtgtggcggtgaaaacaaatccnattggtttgganaacttgccaagtcca

SEQ ID NO: 3128 - DNA, 481 bp, Arabidopsis thaliana
  unsure at all n locations
  Clone ID: LIB22-010-Q1-E1-F3
tgtatcncggtccgaggcaccgggtcgacccacgcgtccggacaaatctaaaggtgcaaagcaaacgcttctagagcggccatggttcctcgctgtggctctagctggtcttataggtggcgcaatgctcatcacaagcttcatccgagctacggacaanaccttgtcactctgctccacggctaagaacacagctgcgtctatagccaaatacacagccaccccaatccaactccaatccatcgtccactacgccacttcacacaccgtccctcaacaatctttcgaggagatctcgatctctttaaacgtcctcaaggagcgtctcccttgtaactttctagtctttggcctcggccgcgactccctcatgtgggcctccctcaatccaggtggcacaactgtgttcttggaagaggatnctgantggatagaggccgtcctcaaggacgccncatccctcaagggccaacatgttcaa

SEQ ID NO: 3129 - DNA, 491 bp, Arabidopsis thaliana
  unsure at all n locations
  Clone ID: LIB22-010-Q1-E1-F6
gccgcagnctaccggtcatagatcccgggganccaactttcgaagaagacgactaatcaattcatctgattatggagagactacagagaatcttcggagctggtggcggtttaggtcacgcatcgcctgattctccgactctcgatacatcggagcaggtttacatctcttctctcgctctcctcaagatgcttaagcacggaagagctggtgttcctatggaagtcatgggattgatgcttggagagtttgtggatgaatacactgttagggttgtggatgtttttgcgatgcctcagagtggtactggtgttagtgttgaagctgttgatcatgtnttccagactaatatgctcgacatgcttaaccagancggaagaccttgagatgggtgggttgggttgngtatcattcacatcctggatcggctgctggcttctggggttgacattaatactcancanngttttnaagctttgatcanggaactg

SEQ ID NO: 3130 - DNA, 447 bp, Arabidopsis thaliana
  Clone ID: LIB22-010-Q1-E1-F7
ttttagctacggtcagcttttctctagcgtcggggcctcgatctcttgatttgagcttttcttaggtctgtctctctctgtacactctctccgccgtcgtatctcgccgtcgatttcaatttttccgacgatatgaagctcaccgttaaaactctcaagggcagtcattttgaaattagggttttaccctccgatacgataatggcggtgaagaagaatatagaagattcacaaggaaaagacaattatccatgtgggcagcaattgttgattcacaatggaaaagttttgaaagatgaaactagcctggtggagaacaaagttacggaggaaggatttctcgtcgttatgcttagcaagagcaaatctggaggttcagctgggtcaggcttcggttcagacttcttctgtttcacaacctgtttccgctaccacatcttcgactaa

SEQ ID NO: 3131 - DNA, 441 bp, Arabidopsis thaliana
  unsure at all n locations
  Clone ID: LIB22-010-Q1-E1-F9
ctccgatcgttggcctcctgtttccgttttactcgacatcgttccgacgacttttgacctggaatcgacgcagtgacttcaattcaactattgcacttggtttgttggcaatggacaaaggagcacctcctagtatttttgtgaatgatgggtcattcatggaaagattcagacagcttcaacaggagaaagataaagacaaggataaggttgtccaagttgaggattctaagccggtgaagattatatcaaatcccaaacctgctgctaataaaatttccattggattaaagcccaatgatgcccagaagaaaggtggtaagcttgctttcagcttgaagcaaaagtctaagcttcttgcacctcctgtgaancttggtacagaagaagatgaggatgatgaggatgttaaacatgaacaaggctttggatccgtaaacc

SEQ ID NO: 3132 - DNA, 448 bp, Arabidopsis thaliana
  unsure at all n locations
  Clone ID: LIB22-010-Q1-E1-G10
gngattgatgagtccaagagagcaagtctcggaaagtgttcaagaatgctcaagcgccatctcacggattctgaacttcgacaagtcatgaatgccgagatcacctgcaaggcgaatcaattgccttcacgacttatcattgtcaatgacaagcctttaagtgaagatgagctttacacgttgcagacatgtccaaatccacccaagaagctaaaacccggacactattggtatgataaggttgctggctactggggaaagataggagagaaacctagtcagattataagtcctaacaacagcataggaggatacatcagtgagaaagtaagcaatgganacactgaaatttatattaatggccgggaataaccaagccagantcacgatgctcaattgggcgggggtgaattttnaaggaaacctcattttgggtccaatcanatgg

SEQ ID NO: 3133 - DNA, 497 bp, Arabidopsis thaliana
  unsure at all n locations
  Clone ID: LIB22-010-Q1-E1-D4
cgtctncctgcgccacggtccgagnaccgggtcgacccacgcgtccgtttaaancnaagcaagnnnaaaaatgggnaatccgganttnaanaaaannggaancaatngagntnnacctncgccaacgggtncctggcaaagttagtgaagacgacaagcttgttgagtatgatgctttgcttctagatcggtttctcgatatcctccaggatttgcacggtgaagatctccgtgaaactgttcaagagctttatgagcattctgcagaatacgaagggaagcatgaacctaagaagctagaggagctagggagtgtgctaacgagtttagatccaggagattccattgttatcgctaaagctttctctcatatgcttaacttagccaatttggctgaggaagtgcagattgcttatcgccgtangatcaagaagctgaagaaaggtgattttgttgatgagagctctgctactactgaatccgatcttgaanaaact

SEQ ID NO: 3134 - DNA, 469 bp, Arabidopsis thaliana
  unsure at all n locations
  Clone ID: LIB22-010-Q1-E1-B6
cgtgtntaccggtccaggtatcccgggtngacccacgcgtccgcntaccttcaataagtaactctacactgaatcaactcctctgatttctcgataaaaatctagaggcaagattccccacggaattaaggtttctttgttaacctctccattgaagatatgggggaactaaacggagtcatcattccgactatagacttggaagaggtttctgataagattctgaatcagaaaatccgtgaagccagtgagagatggggatgtttcagggtgataaaccatggagtttcattgtctttgatggctgagatgaagaagactgttattgatctctttcaacgtccatacgaggtgaaagtgcgtaacaccgatgtgctcctagggagtggttacagagctccanacgaaatcaatccttactatgaagcattangtctctatganatggcttctcctcatgcngtcaata

SEQ ID NO: 3135 - DNA, 473 bp, Arabidopsis thaliana
  unsure at all n locations
  Clone ID: LIB22-010-Q1-E1-B9
cacaattcccacagnccacccngnccnccnaagcgtccgaaaagatggttttgacaaaaaccgcaacgaatgatgaatctgtctgcaccatgttcggatctcgctatgttcgcactacacttcccaagtatganattggtgagaattcgataccgaaagacgctgcgtatcagatcataaaacatgagctgatgcttgatggtnacccaaggcttancctagcttcttttgtgactacatggatggaaccagactgtgacanactcatcatggactcnatcaataatgaactactttgatatggatgatgtaccctgtcacaactganctccaaagncgatgtgtaaacattataactcgactgttcaatgcgccactcgangaatctgagacggcggtgggagtagggacagttggttcttcataagcatcatgttaacccngattggccttcaaaagaaatggctgagcna

SEQ ID NO: 3136 - DNA, 468 bp, Arabidopsis thaliana
  unsure at all n locations
  Clone ID: LIB22-010-Q1-E1-C1
anagaccgggtcggccccgcctccgaacananctcatcctcgtcaacctcttcctctcccgctgtcgccaagattgaatcttttttcagttgtggcttcaccggataataaggaattcagtaagagataagttcatcctgacaacatggagaccaagaatgagaattctgatgtttcacgggcagaggagtttaaaagtcaggccaacgaagcttttaaaggtcacaaatactccagtgctattgatctatatacaaaagctattgaactcaacagcaacaacgctgtgtattgggcaaatcgtgcatttgctcacacaaaactggaggaatatggcagtgcaatacangatgcatcgaaggccattgaagttgattcaagatactctaanggctaatacaaggcttggtgctgcgtaccttgcaatgggaaaatttaaggttccttnaagggcttcaacangtaaaa

SEQ ID NO: 3137 - DNA, 427 bp, Arabidopsis thaliana
  unsure at all n locations
  Clone ID: LIB22-010-Q1-E1-C10
gaagattcttccggcagattcagaacattctgccatatttcagtgtattcaaggtttgcctgaaggcgctctgcgcaagataatcttgactgcatctggtggagcttttagggattggcctgtcgaaaagctaaaggaagttaaagtagcggatgcgttgaagcatccaaactggaacatgggaaagaaaatcactgtggactctgctacgcttttcaacaagggtcttgaggtcattgaagcgcattatttgtttggagctgagtatgacgatatanagattgtcattcatccgcaaagtatcatacattccatgattgaaacacaggattcacctgtgcttgctcaattgggttggcctgatatncntttaccgattctctanaccatgtcanggcccganaaattccttgttctnaattacttg

SEQ ID NO: 3138 - DNA, 486 bp, Arabidopsis thaliana
  unsure at all n locations
  Clone ID: LIB22-010-Q1-E1-C3
gtccgganaaccgggtcgacccacgcgtccgcaaaaaacgaanacgatgggttccatcgaagaagaagcaagacctctcatcgaagaaggtttaattttacaggaagtgaaattgtatgctgaagatggttcagtggactttaatggaaacccaccattgaaggagaaaacaggaaactggaaagcttgtccttttattcttggtaatgaatgttgtgagaggctagcttactatggtattgctgggaatttaatcacttacctcaccactaagcttcaccaaggaaatgtttctgctgctacaaacgttaccacatggcaagggacttgttatctcactcctctcattggagctgttctggctgatgcttactggggacgttactggaccatcgcttgtttctccgggatttatttcatcgggatgtctgcgttaactctttcagcttcagttcccggcattgaagccancggaatgtattggtg

SEQ ID NO: 3139 - DNA, 454 bp, Arabidopsis thaliana
  unsure at all n locations
  Clone ID: LIB22-010-Q1-E1-C4
ggaaaanggnnccctggcggcccccttcccccaaaggtttttcattacgagttcagttattgatctcactattgttggcttagaccttgttgatggagactcaagttcccagagccaacttcaacaacaaccacattacctgaagacatgttccaaaccaaacctggatctagggagtgtggtgtacctcttaggctatgccaatcagaatgaactcaagatcggcgagggaaagttagttgtagctaccgacaatctcatcaaactctcaactgatgaaatgatttggagtcctgnatctgctggatttgatgttcaagggaatcttgcattcatgatttgtgatccgaggaaactatcgacatcaccaacctcaacctcgtcatcttcctcntcctctttgaagaaaagattncaacaangacactgatgatgcactttgggtatacaatac

SEQ ID NO: 3140 - DNA, 429 bp, Arabidopsis thaliana
  unsure at all n locations
  Clone ID: LIB22-010-Q1-E1-C6
cagactgagtagtcaccaagtgaatatgcttctttcatccctatggatccaagcaacttctaccgacaatacccctgaaaattttgaggccatggccagcacatatcaaatcactttactgttttcactagcaaagagatcaaatcacatggctctggtgcagtgttttcagctggcattctctcttcgaaatctctcattgaatcaagatggaggtatgcagcactctcgtanaagatctatcttcacttttgcatcatatatgctcattttcggtgccaagatttccaatattctggagctagttccaattatcaaagaatctttaactgcccaaatggttgatccttatcttgtgctggaaggagatatcagactgcgtgctgtatgttctggatttccacaggaagaaacgtatggatntgacaa

SEQ ID NO: 3141 - DNA, 444 bp, Arabidopsis thaliana
  unsure at all n locations
  Clone ID: LIB22-010-Q1-E1-C7
aaacactcgtaaaagagttcttgaacttcacaaaacaattgtcagattttcaagaaaaactttataaaacaaaaaacannnnnnnnnnnnnnnnnnnnnnnnnnnnnnnnnnnnnnnnnnnnnnnnnnnnnnnnnnnnnnnnnnnnnnnnnnnnnnnnnnaactcggatctacaaaaaaccatgtcggaaactaacacaaccgatgccaagactgttccagcagaagcagagaagaagaaagaacagagtttaccattctttaaactcttttctttcgctgataaatttgattatctcttaatgttcgttggttctcttggtgccattgttcatggntcttccatgcctgtctccttttactcnttggtcaaatggttaatggatttggtaaaaaccaaatggatttacatcaaatgggtcatgaagtcncaagatatccccaa

SEQ ID NO: 3142 - DNA, 439 bp, Arabidopsis thaliana
  unsure at all n locations
  Clone ID: LIB22-010-Q1-E1-C9
ttacgttccaggtcgaacggtcagggttccgggtccacccangcgtccgaacagtattggtctacgggtcggccaccgtattgattattagattgcnnnnnnnnnnnnnnnnnnnnnnnnnnnnnnnnnnnnnnnnnnnnnnnnnnnnnnnnnnnnnnnnnnnnnnnnnnnnnnnnnnnnnnnnnnnnnnnnngcaagctaacatggaatcattaaaaggaggtctacgaagtatgacgtgaagttgaagacggcgataatattgaagatcaacaattcagtagatggnnnnnnnnnnnnnnnnnnnnnnnnnnnnnnnnnnnnnnnnnnnnnnnnnnnnnnnnnnnnnnnnnnnnnnnnnnnnnnnnnnnnnnnnnnnnnnnnnnnnnnnnnnnnnnnnnnnnnnnnnnnnnnngatgaaaaaaaaaaaaaaaagggc

SEQ ID NO: 3143 - DNA, 588 bp, Arabidopsis thaliana
  unsure at all n locations
  Clone ID: LIB22-010-Q1-E1-D1
gcgatctctccggggntcccgnnnaatgnatgaacncgngggntcgggnnccccccngncccgtnccgggggttnaaaaaaaaattgggtttncacccnaangnanaccaagggnctncnaaaaccaaaaggggccgggatttcaaacaacaatttgggancctgggttgggtcaaattgggaagcctcaatcaccaagaactncgggcttaaattgctaaattttaaatccgaanggangggagggaaaggggtgcattagagtgggccaagaaggggcacataagaacagcttgaagacaaagctcatagaagcacaaatcgagagccaaaaggttcagctgaagcatgtccttgagcataagatctaggccacaacatattccaaaactaccagtcctaggccattctactaatctttgtggctgagcagcaagaactggatttttgattccgttctcctgctattgccattgtcgcatgatctaacgctgggtcaaaccaatcaacgtgggtatattttcgttanctaaaagcaaaatgatcttgtgaattgattactgtcatacnttggtggggctaacttca

SEQ ID NO: 3144 - DNA, 441 bp, Arabidopsis thaliana
  unsure at all n locations
  Clone ID: LIB22-010-Q1-E1-D11
gaagtaatggcagcctcaggcacctctgctactttcagagcctccgtttcttcagctccttcctcttcttcccaattgacccatttgaaatcacccttcaaagctgtcaaatatacgcctctgccatcgtctcgctccaagtcatcatccttctccgtctcctgcaccatcgccaaggacncgcctgttctcatggccgccggatntgacccggccctgtggcaacgaancgattcgttcggtcgtttgggaagtttggtgngaaagtatgtacctgaaaacccttatgcacgctccaatctgagcttgatccgctttctatgctcttgcnacggacnatgatttcnananaganttggctggaatcttgaaggactatgtgggtanagaaatcctcngtattttgcaaaaaggttacggagcattacaggcncaaaatgg

SEQ ID NO: 3145 - DNA, 429 bp, Arabidopsis thaliana
  unsure at all n locations
  Clone ID: LIB22-010-Q1-E1-D12
aattttcacgtttcttacatgtacatatatatagtaaaacaaatctctgaagacacacaagagaatcaagaacaatgaaaaatttaaccagtttcgtaattgttatcttactacaaagcttattgtttcatgtatatggtcgtcatcaaagttcttcgaagaacattttagtagattcatctccatttccttctgatttcctctttggtacagcttcttccgcttaccagtatgaaggtgcgttcttgactgatgggaaaaagtttgaacaattgggatgtctttacgcataaaatcctgggaaaatacttgacaagaacaatgcagatagagctgtgggaccaatataatccgattttgggtaattcctaagataattaattcttcaattttgtcctgncaactcctttacatatanatcccatataa

SEQ ID NO: 3146 - DNA, 454 bp, Arabidopsis thaliana
  unsure at all n locations
  Clone ID: LIB22-010-Q1-E1-B5
aaactaaagctttcttcaatggaagaagaaacccacgacggatctctcgatctccaagagattcgcaggcgcgtgaaagagctcgatttctttccccggaattgcagagaagagcctgtagaatcgtgtagttccgattacgagactctggtggttcaagattttgttcttcagtttgaaccaaaggtgaaagagattgttgaagaatacggcgatgttgatttattggatgttgaagattcagatgcttacttggagtacttgagaaatgagcttcagtctgtggaggctgaaagtgccaaagtttctgaagaaattgaacgtctttctcagtctcatgcccaagattctagtangttgcaaagggatcttgaaggtcttttactgtcactgggattctatgtcatctcaggatgtggagaagtcaaaagagaatcaaccatctagcaagctc

SEQ ID NO: 3147 - DNA, 446 bp, Arabidopsis thaliana
  unsure at all n locations
  Clone ID: LIB22-009-Q1-E1-H1
cgcgtccgaattgntctcgattctccgcgaccatgcaaatttagggtcttcgttttgtttgatgggcgcgaatatctcgggaggttcaccggagtttgaccggaacgatgacgtttactcgaggaaactcagattggtggatttacctgagaattgtgtagcgttgattatgacacggcttgatccacctgagatttgccggcttgctcgtctcaacaggatgttccgtcgcgcttcctcagctgatttcatttgggaatcaaagttgcctgcgaattatcgtgttattgcacacaaggtgttcgatgaaattactctgacgaaattaataaagaaagatttttatgcaaagcttaaccagcctaaacctcctcgacgatggnacaaaaggaattgtggatagataagaacaacnggtccgcctttggttaacccaattcctcaaa

SEQ ID NO: 3148 - DNA, 534 bp, Arabidopsis thaliana
  unsure at all n locations
  Clone ID: LIB22-009-Q1-E1-H10
ccaggcgtccganctctctnactctatctttctctcttcaccatttctttatcttccatggaagaacagtcttcaacaacaaactaaaaacatgtttctaaagttgtttcttctcttatctttggtctccttctcacactcagactcttcttccacagtttcttgtcctaacggcacagacttccatcaactaaccacagtttttcgttacgtctccggtttcaactcttcctggttctcctcaaactgctccgccgttatcactcacgtcgttcttccgtcaagaaaactaaacgggaacgttttcttgggaaccctaatacgtaatctcaanggcgccttaagtggttccttggattctcctccaaaanaaactcctcctccgaaaggggttccnccnttcccaaanttgggggtcccgggncccaaaggccaaaggtccctgggtccncccggtttaaatccncctccncngggnaaacggggntttggggtggggntcccaaaaaangaagtgggatttccaagttttaa

SEQ ID NO: 3149 - DNA, 414 bp, Arabidopsis thaliana
  unsure at all n locations
  Clone ID: LIB22-009-Q1-E1-H11
gtacgcctccanaattccaaggtcnacccangcgtccgngtttttgnttcttcttctttcaaaatctcaagcaaaagaaaaaatggagctattcacaaaaggtaacaacgttaagttacgtagccacctagataagtttttagtcgccgacgatgaccaagaaaccatccgtcaaagccgtaaaggagatgcacggcgtgccgtttggacggtggagcccgtcgtcgataaacctaatctgataaggttaaagagcagccacggcacgtacttaacggcgagcaacaaaccgttattgttaggtatgaccggtgagaaagtgactcaaacggcgtcgtttaacaagctgatggattggcaaacgcantgggaaccggaccaaaatggtttcaggtgaacctaaatccttgggnc

SEQ ID NO: 3150 - DNA, 471 bp, Arabidopsis thaliana
  unsure at all n locations
  Clone ID: LIB22-009-Q1-E1-H12
ccaggcgtccgnaaaaccaaattttgtcaatctaatttatcttctcctctcccggagaagaaggaaacttacaatttacaaagaacgagcttcaataaaaatttccaaagaaattaccgtcggcgaatcgttaggctcgagaagaatcaccaaattccaaggggagagagactgaattttcttttgattcacgtaacaacaacgctcagagactatgtcgtcggaggtgaaacagctgatcgtcgttgctgaaggcaccgccgctttgggtccttattggcaaacatcgtccccgactatcccgagaaaatcacaaggccttccggtggaattgagtttaattggaaaaaggaacccggttccaacggntgaacnaacancggggatnttcaaatcccaagggtcaaaatgtgcctgcctgggnacaacggantggctggacnaaggangttgataatttcctgcaatggn

SEQ ID NO: 3151 - DNA, 521 bp, Arabidopsis thaliana
  unsure at all n locations
  Clone ID: LIB22-009-Q1-E1-H4
ggtccccngggcccccgccgntcccgaaaacaacgacgttccgggaattccaatgcccggaattccggttannagaacgaacgaanggtttcaagattcgttccgtnggtnncttnacnaagggggaacgttgaaagggcnaaagtttgttccanggttttacccgttcgcnanatggggtgattcaacaatcgaagaagaaatccacgaangggagaaaggtgaatgggnacaaaccgtgaacgttggggattcagccgtcgaaagttgtgataacgaagcttcgtcttgataaagataggaaatcgcttttggagaggaaggctaanggacgtgctgctgctgataaggagaagggtactaagtttacgtctgagggatgttatgcagaacgttgattaagttaagaaaggaagaagaaaatccttcntgaaaagggttttaacctttttagaagtttatccttcaaatccgcctttttaanttttccaagttttgggtaatttttggnaatgtttgtc

SEQ ID NO: 3152 - DNA, 425 bp, Arabidopsis thaliana
  unsure at all n locations
  Clone ID: LIB22-009-Q1-E1-H6
ganccacgcgtccgcggacgcgtgggtgatgannnnnnnnnnnnnnnnnnnnnnnnnnnnnnnngctgtagctcatggtggctatggcggtggtcacggtggcgacatgtaccatccgatgatgtacgctcggccttatcctgcagttaattatgctcaccctccaccaatgccgcctcctcactcggattcttatactcatatgttcagcgatgagaatccaggtagttgtagtattatgtgatcatcttttgtaatgttatttagaatatggacatgtatgcttgtcttagtcttatgtttttttttttggggatgtccttatcttttttactttggaggattggnaacaaaatgtgcnttaattttgtagtggaatgatgttaaaatatcccaatttcggaaaaaaaaaaaaaaaagggngg

SEQ ID NO: 3153 - DNA, 455 bp, Arabidopsis thaliana
  unsure at all n locations
  Clone ID: LIB22-010-Q1-E1-A1
ttaaaaaaccggtanaaaggnccccttgaaggataattaggcaaatgcnatcaggaaactgtgaccccaatggacctctcatgctcctaacgttatccaaagaatgattccaagcctcctgaacaaaggggttanaattctttgcctttcggtccgtgtctttgctgggtaaggttctactgggtatgaaggtcagaatcatgggtcccaactatatccctggtgagaagaaggatctgtacactaagagtgttcagaggactgtcatttggatgggtaagaggcaagagacagtggaggatgtcccttgtggtaacactgttctatggttgggctggatnagttcatcaccaagaatgctacattgactaatgagaaggaattgatgctcacccatcgtgcatgaattttcgtgtccctgttgtctgttgcgtcatgtaagtnctcgactccaa

SEQ ID NO: 3154 - DNA, 445 bp, Arabidopsis thaliana
  unsure at all n locations
  Clone ID: LIB22-010-Q1-E1-A10
tttagaaacacaaataaaagtttaattacttttaagcccaacaaaaatgggttatgctaaatcagccatgctgatcttcttactagcattggtcatcgcatcttgtgccacggccatggacatgtccgttgtttcctccaacgataaccaccacgtgaccgccggtcccggccgccgtcagggtattttcgacgctgaagccaccttgatgttcgagtcatggatggtcanacatgggaaaagtgttacaactccgttgctgaaaaaggaacggcgttnaactatttttganggacacccnccgtttaancacnaancggganngctgagaacctcanttaccggcttggtttgaatcggtttgcggattaaccncncaaggaatacggnaaaatttgccatggggctgntcaagaactccaaggaaccacttcttcagaacaan

SEQ ID NO: 3155 - DNA, 397 bp, Arabidopsis thaliana
  unsure at all n locations
  Clone ID: LIB22-010-Q1-E1-A11
gagaagaagcaaagcaaaattcgatcgctctgggtttttgatcttttagggtttctggcaaatttggatggaaacctcaactttatccaaagataatcataaaggaagaagctttcgttgttgtttccattgttgcagctccttcaaaaactcttgtctctattgctttcacagctaagaattctcgattccatcgttgtcgttttcgattttgacgaaattgggttcttctagatttggttatggaccgtanagctcaatcagatctctctttaggattcggtagctcccacgctttacctctacctcancctcctagaatcccaatcgctgatgactcaatcacgcttcanattgattccagcttccgtccttcgtcaatccnaagcctcctgtc

SEQ ID NO: 3156 - DNA, 483 bp, Arabidopsis thaliana
  unsure at all n locations
  Clone ID: LIB22-010-Q1-E1-A2
cacggtcccagaaccgggtngcccacgcgtccgcatanacgtagttggcatgattactccatggaactatccgttattgatggctgtctggaaagtcgctccttcacttgctgctgggtgcacggctatactgaaaccttcagagttggcctccctgacatgtttggagctcgctgatatttgccgcgaggtgggtctaccacctggtgttcttaatattctgactggtttaggaactgaagcaggtgctccactggcatcgcatccacatgttgacaagattgtattcactggaagcacaacaactggaagcagcattatgacttccgctgccaaattggtgaaaccagtttccttggagcttgggggtaaaagccctatcattgtctttgatgatgtcgatattgataaagctgtggaatggactatgtttggttgtttctgggacgaatgggcagatttgtantgccacatctcaacttc

SEQ ID NO: 3157 - DNA, 442 bp, Arabidopsis thaliana
  unsure at all n locations
  Clone ID: LIB22-010-Q1-E1-A6
natgcttgcttgctacaatgggttacgcccagctagttattggtccagcaggcagtggaaagtcaacttattgctcgtctttgtatgaacattgtgaaactatcggtcgaacaatgcatgttgttaaccttgatcctgctgcggagatcttcaactatcctgtggctatggatatcagagaacttatttctttggaagatgtgatggaggatctaaagcttggtcctaatggtgcccttatgtattgcatggagtatcttgaggatagcttacatgattgggtggatgaagaattggagaactacagggatgacgattaccttatctttgattgtccaggccaagatagagctgtttacacatgttcctgtgctcaagaactttgtggagcatttgaagcagaanaacttcaacgtctgtgttgtttanctgcttgattcac

SEQ ID NO: 3158 - DNA, 425 bp, Arabidopsis thaliana
  unsure at all n locations
  Clone ID: LIB22-010-Q1-E1-B1
nccaatttagggttcctttctcgaaanctgcggtttcngaatcancctatctggttgangggtttcgtttgatatctgggagaaaagggggtttctgggaaacaanggagttcataaattccgcgattcttgggattctatcgattcttcatttatatataaaagcgtgaaatgangattatgatggagtcgaaagggtgggtaaaaagaagtccaagcagtagtagttccttattttacgaagctcccctcgggttacagcattgaagacgttcgtccaaacggtgggaatcaagaaattcaaatcttctgtctactcaaactgctccaagaagccatcctgaagtaccaacgtgcaccgatcttcataatataattataagccttccttacttccaagtttanaantttcctcctttcaaagc

SEQ ID NO: 3159 - DNA, 434 bp, Arabidopsis thaliana
  unsure at all n locations
  Clone ID: LIB22-010-Q1-E1-B11
cgtccggtttcattcgcctctcatctcttcgaccaacaatccactnnnnnnnnnnnnnnnnnnnnnnnnnnnnnnnnnnnnnnnnnnnnnnnnnnnnnnnnnnnnnnnnnnnnnnnnnnnnnnnnnnnnnnnncaagctccgccacagcagataccgatagaaactccgatcaatcagcctcttcctcagtcctctccgcttccaattctcttctccgtgatacctccgacgaagcttcagctgcaggaccaagcgattggaaaacagcanaagcttattgtaaaagtggtgatacatttgaaggtgaagttcaaggntttaatggtggtggcntacttaatcgttttcaatctcctgtgggttttcctccttaaccacaattaagttcttcccgttcctgtaaagagcctcaaaaaagtnatcaagaaatagc

SEQ ID NO: 3160 - DNA, 427 bp, Arabidopsis thaliana
  unsure at all n locations
  Clone ID: LIB22-010-Q1-E1-B12
cattcttcttcatcgtctctctatttcttctgtttccgtcaccatccgcgtcagaatccactactcagttttgtagtgcagggagagagaatggtgtgggatcttgtggggtttcatcgacgaggattttgattaaaggaggtactgttgtcaatgcacaccatcaagaacttgctgatgtttatgtggaaaatggtattattgtcgctgtgcagccaaacattaaggttggggatgaagtcactgtcctcgatgctactggaaagtttgtcatgccaagangaattgacccccacacgcaactcgccatggaanttaagggtaccganactaatgatganttcctcanttggtcaaggcancggcaattacctggtggaacaactatgcataaaaaactttgttaaacctgtcaatgggaaaccng

SEQ ID NO: 3161 - DNA, 401 bp, Arabidopsis thaliana
  unsure at all n locations
  Clone ID: LIB22-009-Q1-E1-G7
gcatttttctcaatggcgtcgactacacgagaaaagtttgtatctttcataaacaacagatggctcgtcttcgtggctgccatgtggatacagtcttgtgctggcatcggttatttgttcggaagcatttctccggttatcaaaagctccttaaactataatcagaaggagctttccagacttggagtcgccaaggatctcggtgatagtgtcggattcatcgccggtactctctctgagatcttgcctctttgggccgctcttcttgttggcgccgttcagaacctcatcggttacggatgggtttggcttatcgtcaccggtcgagccccgattctcctctatgggctatgtgtgttccatattcttgggaaaatggcgagacctactnaatactggag

SEQ ID NO: 3162 - DNA, 340 bp, Arabidopsis thaliana
  unsure at all n locations
  Clone ID: LIB22-008-Q1-E1-F5
ggtaccggagnggaattccngggncgacccacgcgtcnaancttcttttgcccgatattcaaatataaaaatgcttaaacagttaggctcacgannnnnnnnnnnnnnnnnnnnnnnnnnnnnnnnnnnnnnnnnnnnnnncagccaaattggttcaaaaagaaaaccaaataggcnnnnnnnnnnnnnnnnnnnnnnnnnnnnnnnnnnnnnnnnnnnnnnnnnnnnnnnnnnnnnnnnnnnnnnnnnnnnnnnnnnnnnnnnacatagagccccaaagtgtaaatgctcttttctgttaaaataattattatgtcctaaaaaaaaaaaaaaaagggcg

SEQ ID NO: 3163 - DNA, 434 bp, Arabidopsis thaliana
  unsure at all n locations
  Clone ID: LIB22-008-Q1-E1-G1
nataacattaaccatcttcgtagcaactttactctcaatcggttttcttctaagcatagttctgatcttctctaccgttttcagtgttggaaagagaaaggaaaaggaatggngagacttccacaagtgaaagtaaaagagggggaagaaagattgataaatgaagaagtggtgaatgttacattaagaagaagtttgagattctactcaatacttcaatcacaagatggtttttggcctggtgattatggtggccctttgtttctcttgcctgctctggtgatcggcttatatgtgacggaagttttggatggaactttaactgcgcaacatcaaatcgaagattcgtcgttatctctataaccatcagaacaaggatggaggatggggactacacgtanaagggaatagcaccatgttttgtcaatgctcna

SEQ ID NO: 3164 - DNA, 415 bp, Arabidopsis thaliana
  unsure at all n locations
  Clone ID: LIB22-008-Q1-E1-G11
gnagcagannnnnnnnnnnnnnnnnnnnnnnnnnnnnnnnnnnnnnnnnnnnnnnnnnnnnnnnnnnnnnnnnnnnnnnnnnactttttataatttatccgcttgtctgctatctcttacattaaatctaaacctaaatcattagaannnnnnnnnnnnnnnnnnnnnnnnnnnnnnnnnnnnnnnnnnnnnnnnnnnnnnnnnnnnnnnnnnnnggcatggctggtctcgatctaggcacaacttctcgctacgtccacaacgtcgatggtggcggcggcggacagtnnnnnnnnnnnnnnnnnnnnnnnnnnnnnnnnnnnnnnnnnnnnnnnnnnnnnnnnnnnnnnnnnnnnnnnnnnnnnnnnnnaggtttaaatttaatagcttcnaatgataactccggactaagngg

SEQ ID NO: 3165 - DNA, 490 bp, Arabidopsis thaliana
  unsure at all n locations
  Clone ID: LIB22-008-Q1-E1-G3
ntcttgccgttacctaccggtctntnnattcccgggtccgacccacgcgtccgaancatctccttcgtgttccgagatttgatatcgactaatcgaatcagaggataagagaatggctcacagaatactgagagatcatgaagccgatggatgggaacgctccgatttcccaatcatctgcgaatcttgtctcggtgacaacccctacgtgcgaatgaccaaagcgaattatgataaggaatgcaagatatgtacacgacctttcacggtgtttaggtggcgacctggccgggatgctagatacaagaaaaccgaaatttgtcagacttgctgcaagttgaaaaatgtttgtcaagtctgtcttctggatcttgagtatggtcttccagttcaagtaagagacacagcactcaacattagtactcatgactctatccctaaaagtgatgtcaacaagagagtatttgctgaanaacatgacaggaaggct

SEQ ID NO: 3166 - DNA, 430 bp, Arabidopsis thaliana
  unsure at all n locations
  Clone ID: LIB22-008-Q1-E1-G4
acnagtcnanannttacccggnngntcctngtaccgcaangtacccgttgattcagaagctgagacaagttattgttgaccatgctttgatcaatggtgagagtgagaagaatgcagtgacttcaatcttccataagattggagctttcgaggaggagcttaaggcagtgctaccgaaagaagtggaagcagcaagagcagcctacgataacggaacatcggctatcccgaacaggatcaaggaatgtaggtcgtatccattgtatagattcgtgagggaagagcttggaacagagcttttgaccggagagaaagtgacgtcgcctggagaagagttcgacaaggttttcacggcgatttgtgaaggtaaaatcattgattcgatgatggaatgtcncaacgaatggaacggagctcccantccaatatg

SEQ ID NO: 3167 - DNA, 433 bp, Arabidopsis thaliana
  unsure at all n locations
  Clone ID: LIB22-008-Q1-E1-G5
atttcatctatatatacctaagaaagaaaagagttaaagaagtatattttcgattcaaagaagaaaaatgaattctcaccagaatcaaaccggagtgcaaaagaagggaataacggagaaaatcatggagaagctaccaggtcatcatggacctactaacactggtgttgttcaccacgaagaagaaagggattgacggcgaaagttatggcgcagctgccaatgtcatccatggtgctactgggtaccggtggtngttcaccanganaangaanggaatgacggaaaangtnatggancanntgccaggncaccatggttcacaccaanctgganccaacacaacttatggtacnacnancactggtggtgttcaccacgagaaaaaaagtgtgaccganaaattatggagaaactaccaggtcatcatggg

SEQ ID NO: 3168 - DNA, 475 bp, Arabidopsis thaliana
  unsure at all n locations
  Clone ID: LIB22-008-Q1-E1-G8
gaccggtccanattgaattcgggcggccgacccacgcgnccancattgtgcaagaatgggttggtgggttctgctgtttctttgatcgatgagatgacaaaggaaggaattagtcctaatgttgtaacttataattccataatcgatgcctttggtcgttctgcaactatggacagatcagccgattatagcaatggtggatctttgcctttctcttcttctgctctgagtgcattgactgaaacagagggtaatcgggtaatacagttatttgggcagttaacaactgagagtaacaaccgaacgacgaaagattgtgaggagggtatgcaggagctctcctgtatattggaagttttccgcaaaatgcatcagctggaaattaaaccaaatgttgtaaccttttcagcgattctgaatgcttgcaatccgtgtaactcaattgaaagatgcatcaatgccactaaaaggagct

SEQ ID NO: 3169 - DNA, 421 bp, Arabidopsis thaliana
  unsure at all n locations
  Clone ID: LIB22-008-Q1-E1-G9
tctttctcacgattaatcgctgagaagaagcaaccacctggagacggcggagatggcagggtacagagtggaagatgactacgattacctcttcaaagttgttcttatatgcgattctggagttggcaaatccaatctcctttccagattcactaaaaacgagttcaatctanagtctaaatccaccattggcgtcgaattcgccactcgtaccttaaaagtcgatggcaaagtcgttaaagctcanatttgggacactgctggtcaggagaggtaccgtgccatcactagtgcatattaccgtggagccgtgggtgcactcctagtatatgatgtaactcgccgtgcaacatttgagaactanatcggtggttaaaggaactcaagaaccacacagatccaaacattgtatgatgccggn

SEQ ID NO: 3170 - DNA, 433 bp, Arabidopsis thaliana
  unsure at all n locations
  Clone ID: LIB22-008-Q1-E1-H2
gaaaatcanccacatcagcagcctgaaggactagcgagtggatccttggatcttttaactatgcttcttaaggcaagttatactagctagattttcgtagtacgcaattattttttatgctaaatggacagtatttgtgttttgctgactatttttctagtcatatatagggtgccccaagtgatatagtgaaaactgcatatgacttttgctttgctgctgtcattcgtatcgtactccacagtgaggatcatggtgaactacagaatgcctggcagcttttatatctagtggtaaacaaagagttgctcacatggagtggtgatnccggttttactanganaaatttgcttgatgcgactctaagcttccaaccctgatctgggaaggtcaaaggatntccncnttgctgggaagtacattcngcagctta

SEQ ID NO: 3171 - DNA, 445 bp, Arabidopsis thaliana
  unsure at all n locations
  Clone ID: LIB22-008-Q1-E1-H3
agaagcanctccgattcganannaaangnnnttncngttcctncncaantggcncggcgagaaccttctnancccctaattacaaagttcttgtcctgtgggagaacccgattttcaaatttccccctggacaaagggattcatgtcaaacgccgtctcttttcgtangggtacgatgctttcaagcaaaaagcataaagctactcagcaagaacattcatttggagaaagcagctgttctattcaatcttggtgctagctacagccagattggactcggtcatgaccgcaccaccgtcgatgggcgtcgtcaggcttcacatgcgttcatggctgcagcanggggcgttcgctcacttgagggataacgagtccattaaggcgacgatcgggccgagcactaacgtggatgtgtcggttgaatgtgttggaatgttggaacngg

SEQ ID NO: 3172 - DNA, 417 bp, Arabidopsis thaliana
  unsure at all n locations
  Clone ID: LIB22-008-Q1-E1-H7
cgtgggcttcggtaaagctgctcaccttgtggacagcactaaccaagttggacatttccanaaggttcttacagccattgggaacttctgtatctgttccattgctatcggtatggtgattgagatcatcgtcatgtatccgatccaacgccgaaagtacagagatggaattgacaaccttttggtcctcttgatcggtggtatccccattgctaagcctacagtcttgtccgttgaacaanggtattgggtcccaaaaggtngtcccaagcaanggtgcaannacaanccttataactgcnattgannanatggnaggantggatgtcctgtgcantgacaaanccgggacactaaccctcaacaaattgantgtggacanaaacttggtcnaggttttctgcaagggtgtggana

SEQ ID NO: 3173 - DNA, 411 bp, Arabidopsis thaliana
  unsure at all n locations
  Clone ID: LIB22-008-Q1-E1-H9
cgaccctttataaatctcacttccttcnnnnnnnnnnnnnnnnnnnnnnnnnnnnnnnnnnnnnnnnnnnnnnnnnnnnnnnnnnnnnnnnnnnnnnnnnnnctatccagttccttctgtgcgaagttcttctgattaatttgagtttcttggaagcttttactcgatcntcatcggatcttagggttttgtttaaatccagatcttgggttttgttaaataatggcgactccttatcctggagcgacgcangtgggttcgtactttgtggggcagtantatcaagtgttgcagcancagccagatcttattcatcagttttattctgagcctantagagctattcgtatcgaaggngattcaccganactgnnaaatccttgntgnatattcanaacatgggtaagtcac

SEQ ID NO: 3174 - DNA, 480 bp, Arabidopsis thaliana
  unsure at all n locations
  Clone ID: LIB22-009-Q1-E1-A2
gcccggtctgacaaacgggtccancacgcgtccgntcttnattcacttagtggtagctcatcggttgagtgggcagaaggtgcatttgttgcacagaagcaaccacttacttggtacaagacgactttctctgctccagctggagattcgccattggctgtagacatgggaagcatgggaaaaggtcaaatatggataaatgggcagagcctgggacgtcactggcctgcatataaagcagttggttcttgcagcgagtgttcttataccggaacattcagagaggacaagtgcttaagaaactgtggagaggcttctcaaagatggtaccatgtcccaaggtcgtggctaaaaccaagtggcaatctaatggttgtccntttaaggaatggggaaggagaacccaaacgggatcaacgttggtcaagaagaanaattggacaatttnangtncaanatatcctaatgaattggnaatca

SEQ ID NO: 3175 - DNA, 461 bp, Arabidopsis thaliana
  unsure at all n locations
  Clone ID: LIB22-008-Q1-E1-F4
ntgatcacgggccgaccacgcgtccaaanagactcggcgggggctcgggaaagattatcttttctgtttaacaagcctgcccaccctggaaacggctcagccgggaggtangggtccaagcggctgggaagagccaccgcacgtcgcgttgggtgtccggtgcgcccccgggcgggccctttgaaaaatccgggagggaccgagtgccgctcacgcccggtcgtactcataaccgcatcangtctccaaggtgaaacaacctctggtcgatggaacaatgtangcaagggaaagtcggcaaaatggatccgtaacttcgggaaaaggattggctctgaagggctgggctcgggggtcccaagttccgaacccgtcggctgtcaagcggactgctcgaactgcttccgcngcgaaaacgggtcgccgcntgccggccgggggacggactgggaacgntctct

SEQ ID NO: 3176 - DNA, 418 bp, Arabidopsis thaliana
  unsure at all n locations
  Clone ID: LIB22-008-Q1-E1-C8
tttctgatttcgagaaaaaacaaaaatccgcaaactcgacgatgatcctgaagaaagtatggggatcggtgtggaaccgatcgaatagtggcaaggatttggtgaatcatcagagagcgatcgatgttcctcctctgttattgtcttcttcatcgtctcttggtgcgtttgatcagctaccgatggatattctagtccagatactgatgatgatggagccaaaagatgctgtgaaattgggcttaacgtgcaaagcctggaaatgcgtagctagtggtaatcgtctctggatattttatctccagtgttctcaagagccatgggactccattttcttcgctgaaactagtttgcgttctggttatcctctccgaatgattccaagtcaatcaagganaattgtccnttaagcacaatt

SEQ ID NO: 3177 - DNA, 459 bp, Arabidopsis thaliana
  unsure at all n locations
  Clone ID: LIB22-008-Q1-E1-D12
tctaggtcgtcggtacngatacntnnattcgcgcggtcgacccacgcgtccgntggcactcctaccacaggaacaccaactactgggacaccaaccagtgggaccccgactaccggaactccgaccaccggaacccccaccactggaactccaaccagtgggactccaactagtggcttcccaaataccgggactccaaacacagggactaacactgggatgccaaattccaacgggatgccaacttcatcgtcatcttcggtgttcccggggactactcttggcccgactgggagcgggggactaggcgatccaaatgctggaganaagctgtctgttcgaactaacacagtggtcttcttattaaccggtgtagcagcaatgcttgtcatatgagggcttanaantcacacgcggttatggttgtaattgaattgctgaaaaattaaatnttgccaa

SEQ ID NO: 3178 - DNA, 480 bp, Arabidopsis thaliana
  unsure at all n locations
  Clone ID: LIB22-008-Q1-E1-D6
ccanacatgcggtcttatctaaaacacaaaccaacaaaaagaaaaaatgggcttggtccgatcatttgctttggtcatagtcttccttagttgtctcatcgccgtttatggccaaggtacgaggatcgggttctactcgactacgtgccctaatgccgagacaattgttcggaccactgtggcatctcactttggttcagatccaaaggttgcacccgggttactganaatgcacaaccatgattgctttgtccaaggttgtgatggttcggtgcttttatcgggacctaactctgaaagaaccgctggcgcaanacgttaacctccaatggtttttgagggtccatttgacgaatgccaaanaagggcaagctccgaanggcaaacaatgtccctnggtggnttgtcctccttggttgccngaaaaatccttgggccttaaaccgggctccnttgaattccgggttttcctcctccgta

SEQ ID NO: 3179 - DNA, 415 bp, Arabidopsis thaliana
  unsure at all n locations
  Clone ID: LIB22-008-Q1-E1-D8
cgctcaatcgctacaaacattcattgttcaccgatcgattctctctctttcttcttccccattgctccttccttcgtacccctctctctgtcttttgaggtttccgggtcgggttggtgagaaaactccagcggcttaacggatcttccactggtagttttctgttcctcacaaggaaatcgaaaatttgataaagcgaaagtganaaaggcgtgtgttttctttgtaaaggctccaacttttttgatgancagcttgtgcttgtngtgaaagnttgttactttttgtgtnantggnanttggggtttttccttaangttctgaaggaggagnaaaggagaaanctttcttggaatttggatncaaatttgngctcananggngagtttcaagggttttgtttgtgattccngga

SEQ ID NO: 3180 - DNA, 465 bp, Arabidopsis thaliana
  unsure at all n locations
  Clone ID: LIB22-008-Q1-E1-D9
cggtaccgatatgtgaattcgcgggtccgacccacgcgtccanccacgcgtccgcggacgcgtggggcttgacgctgcttcaaggctattcttctnnnnnnnnnnnnnnnnnnnnnnnnnnnnnnnnnnnnnnnnnnnnnnnnnnnnnnnnnnnnnnnnnnnnnnnnnnnnnnnnnnnnnnnnnnncttctgtgtttgatttctctgcatctgcctcctccgctaaaaacgccggccttccttcagctgacgacgttttctctcagatttcagggccaccggagtttctaaacaaccgcacagaagcagataatgaagcttcagctagagatgcagaacatgcaaatcgtattagtcgcaaaaagaagaaagttaaaccaaaaggtgttgtcatggaagcaaaacctcaactagtaggaatccatgagagagtaagaaacgatattgatgcacccccatcttcaa

SEQ ID NO: 3181 - DNA, 475 bp, Arabidopsis thaliana
  unsure at all n locations
  Clone ID: LIB22-008-Q1-E1-E1
gaacacgcgtccgcccacgcgnnnnnnnnnnnnnnnnnnnnnnnnnnnnnnnnnnnnnnnnnnnnnnnnnnnnnnncatgtgggatgtggctatagcagtcttcactgcatcttcctcctcactttcttctctctctttctcttaatttctttttttccagatttttctctgattcccatcttttccctcgaatgatcggttgagagaagatggtttcagagacttggtttcgtaatctgtggaggtttcaanagaaacatgatgggtcataangataaggngggttcnaggagtaataaccgtttggagggttgccaagtttgggtggtcccaaagcttggttcaaatttgtgggcaagtcaatttaaggtggantaaagaaatggtttggcnaaggggcttaanggggaacnaagaattttcnacaatttccaaacngggggtantnaancnnaaagttttanggttttccca

SEQ ID NO: 3182 - DNA, 425 bp, Arabidopsis thaliana
  Clone ID: LIB22-008-Q1-E1-E10
ttgtgaagccacttgtttttaaggaagtggaaaaaactgaagggataccgaaaagggaaaggggtaatgtaggaggaggaaaagatgctaattttggaaatgtgggtgtaagaaaggaaacagaacggtgtttgagtcagactgaggttgagaaggaggcgtggaagctgcttcgtggtgccgtggtgaactactgtgggttccctgtggggactgtagcggctaatgatccaggggatacgcagactttgaactatgatcaagtgtttattcgtgattttgttccttcggcgtatgcgtttatgcttgatggagaaggggagattgttagaaactttctccttcatacattgcaattgcagaactgggagaaaacagtggactgtcacaaccctggcccgggggctaatgccaaccaattttaa

SEQ ID NO: 3183 - DNA, 470 bp, Arabidopsis thaliana
  unsure at all n locations
  Clone ID: LIB22-008-Q1-E1-E11
gccgncggtaccggaactgaaattcncgggtcgacccacgcgtccggatagatacaaagactcgactccgtgatacacttccagctgagccacagaggaggaatggaaggcttcagctaatgctttacaagcttctatgggacactattgtgaaagaagggtttccaacgggaccttttttcgactacttttctttgaatcgcaattatgtcttatcccaagatgtcagagatcacattgctaatgcaggtatcaaagctcagacacttgaagagatagttaggtactatgaaaacacttttcagatgcttccgatagcaaataatcaactattactaaagtacgagtttcagaaggaccaatctataatagctgaaattagattcaaccatgatcatgaatgggtgatgagcaaatatagagaagtcattgagttctggagaaatgaacgaaaanctgggtacactccc

SEQ ID NO: 3184 - DNA, 440 bp, Arabidopsis thaliana
  unsure at all n locations
  Clone ID: LIB22-008-Q1-E1-E2
gaatataactaccatattctcaatcacaacactcgccactgtttcgaatagatggcttcnatttcaaccccttttccgatttctctccacccaaaaaccgtacgatcaaagccgttganattccgagttttgacccgtccgatcaaagcttccgggtcagaaactcctgatctaaccgtagcgacacgaaccggatccaaagatctcccgatccgaaacataccgggaaactacggtttaccaatcgnaggaccaatcaaagaccgttgggattacttttacgaccaacgagctgaagagttcttcaaancacgaatccgtaaatacaactccacggtgtacagagtcaacatgccancgggagcttttatcgccggagaatccacaagtcgtggctttactccgacggtaaaagcttcccggnttaatcgatgtcgata

SEQ ID NO: 3185 - DNA, 434 bp, Arabidopsis thaliana
  unsure at all n locations
  Clone ID: LIB22-008-Q1-E1-E6
agctttgnnnnnnnnnnnnnnnnnnnnnnnnnnnnnnnnnnnnnnnnnnnnnnnnnnnnnnnnnnnnnnnnnnnnnnnnntggtacttagatgcggttcttgtgccaagtgctttacttatgatgtttggttaccacatctatttgtggtataaggttcgaaccgatcctttctgcaccattgttggtacaaattcccgcgcccgtcgatcttgggtagcagccatcatgaaggacaacgagaagaagaacatcttagcggtacaaacactacgaaacacgataatgggagggacgttaatggcaaccacttgcatcctcctctgcgcangtctcgctgccgtttttaaccagtacttataccatcaagaaancctttaaacgacnccgtatatggagctcatggngacttcacngttgcactcaatacgtaac

SEQ ID NO: 3186 - DNA, 420 bp, Arabidopsis thaliana
  unsure at all n locations
  Clone ID: LIB22-008-Q1-E1-E7
naatcagatctagctcaaccatggcgttgctcgtcgagaagacntcaagtggccgtgaatacaangtcaaagacatgtctcaagccgatttcggtcgtctcgaantcgagctcgccgaagttgagatgcctggactcatggcttgtcgtaccgaattcggaccttctcagccattcaaaggcgcnagaatcaccggatctcttcacatgaccatccaaaccgccgtactcatcgaaaccctaactgctctcggtgctgaagtcagatggtgttcctgcancatcttttcnactcaggacangcngccgcagccatcgctcgtgactccgccgctgttttcgcctgnaaangnnagactcttcatgagtactggtngtgtaccgagcgtgctcctagattggggtcaagtgttggtnctga

SEQ ID NO: 3187 - DNA, 416 bp, Arabidopsis thaliana
  unsure at all n locations
  Clone ID: LIB22-008-Q1-E1-F11
catcttgaatcttgattgtgatcattacataaataacagcaaagccttaagagaagcaatgtgcttcctgatggacccaaacctcgggaagcaagtttgttatgttcagttcccacaaagatttgatggtatcgataagaacgatagatatgctaatcgtaataccgtgttctttgatattaacttgagaggtttagatgggattcaaggacctgtatatgtcggaactggatgtgttttcaacagaacagcattatacggttatgaacctccaataaaagtaaaacacaagaagccaagtcttttatctaagctctgtggtggatcaagaaagaagaattccaaagctaagaaagagtcggacaaaaagaaatcaggcangcatactgactcaactgttcctgtattcaacctcn

SEQ ID NO: 3188 - DNA, 427 bp, Arabidopsis thaliana
  unsure at all n locations
  Clone ID: LIB22-008-Q1-E1-F12
gcagcatagatgatcctgcgaaagcgagtttcttcgagtcataccacacacctgtccccatccataacaccattgctacgaaattggggataaaagaatctccaatcaagatcaacagccagactaagtatgcagctttatctagaggagatggagaggtttacttgaggtttactcgcaaagcaagacccgaatcaatatggaatcacgctgctggctcaatcattgtttcagaagcaggagggaaagtgactgatgcagcagggaatccattggacttttcgaaagggaagtatcttgattacaagagaggaatcgtcgttacgacgcagaaactgttgccaaggcttttaacnnnnnnnnnnnnnnnnnnnnnnnnnnnnnnnnnnnnnnnnnnnnaaagctgcttctccaaaacttcactaac

SEQ ID NO: 3189 - DNA, 433 bp, Arabidopsis thaliana
  Clone ID: LIB22-008-Q1-E1-C6
agcaaaacaccaggaggaaaccaaaaagctagaggctttgtggagtgagaagaagagtctcagtgaaaacagaaagcagcatttgagattccactgttaatctttgaattaaaaatgagtgcagcagctacaatgcctatgccccgagaagcgtctaattacgatgagatctctatgcaacagagcatgctcttctctgatagtctcaaggatctgaagaatctgagaacacagttgtattcagcagctgagtatttcgaactatcctacacaaacgatgaacaaaaacagatagtcgtggagacactgaaagattatgcaataaaggctctggtgaatacagttgaccatttggggtctgttacatataaagtaaatgactttgtagatgaaaaatcatgaattaccaggaaccgaactgcgaatttcttgc

SEQ ID NO: 3190 - DNA, 437 bp, Arabidopsis thaliana
  unsure at all n locations
  Clone ID: LIB22-008-Q1-E1-F3
aaaattgtgtccttccaaaatccccgggttctttgatttctccggaaaccggtatttggaaggtccggctccggttatgagcagtatcaagcttcagacatctccacatcanacaagacacattcttgctgaaactccaacttcaagtcccacgaacaaacccaacaacagcactacatcaaaagctccaaagggagctccaaaaccaggnnnnnnnnnnnnnnnnnnnnnnnnnnnnnnnnnnnnnnnnnnnncggcatggatcttagggtttgtcgttggagccataggaggaacaatctctgggtttgtcttctcggtgttgttcaaattgattattcaagcaataagaggatcagaaaaaccaccaagtccttccatattcagcccattgattaaagaaagctgaaagatttaccttccttgggagaatgaag

SEQ ID NO: 3191 - DNA, 437 bp, Arabidopsis thaliana
  unsure at all n locations
  Clone ID: LIB22-008-Q1-E1-A2
aaaaatcnanaatgacttcncctactgcgactaagtatgatgtctttctggagtttcagagggagtcgacactccgtcgcaacttcatcagttttctctacanagaattcgttcgaaggaaaattcgaactttcaaagacgacaaggagcttgagaatggccggaggatttctccggagctcaaacgcgccatcgaggagtcgaaattcgccgtcgttgttgtctctgtaaactacgctgcgtctccttggtgtctcgatgagcttgtgaagattatggatttcgaaaacaagggttccatcactgtgatgcctatcttctacggtgtggatccgtgtcatttgaggaggcagatcggagatgtcgctgaacagtttaagaagcacgangctagagaagaagatcatgagaaaattgcntcgtggagacgaacattg

SEQ ID NO: 3192 - DNA, 441 bp, Arabidopsis thaliana
  unsure at all n locations
  Clone ID: LIB22-008-Q1-E1-A5
ngacggagactgtataatctatcatttcttcacagtaacgctttcatcggaagatctcgccggaaaaaaacttctctctgagatcagatctcttacgattctcagctcaatcttatcttttcctttgttgtgctgcttttcactctcttctgcgcgacgaatttggccttgttttttgtttgtttgtcgtatccgacgcggaggtattgagaaaccgtggcttaagacggaggaagaagatggaagctaacgggattgagaacttgacgaatccgaatcaggaaagagagtttataaggagacatcataagcatgagcttgtggataatcagtgtagctcctacgcttggttaaacataacaacgctcccggtcaaaatggtggtggccacttgtgaagaaagatttgntnagccacaagaagtataanccgtttatcagt

SEQ ID NO: 3193 - DNA, 456 bp, Arabidopsis thaliana
  unsure at all n locations
  Clone ID: LIB22-008-Q1-E1-A7
tggaattcgngggccgacccacgcgtccanaacttgattattttttctgatctgagaaaaaaaatggcgaatggagctaatagagtggatctcgacgggaaaccgatacaaccgttgacaatatgcatgatcggcgccggaggtttcatcggttcacatctctgtgaaaagctcttgaccgagacgccacataaggtgcttgcgctcgatgtttacaacgataagatcaaacacttgcttgagcctgataccgttgaatggagtggtcggatccagtttcatcgtatcaatattaagcatgattcgagacttgaaggtcttgttaagatggcggatctgattataaatcttgctgcgatctgtactccagctgattacaatacacgtcctcttgatactatctacagcaatttcattgatgcgcctccagttgtgaaatacggtctgagaacacaa

SEQ ID NO: 3194 - DNA, 414 bp, Arabidopsis thaliana
  unsure at all n locations
  Clone ID: LIB22-008-Q1-E1-A8
atctaatctccgtagacacttgagcgcaagtcgcctccgcttaaaccgcttcatctctacttcttcttcttatcattcacatcgccgtgttgttgtcactggtctaggcatggtgactccacttggtagaggcgttgaaacaacgtggaggcgtttaattgatggagaatgtgggattagaggattgactcttgatgatctcaagatgaagtcttttgatgaagagacaaagttatatacttttgatcagctttcttctaaagttgctgcttttgtgccttatggattaaaccctggtgaatttgatgaaaccctttggctaaactccaanggaattgccaaatttaancggataatgcggtanttgctgccgatnaanctttgnaanatgcanagtggttacaaactgaagaa

SEQ ID NO: 3195 - DNA, 415 bp, Arabidopsis thaliana
  unsure at all n locations
  Clone ID: LIB22-008-Q1-E1-A9
gnccacaaaatcatctcttttgcttcgctgtttctctcattattccatctctcttatcgccgctacaaacgtttcttcttcaacctcgttcagagattatcctcccttcttttctcatcttacaaggaagttgggcagttaaagctgctgggatcaccagttttgtcaaaagtggagtgtgaagaatcttttatgtctgaacaggcttctctctttcaatcatctatccggcttttaggagagtactgtcctatatctaggaaaaagtccactcataaagttggtggtttgcgttttgaggaggacatcacgagctgtattggatttcagtttatgcaactgagtgattatcactgcctcttctgacatcccttgtttgtttacgtttgttgaatcaagatggctttgcaaaaca

SEQ ID NO: 3196 - DNA, 422 bp, Arabidopsis thaliana
  unsure at all n locations
  Clone ID: LIB22-008-Q1-E1-B10
tagatcgaagcagatctctcgctggaaaacgtcacattgaggtatctatcgccgccaatggtgaaggcactgcaaggcgcggctcanaatctaccggcggatgtcaaccaattgatcgatcagttagagcgtcactgtttggctcccgatggatctcttgttaccaaatctgtctactccgatctccaactcgcgagagaggagatgtctcgggagagacttcggtatttggaagctatggctatttattgtgaagctgtagctatggttgaagaatatcagcaagctatttcagtagctaaccatgggggaattcgtgatgttcaaggtctataccctcaacttggcttgaagaattctcctcangtttatgagactctanagcatangttggtggtttccgaagggggtcaaaaactgaa

SEQ ID NO: 3197 - DNA, 470 bp, Arabidopsis thaliana
  unsure at all n locations
  Clone ID: LIB22-008-Q1-E1-B2
ccggtcatnaatcccgggtcnacccacgcgtccgagtntaaagggatcttcactacacttcctaagcctggtggtggtgaattcggaaagttctatagcttacctgctcttaacgatccacgagttgataaacttccttactctattaggattctgcttgaatctgcgattcgtaattgtgataactttcaagttactaaggaagatgttgagaagattattgactgggaaaagacatctcctaaacaagtagagattccttttaaaccagctcgtgttcttcttcaggactttacgggagtcccagctgttgttgaccttgcttgtatgcgtgatgcgatgaataagctgggaagtgattccaacaaaatcaatcccttggttcccggtggatcttgtgattgatcactcggttcaagtagatgtagctcgatnagagaatgcagtgcaagcaaacatggagcttgaat

SEQ ID NO: 3198 - DNA, 437 bp, Arabidopsis thaliana
  unsure at all n locations
  Clone ID: LIB22-008-Q1-E1-B3
gaanagtttcatcaaactcttcatcagtgcttcttattttcttcaaagcttcaaatttctttttttccttcttgcaatggcaaaatcgaagaaaatttctacaggtcaaatatttggttgtgagagtctccttgggtgcattttccagagctggagccctcgccgtcgaaaaccctctttaccggaaaaggatcatcgggcaaaagataacttgtcttccaagtcatcaacaaccgttacaaaccctaaaatcctcccaagaaaatccaccgatacttcttctcaaccaaagaaatctgactcccagaaaccccaacaaaagccaaaaccaagatgagaatcaccgcgaaaatcatcgggatccgccaagaaaatcatctgattccgcaaagaaaatcgattcgtcaggctcatcaagaacagagagcaangagatt

SEQ ID NO: 3199 - DNA, 448 bp, Arabidopsis thaliana
  unsure at all n locations
  Clone ID: LIB22-008-Q1-E1-B6
aagaaaaaatgccggcggcgaagaggactcccaaggttaaccgtaaccctgacctaatcaggggagttggaaaatattcgaggtctcagatgtaccacaagagaggtttgtgggctatcaaggccaagaacggtggcgttttccctcgtcacgatgctcagccaaaggtcgacgctccggttgagaagcctgccaagttttatccggcggaagacgtcaagaagccgcttgttaacagacgcaagcctaagcctaccaagctaaaagccagcatcactccaggaactgtgttgatcattcttgctggtagattcaangggtaagaaaattgtccttcctcaagcaactttccttctggtttgcctccttgttacaaggaccaattcaagaattaatgggtgtttcaattganaacttgttaaccaaancctaatgtnaattggaacct

SEQ ID NO: 3200 - DNA, 426 bp, Arabidopsis thaliana
  unsure at all n locations
  Clone ID: LIB22-008-Q1-E1-B7
gagattgatgtgttagctcatcaacaagtgaggaagattctatggggtggtcttggttactcagtggttcaaattggaatctttgttaggctaactttttgggagttttcttgggatgtgatggaaccaataacgtttttcactacagctactgggattattgtgggttatgcttatttcttgatgacttctagagatccaacgtatcaagatttcatgaaaaggttgtttctttccaggcagaggaagttgcttaagagtcataagtttgatgctgagaggtttaaagaactggagaacaagtggaagataacgtcttgctcttcttcttcgtgccacgctaatgcatcgattcggaatcgtgttggtgttgatcttgatttggaggattccttgcagagtcatcacagagattgattggntcta

SEQ ID NO: 3201 - DNA, 433 bp, Arabidopsis thaliana
  unsure at all n locations
  Clone ID: LIB22-008-Q1-E1-C1
gaagacgatcttcgatccagagttgagcttctcttctgccatcgtcttcttcctcgatctcggtcaattacgcattctctgatctgatttgtgagatctctcgtcggatcaccgttttttacatcgtcgccgacaacacttaggagtaattggatccaagcanaaatgtcgataaacatgaaaacatttactcaagctctagctagaacggctgctgtgattgagaagacggttcataccacagtacaggaagttacgggaccaaangctcttcaggattacgagctacttgatcagatnggttccgctggtcctggtcnagcttggaagctatacgcagctaangcgcgttgattccacgaaggcacagcaataaccgaaggtctgtgtaatggatgcctgataagcgtgctttgtcggaaggcncctgtaa

SEQ ID NO: 3202 - DNA, 414 bp, Arabidopsis thaliana
  unsure at all n locations
  Clone ID: LIB22-008-Q1-E1-C10
tcatatctccgtctccggctcgatccgccaagtagagtaagcagcacatcatctgcactgcagcaatgactaaaaagaagaatcctaatgttttcttggatgtatcaattggtggggatcccgttcaacggattgtcattgagctttttgctgatgttgtccccaagacagcggaaaacttccgtgccctctgcacaggtgaggcgggcgttggaaagtccactgggaagcctctacatttcaaaggatcatctttccatcgggttatcaaaggattcatggctcagggtggtgatttttccaatgggaatggcactggtggggagagcatctatggtgggaagtttcagatgagaactttagattggaccatgatggaactggantccttcaatggcaaattgtgggccaaaa

SEQ ID NO: 3203 - DNA, 447 bp, Arabidopsis thaliana
  unsure at all n locations
  Clone ID: LIB22-008-Q1-E1-C3
gaaaagaggaagagagagggacaagagaatcataagaagaagacatagtcatgggagaggtgaaagtagacgacgatgcgattcttaaatccttcctcgccgaggtcggagaagttgagagagataacgaagtcggcaggattctctcatgcttcaagctgaatccgtttgagcatcttaacctctctttcgattcttccacggatgatgttaaaaggnagtacagaaagatttctttgatggttcatcctgataaatgcaaacatccacaagcacaagaggnnttcngggcaatgggaaaagcccnacaactggtggcaaacgaacnagnaagngaataaaatccttaaccaaattcaaggctggcaaaggaaganctttaganngagaggnaaggaacnnnttaaggaaagaaaacggctnnaaaaataaaatcccttggtggna

SEQ ID NO: 3204 - DNA, 432 bp, Arabidopsis thaliana
  unsure at all n locations
  Clone ID: LIB22-008-Q1-E1-C5
tcagcgagaaggagagctattcatagaaaaagcggaagtgaaaaagctagcgtcttttttaaagcaggcctcagaggatgctaagaaacttgtcgacnaggaaagagcgtttgcacgtgctgagattgaaagtgcaagagcagctgtacaaagagttgaagaagccctgcgagaacatgaacagatgtctcgtgcctctgggaaacangacatggaagatctaatgaaggaagttcaagaagctangcggattaaattgctgcatcaaccaagcagggtaatggatatggaatatgagcttcgagcactaagaaatcancttgcagagaaatcaaancattttcttcaactacaaannaagctcgcaatgtgcanaaagancgaggaantatcccttgtatatgaaatagatggcactgaagctctaggatc

SEQ ID NO: 3205 - DNA, 418 bp, Arabidopsis thaliana
  unsure at all n locations
  Clone ID: LIB22-007-Q1-E1-H9
ggcttctttggcnggtcgtcgtaagagcatagctgatatgattcatgcggcctcattcggcaggaaatcgtccaacgancacaagagatccatgccatttcctctgatacatcttcagaacacgcagtnaagattaccggagtccgatataaattcggttaatctgntgagggagacagattctctctccagcgatgctattgctantgaagatccctttancactgatttggcctcacaaagttttactagtgcncagacagagagattgaacgcnaggcaagcgagccatgaggacaacaatctatctgtttttggtgcttctcctccatcctctgttgcttcaataatgncgangaaccattanagacnaacaatctcagngaanggagaatgctccacagtacacacntcaatc

SEQ ID NO: 3206 - DNA, 448 bp, Arabidopsis thaliana
  unsure at all n locations
  Clone ID: LIB22-006-Q1-E1-D8
gcttgggccgtacgctaatcttgggccaagagatgtttgtactccggcccataaacatttagctcttgaagcagcccancaagggattgttcttctcaaaaactctgctcnctctcttccactctcncccagacgccaccgcaccgtcaccgtgattggtccaaactccgacgtcactgagactatgatcggcaactatgcagggaaagcatgcgcctatangtcgccgttgcaagggatttcaagatacgcnaggacacttcaccaanctggctgtgccggcgtggcttgcaaagggaaccaaggatttggtgcancggatgcagcggcgcgtgaagccgacgcgacngttcttgtgatgggantaaatcagtcgatanangcagagacacgatatcgaaccggggcttctcttaccgggttatcaacaagatctaatgacccgtgt

SEQ ID NO: 3207 - DNA, 453 bp, Arabidopsis thaliana
  unsure at all n locations
  Clone ID: LIB22-006-Q1-E1-E1
ctgctcctttagtcatcttctcttttgagaaaagatagatcttcttcaccttcttcattgatctcagatcccgatcccgtctccttatcttccgccggcgacttcttcatttttctcttctacctaccacctcttaatcattctctctccccccgcagatctagcgaatcgaattcgaatccttaagtagtagtggaatcatggcgctaagcatgcgaaaagcgatcggagttgttaaggatcagactagtatcggcatagcgaaggtagctagcaacatggctccagatctggaagttgcgatcgtgaaagctacaaagccacgacgatgatnaatctagtgacaaagtatatcccgcgagattcttaacttaacttcactctccccgtgggctacgttcacgcctggtgtcacctccggttcaacgccgtcttaaagaangacgcgtgact

SEQ ID NO: 3208 - DNA, 427 bp, Arabidopsis thaliana
  unsure at all n locations
  Clone ID: LIB22-006-Q1-E1-E10
tngacaantaagatngttttattccttacaccattatttcgggtttttaattttcgantttggattgatcgattaagccacttagactagtcnctgcgaaagaatgagactgagaagttggacatctcgatacttttggaaaccccgatttgttgatgactcttgaatctatgggacggtgaatcccaaagaatggttccattttaagtttgttttgtattgttggtggaggctggatgattttgagagcacttgtacttgagctttgttctcatatcttgaattacacagtggaatanaaaagatgacaactttgtattaagtaagatgatgaacacntgtagctcttcctgctagatatttgattaatggaattgcctgttttcccctttttttgagttgcaantgganttcaggattgataatg

SEQ ID NO: 3209 - DNA, 424 bp, Arabidopsis thaliana
  unsure at all n locations
  Clone ID: LIB22-006-Q1-E1-E11
gatctggcaaagtgtttaatttccgagaaagttgaagcagagaagcagaaagtttcagaattctcttttctccaagtttaacgcttttttagctcaaagctcacacacacgaccactctattcctcctttaacctttgtgtttgtcaannnnnnnnnnnnnnnnnnnnnnnnnnnnnnnnnnnnnnnnnnnnnnnnnnnnnnnnnnnnnnnnnnnnnnnnnnnnnnnnnnnnnnnnnnnnnnnnnnnnnnnnnaaagtttcgattaagaagatagtggtttaggtttacggttttgtaattgatttattatctgtaatgggttgtgaggtttcaaagttatctgcactttgttgtgtttcagagtctggaagatcgaatcctgatgttacanggcttagatgangaanggagaaggtgaatcaa

SEQ ID NO: 3210 - DNA, 431 bp, Arabidopsis thaliana
  unsure at all n locations
  Clone ID: LIB22-006-Q1-E1-E12
gcggacgcgtgggggaaaagagagagatgaggaagttgaatccgcttctgaaacgaggcttgaaggctattgaaaatggtgatttgttgaagatcctccaaagtgaaattcgtcacgaaatctcccatcctcgtttccagggcgttgagaccggttctctaggagatttcaaattggattgggattcaccggaaagccaagatattgttctgaagagacagtttgattcaggcgagaaggttgtggtctctgctttattgcaaccagaacctatagaactagaagatgatttagtgtttcctagggaagctcatgccaaagtttgtatcaaaaagcctggtctcagctctatcttgcagtttcattgccgggtttacgaatcaggatctgggatcttctcanttcgacatcganaacgcctactttatccc

SEQ ID NO: 3211 - DNA, 446 bp, Arabidopsis thaliana
  unsure at all n locations
  Clone ID: LIB22-006-Q1-E1-E2
gcggacgcgtggggtangatcttccacttgccgctctttgaaaatcactcgccgtgtctctctaagcttcttcttcactgtnaaaacctcagatcgcaaatatgcacgcaccggtactcgttctgagcgattcgttgaagcgtgaatctggaagtaaggttcatcatggtaatatccaagcttccaaggctgttgctgatatcattcgtacaacattgggtcctcgttctatgttgaagatgcttcttgatgctggtggagggattgttgttactaatgatgggaatgctattcttcgtgagctagatgtcgctcatcctgcagctaagtcaatgattgagttgagccgtacgcaagatgaagaanttggtgatgggacaacgtctgttattgttccaactgggtgaaatgctcacgttgcagaanctttcntgagaagaattaca

SEQ ID NO: 3212 - DNA, 441 bp, Arabidopsis thaliana
  unsure at all n locations
  Clone ID: LIB22-006-Q1-E1-E3
atgatgtcaagctttatgttgggagggcaaggtcagcagataagcacgccatgcacctcctccatgatctctaccttcactccatgtctcaacttcatcaccggaagcagcggcggttccgtcactcccaccgccggctgctgcgactccttgaagacgttgaccaacactggcatgggctgtgcttgcctcatcctcactgctaacgtcccgctgcctactggcttcatcaatcggactctggcgcttgctctacctcgagcctgcaaaatgggcggtgtacctattcaatgtcaagctgcggggactcctctaccaactccaagtcaggttccatttttgattgctccaccacctcaagtgtctgctttagcccgggaacctcaanggcggcngggacaacaccaacacaggcactgcancggatactcccgcggatgg

SEQ ID NO: 3213 - DNA, 450 bp, Arabidopsis thaliana
  unsure at all n locations
  Clone ID: LIB22-006-Q1-E1-E6
gctccgccattagagtcactggtgctagcagcagtagacgaagcagtcagaccaaatccaaggctgctcctactcccatcgataccaaggcctctaccaaacgccgaaccggctccatcccctgcggcaagcgtaccgattttggctactccaaagacttccacgatcactacaccatcggcaagttgctcggccatggtcaattcggctacacctacgtcgccatccacagacccaatggagatcgcgtcgccgtcaaaagactcgataagtctaagatggttcttcctattgctgttgaggatgtcaagcgtgaggttcagattcttattgctctctctggccacgagaatgttgttcagtttcacaatgcctttgangatgacgattacgtctatattgttatggagttgtgcgaaggaggcgaattgctgggataggatattatcc

SEQ ID NO: 3214 - DNA, 401 bp, Arabidopsis thaliana
  unsure at all n locations
  Clone ID: LIB22-006-Q1-E1-E7
natnttttttttggttttaaaaagaaagttgggatttttgaagcgatcttgtttctctacnatggatgctgctatctttacttccgtanacgtttgcaatataccaaagacgaagaangctttcttcaacccgaatccgcctgctctatcttcgtcttcttgttggctctgcaattcgcangccaagcaaatcatanaactgagaatcagggaaggctcgaatcaggggcttcttcgtgtacatgctctgtttaacaacgaggaggcatcangtgaaagtgaagatangaatgggtttggtttgctaccggcggatattttctctttgcctcaggagaagtttggaagtaatgtaagtggtgaaaaggatagtgnaaanataattgatgtngagacatctc

SEQ ID NO: 3215 - DNA, 442 bp, Arabidopsis thaliana
  unsure at all n locations
  Clone ID: LIB22-006-Q1-E1-E8
ggcnnnnnnnnnnnnnnnnnnnnnnnnnnnnnnnnnnnnnnnnnnnnnnnnnnnnnnnnnnnnnnnnnnnnngactcatttccctcattagatcttcttctccactaaacccataattgaaagaagctctttttttgcttacattgaagttaaaaaatcatcacttgttttgtttttgaagaaacacacataaagtttgtctttttacttctcaaatttggttgttttcactcaatttcaatcttgctttctgattcagattctgggttttcttcagaattcccagagaagttgttggaattgaatttttcacttttttgttcataaaagttctagtcnttttagatgaacatggacaaggaaacagagcaaaccctaaattacttacctttgggtcagagcgatcctttggcaatggcaatgaangaacaattggagattc

SEQ ID NO: 3216 - DNA, 428 bp, Arabidopsis thaliana
  unsure at all n locations
  Clone ID: LIB22-006-Q1-E1-E9
cgnggcttactatagcagttgaattggtagctaatccatcaataatcttcatggacgagccaacatctggtcttgatgcaagagctgctgccattgttatgcgtactgttaggaatactgttgatacaggaagaactgttgtttgtacaattcaccaacctagcatcgacattttcgaatccttcgatgagttgctgttgatgaaacgaggaggacaagttatatatgctggaacactaggacatcactcacaaaaactcgttgaatactttgaggctattgaaggggttccaaagatcaaggacggatacaatcctgcgacgtggatgcttgacgtcactactccttcaatggagtcacaaatgaacgtggactttgctcaaatattcgttaactcctctgttaatccgagaaatcaggaactcatc

SEQ ID NO: 3217 - DNA, 455 bp, Arabidopsis thaliana
  unsure at all n locations
  Clone ID: LIB22-006-Q1-E1-F3
gatacccgatantctcttctatgtttggtagagatatcttcncanagtcttatctttccttaccgtgttcngtgttttttgatgatttatgtgaacaagantcaagcagagacancctacgattatgaagtacgttttggtgacaggaggagtggtgagtggtcctggcaaacgtgtcacngctagtagcattggacttctccttcaagcatgtggtcttcgtgtcacttccattncaattgatccttatcttaacactgatgcnggnacaatgtctccgtttgagcatggntaagtatttgtcntggatgaangtggagaagtggatttgnncctnggaaactaatgaacgattttttagacagtacatttgacccgtnacancaanataactaccgggaaagatataccagtcaagttattgacaaaggatnggaagggggactactcggaac

SEQ ID NO: 3218 - DNA, 450 bp, Arabidopsis thaliana
  unsure at all n locations
  Clone ID: LIB22-006-Q1-E1-F7
gaacactcacncacncangtanttccattacctctctcacnaaaaatcanacttttctctgtctcactctctccaaaaacagaggaaggagaacaaaccaagaactcaagctcccctgctcttctcatctttcttcttcgttttctattttctttcttctttattctttgattcttttgaaatgaatcatctttacaaaaacccatttcgcatttatgaaattagtttccatttctgcgcgagtctactcttgtgtttcttactcttctctgctcaagctgttgcaggtggtggaggtggtggtcactcttgggatggaatcgtggtgactcaggcgaactatcangcactccaatgctatcaancacganctcattgacttcaccggagttctcaaaaagctgggaacaactctgcctcntctcaagtttgctcaggctgggctggaat

SEQ ID NO: 3219 - DNA, 441 bp, Arabidopsis thaliana
  unsure at all n locations
  Clone ID: LIB22-006-Q1-E1-F8
ggccatttcaagccttatgcaggagccatttcgttcagtaccacttatatggatagttcatgaagatattcttgcaaatcggttacctgtttaccaaaggatgggccagaattctcttatctcccactggagaagtgcttttgcgagagcagatgtggttgtctttccacagtttaccctgccgatgttgcatagcgttcttgatgatgggaacttcgttgtgattccagaatctgtagttgatgtttgggctgcggaaagctacagtgaaacccatacaaaacaaaatctaagggaaattaacgaatttggtgaggatgacgtgatcatcttggtgcttgggagctccttcttttatgatgagtttcntgggataatgccgtggcaatgcacatgttggggaccacttttaacacgatatgggangagaaaagattcaag

SEQ ID NO: 3220 - DNA, 433 bp, Arabidopsis thaliana
  unsure at all n locations
  Clone ID: LIB22-006-Q1-E1-D7
gctcaacaatggtgtttgaagcattcgaagtcggcacagtcccattcaattccgatggttggggaccacnagatgcttccgacacttccnccaccagcgtcgcggcggcgaatctcctcccaaacgtccccttcgcttccttctcacgatccgaaaaactcggacgcgttgctgattggactcgagctctctcaaatccatcagctcgtcctcacaccggatccaaatcagatccatcagcgatcttcgatttctcagcttttgcagtagatgaaggatttggtctaacaaactcangtggaaacgcngactaagacgccgctttccgattantcgacggaaaaacaccggccgcgtcctaaattccggactaaatggganaatcaatcaatgnncataaccgaanatcagcttcctcaacgttnttaatgaa

SEQ ID NO: 3221 - DNA, 455 bp, Arabidopsis thaliana
  unsure at all n locations
  Clone ID: LIB22-006-Q1-E1-C1
gcaaatcgactttcatattttctctgcataagagagaaagaaaatgggatctcatgtcgcacaaaaacaacacgtagtttgcgttccttatccggctcaaggccacatcaacccaatgatgaaagtggctaaactcctttacgccaaaggcttccatattaccttcgtcaacaccgtctacaaccacaaccgtctcctccggtcccgtgggcctaacgccgttgacgggcttccttctttccggtttgagtccatccctgacggtctacccgagactgacgtggacgtcactcaggacatccctactctttgcgagtccacaatgaagcactgtctcgctccattcaaggagcntctccggcaaattaaacgcaaggggatgatgttcctccctggnganctgtaaccgtatccgacnggttgtaagaacctcacacttgatgccgccggaggaa

SEQ ID NO: 3222 - DNA, 482 bp, Arabidopsis thaliana
  unsure at all n locations
  Clone ID: LIB22-006-Q1-E1-C10
ctgtttacgccngccagtaccggtccaanaattcccgggnccaaccaanccttcgncnatttcgcggtgggctcgattcgtgattcctcaaagttcatcatccctaaggcactgtcacttaatggcatcggaatcgaaaagctacgctaggagagatcgtcttcttgagattgaggccactgttcgaaagtggtgggaagacgaggatgtattcagagccgaatcttgtgagaatcttccaaaaccaggagaaaagtttttctcaaccttccctttcccgtatatgaatggttatctacacattgggcatgccttttcattgtccaaggttgattttgcttctgcttaccataggctaagangagctaatgtgcttctccaatttgggtttcaattgtactggtatgccaattaagggcttctgcggataaccttcgtcgtgagattgaacagtttgggtaacctcctgtgttactgctgaa

SEQ ID NO: 3223 - DNA, 419 bp, Arabidopsis thaliana
  Clone ID: LIB22-006-Q1-E1-C11
gctcaaaggctctctctgtctctctctctcacaattactgatcggttctgaaatttgtagctatgcaggcaacggctttatcatctgggttcaatcctctaacgaaacgtaaagatcacagatttcccaggtcatgctctcagagaaattctctgtctttgattcaatgcgatataaaagagagatctttcggagagtctatgacgatcacgaatcgtggattgagttttaagacgaatgtgtttgagcaagctcgttctgtgactggagactgttcttatgatgaaacttcagctaaagcacgttctcatgttgttgcagaagataagattggtgtctgctttgaattaaggtggcctgaaacccttaacgatgttcaaccttcctggtaaaacctctttgctgatccggatataaaa

SEQ ID NO: 3224 - DNA, 473 bp, Arabidopsis thaliana
  unsure at all n locations
  Clone ID: LIB22-006-Q1-E1-C12
agtaccgggtccaagaattcccggggtcgacccacgcgtccgcagagcttgaaggtgttgttaaaagtgctacatcatatgcattaaacagacaactaagcatggatgatcttacaaagcctgtggaagaagagaatatcaagatcactatggaggattttctccacgctatctatgaagttcaacctgcatttggagcctccacagatgacctagagcgctgcagactcaatgggatggtagattgtggtcatcggcataatcacatttacaaaagagctatgcttctagtcgagcaagttaaagttagtactagaagtcctctagtcacttgccttctggaggggcccagtggaagtgggaaaactgctttagcagcaacaattgggtatccgatagtgacttcccaatatgttaaagatagttctgcggnaactatgattggtctttctgagagcacaaaatgtgctcac

SEQ ID NO: 3225 - DNA, 453 bp, Arabidopsis thaliana
  unsure at all n locations
  Clone ID: LIB22-006-Q1-E1-C4
gcccacgcgtccgcgcagacttcgcactcacacactcacttccattgctccaaaaaaacattgtatctacttcacttgctgtagagatatggtatcaagatcttattcaaacctcttggatcttgcttctggtaacttccattcgttttctcgagaaaagaanaggtttccaagagtagcaactgtcactggtgtcttatctgagctagatgatgataacaacagcaacagtgtctgctctgatgctccttcttccgtcacacaagatcgaatcatcatcgttggaaaccagcttcctattaaatcacatcggaactctgctggtaaattgagttttagttgggacaatgactcgcttcncttgcagcttaaaagatggtatgcgtgaagatatgggaagtttgtctacattgggttgccttaanggaacagattgatacagttgagcaagat

SEQ ID NO: 3226 - DNA, 450 bp, Arabidopsis thaliana
  unsure at all n locations
  Clone ID: LIB22-006-Q1-E1-C7
gcaaccacatcatgggaagaactcttaggctcaaagaattgggacactatcttagacccattanaccaatcacttagggaactcatcttacgttgtggcgacttttgtcnngccacctacgatgccttcgtcaacgancaaaactccaagtactgtgganccagccgctacggcanatcttctttcttcgacanggtcatgctcnaaaacgcttccgactacnatgttgtaaacttcctctacgccacanctcgtgtttctctccccgaaggtttgcttctccaatcacaatcancnagattcctgggaccgtgagtctaactggtttggctacattgctgtcncgtctgaatgaanngtctaaagctttaggacgccgtgagatctatatagctttganaagaacgagcaggaactaagagttggtnaaatgttttggggtgctangcc

SEQ ID NO: 3227 - DNA, 443 bp, Arabidopsis thaliana
  unsure at all n locations
  Clone ID: LIB22-006-Q1-E1-C8
gattctcctctgaatcaacctctaagttgctgttgaatgagaaagctttgatgtgagcgagcctgagagtgtaacaaaggactgatgatgaagattattgcggcgtttctcttcctcttggtcacgacttttgtttcccgttgtttgtctgcagacatagaatcggacaagcaagcactgcttgagtttgcatctcntgttcctcacagtcgcaaactcaactggaactccactattccaatctgtgcctcttggactggtatcacctgcnccaagaacaacgcccgtgtaaccgcactccgtttgcctggatctggactttatggacctttaccanagaaaacatttgagaagcttgatgccctcangatcattagccttagatccaaccacttcaagggaacattccatctgtcatccttcacttcctttaanccgatgac

SEQ ID NO: 3228 - DNA, 451 bp, Arabidopsis thaliana
  unsure at all n locations
  Clone ID: LIB22-006-Q1-E1-D1
gagagagactctgtagaagaagcacatgaattgttctggttttatgatagctttctcttaagaagaagaagaagaaagataaattaaaagggtggttctgagttttaaggattattgtttgannnnnnnnnnnnnnnnnnnnnnnnnnnnnnnnnnnnnnnnnnnnnnttatctgattgctctaatgaatatgagaagctcgttgttcggatgaacatgcccagggtcgtaattgacaatggagtttgccctaattcaactgtcgtcaagattgatagtgcaagaagcccaggaatattgcttgaatctgtacaacttctcactgatatgaatctccggatnaaaaaagcttacatttcctctgatggaaaatggaatatgggatgtttttcatgtgagcgatctaacggagacaaattaaccgacgagaacctaatcccgttacattgaa

SEQ ID NO: 3229 - DNA, 481 bp, Arabidopsis thaliana
  unsure at all n locations
  Clone ID: LIB22-006-Q1-E1-D10
cttttacccgccagtaccggtccaanaattcccgggnccaaccaagccttcgnccaanccttccgcccanncgtccgatcaaatcaaatcaccatggctttagcttggtgcgttgtacgcaggtcagcatctaagtttgcttccgtttatggtggccgagtccgatctatctccgccgttgcgaaccgcgcctctctagctcgcaacccatcttcaattcgtccattcgtctctcgcgccttaaattactcgacggctattgatcgaattagctccgagcaaacgcttatccgagttattgactccgaaatcaactctgctttgcaatccgataatatcgattcggatgaagagatgactccaggaagctttccttttagaattgaagacaaacctggaaatcagaatgttacattgactagagactacaatgggggaacatattaaagttgttgtaagcatgcctaagtcctggttcaga

SEQ ID NO: 3230 - DNA, 418 bp, Arabidopsis thaliana
  unsure at all n locations
  Clone ID: LIB22-006-Q1-E1-D11
ttggaaatggtcatgtacgacattgcaaccagggaaacaacatgtatctatttccaggtattggacttggcactcttttatctggtgctcccattgtctccgacgggatgcttcaggccgcatccgagtgcctagcagcatacatgagcgaagaagaagtgctagaggggattatataccctccaatatcaangatacgagacataacanaaagaatancagctgcggtgattaaggaagcgattgaggaggatttggttgaaggatatagagaaatggacgctcgagagatccaaaagctggatgaggangggctgatggagtatgtggaaaacaacatgtggaatccagagtacccgactttggtctacaaggatgactaagtttgggttcccaaaatgaataagtctactttctc

SEQ ID NO: 3231 - DNA, 438 bp, Arabidopsis thaliana
  unsure at all n locations
  Clone ID: LIB22-006-Q1-E1-D12
gaggttatgatatagtgatgaccactagtctatcatcagatgttcctgttggatatttttcgtgggcggagtatgatattatgtctccggtacagccaaaaactgagagagctattgcagctgcttttatttctaattgtggtgctcggaattttcgtctacaagcacttgaggcattgatgaaaactaacattaagattgattcttatggtggttgtcatcgaaaccgggatgggaaagttgacaaggttgaagctcttaagcgatacaaattcagtttggcttttgagaatactaacgangaagattatgtcaccgaagaaattccttcaatnccttaagttgcctgggtcccgttccccgttggtaatttgggccctccaaaattattagaaagaantttccgcctggcttccggactcattcccttcaaaatta

SEQ ID NO: 3232 - DNA, 440 bp, Arabidopsis thaliana
  unsure at all n locations
  Clone ID: LIB22-006-Q1-E1-D2
tgtagaagcaatctcactttttccctttctctgtacatcatcatccttcaagctcggagctctctcttcccgccggcgatctcctccgcttctctccgattttaagtcgatcgaatggggaaaatcaagaaagtgaatcaaaggggtcatattgctacaccgtatccatcaccatgttgtaagaaagaatgggctggctcaacctgtccagtatgcttggagtctccacacaatgcggttcttctcctgtgttcgtcttatcacaaaggatgccgtccttacatgtgtgctacaagcagccgttttgccaactgccttgatcaatacaggaaatcctacggtaacgaaaactcangacaacccgagcttttgtgtccactgtgtagaagtcaagtgaaangctggactgttgtgaaagatgcccggatgcatttaactcc

SEQ ID NO: 3233 - DNA, 449 bp, Arabidopsis thaliana
  unsure at all n locations
  Clone ID: LIB22-006-Q1-E1-D5
gaataaaaanatganacantcttctttctcatggacagatctcaagaacactgatgccaatggtgaccagaacttaggaagcaaaccttatagatcatgaggtggtaactgaatcatcatcatcagctgtgcctcaaaccgagaactataaaaggtggcttcgtgtctccatatacgtaatctttgtcctcttttgccagccactagctacaattctgggtagattgtactatnaaaatggaggaaatagcacatatgtggtaacacttcttcaactcattggcttccctgtacnggttctgttccgcttcttttctcgaatcangcatcccagatcaacagatacaantttcaagtcagtccccntcnttcaacanccttgcatcggttnacntgtgcactggactgctantgtccgcntangcntatttgtcgtaatagggttgccc

SEQ ID NO: 3234 - DNA, 451 bp, Arabidopsis thaliana
  unsure at all n locations
  Clone ID: LIB22-006-Q1-E1-D6
gccaaaaccttagctgatgtaaaggggggaactctcatttcttatgaaggcaaagtccagcttctggagattgctcaggttcctgatgaacatgtcaatgagttcaaatcaattgagaagttcaagatattcaacacaaacaacctatgggttaacttgaaggccatcaaaaagcttgtggaagctgatgcacttaaaatggagatcattccaaacccaaaggaagttgatggagtcaaagttcttcaactggaaactgcagccggtgctgcgataaggttctttgacaacgctatcggtgttaatgtacctcgctcacggttcttgccagtgaaggcaagttcagacttgctgctcgtccagtctgatctctacaccttagttgatggctttgtcactcgaaaacaaagctagaactaanccctcgaaacccgtcaattgaantgggaac

SEQ ID NO: 3235 - DNA, 448 bp, Arabidopsis thaliana
  unsure at all n locations
  Clone ID: LIB22-006-Q1-E1-B7
gctatggttgccttttccatgagcttttggctttccagcttgctgatcgccatgccccggctgagagggaaagtgagaaagcaaagtctgaagagatcattggattttcaagctcagcagtctctattctaaaagatgctgagctttcagtcactgagattgacgaaacttctctaatccacatggatgttgatcaaagtttcttgcaaattccacaatctgttaaggctgcaatctttgaaagttttgtgaggcagaacatatctgaagcggaagttgatatcaacccatgtattaagcagtttgtgtggagtaattatgggtttccaaccaaaagcagcacaggctttgtatatgctgatggctcactancactattcaataaactggtaanttgttgtgctcaagaangtgggaacgctttgtttacctgccnggtacaaaatgg

SEQ ID NO: 3236 - DNA, 449 bp, Arabidopsis thaliana
  unsure at all n locations
  Clone ID: LIB22-005-Q1-E1-H2
gcggacgcgtgggcggacgcgtgggggactgttagagagctcaggcggcggcgtgggaggttccgtcgaggaggaaaaagatatgaagatggaggaaaccggtgaaggagccggcagcggaggaaaccggtggccaagaccagagactttagctctattgagaatacgttcagagatggataaagcttttcgtgactctactctcaaagctcccttatgggaagaaatttccaggaaaatgatggagcttggttacaagagaagttcaaagaaatgcaaggagaagttcgagaacgtgtacaagtaccacaaacgtaccaaagaagtcgtaccgggaaatccgaanggcaaaacttaccggtttttccaaagaatttagaancntttcgagactctcaagttcctaacaaccctgaancctgaattccaaacccgcgaaatccttctgc

SEQ ID NO: 3237 - DNA, 441 bp, Arabidopsis thaliana
  unsure at all n locations
  Clone ID: LIB22-005-Q1-E1-H3
gcagcntcgcccaatccgaaggtgccatcgcctatgtcacctggtgcgaccctgctttgcaatcgtgcaacccccctgctggtggtaacggtgatcctcaattcgtcggtttgcaaggccaaaactaccaattccacggtatggctgatgaggtgttctccttggtctctacccctgagttgcagatgaactctttgttcaaattcatcgcctctggtaactgcgagtacaacaacaccgtctgctggtctcaccctggtacctatttgggtcaaatcgccatccagtatggtaacgagaagatcttgttgcantctggttctcactcgganggtgccaaccgttctggtcaaacgacaaaggcaantggcccctaacgnccaatgtncaaaaatnncaatgcctccggcaaatcgaaccttgttcangtcccttggttgg

SEQ ID NO: 3238 - DNA, 439 bp, Arabidopsis thaliana
  unsure at all n locations
  Clone ID: LIB22-005-Q1-E1-H4
gagccacgaaggaaaagtaacgtttccgataaacttaggtttaagaaaattgagaagaggaacgataatactgaatctgagagtttaagtgttgttgaggaaccgaagaacgataaagaattgagtcttcgagctttgaatcaaaatggtgatccattagggcggagagatttagggaggaacgtagtgaagtggattantcaggcgatgaaagcgatggcttcggattttgcaactgcggaggttcagggggagttttcggagttgaggcagaacgtcggatctggtttgacgtttgtgattcaagctcaaccgtatctcaatgctattcccatgccattaaggttctgaaatcaatttgtttgaaaggcttgtacccattaacccaaccntggtccattaatttccaaaagaaagttgccttgatgttccntcaaag

SEQ ID NO: 3239 - DNA, 435 bp, Arabidopsis thaliana
  unsure at all n locations
  Clone ID: LIB22-005-Q1-E1-H5
gatttgagggtgacaacatgattgagaggtccaccaaccttgactggtacaagggaccaactctccttgaggctcttgaccagatcaacgagcccaagangccgtcanacaagccccttcgtctcccacttcaggatgtctacaagattggtggtattggaacggtgccantgggacgtgttgagactggtatgatcaancctgntatggttgtgacctttgctcccacaggattgnccactgangtcaagtctgtttanatgcaccacgantctcttcttnatgcacttccangtgacaacgttgggttcaatgttaanaatgttgctgtcaangatcttaagacaaggtacntcgcatccaactccaaggatgaccctgccaanggtgctgctaacttcaactcccaagtcatcatcatgaaccaacctggtc

SEQ ID NO: 3240 - DNA, 479 bp, Arabidopsis thaliana
  unsure at all n locations
  Clone ID: LIB22-005-Q1-E1-H6
ggcccggtccaaanaaccgggncggccacgcgtccgaacaaaactcaaaacccaacaattaaagaaacaacatttcaatatacagatttacttccttttacagattttcctaaaaaaccgaaattgaaacaaacaaaaccaaaagacgttaccttttttccattgattcctcaattctctaaacaaatgagttaatcttccatggctgccatgttgatgcagccatggccaccgtttcttcctcatctaaccctagttttcttaaccctaatcctctttttccctaatcaatccttttctcaatccgattctcctcgaaacatcgaaacatttttcccaaatgacacaatcacccctccaagttcaatctccggttctatcgccgccgcaaaaccatcatcttcgtcatcggattcaagacagaggaaatatcctgagggctgtgctataacaagcaagcaagcactttacttgtagca

SEQ ID NO: 3241 - DNA, 474 bp, Arabidopsis thaliana
  unsure at all n locations
  Clone ID: LIB22-005-Q1-E1-H8
attctcgggncccgccacgcgtccgaaccacgaaggaaaagtaacgtttccgataaacttaggtttaagaaaattgncaagaggaacgataatactgaatctgagagtttaagtgttgttgaggaaccgaagaacgataaagaattgagtcttcgagctttgaatcaaaatggtgatccattagggcggagagatttagggaggaacgtagtgaagtggattaagtcaggcgatgaaagcgatggcttcggattttgcaactgcggaggttcagggggagttttcggagttgaggcanaacgtcggatctggtttgacgtttgtgattcaagctcaaccgtatctcaatgctaattnccaatgccattanggttctgaaagtcanttggtttggaaggcntgtactcantaancctaccttgttcgattcatttccaagaagaagaagttgcgttgatgttcctcaaagnacct

SEQ ID NO: 3242 - DNA, 429 bp, Arabidopsis thaliana
  unsure at all n locations
  Clone ID: LIB22-006-Q1-E1-A1
ggattactcaagcgatatgcgattaaaagcttcaaatttgcagaaacccatcttcttcagctcctactctgcccatgatattctcagagcgtctttcattgagaagtttctggtctccagaatcctttttgtgcacttaagattccttcttggtgtttggagaaagttaagtgaacatcccagtgcagtgacttcaacatgttctcaacttctcttatcacatttgattcgtcacgaactattagtttacctcctggtcctactattctatccacttctgccattactgggacaaagantgcanctttcaaaacaaaacaaaacaagagacntaatggttgatgaaacgttancaaaaggggtggataataagagttacgcctaaaacctggtcncaactttgagaaaagatgatntgcatgtaagaga

SEQ ID NO: 3243 - DNA, 434 bp, Arabidopsis thaliana
  unsure at all n locations
  Clone ID: LIB22-006-Q1-E1-A10
gggaaaaagcaagcnccttcctcctccctncttnccctttttnnaaaccnnaaaancaaagatccgaaacacgatttcggaggaagcttcgattctacctattttcagatctgaaatagttgtgtttgagaagcgggattggtgatcggagctggaatttggttggtaatcggaggtcagagagaagtcaacggatatgccggaggaagaatcgatagatatcaaattcaggttgtacgatggctccgatatcgggccttttcggtattctgcggcttctactgttgactttttgaagcagagggtcgtctctgattggcccaaaaggcaaaacaagttgttncaaaaggggataaacgaaattgaanctgataaaccccgggtaagaatcttggagaacaacaaagactgtttgggcattgttaagacaccat

SEQ ID NO: 3244 - DNA, 427 bp, Arabidopsis thaliana
  unsure at all n locations
  Clone ID: LIB22-006-Q1-E1-A12
gctttgtctgttaggtttagagagatcctttccaaagatccaaagctggaaactttctagtcaatgctgcttaagatctgactttttcccttcaatgtcgctctgaaatcccctaaatttttgggcccatcaggtgaataaagcggaggtcagaagatgggttctggtttaaatgacacattatctcggaactacaatggtttggagctatgggagataatagtgattgttctctccgcgatattcgttgtagttttagctatatcgctatggcttactttcagaagaaaaacctctagatcttcttctaatctaatccctgttagtcgccagattcctcctaagtgttcctgaagagattaaagagattagagtcgacgaggtttcttcaagcaatgggtggggaatggataccctctantagtga

SEQ ID NO: 3245 - DNA, 511 bp, Arabidopsis thaliana
  unsure at all n locations
  Clone ID: LIB22-006-Q1-E1-A3
atgcggccgncaagtacggaacaagnnttcgggggacgcacgcgtccgcctccttgagtcgaaatgctactgtgacgactctgtttgcttctcttccttttcttcctcggcaacaacaacacccttcctctcctcactccctatccgccaaaatctcttcttcttcctttttcttattttcctttcaatatctgatagctgcaaaacagaacccaccatgtctggtctgtataattataataacttctcaccttctagagccgcttctcctcagattagaaccccttcctccgatgttgacagtcaatacatatctcaattgttagcaagagcatcaaaagcttggacctttcatgcaaagtcttacccatttgtagccgactcctaaatcaagaaattttccgggattcaccgggaatgatgcccaaaccaaagggatttaacggattttggataaggttacgggaatcgaagtccctaagtccaaatgggcttcaacaaaatcctaatg

SEQ ID NO: 3246 - DNA, 425 bp, Arabidopsis thaliana
  unsure at all n locations
  Clone ID: LIB22-006-Q1-E1-A9
gagcccatcatttttttatttctcctgcgaattctccgccatagattttcttttgaatttctcctgctaactcttgagctccccaaaggcggctacatcggttttgtcacctctactcgctcacttttctccgtccaattttgcagcttttgaagatcaagaggtgaacattcggagtgatgaatcggccaaaggttcagcgtcgtgttggaaagtatgaggttggaaagacgcttggacaaggcacttttgcgaaagttcggtgtgctgttaatactgagacaggagaacgcgtggctctcaaaatacttgataaggagaaaggtcttaagcataagatggctgaacaagataaggagagaaatttgtactatgaagctgataaaccatccaaaatgtaatgcggctgtatgaagttttggcna

SEQ ID NO: 3247 - DNA, 452 bp, Arabidopsis thaliana
  unsure at all n locations
  Clone ID: LIB22-006-Q1-E1-B1
gcccacgcgtccggcaatcttcgctcttctctttgcnctctcnctcncancgcggttcaggatccgagtttgggagattcaagctccctgaaaanagccctttantctcgcttaccaactttgctccagcatggcaggatntgcaccagaaggcacacagtttgatgcacgtcagtttgaccagaaactcaatgaantacttgagggacangatgagttcttcacatcctatgatgangttcatganagctttgatgccatgggtcttcangagaancttctcaggggtanttatgcttatggttttganaanccttccgctagtcagcaacagaggaatcgtccccttctgtaaggggtcctgatgtgaatcaacaggctcaagtctggtactgggaananaacanctttctgccctggtgtcntgcaacaactgggacctctcccgtatc

SEQ ID NO: 3248 - DNA, 424 bp, Arabidopsis thaliana
  Clone ID: LIB22-006-Q1-E1-B11
gcggaatttataattttcttctctgagaactataaaccaaacgagttgtccaaaaagaagagatcaaagtttcttcttgaagaaagaaagaaacacaaaagctatggcatattcaactaaactttatcttcctcttaaaacaccatgttttgttccaaagacagtaagagcaaagactttgatgcttcaacagagtcaagttcatgttaaagtcaagaaagccacagtttcacagcctcagccgatcagatactccaccaagaacattgtttttgaagatccgatacaagggatcatctgttacacagatgataatggagaggttatatgtgaaggatacgatgaaggtcctcgttgtcccacacagagtccaatggtagcttcttactcaagagaggtggagaatcctgatcttctgcaaaga

SEQ ID NO: 3249 - DNA, 454 bp, Arabidopsis thaliana
  unsure at all n locations
  Clone ID: LIB22-006-Q1-E1-B4
gcccacgcgtccgctttcnttcatctctcctcttctacccaaaaccttctccacctcggcaacttctctactcagtgaccatgaaaacgacgaatccgccgccaccataaccgccgccgtctctgtcccaatctcacctctgttaactccggaagacacacaaaccgtagaaaagttccattcaatcatcaaagaccactatcgcaaaaaccctacaagccccaacgacgccatcttaanccctagcttaactctccatgctctctccctcgatttctcccaaattgaaacttcccaagtctctccctccgtcgtccgatgcgtgatagagaagtgcggcagtgtccgccacggaatccctcttcaacaatctctagctttcttcaattgggcaacttcacgaagacggattacgaacaacaaatcacctcatccgttacaacgaaatgattga

SEQ ID NO: 3250 - DNA, 420 bp, Arabidopsis thaliana
  unsure at all n locations
  Clone ID: LIB22-005-Q1-E1-H12
ggattatgctgcggaagactatcccgtagttaaaatggaaaacttacgtgaggctcgaatcttccttttggttactgataatgaaatagagcgagtaagactaccaattaatgatggattagaggatgctatggacaatgttgttctcagatttggacatgtggggaagctcatgaatggcatacgaaatgttgagtatctggagttgtctgctgatactctcgaggtgctttctctatgctgtgagtcaatgccagtgttcaaaaacctcaaatcgttagctattaaaagtactgaaggtcgaagatggcaagcaatgccagttcttctaaggaattgtccacatttagagtttctactcattgagggactcttgcaccatgtcacaagataaatgcggggatgcttgtgactgcttnc

SEQ ID NO: 3251 - DNA, 421 bp, Arabidopsis thaliana
  unsure at all n locations
  Clone ID: LIB22-004-Q1-E1-D8
gcggacgcgtggggtgaaatcaaagcaaaaaagagagaaggagaggtcgtgttagataattagagcgcacttgcgagcaacaacgaacgacgacccactgattcaatctcctcctctctgcatattccttggcatcttttctggtaccgaagctgagtctctggagagtttctagatcttcttcaattctgcaattcagagcgaagatttattagtgattgattattcactctggagctcgagttctggatccgtgtggctggagggaatgttctgttaagctgattgtttaggcttgttggatcagtatagaaattgtcagattgagaaagacaacattgaagaacggtatagctgagtgccctgcatgtcattcaaaantggtctcacctgggtaacaaaactaatttcaaggcttatg

SEQ ID NO: 3252 - DNA, 468 bp, Arabidopsis thaliana
  unsure at all n locations
  Clone ID: LIB22-004-Q1-E1-E11
cttttacttnccggtcccggtccaaaattnccgggtcgacccacgcgtccgaggtgaaacaatcaaatctatgcaagctaagactggagctagaattcaggttattcctttacatttgccccctggagacccaacgccagaacggactttgcagattgatgggataaccgaacagattgaacatgctaaacaattagttaatgaaatcatcagtggcgagaaccgtatgagaaactcagcaatgggtggaggctatccacaacaaggtggttatcaagcccgcccaccctcaagctgggcaccacctggtggtccgccagcacaacctggttatggtggttacatgcaaccaggagcatatccaggtccacctcagtatggtcaatcaccttacggaagttaccctcaacaaacttcagctggttactatgatcagtcctctgtgccaccatcccaacaaagcgcgca

SEQ ID NO: 3253 - DNA, 422 bp, Arabidopsis thaliana
  Clone ID: LIB22-004-Q1-E1-E3
tctacagaaacaaaaatctgattgtttttcccactttgcatctgttttgaggatgccagctacggattttcaaggatcatttggaaggtcgttgctaagtttacggcgagaccaagttgactcatcaacagtcgtctccggaagtagtagccaccacgagccaagcaccatggaggttgagctagattcgtttcaaagacaagtcgctgagaaattcatcgatctcaacgcttcttcaaacgaccttctctctctcgaatggatcggaaagcttcttgattctttcctctgttgtcaagaagagtttcgagctatcgtattcaaccaccgatctcagatctctaaatctccgatggaccgtttgatttcagattacttcgaacggagcatcaaaagctctagatgtctgtaacgccatccgc

SEQ ID NO: 3254 - DNA, 418 bp, Arabidopsis thaliana
  unsure at all n locations
  Clone ID: LIB22-004-Q1-E1-E6
caggtaactgtgcatataaagggaaaaacagaatgttatgagtgccaaaccaaacctgctccaaagacttatcctgtgtgtacaataaccagcacgccaactaagtttgtgcactgtattgtatgggcaaaagacctgctctttgcaaagttgtttggcgacaagaatcaagataatgatcttaatgtgcgatccaacaattctgcaagctcatccaaagaaacagaagatgtatttgaacgttcagaagatgaagatattgagcagtatggtangaagatatatgatcatgtgtttggttctaacattgaagcggctttgtccaatgaagagacatggaaaaatcgcagacgaccaaggcctatatacagtaaggatgtcttgcctgaaagtctgactcaacaaaatgggancactc

SEQ ID NO: 3255 - DNA, 419 bp, Arabidopsis thaliana
  unsure at all n locations
  Clone ID: LIB22-004-Q1-E1-F1
tgatgacgatggccggcttaaacgttcagggacggtttggaccgcnagtgcgcatatcataaccgccgtgattggatctggtgttctatcgcttgcgtgggctataggtcaactcggttggatcncatgtcctacantgatgttgttgttctcttttgtcacttactactcttccangcttcttancgantgctacagaaccggagatcctgtctctgggaagagaaactatacttacatggacgctgtcnnatcaatcctacgtggctttaggttcaaaatttgtgggctgattcaagtatttgaatctgtttggtatcacngtcgggtacacaatcgcaacatctacaagtatgatggcgatcaagangtccaactgtttccactagagcggagggaaaaacccgtgtcacatgtcc

SEQ ID NO: 3256 - DNA, 411 bp, Arabidopsis thaliana
  unsure at all n locations
  Clone ID: LIB22-004-Q1-E1-F12
accctcaagnnnnnnnnnnnnnnnnnnnnnnnnnnnnnnnnnnnnnnnnnnnnnnnnnnnnnnnnnnnnnnnnnnnnnnnnnnnnntcaaatctttcagttttgatctctaaatttccagaaaatgagcaacgataaggacagtttcaatgtcagcgatctcacttctgctcttaaagatgaggatcgagctggtcttgtcaacgctcttaagaacaagctccagaatctagctggacaacattctgatgtgctcgagaatctgactcctaaaattagaaggcgtgttgaggttttgcgggagattcagggcaaacatgatgaaatagagacaaaattccgcgaggagagagctgctcttgaagccaagtatcaaaagttatatcaagcctttgtataacaaagcgttatg

SEQ ID NO: 3257 - DNA, 432 bp, Arabidopsis thaliana
  unsure at all n locations
  Clone ID: LIB22-004-Q1-E1-F2
cacgcgtccgatcgtggagtaaaggaagagactttggtgttgccctcgatttctagtgatgaattcgatgagtttaggtcgattgttcgatgtcctaatgctcctttgaactattcttcatctgttgatttgcaattccgtggagatttggtgaagaagaagatgaagaaacagagccgtcgtgttcataattgggaaaaggttggttatgaggcggtgattgacggcgacacggtggttgtgtttgttaaaggattgactcgaagacctcacaaggaatcagatccttcttactataagtgtcaatttgagattgagaattcggaggagaaagaggtgactcaagctattgctgctgcgcaagaagttgtgaggtgtggtttgcctgagagtttgaagctaaatccagagatgatgtttcnagtgagtgta

SEQ ID NO: 3258 - DNA, 470 bp, Arabidopsis thaliana
  unsure at all n locations
  Clone ID: LIB22-004-Q1-E1-F7
atttctagcngacggtacggacacaaattcgcgggtcgacccacgcgtccncccacgcgtccgcggacgcgtgggtttcagacaattttggttctttttcttttgtatttatacattcttaatcttctacaaaacaaaagaagaaagacacatttcgttagtagaaatggcgggaaacggaaacgaaagtaccggtggagacttcagtttctcggctgcggcggcccgtgatgcgcttccgaggatcacgactgagaagggcggcaaatctccagggccggcagacgtctgccaggatgacatcgcaccgcgggtcaactttcagaccatcgacgagcttcacagtctccagaagaaacgatctgcccctaccactcctcttagagatggcagcgccagcggagtcagcggaactagtggtccgactactcctgtctccaaccagacatgcctcaatccgtcattgaacn

SEQ ID NO: 3259 - DNA, 460 bp, Arabidopsis thaliana
  unsure at all n locations
  Clone ID: LIB22-004-Q1-E1-G11
ctgtttactttgcccggcccggtccnaanataaacgggtnaagcccaagaacatcctcgcaaatgctgattgcaaaatcaagatctgtgatttaggacttgctcgtgtctcctttactgattccccttctgctgtgttttggactgactacgttgctacaagatggtaccgtgcgccagagctctgtggttccttctattctaactacacgccggcgattgacatgtggagtgttgggtgcatatttgcanagatgctaactggaaaacctttgtttcctggcaaaaacgttgtgcaccagctagaactcgtgactgatctgcttggaactccgtcgccgataactctatccaggattcggaatgagaangctagaaagtatttgggaaacatgaagcgaaaggatctgtacctttcaccanaaattcccantatcatctgtggcgcngaagttacttca

SEQ ID NO: 3260 - DNA, 424 bp, Arabidopsis thaliana
  unsure at all n locations
  Clone ID: LIB22-004-Q1-E1-G2
gatcaccgtctcctcaaaatcacancaccaacataacaaaaaaaaggttttgatcaaagagatcactgttaaaccctcacaanatttcctcaggactantantctgcgatcgatcgtcgttatgataagtctctaaagaagattgatgattctggattacattatcatgggaggagcttgttcaaggaagagagatcancaagttgangatattttaaacagangtgtctctgganaatatancannagttcaagttcgaaatggttagctacntcgctctctaggtctggctccgatgttaaacggaagaatggagaatgcccgtcgcttatgganctctgtgtccgcaagatacangaggacattgatagatataccaagttctctgacctacctagagatacagtcagcagattttganga

SEQ ID NO: 3261 - DNA, 423 bp, Arabidopsis thaliana
  unsure at all n locations
  Clone ID: LIB22-004-Q1-E1-G3
gcccacgcgtccgatccatatctctctccctatatctacttatatataacaaataaacacataagttgacatatatactatatacaagtatattaattatacatatatggctgaccctaacaatcctatcactgaacctaaagctataatccaatcttctacttcatcgtcagttactattgtgccagttcccacgtgcggtgacagcctctctgactctgccacgtgtgaaaacccttgtccacttgannnnnnnnnnnnnnnnnnnnnnnnnnnnnnnnnnnnnnnnnnnnnnnnnnnnnnnnnnnnnnnnnnnnnnnnnnnnttaatggccactgacaccgacatctctcgccggaaaaagaatccggtttatcggggaattcgttgtcngagtggaaaatgggtgtctgaaatccgaga

SEQ ID NO: 3262 - DNA, 424 bp, Arabidopsis thaliana
  Clone ID: LIB22-004-Q1-E1-G8
ggagaggttgaaggaagtaggtactgatcggcaattgactctggaggagtttgagatttgtgttggtacgtcaccgattgtgcttgagttgatgaggaggcaaaatgttgaagatgtttgtaaagactctgtggatttggatactaatgttagtggaagcagggtgactaaacatagaaggagagggagttggttaaagagtattaagaatgttgctagtagtgtgactgggtataaagagcgacggagcaccgatgatagggattcaccgtctgagagaggtggtcagaggtttagctctgcaactgatgatagtcgagatatgtcttttcatgaccctgagagagttaaggttaggcagtatgggaagtcgtgtaaagagcttactgcacttttcaagaatcaagaaaatcaagcccataaa

SEQ ID NO: 3263 - DNA, 425 bp, Arabidopsis thaliana
  unsure at all n locations
  Clone ID: LIB22-004-Q1-E1-H1
gcaaaacccctaaaaatggccgactcattcgagctaattgtaacccgaaaagaacctgttctcgtctctccagcctccgaaactccaaaaggtctccattatctctcaaatctcgatcaaaacatcgccatcattgtcaaaacattctactacttcaaatcaaactcaagatccaacgaagaatcctatgaagtcatcaagaagtcactctccgaggttctcgttcactactatcctgccgcagggagactcacgatcagtcctgaaggaaagatcgctgtggattgcaccggagaaggagttgtagtggtggaagctgaggccaattgtgggatagagaagataaagaaggctatatcggagattgatcaaccagagactcttgaaaagttggnttacgaagttcccggtgctcggaataatct

SEQ ID NO: 3264 - DNA, 415 bp, Arabidopsis thaliana
  unsure at all n locations
  Clone ID: LIB22-004-Q1-E1-D7
caaacaaaaaaaatctccaccgctctnnnnnnnnnnnnnnnnnnnnnnnnnnnnnnnnnnnnnnnnnacgcaccaactgttgcggctcaaagagatctcgatcgggatccacaagacggagatagatagagagagagtgagagctaacggaaatgggatctcagctacttgagtgttgcttccgtttcgtcttctactgtcactcccacagctccaactgttttccttgattgtttttcttttatctcggcgttttactcggaagcttacaacacactctctcagggatttgaaatcctcacgtttcagcacattctttgtggttcccatctattctctagccagttcggagttgcctgaagaaatcaaatgggttcgagatacgcatctcaccagctcaacaatgggcttttgt

SEQ ID NO: 3265 - DNA, 420 bp, Arabidopsis thaliana
  unsure at all n locations
  Clone ID: LIB22-004-Q1-E1-B7
tatctcacaataaagacaannnnnnnnnnnnnnnnnnnnnnnnnnnnnnnnnnnnnnnnnnnnnnnnnnaacaccaattcaagaaagaaggaagcttaagaagagtctatcatcaatcaatggagtttcatcttgaacatcctctctcacattcttcactccacaataacttcaacgacgacacagactatgaaactttaccacactctctcttcctcgtcgagtttcaacacatgccttcttctcattacttccatagcctcaagtcctctgcttttcttctctctaatcgaaaccaagccatttcttcaatcactcagtattcaagaaaattcgacgacccatctctgacgtatcttgctgtgaattatctagacaggttcttgtctagcgaagatatgccgcaagtcaaagncctgg

SEQ ID NO: 3266 - DNA, 422 bp, Arabidopsis thaliana
  unsure at all n locations
  Clone ID: LIB22-004-Q1-E1-B8
ggctggtcctgctgaagtaactgaactaactgggccggatgtcatggaagataagtgtggttctgctgctatttgttttgtttctttcttacctgacattttggactcaaaagctgaaggaaggaacaagtatctagagatgttattatcagttgcagacaagtttaagaaagacccttacggctttgtgtgggtggctgctgggaagcaacctgatttggagaagcgtgttggtgttggaggatatggttatccagcaatggtagccttaaacgcaaagaaaggagcttatgctccacttaaaagcggttttgaggttaaacacctcaaagatttcgttaaggaagctgccaaaggangaaaaaggaaattgcctatagaccgaactaagggagatagtgaagacagaagcttgggatggt

SEQ ID NO: 3267 - DNA, 413 bp, Arabidopsis thaliana
  Clone ID: LIB22-004-Q1-E1-B9
gatttcgaaaccctagtcgatttcgagatccaaccaactctgctccttatctcagcttgttgaatttgcgaagtatgggagacgctagagacaacgaagcctacgaggaggagctcttggactatgaagaagaagacgagaaggtcccagattctggaaacaaagttaacggtgaagccgtgaaaaaagggtacgtgggaatacacagttctggattcagagacttccttttaaaaccggagcttctcagagctattgttgactctggatttgaacatccatctgaagtgcaacatgaatgtatccctcaagctatcttgggcatggatgtcatctgccaagcaaagtctggtatggggaagactgctgtgtttgtcctgtctactctacaacagattgaaccatctcctggg

SEQ ID NO: 3268 - DNA, 411 bp, Arabidopsis thaliana
  unsure at all n locations
  Clone ID: LIB22-004-Q1-E1-C11
gtcgttattacaagcatttaatgcttggctacagaacataggcagtttcacacaggttttgttttcacaggaacgtcgatgaaatctcggtatcttgtgcacgtacacatgtcggactcaggttttaccgtgaagtagaaaacataaaggggcgttgtttttgttgccgtcaaggtctgacttttagtaaaatcacattaagaagagacgtcggagggaaaaacctccagctacagaacggtgtaatcgtgtaagtgggaatacattgccatgagaacgtctttctcttcagacgctgtatataaagcgcatgttgctgtgtttatgtcgatttttttcaagtaaaattataagtcaaagaattcaattattcactgtattgtctanctttccaagccgaaaagtccaata

SEQ ID NO: 3269 - DNA, 408 bp, Arabidopsis thaliana
  unsure at all n locations
  Clone ID: LIB22-004-Q1-E1-C2
gcaactatctctatctccttcatcgggcgacttcgtcttcttcttcgttcgctgtcagatttttttttaccaaattaacaatttttgagtctccgttgcctctctcagttgaagcgtcttccttctctctatcgaatgatggaggccaaaccaaaaaggaggattgttacagagaatggagatacaggtgaagatttagttcttgcaacattgattggaaacggtgatgatgtaggtcctctcgttaggcatgctttcgaaatggggaggcctgagcctctcgttcatcagctcaaaaatgtggcgaggaagaaggaagctgaaattgaggatctatgcaagactcactatgaagaatttattgttgcagttgatgagcttcgtggtgtgttagttgacgctgaanag

SEQ ID NO: 3270 - DNA, 425 bp, Arabidopsis thaliana
  Clone ID: LIB22-004-Q1-E1-C3
gcccacgcgtccgctaatttctaatggtacttcttccttcgatgacgtcgcttcttctggtgttcctcttcctctacggcttttctccggttatctccgacggctccgatcaccgttacaaggtcggtgatgatgttcctctttacgctaacaaagtcggaccgtttcataatcccagtgaaacatatcgatactttgatcttccgttctgttcatcagctcctgttaaggagaagaaggaggctctaggggaagttcttaatggagatcgattagtcagtgcaccttacaaacttgagtttttgggtgagaagaactctgaagttgcatgtagaaagaggttgagtagagaagacgttgctaagtttcgtgatgtgattgcgaaagattaatactttcagatgtattaagatgacttgccaatt

SEQ ID NO: 3271 - DNA, 414 bp, Arabidopsis thaliana
  unsure at all n locations
  Clone ID: LIB22-004-Q1-E1-C5
gagagaaaaggtagacggatttaaacaaggcgacgtcgttttgccagtgtttcatcctcaatgtgaagaatgcaaagagtgcatatctccaaagagcaactggtgcacaaaatatacaaacgattatttatcaaacacaagacgatatggaatgacttcaagattcaaggactctcgtggagaagatattcaccatttcatctttgtctcaagttttactgaatataccgttgtagatatcgcacatctcgtcaaaatatctcctgaaattcccgttgatatagcggccttgctcagctgcagtgttgccacaggacttggagctgcgtggaaagtggctgacgtanaggaaggttccactgtcgttatctttggccttggtgctgttggactaacggttgcanaaggagtcag

SEQ ID NO: 3272 - DNA, 423 bp, Arabidopsis thaliana
  unsure at all n locations
  Clone ID: LIB22-004-Q1-E1-C6
gcccacgcgtccggtgatcacaacggtaattatgtccgttaaaacgttgantatgttgggagctgcgagaaccatcgacgcggntaatctcacttgcttacattcactcgatgtatcaacggtcggagacngtcgacgttagagaactttcgagagtttatggttacgcagtgaccatgagaatgttgtttggaanganacatgtcacgatgagaaaacatgttttcggatgacgggagactngganaagccnacaaacatcatcttgaggtgattttcancactcganactgtttgccatgttttagtcncgtggantacgtggacncaaggttaggtggttggtatattgatggtgnagaggagagagcgatagtgaatgttaatcttgttcgnagttacaacaatcccataattacgaag

SEQ ID NO: 3273 - DNA, 408 bp, Arabidopsis thaliana
  unsure at all n locations
  Clone ID: LIB22-004-Q1-E1-C7
gccctcgcaaggccttataaggaaaggctcgtcaccttattggagaagcggtccatgggcgggaacaaggttcactgggataccagaaatggatgcatcgtatgtgaatccattgggaatggtccaagatgaagtcaacggcacaggagttttcgctttttgtgttctgagaaatttcaatttgtcatacatcaagctaacgccagaaggatcattgaggattacacggaataatggaaccgactggatcaagcactttgagggtccgctaacctcgtgtgatctatatggtagatgtggaccttttggcttgtgtgtgagatccggtactccaatgtgccaatgcttaaaagggttcgaaccaaaatcagatgaagagtggagaagtgggaattggagtcntggatg

SEQ ID NO: 3274 - DNA, 412 bp, Arabidopsis thaliana
  unsure at all n locations
  Clone ID: LIB22-004-Q1-E1-C8
gcccacgcgtccggtccttttgagttctttgggcttcctcccaaatttctccacgagctcgacccctttcgtatcttccttctcatttttttgccaaatttattcgatccgtctttcactatgtatccgatggattctgattaccatcgccgtggtctggtggcaaacgatcgttcaccagctcagtttgttaggctggataaaccgagagccgtagacgatctctatataggcaagagagaaaagatgcgtaggtggttgtgctgtgcttgccacgttgaagaaccttaccattcttctgaaaatgaacacctcagaagccctaagcaccacaatgattttgggcatcacactagaaaaccacaggcggctgtgaagcctgatgctttgaaggagcctccatctantgatg

SEQ ID NO: 3275 - DNA, 421 bp, Arabidopsis thaliana
  unsure at all n locations
  Clone ID: LIB22-004-Q1-E1-D1
tcttctgccgctgatttcaacactttcgcttcttcttatagcttcgccaccgccgccggtaaaaagtccgattctttgccggtgtttgacgatcctggtcgagatggtgatgatcttctcttcaaagatgtgtttagtggaccaccaccaccaaagtacggatcttcttctggtgattcacgttctccatctgctcctgcttttgactatgatgctatgttcaaggaacccaaatccaaatcagngtcgtctatgccggtttatgacaagcctgtgtatgatgatgaggatgtgtttgagtctattcctgagctcaaaatcccttccacttcttctcaatcagctaggtttgagaatgttttctcttctatctcatcttctcctacgaagcacangaaacaagaacaattctccctttcaa

SEQ ID NO: 3276 - DNA, 424 bp, Arabidopsis thaliana
  unsure at all n locations
  Clone ID: LIB22-004-Q1-E1-D2
gagacacagtactaaatcatttgcagcttcttacaatgtcgcgaccaatctcgcttgaagaaatggtgagactgttcaaagtacgtcacgcaacagctcacatgttcaagatagaccatttctctttactcagaaagcatggaatcgaaaaggtcgagtcctctgttttcgatctcgctggtcacaaatggaaactctctgtgcacccaaatggncatacaaatgctaaggggacacattatgtctccctctacttaatgaatcaagctccggtatatgatacgcttacatatgagcttcttgccgtcagtcaacttgagccaaaatggcacactcacggaagagatgaatacgaaaccaatgaagaactgggtagtgaggggtttcgtgagttcatatctcctgttgatcttaanaaaaatgg

SEQ ID NO: 3277 - DNA, 423 bp, Arabidopsis thaliana
  unsure at all n locations
  Clone ID: LIB22-004-Q1-E1-D3
gcccacgcgtccgcccaattctcaccaaaaatcgcanaaaagatttcaactttcgataaacccagatcgaaaaatcagatttttccagatcaatcagagagttagngatggngtatantaacaacaatcagcaatctttttggcagttcagcgaccagctgagagttcagacaccgaatctagcgaatctgtctctcaacgactcgatctggagcacaaactctgtcttcaaanagcgtcgaaacttagacatagccgccaccaccgacaagaacaacaaccagatcgactattatcagaagaagacaacttccgacaacatcaattccaactggaactggaagtcttctggttcaaacaacgacatgggtttaggattcggacctgtgggttcaaaatccaacgtcgatttaaanccaatcg

SEQ ID NO: 3278 - DNA, 421 bp, Arabidopsis thaliana
  unsure at all n locations
  Clone ID: LIB22-004-Q1-E1-D6
gcaaacacataaagttctttctcttactcatctccgccgccggcagtaaaaatatcacatcgttagggtttcacggcggagattcaagttctttgacctaggaagctttcactatcaccggagactatttcaatggcaaccatggctaggtcgtttctgcaggcgatatcgaaggatgaggcggtggctcctccgcttagagttgttcagatcgaaggactggctgtactaaagataatcaaacactgcaaggagttttcaccgacccttgtcactggacagcttcttggacttgatgttggtagcgtcctcgaagttaccaattgttttcctttcccggtcaggnnnnnnnnnnnnnnnnnnnnnnnnnnnnnnnnnnnnnnnnnnnnnnnnnnnnnnnnnnnnnnnnnngaagttaatg

SEQ ID NO: 3279 - DNA, 425 bp, Arabidopsis thaliana
  unsure at all n locations
  Clone ID: LIB22-004-Q1-E1-B4
gagttaaattctataacatatatgggaccaatctagaaacccctcatagtgtttgctatgggaatgagaagatgcccgttaaagatctaacgaatctaagatacttccagccgacatatatatgcgtggatggtgatggcacagtcccgatggaatctgccatggcggatgggcttgaagcagtagcaagagttggagtccctggtgagcaccgaggaatcctcaacgatcaccgtgtcttccgaatgctcaaaaaatggctaaatgtaggcgaaccagacccgttctacaacccagtaaacgattatgtcatccttcccaccacatatgaatttgagaaattccatgagaatggactcgaggttgcttccgtgaaagaatcgtgggacatcatatcagatgacaacaatatccgcacaancggg

SEQ ID NO: 3280 - DNA, 429 bp, Arabidopsis thaliana
  unsure at all n locations
  Clone ID: LIB22-003-Q1-E1-H10
ctnttcattgcaacgaantgggctcttttcttactcttaactgccattgaaccagggcttgtcagttcttgacagagaacctcttttcattggcatatctgtcagctccactgaaaaggcttatanaacagttgatattgggccagatgctgaaaacaagatagagattccggaagttttggggtgagaagtctgatctaaggaggtttaaagatggaagaatatctgaaagcacagtttgggagactcagcagtggaccaaacatcttatcatgaaacaaattgttgaatatatccttaagcggcatctttcactgacgtccgatgacattgtacaattagtgggatcaacttgattctctctaaaactatgggggcaaagacccantatcnttatctgggnaatttggttcaagcctaagaaagttt

SEQ ID NO: 3281 - DNA, 452 bp, Arabidopsis thaliana
  unsure at all n locations
  Clone ID: LIB22-003-Q1-E1-H12
attcggccggccaacncattcnanttaatccttgggatggcttcatcctctaaggatctacggagttacatgattcatttacngcctttaggggaccctgtattgcccgaaatgctgttgaagatactagaaccttatcggaaagaaggttgcttgctggacgatgaaagagcaaaactttacgctgatgtggtcaagaaaggttatgctgcaagatttgcttttgcagcttctgtttttggtgaaacctcagaagcacttttctggttgcaacttcctcaagccattcgccatctgatgaacaagctaacgagaaggtctccgcagaaaatctcttcccctactttagactcaggagctgatgaagtagctatgccgagtaaaataccatctactggattaaccgtcacctgaaaccaagaaagatagactcctaagttgtgatnggttca

SEQ ID NO: 3282 - DNA, 440 bp, Arabidopsis thaliana
  unsure at all n locations
  Clone ID: LIB22-003-Q1-E1-H2
cgaaaaaagagcactccccaatcccnattggtncggtgatggannagcttcgttgtcttccccattgcaattanggttttcaaaacgggtaatcgaattcggtggtgctcggctttgaaattgaggatgagatcctttccacttccttctacctgctgacaatgggcaactgcggtactagagacgaggctgccgtcttcactcctcaagctcaagcccaacagctccagaagaagcactcccgatccgtctcagatctgagcgatccatccactcctcgcttccganacgactctcgcactcctatttcgtatgcccaagtcatcccctttacnttgtttgagcttgagaacatcaccaagagctttcgcccaaattatatactccggagaaaggtggtttcggtaacgntctacaaggggttacattgatgacaatcc

SEQ ID NO: 3283 - DNA, 416 bp, Arabidopsis thaliana
  unsure at all n locations
  Clone ID: LIB22-003-Q1-E1-H4
cccctaattgtctgccatggcgatttctactattctctgagtctgtgatcttaaagatttgatgagacagaaacccagaaactgaaanacaaaaacccaactcgtganatttcgttccgaccaaatctgtctgatttgtgatctgaacaaagtacggtaatggagttgatggctaaaccaaccttctccatcgaagtctctcaatacggaaccaccgatctaccggcgacggagaaagcttcctcttcctcttcctctttcgagacaacaancgangaaggagtanangaatctggtctaagtcggatctggtcaggacaaacggcggattactcatcggatagttcatcaatcggaactccgggagatagcnaataaagacgaagaaggaagccaaaacgaaaaccaatgacntt

SEQ ID NO: 3284 - DNA, 429 bp, Arabidopsis thaliana
  unsure at all n locations
  Clone ID: LIB22-003-Q1-E1-H6
tcgattccccattgtaccggatttgatnnnnnnnnnnnnnnnnnnnnnnnnnnnnnnnnnnnnnnnnnnnnnnnnnnnnnnnnnnnnnnnnnnnnnnnnnnnnnnnnnggagttaatagatctggaatcgagaaatcaacaactgaagaacaacggcaaagattcggtttttagcagaacactcaggaagttttcactcaaacatcatcgaaaaattccagattccgggaacagtcttggtcgtcgttcatgtgatgtagatcctaggttgtctcttgacgcaagtcgaagtctctttcgacgagcctagagcttcatggggatggatgtttgattggaaagacatatccaaagctgatacctttgtcctctgtgactgaagacgttaaagcctcgccggagaagataaccggtgagaaggtanaggaa

SEQ ID NO: 3285 - DNA, 405 bp, Arabidopsis thaliana
  unsure at all n locations
  Clone ID: LIB22-003-Q1-E1-H8
acgctctctcaaaagtcgaatatcccaaattcgatccgttttccggcgataatctccgatctagatccgatggcgaaagaaccagttcgtgtgctcgttactggagctgcaggacaaatcggatatgctcttgtacctatgattgcaaggggtatcatgcttggtgctgaccaacctgttatcctccacatgttggatattcctccaactgctgaagctttgaacggtgttaagatggagttgatcgatgctgctttccctcttcttaaaggtgttgttgctacaaactgatgccgttgagggatgtactggantcaaagttgccngttaagggttggtnggtttcccgaagggaaagaaaggtatgganaaggaagggattttnacgtccaanaatgtttccag

SEQ ID NO: 3286 - DNA, 428 bp, Arabidopsis thaliana
  unsure at all n locations
  Clone ID: LIB22-004-Q1-E1-A1
gctttaaacctcttagagaagcacttaaagatccaggcgactttcttctaagtgacttttcaaagtttgaccgaccacctcttctccacttagcattccaagcacttgataggttttcgtctcaagcaggccgatttccgtttgctggttcagaagaagatgctcagaaactagtggaaattgcagttgacattaatgagggtttgggtgatgcaaggttggaagatgtcaactctaaactgttgcggcatttggcctttggatccagggctgttctgaatcctatggctgcaatgtttggtggcattgttgggcangaggttgtcaaggcatgctctgggaaattccatcctatctttcagttcttttactttgattcggtggagtcactccccaagggacctcctgaagcatcaaagtttaaacac

SEQ ID NO: 3287 - DNA, 422 bp, Arabidopsis thaliana
  unsure at all n locations
  Clone ID: LIB22-004-Q1-E1-A10
gcccacgcgtccgcccacgcgtccgcccacgcgtccggtttgacttgctaatggctcctcctccggcgaagatgcaagagatccaccaattcctctcctccgcactcacccagcgtggcccttccgctcttccatacgccgagaacaccaagtcgctaatccgtcaacacctcctcaacctaatctcttcctacacttccctcgaccccaaaacggcaacgtttacacacaacgatggccgatccgtgattctcctccaagccgacggtacaatcccgatgcctttccaaggcgtcagctacaacatccccgtcgtgatctggctcctcgaatcttaccctcagtatcctccttgcgtttacgtgaatcctacacgcgacatgatcatcaaacgacctcactctaatgtctctcccttcngg

SEQ ID NO: 3288 - DNA, 415 bp, Arabidopsis thaliana
  unsure at all n locations
  Clone ID: LIB22-004-Q1-E1-A11
ggagagaagagggaagtcaggtgaagatagagagagacactgagaggagggaaaatttgtagggttttcggagatctctgtgattcctctgaatttgtcgaattttttggaggaggcgttagaagtcgggcttcttaaaaatcagatcttctgctcaggctttaatcggcgacgtctggtattgggatctgtgacacaaaaagctgcgttggagactatggaagaagttcagcctccagtgaccccgcccattgaaccaaatgggaaaagaagcgaagcctctctcttggacatatgcgagaaagttctgtctcttgatgggagcacttgcgatgaagctttgaagttgtttacaagaaaccaaacgaattttgtcaagcaagcatgtctaacattggaagtggnacgccgggaa

SEQ ID NO: 3289 - DNA, 426 bp, Arabidopsis thaliana
  unsure at all n locations
  Clone ID: LIB22-004-Q1-E1-A2
tcacacacactcatgggttcntcctcctcntcntcntcctccatcacaatcatnancaacttcctcttccttcccctccaaacaaccgccaaaaaaacctacatcaacngcgtcaatcantccgataaaccggaatcattcctcactcaccacgattggnacacatctcaactcaattcaagaatcatctcttctctacacttacacaacctccttccaaggnttctccgcttaactcgactccaacgaagccgattctctcctctcctcctcaaactcaatcctcgatatcttcgaagattctctctacacacttnacactaaggcgttactcctggagttttctcgggtctcaaattccgaaattcnggggtttaatctncgggttcttccttctaaagggggttaatcaatccggaggnttta

SEQ ID NO: 3290 - DNA, 424 bp, Arabidopsis thaliana
  unsure at all n locations
  Clone ID: LIB22-004-Q1-E1-A4
ggagaacggtacagtccgttgccggtgtgagaactctgcgatgctcggtgagagaaagaacgttaatctcccaggtgttgttgtggatctcccaactctaactgagaaagacaaagaagacatcatgcaatggggagtcccgaatcaaatcgacatgattgctctgtcttttgtcaggaaaggttcagacttggttcaagtccggaaacttctaggaaagcacgccaaaaacattcttctcatgtctaaggtcgagaaccaagaaggtgtggcaaattttgatgacattttggtcaattcagacgctttcatgattgctagaggagatctgggcatggaaatcccgattgagaagatcttcttagctcagaaggtgatgatctacaaatgcaacatccanggaaaacctgtggtcacaacaact

SEQ ID NO: 3291 - DNA, 416 bp, Arabidopsis thaliana
  unsure at all n locations
  Clone ID: LIB22-004-Q1-E1-A6
tcactttccaaaaagaaaaaaacgaatctctctccaccatcatcacctttctccttcacttgcctcagatctggctgcgatttcaaatcttccttagtttctctcgcatcgctcggccgttgacggtcccgtcctttccgtggatctgattctggccccggattctctcgccgcgatctgaggtcaaacatggcggctgctaacgcgcccatcattatgaaggaggtcctaacgcttccgagcgttgggatcggtcaacagttcatcacctttacaaatgttactatggagtctgataagtacatatgtgtacgagagacggcaccgcagaacagtgttgtaattatcgatatgaatatgccgatgcaacctttaaggaggctataactgctgaatctgctcctaagaanccaaac

SEQ ID NO: 3292 - DNA, 424 bp, Arabidopsis thaliana
  unsure at all n locations
  Clone ID: LIB22-004-Q1-E1-A8
gcccacgcgtccgatcctcgnnnnnnnnnnnnnnnnnnnnnnnnnnnnnnnnnnnnnnnnataatggcgtcgatccctccgccggagcttgacaacgactcactggcgtcatcgccgagatcggagtacgatagtcagccacgcgtacggttcatgtgtacttttggaggaaggatcttgccacgtccgccggataatcagctctgttacgtcggcggcgataatcgcatggtcgctgttcatcgtcacactactttcgcctctctccttagtaaacttgctaaactctccggtaaaagcaacataagcgtgaagtaccagctaccaaacgaagatcttgacgcgttgatttccgtatcaacggacgaagatgtagagaacatgatggacgaatacgaccgcgtcgcacaagaatcaaaaccca

SEQ ID NO: 3293 - DNA, 408 bp, Arabidopsis thaliana
  unsure at all n locations
  Clone ID: LIB22-004-Q1-E1-B2
gaaaagaatgaagtaatcgttgcggataattacttcacaggatcaaaagacaatctcaagaaatggattggtcatccaagatttgagctaattcgtcatgatgtgactgaacctcttttcgtcgaggttgatcaaatctaccatttagcatgtcccgcttctccaattttctacaaatacaaccccgttaagacgataaaaacaaatgtgattggcacacttaacatgttaggactagctaagcgagttggagcaagaattttacttacttccacatctgaagtgtatggtgatcctttggttcaccctcaaaccgagagctattggggaaatgtaaacccgatcggtgttagaagctgttatgatgaangaaaacgtgttgccgagactcctatgtttgattancat

SEQ ID NO: 3294 - DNA, 426 bp, Arabidopsis thaliana
  unsure at all n locations
  Clone ID: LIB22-004-Q1-E1-B3
cgtcctcgagctcaaccctttaattgcatctacgacagtcgtaccttttgctaggttatcgtcgtcatgatgcagcagccacctccagcttccaacggtgctgcaacagggccagggcagattccttccgaccaacaagcttacctcnnnnnnnnnnnnnnnnnnnnnnnnnnnnnnnnnnnnnnnnnnnnnnnnnnnnnnnnnnnnnnnnnnnnnnnnnngtctgcaccgtcttctggtcaaccacagcagcagcagtatggtggtggtggatctcagaatccaggatcagctggtgagatccggtccctgtggatcggtgacttgcagccatggatggatgagaactatctcatgaacgtctttggtcttactggcgaagctacaagcagctaaagttattcgcaataaacagaacgggtantc

SEQ ID NO: 3295 - DNA, 430 bp, Arabidopsis thaliana
  unsure at all n locations
  Clone ID: LIB22-003-Q1-E1-H1
gataccttgaaaacgttaaatgatcttctcctccgatcattagtctctttaatctttctcagcctcttcttgttcgtgatctctcttcctccggaaaaagatgtcggccggtaacggaaatgctactaacggtgacggagggtttagtttccctaaaggaccggtgatgccgaagataacgaccggagcagcaaagagaggtagcggagtctgccacgacgatagtggtccgacggtgaatgccacaaccatcgatgagcttcattcgttacagaagaaacgttctgctcctaccacaccgatnaaccaaaacgccgccgctgcttttgccgccgtctccgaggangaacgtcagaagantcaacttcaatcaacaantgcatccntaacatcgttaacganagaatcaggacaaaggtggtaaaaggaa

SEQ ID NO: 3296 - DNA, 495 bp, Arabidopsis thaliana
  unsure at all n locations
  Clone ID: LIB22-002-Q1-E1-D3
atggttgcttggccnccggtccggaaatnacgggtcgacccacgcgtccgctgagagctaaaggagagacatacgaagagattgtggggttagctagggcaatgatgnnnnnnnnnnnnnnnnnnnnnnnnnnnnnnnnnnnnnnnnnnnnnnnnnnnnnnnnnnnnnnnnnnnnnnnnnnnnnnnnnnnnnnnnnnnnnnnnnnnnnnnnnnnnnnnnnnnnnnnnnnnnnnnnnnnnnnnnnnnnnnnnnnnnnnnnntcttctgcttgtggaagtgctgatgtactagaggcactaggagtggttctggacttgggaccagagggcattaaaagatgtgttgaagaaggggggatcgttttatgatgtcaccaatgtatcatccagctatgaagatcgttggtcctgttcggaaaaagcttaaaattaaaactgtttttaacataatgggacctaagcctaatcctgccaagagttcctaagccgtcgttgg

SEQ ID NO: 3297 - DNA, 458 bp, Arabidopsis thaliana
  unsure at all n locations
  Clone ID: LIB22-002-Q1-E1-D4
gggagaagaagccagaaacaccagttttacctgagtgttgcagcacggataaatttcgggggctgaaagtgaagcttctgtgaggtacccgggatgatccgtatgatagaatatgggaatctgatttgcaaaagaagcctaattatcttgtggatgttgctgctgggactgtgcgagtgtcgactacattgccaatcgaaagcagggtcgatgacagaccgcctcagaaggttatgcagacggctgtggttggaacaaacgggtccttaacttacagaatgaacctagatggcttccctgggttttggttgggcattcacatactttgctgaaatcnaaggatttggctgaaggatgaatcaagggaaatttaaattaattctanctgaacancctgagtatancaaatccggtttgttaacatcaanggaaaatacacagagaccgttacnccgttt

SEQ ID NO: 3298 - DNA, 490 bp, Arabidopsis thaliana
  unsure at all n locations
  Clone ID: LIB22-002-Q1-E1-D5
gaatgttgcgcgcntaccggtcaggaaattcccgggatcgtcttcgtcttctacaaattttgtttgttgcttggttttgaagccggcctttgatgggtgcggcagaatctggaaccgatcggagaagcttagcttatggatttggagtttctctgtgaatgaatctctgtttgttatggggaagaataccgtcgaggagcagaatctccctgtgagcgacggagctgcttcggctaggaataacggaggtggaggaataagcacatgttgttgctgtgattggatctctagctactttagtctcagatgcgttttgantcttgctttttctgctgctgtgtntctctccgccttgttntggttacctccattcctcggatttgcangatncaagggatctanatctcgatccaaggtttaaagatnacagaatantggcganttttgangttggaaaaccaatttcgttcaagggaaaacaantttaggc

SEQ ID NO: 3299 - DNA, 446 bp, Arabidopsis thaliana
  unsure at all n locations
  Clone ID: LIB22-002-Q1-E1-D6
gcccacgcgtccgtctgaatcttctacttctccttctactatctccccacttcttgataccttgtaatccatttcagcgattagatataatcaaaactttttcaacttgtagtggccaaattttttgtttaatggttgtaaagatatcgaaaaagttttttgatgttaaagataaagaaaaaattgatttaccacctggtttcagatttcacccaactgatgaagaacttataacacactatctaagaccaaaggttgtaaactcttttttctctgctatagctattggtgaagttgatctcaacaaagtcgagccttgggacttgccttggaaggctaagcttggggaaaaagagtggtacttcttttgcgtaagagaccgaaaatacccgactggtttaagaacgaatcgtgctactaaagccggttaatgggaaagctacang

SEQ ID NO: 3300 - DNA, 449 bp, Arabidopsis thaliana
  unsure at all n locations
  Clone ID: LIB22-002-Q1-E1-D8
aggactatataataacaaattaccttcttgttgttctcagtttcttctcccaataccaaaaatattttgcttcatccaaggtcttgaagatgggtataaaagtttcatcaaagatcaaaagaattctcgcatccacagcttcaggtagttcaaatcccaaagatggtgctgacgtggatgtccgagaggaatatgcaaacgcctttcgtacggaatcatacaatcacttttggacacgtgtcgtacagctaagccgcaaaaagtccgcagtgtcttcttcttcttcttctccaccaatcgaatcatcctccacgtcagctcgtctcatgtcttatccgcctattcgcgcacaatcttctanacccgggntctgantancattactcgggtactaagatgtaaccccgggtcngggcgacacacccgaaactcntctctctgattacttt

SEQ ID NO: 3301 - DNA, 449 bp, Arabidopsis thaliana
  unsure at all n locations
  Clone ID: LIB22-002-Q1-E1-E1
tcctctcagctcacctatgggaaaccctacaaagatctctctctcaagatttctgaaaatggatatataatctcactgatttgtttctttttttgttcttgtttcgttttctatatgtttatggatgagttgtagtttccatctcccagccggatatagaaagaagaaacagaggaaatttgttcataaaggaggtacatatatacacatacaagtctctgtgaaatatgacatctcagctaaaacgaactttaaccaagagatacggtgttcttgaactgtgggagatcatagtgattgctctctttgcaagccttcatagtaatccttgtcctttcaagtttggctcaacttcccgtaaaaagtccaaaagatctaatgctacaacgcttcctgtaactcaaagccctcgcnttaaccgaagaaataaaagaaataaagtgttgatc

SEQ ID NO: 3302 - DNA, 426 bp, Arabidopsis thaliana
  unsure at all n locations
  Clone ID: LIB22-002-Q1-E1-E10
gcttttacaactgtattacctaccgttacacttcaccagcagttgacctcaatagagtcaagctggataatcggagggctcttgcttgcttcacagtattttcttatatccgtctggtatattcttcagactcgtgtcatggaggtttaccctgaagagataaccgtagtcttcttctacaatttatttgcaacactaatctcagtaccagtatgtctttttgcggagagcaacttgacttcttgggtgcttaaaccagacatttccctcgctgcaatcatatactcgggagtcttcgtttcattattcagcgcgcttacccacacatggggtctgcatctgaagggtccggtatacatatccttgttcaaggcattgtctantgccattgcagtcnccaatgggtgcnaaaatcctcggggatgc

SEQ ID NO: 3303 - DNA, 422 bp, Arabidopsis thaliana
  unsure at all n locations
  Clone ID: LIB22-002-Q1-E1-E12
tctctgaaacgtgtctctttgactgacttcaatcttctttatcacttaccgtttctgggttttatgaagcaactgagctaataaaaagcttcttcttagactcggaagaagataaaaaacagaatctttattgtttaaagcttccaaattcgagaagagaatttgaaacgaccaagttcagganatncgtttcttcgtctactttggtctcttcctcttctctttcgaaaagggtttattctgtcttaaaagaaacctttttgagagggtaaaaaaagcttcaattttcagagaaacacaaaaggcaagaaacagagaaaaacaaatcatctaattcatgaaacanggttcaatgaatanatcgtgtctctgtantgtcntaancaccactgctctgatttgtggtgcttacntcatttgca

SEQ ID NO: 3304 - DNA, 463 bp, Arabidopsis thaliana
  unsure at all n locations
  Clone ID: LIB22-002-Q1-E1-E5
cacgcgtccgagacactaagcagttgattgcttatgctcgtgctaataataaggttattattggaccagctactgttggaggcgttcaagctggagcctttaaaattggtgacacagctggaactattgacaatatcatccaatgcaagttgtacaggcctggatctgttggctttgtctcaaaatctggtggcatgtctaatgaaatgtacaataccattgcccgtgtgacagatgggatctatgaaggcattgctattggtggggatgtgttcccgggctcaactttatctgaccatatcctgcggtttaacaacatcccacaagattaagatggtggttgtacttgggagaacttgggaggaagagatgaatattcctccaagttgaaagccatgaaacaagggaaaagttgaccaaaccantggttgcttgggtcagccgggacttgtgcacgtctatt

SEQ ID NO: 3305 - DNA, 498 bp, Arabidopsis thaliana
  unsure at all n locations
  Clone ID: LIB22-002-Q1-E1-E6
naattttgcgccgcctaccggtcaggaattcccgggtcgacccacgcgtccgcccacgcgtccgtctttataactaccatattctcaatcacaacactcgccactgtttcgaatagatggcttctatttcaaccccttttccgatttctctccacccaaaaaccgtacgatcaaagccgttgaaattccgagttttgacccgtccgatcaaagcttccgggtcagaaactcctgatctaaccgtagcgacacgaaccggatccaaagatctcccgatccgaaacataccgggaaactacggtttaccaatcgtaggaccaatcaaagaccgttgggattacttttacgaccaaggagctgaagagttcttcaaatcacgaatccgtaaatacaactccacggtgtacaagagtcaacatgccaccgggagcttttatcgccgagaatccacaagtcgtggctttactcgacggtaaaagcttcccggttttaatcgat

SEQ ID NO: 3306 - DNA, 445 bp, Arabidopsis thaliana
  unsure at all n locations
  Clone ID: LIB22-002-Q1-E1-E7
ggctatcttcaagctcaaaaccaaaccctagaaataaaatgacggcgacacaaannnnnnnnnnnnnnnnnnnnnnnnnnnnnnnnnnnnnnnnnnnnagcaaccaagtcatggcagaaatcaccgacgagttagcgacattgatggaggttaaaacagagcttgacccagaagacaaacacttagcttcatggagtgttaatggagatctgtgtaaagactttgaaggtgttggttgtgactggaaaggacgagtttctaacatatctctacaagggaaaggcttatctggtaaaatctctccgaacattggaaagcttaaacatttgacgggtttgttcttgcactacaatgctcttgttggagatattcctagagaacttggtaacttgtcggaacttacggatctttatctcaatgttaataatcctctccggtgagattc

SEQ ID NO: 3307 - DNA, 419 bp, Arabidopsis thaliana
  unsure at all n locations
  Clone ID: LIB22-002-Q1-E1-E8
gcttatgccgctcgcggaaagtgggagcaaggtctcgctgggtcgttgcagggagggagtggggcatgcatttgggggaagcattgtacactgtggaggcaaggcctgccgttgcaggcaagcacgaagcaatgtggggatgtcgcatgtgatctactgacggctgacaagagggaggtggcggaggaggggtggtgttgctatgatgtgggcggcggctgctgttactgggcgcatctgccctgtacttgctacggtgctgcgagccatgtactgctggagatccaaagagttgtgcggctgctgccttgccancagtctgctgacgttttctgttgtcatgcacactggggaaggcatggcatggtgggaactggccggccgcanctggcatactggctgtttggcngctgttcatg

SEQ ID NO: 3308 - DNA, 428 bp, Arabidopsis thaliana
  Clone ID: LIB22-002-Q1-E1-E9
ggagaaaacaaatacataatcggagaaatacagattacagagagcgagagagatcgacggcgaagctctttacccggaaaccattgaaatcggacggtttagtgaaaatggaggatcaagttgggtttgggttccgtccgaacgacgaggagctcgttggtcactatctccgtaacaaaatcgaaggaaacactagccgcgacgttgaagtagccatcagcgaggtcaacatctgtagctacgatccttggaacttgcgcttccagtcaaagtacaaatcgagagatgctatgtggtacttcttctctcgtagagaaaacaacaaagggaatcgacagagcaggacaacggtttctggtaaatggaagcttaccggagaatctgttgaggtcaaggaccagtggggattttgtatggagggctttcgt

SEQ ID NO: 3309 - DNA, 268 bp, Arabidopsis thaliana
  Clone ID: LIB22-002-Q1-E1-F12
gagcaacgataccaatggaaaaaagagagagctaaaaacaaccttaaatacttattagaagctccaacggtcgagttgttgctgttacactttccgcttgatttagaacttgtaggtctctttggaatgttataaaaaggacctcttcggcttttttgtattaatcaacagctacgtacaaataagccgaagaggtcctttttatacgtagctgttgattaatacaaaaagagaactcttctcgcaaaaaaaaaaaaaaaaaagggcg

SEQ ID NO: 3310 - DNA, 451 bp, Arabidopsis thaliana
  unsure at all n locations
  Clone ID: LIB22-002-Q1-E1-D1
gcccacgcgtccggagctcggatggggatgaagctttgcaggagcttttatgactcatggattcagatcctggttgatggagaaccaagttaaagctgatgagcatgtggttacagtaaagattgcctaagtgaaaagaaaggagaattgagtcttcatcttcaatagaccaaggttagtaagcgtgaggaattgcgtgcaatattttgttcgtgtgtgaagttcaaagaaaacgtttttggcaagatcagatgaaaacatgccgtcttagtctatatggcggggcagttgctcaggtttagttgtctccctcgtttgggttgtcgtctccctcgtttgggcttaagcttctcttcctcgactatattacttccgntaatttgggggttgagccttttgggtaagtcctgggtctatcctcanttantaataaaccgatgttttggcttaa

SEQ ID NO: 3311 - DNA, 507 bp, Arabidopsis thaliana
  unsure at all n locations
  Clone ID: LIB22-002-Q1-E1-A3
aatggttgttggcggcctacggnaaataacgggtcgaccnacgcgtccgccaagagacagagaagaagagagagactcgtaagcaacaataaccaatagnnnnnnnnnnnnnnnnnnnnnnnnnnnnnnnnnnnnnnnnnnnnnnnnnnnnnnnnnngacgtcgtcttcggctttgtagcatctcgccgaagcgtcgttgatttgagagagacccaatttggattgttagaaaatgggttacataggagctcatggtgtagctgctcttaagaaacacaaatacagtggtgttgatcactcttatcttgccaaatatgttctccaacctttttggaaacgttttgtcaaaatcctccctcctatgggatggcccccaacatgataacacttaagggggtcangtttcctcccanatcctggctctcctaaggctatatatactcanctaaagttgggattctccaactcctcgaaggggtccaactttgcacacgggttacttctgg

SEQ ID NO: 3312 - DNA, 428 bp, Arabidopsis thaliana
  unsure at all n locations
  Clone ID: LIB22-002-Q1-E1-A9
cacaccaccaccaccaaagaaacattacgtatacaagtctcctcctcctccggttaagcactactctccccctccggtttaccactcaccancancaccanaaaaanattacgtttacaagtctcctcctcctccggttaagcactactctccccctccggtttaccattccccacccccacctaaaaagcattacgtctacanatctccaccaccaccggtgaagcactactcacctcctccggtttaccattccccaccacccccaaagaaacactacgtgtanaaatctcctcctcctccggttaagcactactctcctcctccggtttaccattcnccaanccccactaaagaaacactacgtgtacaaatctctaccaccaccggtganngcactactctccccctcnagtttaccattcccc

SEQ ID NO: 3313 - DNA, 425 bp, Arabidopsis thaliana
  unsure at all n locations
  Clone ID: LIB22-002-Q1-E1-B10
gcggaatcgtatgcgagtcagcctgagattcagctaatgagatttgctgattactttgggagagcactttctggagtctcatctgtgcaatttccatgggtgaagatgtttaaagagtctcctttgtctaagctgattgaagttccgttagctcatattccggaaccagtgtataagacatcagttgattggatcaaccatcgtccaattgaggcacttggagcctttgtgttgtgggcttttgattgtattctcacagatttagcagcacaacaaggtggtgctaaaggtgggaagaanggtggtcaacanactacttccaaatctcangtggcaatatttgttgcattagcgatggtattgcgtaagaagnctgatgctttgactaatgtatgccaactcctganggaagaatcccaaattac

SEQ ID NO: 3314 - DNA, 402 bp, Arabidopsis thaliana
  unsure at all n locations
  Clone ID: LIB22-002-Q1-E1-B11
ctctctctttctatctctacagagtaaagttctgatcgtgtctcttatcgtttacccaaaaacccttgtttgatctctcgtctcttgttttcttctgccctcgaagttttcaggttatgtggtggaggttgtttccaatttaaagtatgtacctttaggttagaaattaggcttatttgtttctccagtgggtttcattgtagaaacaaattgaattttaggtgttaatgtgagattaggaaacagaatctctgcttttaacaaggtaataggagaatagggtttagtagaagaaaggttaaaactttgtgatgggtaataanttgggaaggaagaggcangtggtggaagaaaggtatacaaagcctcaangtttgtatgtgaataaagatgtcgacgtta

SEQ ID NO: 3315 - DNA, 447 bp, Arabidopsis thaliana
  unsure at all n locations
  Clone ID: LIB22-002-Q1-E1-B2
gaccangatctagtgggaagctatgtagtctcgattctgtcttaggctaatattaggttgcctttggttgggtaatttagtctctgctcatagnnnnnnnnnnnnnnnnnnnnnnnnnnnnnnnnnnnnnnnnnnnnnnnnnnnnnnnnnnnnnnnnnnnnnnnnnnaaccaattgaattagctaagctcagagatccttcttggtttgtgttttgcgcaagtcagtttctctctggttatggaattgcctttatgtcctttgctcttctgctttgctgggtcctcttgggcnnnnnnnnnnnnnnnnnnnnnnnnnnnnnnnnnnnnnnnnnnnnnnnnnnnnnnnnnnnnnnngcagcgtcatctacaagctcctttctagcttctttgaggtttgaanttgggctacaagcgtcacaagtggaacgattaacatgttcctcncc

SEQ ID NO: 3316 - DNA, 450 bp, Arabidopsis thaliana
  unsure at all n locations
  Clone ID: LIB22-002-Q1-E1-B3
gagaagcatgatgcagcagtgactgttatgctttgtgctcaacctgtcagtgggccatcagaatcaggaggttctggtgggaaagataaaaccaaaaaacctgcttgcgatgatatcatagggcttgattccttgaaacagttcttgttatacatagccaaaggtactgagattaagaaagatacccgagtaaaaaagagcattctctgtgcggctggcaagatggaaattcgatcagatctgatggattctcatatatatgccttcaagagagcagttctgcaggaagttttggatcaaaaacctgcttttaggagcctaaaacaggatgtactaccgtatcttgttcgtacacagctgagatnagatgtcctctctgaccaaagtaatgtnnaagaaaatgggaatgggaatgggaaaaataatatgcagaacaacgaaggtgggcct

SEQ ID NO: 3317 - DNA, 453 bp, Arabidopsis thaliana
  unsure at all n locations
  Clone ID: LIB22-002-Q1-E1-B4
ggannnnnnnnnnnnnnnnnnnnnnnnnnnnnnnnnnnnnnnnnnnnnnnnnnnnnnnnnnnnnnnnnnnnnnnnnnnnnnnnnnnnnnnnnnnnnnnnaaaccaccccttcttcaccggacccaccgccgtcgcgccgccaaacaacatccatctctatcaagcagctcctccgcagcagccacaaacatctccaagttcctcctcatccatctatttcccaccctccttactctgacatgatttgcacggcgattgcagcgttaaacgaaccaagatgggtcaagcaagcaagctatttcgaggtacatagagagaatttacactgggattcctactgctcatgggagctttgttgacacaccatctcaagactttgaagaccagtgggattcttgtcatggttaagaaatcttacaagcttgcttctactcctcctcctccctcctccta

SEQ ID NO: 3318 - DNA, 449 bp, Arabidopsis thaliana
  unsure at all n locations
  Clone ID: LIB22-002-Q1-E1-B6
gcagagagtgatggaaacagctgtatttattatgagacgaaacaagaacctctgggtttctacttaaactcttctctctttcctctctcactttaaaaatccacactttanagcacacaatacaaaaaataagggtttctttatcttttcgtttcttccaaattttgtaatggatttgatgcaaatggataagcgtttggattcaacggagcaagtggttgaagaaatcatgagaattcacagatctctacccgcaagaccaggaattgacgaagttgaagctgccaagggtttgattgacaacgttgagaaagaagatcaagcttgtttagaagccattgctagacagaggaaaagctctgaagttcctggtgagcttttcatggtgttgcaagaaatgaagaagggttaaggttcagtttcgtagcaaagaacaagataagagaaag

SEQ ID NO: 3319 - DNA, 495 bp, Arabidopsis thaliana
  unsure at all n locations
  Clone ID: LIB22-002-Q1-E1-B7
atntttgcgcggcctaccggtcaggaattccgggtcgacccacgcgtccgcaaatttagtttcttcttcttttggttctgtctgaatccaattttcttatattttatttcctccaccaccgtgagatatgatcgccgccggagctaaatcgctattagggctttcgatggcttctccaaaagggattttcgatagcaattcaatgagtaattcaagatctgttgttgttgttcgtgcttgtgtttctatggatggatctcaaactctgagtcataacaaaaatggatctattcctgaggttaaatccattaacggtcacacgggacaaaagcaaggacctttgtctacggtcggaaactcgacaaatataaagtggcatgaatgttctgttgagaaagttgatagacagagattgcttgatcagaaaggatgtgtgatttgggtcaccggtcttaagtggttcaaggaagagtactttggcttgtgcctttgaat

SEQ ID NO: 3320 - DNA, 439 bp, Arabidopsis thaliana
  Clone ID: LIB22-002-Q1-E1-B8
aaggtttttgatcttgacaaagttcaggaggaaggtactagttcctcggctcctgaatgcattggtattcttagaattttcaccaatcagtttcctgaagctaagattacttcttttctaagtcttggaggaagttccaccaatattgcttatagccattggcttagataatggctgcatttattgtgtcaaaggagacattgcacgagagcgtatcactcggtttaagcttcaagtggatggacggtccgctattacaggcttggggttcaggatggatggccaagcgcttctgttgtttgcagtcactccagagtcagtcaacttgtttagtatgcaggcgcagccaccgaaattgcagactttggatcatattgggggcagtgtgaatactgttacaatgagtgaccgctcggaattaatagttggtccacctgaa

SEQ ID NO: 3321 - DNA, 348 bp, Arabidopsis thaliana
  Clone ID: LIB22-002-Q1-E1-B9
gcccacgcgtccgtgacatcctcgccgttgaagtctggcaggaggattgcaaagagtggagacgtatgagaagagtgtttggagcggttcatgatttgcagaatccacctagaggcactctcacattgaggttcttagtctacggaagcgcaggaatcaattggatccaatcgccaaacgctattcccgctgattggactgccggagccacctacgactccaacattctacttacttaattgattcacttttcatcagtgtgtttttatcatatagtatttattatggtttctgtatgcaatggctaatatatttaaataatgccctcaaaaaaaaaaaaaaagggcg

SEQ ID NO: 3322 - DNA, 423 bp, Arabidopsis thaliana
  unsure at all n locations
  Clone ID: LIB22-002-Q1-E1-C12
ggaanacagtacttgtttctgtccggcgttaaaagcttcggtggtggtctcttgacttctctgagaagaagaaaaggaagctgagtctcattttagattcagctcacgaggaagtgacgacgatgtctcattctagaagactttcgttggaacctgctatagattcaatcactggtcgatttcgtgatttacagagaaatgatgatgacgtcaacaaacctgattttcgagaactcgatctaggttctcctgtttctaccttaatgccacgtggctctgcttcttcttccgctgctgcgactcctactagcagctctggctcttctggctctgcttctggtaaaccgtcggtgagttctcagatggctaaacggttagatgatgcttacaagagtcattccggtgaagctttctaaccccgga

SEQ ID NO: 3323 - DNA, 497 bp, Arabidopsis thaliana
  unsure at all n locations
  Clone ID: LIB22-002-Q1-E1-C7
gaatngttgcgcggcctaccggtcaggaattcccgggtcgacccacgcgtccgccangttcagagattaaacaatttgaaaaatcggagactctgggattgtatggttcgttgttactgatagattacttaagctatggtttggtttagaatcggttcttctgtggcaaagcttgccataagaaggacactgtctcagtctcgttgtggttcatatgccactagaacaagggttttgccttgtcaaaccagatgttttcactctacaatactcaaatcaaaggcagagtctgctgcacctgttccacgtcctgtcccactttctaagctaactgatagcttcttagatggaacaagcagtgtgtatctagaggagttacaaagagcttgggaggctgatcccaacagtgttgatgagtcntgggataacttttttaagaattttgtgggtcaaggcttctacatcgcctggtatctcggggcaaaccattcaagaaa

SEQ ID NO: 3324 - DNA, 425 bp, Arabidopsis thaliana
  Clone ID: LIB22-002-Q1-E1-C9
gcccacgcgtccgatgaataacagagctttagattatcctcgggagaaggatggagcgcgcgttcagatgagattatcatacagcccgactgctcaattttttctttttcttgtacaatggactgattgtaagcttgctggtttcctcggtttactcagagttcttatttatatgacttatgcagatgggaaaacaaccatgtcggtttacgaaagaaaagccagtattagagagttccaaggtatgcttatatatatggcgatgatattatttctggtaaacaagattgatatcgtttaattcttatgagctttttaatattttcgttatgttttagctgtgatattaccatctttgtcacaactacaaaggggtgttacagacatagatgacagcaaacaaaaagaggtatgcaagatgcgat

SEQ ID NO: 3325 - DNA, 448 bp, Arabidopsis thaliana
  unsure at all n locations
  Clone ID: LIB22-002-Q1-E1-A2
gagaagatgggcatggcaatgaagtcagtttctaacttcgcaatctttttaatcctctttttggtcacctctgaaatatctgagatagaagcgaaagataaggaatgtctaaaaggatacattgatgcgcctttaagctattgtatggctaggatttatccgtcgttgtgttatcgaaattgtcgtttttacaagggcgcgaaaggtggaaaatgcgacggtcttaagtgcttctgcgacttctgcagcgacaagcctttttagtcagtttctgatgagaaatgtttgaatcttggcatgtataatggtttgtgnnnnnnnnnnnnnnnnnnnnnnnnnnnnnnnnnnnnnnnnnnnnnnnnnnnnnnnnacgctagactttgattgtgttatcactaaaataaaatgaagataagtgggacttcggttgtggatnactccacgagtg

SEQ ID NO: 3326 - DNA, 434 bp, Arabidopsis thaliana
  Clone ID: LIB22-001-Q1-E1-E6
gattcgctgtttgaccaaaaaataaaaaattattgtttcgctgagaaatgtatagataattatattatacgttagattggtaactaccaaaaatattactatatgttagattggtcacaaaataagaaaagaaaggtagtgtatatcaatttattaatgacgtatttaataaagttggtctcaagcgaaatgaattgttctttactgctacaaggcatataatcctgtaaagaaaatctgggtggtcgaattgttcttttccctttttctaatttcaacatcaaaagttgttccaccagaagaatttgttctctgcagcagtaaagatcgatccgttcttgcttacaagcagaaaaatcatatcgacagagagagatgagacagaactcagcaactgggtggtctttcatggcggcgtttactgttccttcgct

SEQ ID NO: 3327 - DNA, 435 bp, Arabidopsis thaliana
  Clone ID: LIB22-001-Q1-E1-E7
gaagaaagtccaagcaagaatggagcaatttggaggcaaatcttccgaacacgatatatgtgcgtgtgtgtgaagaaaggatggaccttctgcgtgcagccctggttggtgcccctggaacgccatatcacgatgggcttttctttttcgacataatgcttccacctcaatatcctcatgagccaccaatggtacattatcattcaggtgggatgcgactgaatccgaacctgtatgagtcaggaagagtttgcttgagtctgctgaatacatggagtggctctggcactgaagtatggaacgcagggagctcctccatccttcaacttcttctttcgtttcaggctctggttctgaatgagaagccttacttcaatgaagctggctatgataagcagttgggccgaaccgagggaaaagaaaaactcagtgagt

SEQ ID NO: 3328 - DNA, 431 bp, Arabidopsis thaliana
  Clone ID: LIB22-001-Q1-E1-E8
gctgaactccaaacatcgccatgtccgagattctctcttcgttgaggtcactaatggcctctcactctcctcctcttgatgctttggttgttccttccgaagactatcaccagagcgagtatgtttctgcacgagacaaacgccgtgagttcgtgtctggattcagtggaagtgcaggtttggcacttatcacgaagaaggaagcaagactttggacagatggtcgatacttcttgcaagcattgcaacagcttagcgatgagtggacactaatgcggatgggagaagatcctcttgttgaagtttggatgtctgataatctacctgaagaggcaaatataggtgttgattcatggtgtgtctcggtagacactgcgaatagatgggggaaatcgtttgccaagaagaatcaagaaactaatcaccacaac

SEQ ID NO: 3329 - DNA, 426 bp, Arabidopsis thaliana
  unsure at all n locations
  Clone ID: LIB22-001-Q1-E1-F2
nctncgggnnctnagtnataaatnggnnaaanataanttncttcaatggnctcnaattgcattcagttcctccatgacaagacgattctcgtcaccggtgttcccggtttcctcgccaaagtgtttgtggagaaaatattgaggattcaaccaaaggtaaagaagcttttccttcttttgagagcagcagacaatgaatcagccatgcaacggtttcacagtgaggttttggagaaagatctttttagagtgttgaaaaacgctttaggtgatgagaatctgaaagctttcataacagaaaaagtcgtacctattcccggtgatatatccgttgataatttgggagtgaagggttctgatctcttacaacatatgtggaatgagattgatatcattgtcaatgtagccgccacaacgaactttgat

SEQ ID NO: 3330 - DNA, 424 bp, Arabidopsis thaliana
  Clone ID: LIB22-001-Q1-E1-F6
aatccaacatgggcttctgttccttatgggatcttcctatgcatcgattgttctgctgttcatcgaagtctaggtgttcatatcagcttcgtcaggtcaacgaacttagactcgtggagtcctgagcagctaagaacaatgatgtttggagggaacaatcgagctcaggtgttttttaagcaacatggatggaatgatggtggtaagattgaggctaagtatacttcaagagctgctgatatgtatagacagactcttgctaaagaagttgctaaagccatggctgaagaaactgttttaccgtcgttatcctctgttgctacttctcagccagtggaatcatctgaaaatgggtttacttctgaatctccgaaagagagttctttgaagcaagaagcaactgttgtctcttcaccaaaagctt

SEQ ID NO: 3331 - DNA, 435 bp, Arabidopsis thaliana
  unsure at all n locations
  Clone ID: LIB22-001-Q1-E1-F7
gaaaaaacctctcttctctctcctcactgtaacaaatttttagatctagatctgcttttctcggtgcctttgatcttcatctctttggctttgctttgaaatttcaggggtgaacaagatgccttctccgttggcagtggtgtggtttttctctccttcgatgtagttgtggatccgatgtgttggaagtagagagttgctacgattcccttcggttgtggacgccggttggtgtagcgatttcttctcgtggctcagccgtcgtgtcggcctctgcaactacngcgngaagtcgatcgaagagaaggtgggtaagtgccaattcgccatgggaggttaacggtggatnttcctaaatttgttggctgtcgcggattcagtgtgtttgggtgtttcgcttgagccttgggccctcaaacaacancgtgacttgct

SEQ ID NO: 3332 - DNA, 437 bp, Arabidopsis thaliana
  unsure at all n locations
  Clone ID: LIB22-001-Q1-E1-G3
gnaaggaacggaagatgatgatgaagaagaagttaaggtggtgaggggtaagcggtttacaaaagaagaagatgagatggtaaagaatgctgtattagaatacattgataaccatgctttaggagatgaggggataaagatggttatggaatgcaaggcatacccacaacttaaaggctgttggaaagaaattacatctgctttaccttggaggacttataatagtgtgtatcatcgtgcacatactatatttgaagcaggatctcaggggatatggacgaaagaggatattgaactcgttatggagtttcaaaagacacacgggaatgattggaaaacacttgcagatgcaatgggtaagcacaggaagcatgtgaaagacgcttggaggagangaagattggcangtaagaagaaaggacattggatgagggaag

SEQ ID NO: 3333 - DNA, 434 bp, Arabidopsis thaliana
  unsure at all n locations
  Clone ID: LIB22-001-Q1-E1-G5
gattagctatgagattatgaaagtgaagatataaaacaaacacctaaaagtgaaaagtacacaccaaatccttcattttcatctcttacacaaccacactaagttaccaaaaaacagaatctgttctttttttgccttcttgcagatttcttcagagtcaaagacacataaagatttataattgagttgtgagttttggaggccatggacgtaggagagagcaatgagagggtaaaagacgattctgcccttcaagcttcaccgaggagtcctctgagttctatagatcttgcaattgatggagctatgaatgcttctattgagcagttgtatcataacgtttgtgaaatggagagttctgatgatcagtctccgtccagggcgagttttatttcgtatggagctgaatccaaggattgatttggagttgangc

SEQ ID NO: 3334 - DNA, 424 bp, Arabidopsis thaliana
  unsure at all n locations
  Clone ID: LIB22-001-Q1-E1-G6
tgggtttatatcattgcttggttgttctgatgatgacataaaagaacttctgcagctgtcgcaggagttcactttagtgcggtacccagaccaggttgcccttgaaaggcttttccgagttgaagatattanagttggggctacttctcgaaaggcgattcccttactagttgaacttcttaaaccaattccagaccgccccggtgctcctctactttcacttaatcttctaactcagcttgctggggactgtccacaaaatatgattgtcatggtagagtcaggtgctcttgagggtctctcgaaatatctttcccttggacctcaggacgagcaagaggaagctgcaacaggtcttttaggcatcttatttagcagtgctgaaattcgaaggcatgagtcagcatttggcgcggtcagccaa

SEQ ID NO: 3335 - DNA, 433 bp, Arabidopsis thaliana
  Clone ID: LIB22-001-Q1-E1-G7
gcggacgcgtgggatctctacaaagcttaacttacaagctgattcaagcaaagagtcagaggatttcttgtactctttcaaggcgcaacaccttccaccgattgtgttgaaatgtttattaccaaaagcttatccgagccacttaccgccttatttcttaataagtgttcagtggatgaatcctgataagatttcaagtctctgctctaagctggactcgttatggagtgaacagccagggcaagaagtcttgtaccagtggacagattggctacagaactcgtcgatttctcatcttggttttgataatgagattgttcttggtccttatggtgttacatgttccagagataagcgtgctgtgtctggaaatcgttctccggattcagatattccttatattaggagttatgacgatgagaaacgtcatgat

SEQ ID NO: 3336 - DNA, 470 bp, Arabidopsis thaliana
  unsure at all n locations
  Clone ID: LIB22-001-Q1-E1-H7
ctgttttatttttttcttccggtggtacaaaaattcacaatgaactgtatttatcacaattaatgaccgattgctnnnnnnnnnnnnnnnnnnnnnnnnnnnnnnnnnnnnggaagtaaccaaacaagcctatatgctgctgatcccatctaggggccaagcctctcttctttaaaaacttttgacttccattttcttgagaattcccctttctgggttcttgatttggaaagatgggtaacaagataatctcaatgatgaagaaagatagcaaagatgggaggaagangaggatctaaagagcaaagagaatgaatcggtctcaagaggaaaattacttgctgatgaaagagatgtttgcatcctccaagctcctttccaatggngaattcaacaaagctcaagctttctcaaaaaatttngatgggttcaaaggtcaaaaacggggtccggggtccaacaaagtanaa

SEQ ID NO: 3337 - DNA, 438 bp, Arabidopsis thaliana
  unsure at all n locations
  Clone ID: LIB22-001-Q1-E1-H8
gaattgggttcttttgctgcgggggtcatgatatccactactgatctcgctgaacatacattggagcaaatcnaacccatccgtaanttatttgctgctcttttcctagccagcattgggatgttagttaatgtccattttctgtggacacatgtggatatactgttatcctctgtgatattagttattattacnaagacaacaatagttacaaccgttgttaanggatttggatacaacaataagacngctcttctggttggaatatctctggctcagataggggagtttgcctttgtactacttaaccgtgcctccaatcctcaactcatcgaanggaaactccaacctggctcccccttggaacaanccgctctaaagcctgggttacgacaaccgctgggttttcaaaaatggataccaacaatttgtacatcc

SEQ ID NO: 3338 - DNA, 428 bp, Arabidopsis thaliana
  Clone ID: LIB22-002-Q1-E1-A10
gcccacgcgtccgggtgaacaaccaagtggctttcacgacagatccaagggcggggagatcttcccagtattgtactgatgttgcaaaggctttgagtgctcccatctttcatgttaatggggatgatgttgaggctgttgttcatgcctgcgagcttgctgctgagtggcgtcagacttttcattctgatgttgtcgttgatttggtttgctaccgtaggttcgggcataatgagatagatgaaccatctttcactcagccaaaaatgtacaaggttatcaaaaatcatccttcaacccttcagatctaccacaaaaagctcttggaatgcggtgaagtatcacaacaggatattgaccggatacaggaaaaggttaacaccatcctcaatgaaagaatttgtccctaagtaaaggactaacccccc

SEQ ID NO: 3339 - DNA, 426 bp, Arabidopsis thaliana
  Clone ID: LIB22-002-Q1-E1-A12
gcggacgcgtgggttcgttcttctctacggatactccatgggagttgagttgagcactgataatgttatcgccgagtacttctttgacaggtttcacttgaagctccacacagcagggctcatagcagcatgtttcggaatggccaatttctttgctcgtccagcaggaggctacgcatctgactttgcagccaagtacttcgggatgagagggaggttgtggacgttgtggatcatacagacggctggtggcctcttctgtgtgtggctcggccgcgccaacacccttgtaactgccgttgtggctatggtgctcttctctatgggggcacaagctgcttgcggagccacctttgcaattgtgccctttgtctcccggcgagctcctaagcatcatcctcgggtttaaccggggctggagggaac

SEQ ID NO: 3340 - DNA, 433 bp, Arabidopsis thaliana
  unsure at all n locations
  Clone ID: LIB22-001-Q1-E1-E5
gcggacgcgtgggctagctcacactcacaacactctctctctcctgccataactcagcctgagatgtctccggaagcttacgttctgttctttaacagttttaacctcgtaaccttcgaagcctttgcttcagtctcacttatcatagccacagttgctttcttgctctcaccaggtgggctcgcatgggcctggaccgggtcatccaagagtcgggtttcgattccaggaccatctggttctctttccgtcttctccggctccaatccccaccgtgttctcgccgctcttgctaaacgcttcaaggcctctccgttgatggcgttctcagttgggttttcgcgtttcgttatctctagtgaaccggagacggctaaagagattttgagcaagctctgcttttgctgaccggncggttaaggatcagcttaag

SEQ ID NO: 3341 - DNA, 393 bp, Arabidopsis thaliana
  unsure at all n locations
  Clone ID: LIB22-032-Q1-E1-C8
ttgaattaaaaaatagaagcaatagtttttgggggacaagcccggccgacgaatcggcggcgagacgttctttgtcaccgattgacatattcaaaaacgacgaagctaggtaaaggaacggagagaagagtcgataatagaagcgtacagatgggaaatcagaagctcaaatggacggcggaggaagaggaggcgttactcgccggagttaggaagcatggccctggaaagtggaagaatattctccgcgatcctgaattagctgagcagctctctagtcgctctaacatcgacctcaaggataaatggcgtaatttaagtgttgctcctggtattcaaggctcnaagganttaagataccggcaacaaanatcaaanctggcggctttcaac

SEQ ID NO: 3342 - DNA, 360 bp, Arabidopsis thaliana
  unsure at all n locations
  Clone ID: LIB22-050-Q1-E1-B11
acgnntccgctttattcttccatatctcttccatttcgctctctatttcacatccccatataacataatatacaatcacacatatcatttctatatantatttaatggggagacagccatgctgtgacaagctaggggtgaagaaagggccgtggacggtggaggaagataagaagcttagaancttcatacnaaccaatggccattgttgctggcgtgctttgccgaagctggccggtctccgtcgctgtggaaagagctgccgcctcnggtggactaactatctccggcctgacttaaaacgaggccttctcncgcatgatgaacaacancttgtcatagatcntcatgctaatctcg

SEQ ID NO: 3343 - DNA, 418 bp, Arabidopsis thaliana
  unsure at all n locations
  Clone ID: LIB22-074-Q1-E1-E2
acattcttgttgttttaagcagaagctaagaaaaggcctttggtctcctgaagaagatgagaaacttctcaattacatcactagacatggtcatggctgttggagttctgtccctaaactcgcaggtttgcaaagatgtggaaagagttgtagacttaggtggataaattatttgagaccagatttaaagagaggagctttctctcaagacgaagaaagcttgatcattgagctccatgctgcattaggcaacagatggtctcaaatcgcaacgcggttaccgggaagaacagacaacgagatcaaaaacttttggaactcatgtcttaagaagaagctgagaagaaaaggcattgacccaacaacacataaacccttaataacaancgagcttcaatctcctaacgtcataaatnag

SEQ ID NO: 3344 - DNA, 457 bp, Arabidopsis thaliana
  unsure at all n locations
  Clone ID: 39-LIB22-072-Q1-E1-B4
gcgggcgcgcaactgtagcgnncggtagcgtcanagantcgagggccgacccacgcgtccaatctcctttgnaaanatgtgtttcatggaggagaaacaccaagtgagcaacaacaacaacaaccagtttgggatgacaaactccgttgatgctggatgtaatgggtatcagtatttcagctctgaccagggtagtaattctttcgattgttcggagtttggttggagcgatcaagctccgataactcccgacatctcttctgcggttatcaacaacaacaactcagctctgttctttgaggaagccaatccagctaagaagctcaagtctatggatttcgagacaccttacnacancactgaatgggacgcttcactggatttcctcaacgaanatgctgtaacgactcangacaatggtgcaaacctatggacctatggagtattgatgaaantc

SEQ ID NO: 3345 - DNA, 410 bp, Arabidopsis thaliana
  unsure at all n locations
  Clone ID: LIB22-004-Q1-E1-D12
acgcgtccgcggacgcgtggggccgctgttaacggagagttatggatctggtggatcttcttcgccgttgtcggagctgacgtttggtgatacggaggaggagattcagccgccgtggaacgagaacgcgttggagaagtatccgtcgtacgagatcgattgggattcgattcttcagtgttcgagtcttgtaaattagatgttgccataggggtattttagggactttagagctctctgcgatggagtttttggtcattgcagagattttattattattaagggggtttgttatgttaatatcaaataagtttatctactttgatgttaattagtgttaatctctgcgtcggtccaagctgtttttttttggcatgcttcgaccgtgtgagattctangtaatttttgt

SEQ ID NO: 3346 - DNA, 258 bp, Arabidopsis thaliana
  unsure at all n locations
  Clone ID: LIB22-004-Q1-E1-G12
tttagaaagaaaaaacagattaaatctgagagagaaaaatataattttagctgacatggatcgttatgtacatattattacataaccggagatctgaacttttgttgtgtgcnnnnnnnnnnnnnnnnnnnnnnnnnnnnnnnnnnnnnnnnnnnnnnnnnnnnnnnnnnnnnnnnnnnnnnnnnnnccaaattttcaatcaataatttggtaatcttcagaattatcttgtccnnnnnnnnnnnnnnnnnnnnnngg

SEQ ID NO: 3347 - DNA, 449 bp, Arabidopsis thaliana
  unsure at all n locations
  Clone ID: LIB22-076-Q1-E1-D6
acgcgtccggtcgaaagcaaaacagtctcctttctctatcttctgctcatatcaggccattgacacagttgctttgggtttccctcaaacggcgccgattgtctggattttgaccactgatggccttagatcaatcttttgaagatgctgctttacttggagaactctatggagaaggtgcattttgtttcaagagcaagaaacctgaacccattacagtctcggttccttctgatgatactgatgattcgaattttgactgcaatatttgcttagactcggtgcaagaacctgttgtgactctctgtggtcacctcttttgctggccttgtattcacaaatggcttgatgtacaagagcttctcaacaagtgatgaataccagaagacatagganagtgtcctgtttgtaaatctaaaagtttctcattccnactttggttcctttgt

SEQ ID NO: 3348 - DNA, 447 bp, Arabidopsis thaliana
  unsure at all n locations
  Clone ID: LIB22-082-Q1-E1-F3
gcttgccggtnccggtccaaaattcacgggtcgacccacgcgtcngnttgtcacctccggccaaccttaacccttaagcnaacggtgttcctttgcggattgcgatcgttccgtcgatcccttcaacgcccgatctaaatctccaatcgtgtcggagattaaaagcagaggttttgtggtgaatcatgtctgatgtcccttcttgttctancggtaatgatacaaacaacaatgattcgagtaacttcgaatgtaacatctgcttagacttggntcaagatcctattgtcactctctgtggncacttgttctgttggccttgtttatacaaatggctccatctccattctcaatcnaaggactgtcctgtttgcaaaagccgtgatcnaagaagacagattggttcctttgtacggtagaggtaaancgtctgctgaccctcggtcc

SEQ ID NO: 3349 - DNA, 481 bp, Arabidopsis thaliana
  unsure at all n locations
  Clone ID: LIB22-086-Q1-E1-H2
cttttaacttcccggtnccggtcaaaaattcacgggtcgacccacgcgtccncccacgcgtccggactcggactcgtcgtgttcgttactgagtcgttcactcgggtctaatctgggaaacgacgtcgttgcgtctctcaagaatctgcaacttaataaagtnnagtcctccccttnctcgtcatacaacaatcnaatccgnagnnancgnttccggntncggnnccccccttgnttcggttttgggtcctggtttccntaccttaccaactacaccgacccgacctggttttatgaacatttggganaatggcttggaggaagaaccggcgatggaacgggtcgagtcgggtcgtgaactgcgagcgcagctgttcganaagctgagcaaagagaattgcatgggtcggattgaaccggatccggatnagggagcgggtgatactcctgatgtcnggtgggtctctgaacttggttatgt

SEQ ID NO: 3350 - DNA, 824 bp, Arabidopsis thaliana
  unsure at all n locations
  Clone ID: 31-LIB22-084-Q1-E2-H3
actggtttgcctagccgttgcctggccaaccggtccggaatcccgggtcgacccacgcgtccgctcaaaaccaaaatcactaaagaggagaagattgctaaagtttgataaaacattccaaaatcaatggctgataggatcaaaggtccatggagtcctgaagaagacgagcagcttcgtangcttgttgttaaatacggtccaagaaactggacagtgattagcanatctattcccggtatatcngggaaatcgtgtcgtttacggtggtgcaaccanctttcgccgcaagttgagcatcggccgttttcggctgaggaagacnaanacgatngcacgtgctcacgctcagttcggtaataaatgggcgacgattgctcgtcttctcaacggtcgtacggacaacgccgtnaagaatcactgggaactcgacgctcaagaggaaatgcngcggttacgaccatcggggttacgatggttcggaggatnatcggccggttaanaaatcggtgagtgcgggatntccaacctggttgttactggggctttacatgaancccaaggaaagcccaactgggatntgaatgtcagttattcaagtactaatcccgatattaccttcccgttgaagcttttcaagcctgttgcctaaaacctgggtgctgttgtnccnaccggcttcctatcnaaacgttcgtccttccttccgaatgattcaaccgacttcgttaaancttgtcancttccttggtgccgacnttaagcnaanggatcaaaccgttncccacgaantcaacnaattttcacaanaccaatttcaagcc

SEQ ID NO: 3351 - DNA, 466 bp, Arabidopsis thaliana
  unsure at all n locations
  Clone ID: 57-LIB22-072-Q1-E1-G11
cccgccggtaccggtccaanaattcccgggncgacccacgcgtccgcggacgcgtgggctcaaaaccaaaatcactaaagaggagaagattgctaaagtttgataaaacattccaaaatcaatggctgataggatcaaaggtccatggagtcctgaagaagacgagcagcttcgtaggcttgttgttaaatacggtccaagaaactggacagtgattagcaaatctattcccggtagatcggggaaatcgtgtcgtttacggtggtgcaaccagctttcgccgcaagttgagcatcggccgttttcggctgaggaagacgagacgatcgcacgtgctcacgctcagttcggtaataaatgggcgacgattgctcgtcttctcaacggtcgtacggacaacgccgtgaagaatcactggnactcgacgctcaagaggaaatgcggcggttacgaccatcggggttac

SEQ ID NO: 3352 - DNA, 484 bp, Arabidopsis thaliana
  unsure at all n locations
  Clone ID: LIB22-027-Q1-E1-E1
aattctccagcccgtaccggtcnaaaattcccgggcccaccacgcgtcnaaacgggccacgttgttgngagatgattagggattatgggcaggcagcaagtgatatggagagatatgttaatattctaaccaagcaaatggaagagaagacctctggaacccttgacagatctactagtatgtccaatgacataagacaagctcgtatacgactttctgaactggaagagaaatcaaggaaagaaaattcattggatatgtacctcgtcttgggtgttgtaccatcatgctcggcttcagatatcagaaaggcatataggaaggccgcactcaaacatcatcccgacaaggctggtcagtctttgacaagaaacgaagactaaagatgagangttatggaaggagataggggaaagaatgcgcaaagataccgataaattatttaaaatgattggggaancgtatgctgtgctttcagaccctg

SEQ ID NO: 3353 - DNA, 449 bp, Arabidopsis thaliana
  unsure at all n locations
  Clone ID: LIB22-009-Q1-E1-A5
tgcccgggncgacccacgcatccnacagaggnaactcaggacgantgtgattttttcttcttgagtgaattgttgtaaaaaantgntgatcggagaatctcatcgtggttttaatccaacggttcatattcctccatggccactttctgaagatctaacggtgtctgatatttacggaagtcnagacggaggaagtagtatgatggaagctttggctgagttacaacgttatcttccgtcaaacgaaccggatccggattcagatccggatctctcgggtccggattcaccaatcgatgcttatacatgcgatcattttcggatgtatgagtttaaagtgagacgttgtgctcgtggccggagccatgattggacggagtgtccttacgctcatcccgnataaaaagctcgccgtcgtgattcgangaagtttcattactccggtaang

SEQ ID NO: 3354 - DNA, 476 bp, Arabidopsis thaliana
  unsure at all n locations
  Clone ID: LIB22-009-Q1-E1-C3
catnggacggcccggtcagngataaacgggtcnanccacgcgtccgancacncgtccgcggttctaagaagatgggtcttgaagaaagaacacctttaatggttgcagctatgtatggaagcataaaggttttgactttcatcgtttccactggaaaatctgatgtgaacagagcttgtggtgaagagagagttactccgcttcactgtgctgttgctggctgttctgtgaatatgattgaagtcatcaatgtcttgcttgatgcttctgctttggttaactctgttgatgctaatgggaatcaacctttggatgtgtttgttcgagtttcgaggtttgtggctagtccgaggaggaaagcggttgagttgttgctgagaggaggangtgttggaggattgatcgatgaagcggttgaagaagagatnaagattgtctctaaatatccaactgatgcctccttaacgggataaaaa

SEQ ID NO: 3355 - DNA, 472 bp, Arabidopsis thaliana
  unsure at all n locations
  Clone ID: LIB22-016-Q1-E1-B9
ttacttgcccgcccgtacaatcaagaattcncgggtcgacccacgcntccgtctcgttcgagcttccatttttcctcatcgcaatcttcatcttcaatctccagctatctcaantcgatccttctcgaatcaccatcatgagtgaccatggcgagangacttgtccactttgngctgaagagatggatctgactgatcaacaattgaagccttgcaaatgtggttatcanatttgtgtttggtgcnggcatcacatannggacatggnacaganagatcaantagaagggcgttgtccagcttgtcgcactcnatatgacatngaaangattgtagggatgactgttaattgtgacagtctggcttctgaaggcaatatggancgcaagaagattcanaagtcaaaatcaaaatcttctgaacggagaaancaacaactcaccantgtgcgagtgattcaagaggaatcctg

SEQ ID NO: 3356 - DNA, 435 bp, Arabidopsis thaliana
  unsure at all n locations
  Clone ID: LIB22-019-Q1-E1-G1
acgacggatcttacttccattatcatacagcttatttcaactgcagagtcagaacaataacaactgtggtgctcgagagttcgatttgcctaagccggttcttgttgatgagagggaaggtcatgttgtggaggaacatgagatgaaagatgaagatgatgtggaagaaggagagaaccttcctcccggttcgtatgagatattgcagcttgagaaagaagagattctcgcaccgcatactcacttctgcacgatatgtggcaagggtttcaagagagacgcgaatttgaggatgcatatgagaaggcatgganatgagtacaaaacagcagctgctctgggcgaaaccgaacaaaggaatccgtaaccgggtctgaaccgatgctgatnaagaagtacccgtgccaatcccttggttcaaacttacaaggacaa

SEQ ID NO: 3357 - DNA, 457 bp, Arabidopsis thaliana
  unsure at all n locations
  Clone ID: LIB22-025-Q1-E1-A5
aaattcgcgggncgacccacgcgtccaaaaaaacattccaactttcttctcaatttcattccaggatagtattatgtgcagtggaccaaagagcaatctctgctcttcaagaaccttaacagaaatcgaatcaaggcaaaaggaagaagaaacaatgcttctcctcgaattcgctgcttgtgatgatcttgactcgttcaagagagaggttgaagagaaagggcttgatttggatgagtcagggttatggtattgcagacgtgtcggttctaagaagatgggtcttgaagaaagaacacctttaatggttgcagctatgtatggaagcataaaggttttgactttcatcgtttccactggaaaatctgatgtgaacagagcttgtggtgaagagagagttactccgcttcactgtgctgttgctggctgttcngtgaatatgaatgaagtcctcaat

SEQ ID NO: 3358 - DNA, 445 bp, Arabidopsis thaliana
  unsure at all n locations
  Clone ID: LIB22-026-Q1-E1-A12
ggtaccanacatgagaattcccgggccgacccacgcatccaagttttttggtagtggtggtcgagaaaagagagagtttgtctctgtgactcagagtgaaatcaatagagcgggaaaagattgttgcttttttttgccatgggagttgatgagctgtctcacctcaaattctctcttctgctagaatcatcagcctgcaatgatttgtccggttttaagtctctagttgaagaagaaggtcttgagagcattgatggctctggtttgtggtatgggaggagattaggatcaaagaagatgggttttgaggagaggacgcctcttatgattgctgccttgtttggaagcaaagaggttgttgattacatcattagtactggtcttgttgacgtgaaccgctcttgtggctctgatggtgccacggctcttcactgtgcggtctctg

SEQ ID NO: 3359 - DNA, 502 bp, Arabidopsis thaliana
  unsure at all n locations
  Clone ID: LIB22-029-Q1-E1-G9
gaactggtcttcctggctccacggtccgganancccgggtcggcccacgccgtccggcnaaagacnagataagacagagggtcgttgtcctgcatgtcntacccgttatgataaggaaaagattgtanggatgacagtcagctgtgaaaggttggttgctgaattttacattgaccggaaaaagtcacagaaggcgaagcctaaacctgcggagggaaggaaagatctaactggtgtgagagttattcagagaaacttggtttacgttatgancttgccttttgacctgccagatgaagatatgtttcagcgaagagaatactttggtcaatatgggaaagtcgtcaaagtaccaatgtctcggactgcagctggggctgtccaacaatttccaaaacaatacttgcagtgtntataattacttacccaaanaaganggaancgantccaagttacccgattaattacatggattaatatttggatggtaagaaaatttgna

SEQ ID NO: 3360 - DNA, 407 bp, Arabidopsis thaliana
  Clone ID: LIB22-038-Q1-E1-G5
ctaattcgtctccttctattgctcaccggagccctaggattggtttgcccacgaatctaaatcctaaaattttaatcagccgcagatgtctgagctccgggagttacgtctcagaaatgcagaaatcagctttccagggcaacattttgcgactgatccgtaatgagattgagtacgaactcgatcactcgcctcctcttcagcctcctaacagttttggtccattcactgtggatgaacggcctggagagcagtggattagcttgaaaaggaattttggggataaagaagacatcaaaattgaagcaactatgtttgatagatcagttcccacgtcaaaatctaccaaaactgaacctgaatatattcttcacatcactttcattgtcaacatctccaagggtggt

SEQ ID NO: 3361 - DNA, 443 bp, Arabidopsis thaliana
  unsure at all n locations
  Clone ID: LIB22-041-Q1-E1-H4
acgcgtccgnaaatgataaacgtnaagccaatggagcaaatgatttctagcaccaacaacaacacaccgcaacaacaaccaacattcatcgccaccaacacaaggccaaacgccaccgcatccaatggtggctccggaggaaataccaacaacacggctacgatggaaactagaaaggcgaggccacaagagaaagtaaattgtccaagatgcaactcaacaaacacaaagttctgttattacaacaactacagtctcacgcaaccaagatacttctgcaaaggttgtcgaaggtattggaccgaaggtggctctcttcgtaacgtcccagtcggaggtagctcaagaaagaacaagagattctctacacctttagcttcaccttctaatcccaaacttccagatntaaacccaccggattcntttctcaangccaaaatccc

SEQ ID NO: 3362 - DNA, 446 bp, Arabidopsis thaliana
  unsure at all n locations
  Clone ID: LIB22-009-Q1-E1-A12
cgacncgtccgnnnnnnnnnnnnnnnnnnnnnnnnnnnnnnnnnnnnnnnnnnnnnnnnnnnnnnnnnnnnnnnnnnnnnnnnnnnnnnnnnnnnnnnnnnnnnnnnnnnnnnnnnnnnnnnnnnnnnnnnnnnnnnnnnnnnnnnnnnnnnnnnnnnnnnnnnnnnnnnnnnnnnnnnnnnnnnnnnnnnnnnggcatcggttacatatgggattttcctctgcatcgattgttcagctactcaccggaatcttggtgttcatatcaagcttcgtcagatcaacgaatttagactcttgggagcccggagcagctcaagggacaatgatgtttnggtgggtaacaaacgtgcccaaaggtttccttcaaagcaacaatggatgggactgaatggtggcaaaantgaaacnaaatntaattcaanaactgccgaattgtaaccgna

SEQ ID NO: 3363 - DNA, 478 bp, Arabidopsis thaliana
  Clone ID: LIB22-011-Q1-K1-E4
ccaaagacctccaaagtgtcaatctttacttctctctttttctccaagttatcttcttttcgaggaagagatatgtgcggtgcaaagagcaacctttgctcatctaaaaccctatcagaagtcgaattcatgaggcagaaatcagaagacggagcttccgccacgtgtctcctcgaattcgccgtctgtgatgatctttcatcgtttaagagagagatcgaagagaatccatcggcggagattgatgagtcagggttttggtattgcagacgggtcgggtctaagaagatgggttttgaagaaagaacaccacttatggatgctgctatgtatggaagcatggaagtgttgaattacataattgccacaggaagatccgatgtgaacagagtttgcagtgacgagaaagtcactgctcttcactgtgcagtttctggctggactgtttctatcgatgagatcatcaagatcttgcttg

SEQ ID NO: 3364 - DNA, 371 bp, Arabidopsis thaliana
  Clone ID: LIB22-085-Q1-E2-B1
atcttcaccccaaaaacctccaaagtttcaatctttacttctctctttttctccaagttatcttcttttctaggaagagatatgtgcggtgcaaagagcaacctttgctcatctaaaaccctaacagaagtcgaattcatgaggcagaaatcagaagacggagcttccgccacgtgtctcctcgaattcgccgcctgtgatgatctttcatcgtttaagagagagatcgaagagaatccatcggtggagattgatgagtcagggttttggtattgcagacgggtcgggtctaagaagatgggttttgaagaaagaacaccacttatggttgctgctatgtatggaagcatggaagtgttgaattacataaa

SEQ ID NO: 3365 - DNA, 409 bp, Arabidopsis thaliana
  Clone ID: LIB22-058-Q1-E1-B11
cccacgcgtccgcttcttctccccaaaaacctccaaagtttcaatctttacttctctctttttctccaagttatcttcttttctaggaagagatatgtgcggtgcaaagagcaacctttgctcatctaaaaccctaacagaagtcgaattcatgaggcagaaatcagaagacggagcttccgccacgtgtctcctcgaattcgccgcctgtgatgatctttcatcgtttaagagagagatcgaagagaatccatcggtggagattgatgagtcagggttttggtattgcagacgggtcgggtctaagaagatgggttttgaagaaagaacaccacttatggttgctgctatgtatggaagcatggaagtgttgaattacataattgccacaggaagattcgatgtgaac

SEQ ID NO: 3366 - DNA, 400 bp, Arabidopsis thaliana
  Clone ID: LIB22-001-Q1-E1-B5
acttcttctccccaaaaacctccaaagtttcaatctttacttctctctttttctccaagttatcttcttttctaggaagagatatgtgcggtgcaaagagcaacctttgctcatctaaaaccctaacagaagtcgaattcatgaggcagaaatcagaagacggagcttccgccacgtgtctcctcgaattcgccgcctgtgatgatctttcatcgtttaagagagagatcgaagagaatccatcggtggagattgatgagtcagggttttggtattgcagacgggtcgggtctaagaagatgggttttgaagaaagaacaccacttatggttgctgctatgtatggaagcatggaagtgttgaattacataattgccacaggaagatccgatgtgaacag

SEQ ID NO: 3367 - DNA, 441 bp, Arabidopsis thaliana
  unsure at all n locations
  Clone ID: LIB22-014-Q1-E1-D6
atcattctctctgatctcaagaaataatctcaaatctcttacactcatagtcttcaagcaacttctcagattcagctcttatggatcatttgttacaacaccaggatgtttttgggaattataacaaagcaagagaagcaatgggactatcatattcatcaaacccaacaccgttagataacgaccagaagaaaccttctcctgcaacggctgtgacaaggccacagcctccggagctagctctcaggtgtccacgttgcgactcaacanacacaaagttttgttactacaacaactacagtctcactcagcctcgctacttctgcaaatcatgccggagatattggactaaaggtggaactctaaggaacatccccgtgggtggaggctgccggaaaaacaaacgatccacatcttcggctgcaagaagcctcagaacca

SEQ ID NO: 3368 - DNA, 411 bp, Arabidopsis thaliana
  Clone ID: LIB22-068-Q1-E1-C6
acacacttctaaactttagcctcacaatattcttctctctgtctctctctaagtcatctctttgaacatcagggattaattactgtaattgaagctcacatcatggaccatcatcagtatcatcatcatgatcaataccaacatcagatgatgactagtactaacaataattcctataacaccatcgtcacaacacaaccaccatcaacaacaacaacaatggattcaacaacagcaataactatgataatggatgacgataagaagttgatgacgacaatgagcactaggccgcatgaaccaagagactgtccaagatgcaactcaagcaacaccaagttttgttattacaagaactacagcttagcacagcctatgtacatgtgtaagtcctgtcggagatattggact

SEQ ID NO: 3369 - DNA, 408 bp, Arabidopsis thaliana
  Clone ID: LIB22-058-Q1-E1-C10
catctctctctcgcagctcttctctattttcagcaatcgcctataatattaggtaaagctaaaagggtctgattcgtttgttttttcactgaagaatttggaaggaagtgattccgttgtgaaacataaaagaagtatgggtactcacattgatatcaacaacttaggcggcgatacttctagagggaatgagtcaaagccattggcgaggcagtcttcgttatattccttaacgtttgatgagcttcagagcacattaggtgagccggggaaagattttgggtctatgaatatggatgagttactcaagaacatatggactgctgaggatactcaagcctttatgactactacatcttcggttgcagccccgggacctagtggttttgttccgggaggaaatggttt

SEQ ID NO: 3370 - DNA, 413 bp, Arabidopsis thaliana
  unsure at all n locations
  Clone ID: LIB22-065-Q1-E1-C5
atctgtttcaatcatggcggagaatggtgaagagaagttacttgctgttgcgcgtcacatagccaaaacacttggccacaatgaatccatggccgatgatatcttacagatcttctccaacttcgacggcagattttctcgcgagaagctcgccgaaggtcaagctggagaagatggatccggagtcgccacactcgagcgagctctaaattcaatagacggtcagatctctcgctttgttgctgcggaccaaccaatttgggctgatcctgcagattcagctgctttcctcgacacaatcgatgagctcgttgcaatcattagagagtggagtcncatggcttcagagaaacctatcggcatctgtctaacacgcgccgacgatatgatgcagcaagctatgttccgcatcg

SEQ ID NO: 3371 - DNA, 416 bp, Arabidopsis thaliana
  Clone ID: LIB22-082-Q1-E2-A1
ggaggctagagaatcgagaatcgatcttcgccgaaccaccttgtcttctcttagctcatcgaatctctccgtcgccgtcgattcttcccgccggtgaatctctgccttattgttttcttcaatttgatcgtcctgaattcatcgtcctatttaaggtttcgatcacaatctgaagaggatgtcatggacgtttctgctaaaaagtcacaaaaagctgggcgcgaaaagttgaggagggaaaaactgaatgagcattttgttgaactgggaaatgtactcgatccagagagacccaagaatgacaaagccacgattctgactgatactgttcagttgttgaaagagctcacatctgaagtcaacagactgaaatctgagtacaacgcattgacagatgagtcccgcgagttgacaca

SEQ ID NO: 3372 - DNA, 171 bp, Arabidopsis thaliana
  Clone ID: LIB22-036-Q1-E1-C10
gtttgggatgcatactactgcgtgtattccttcggcgaacggagttgtggaagtcgggtcaacggagccgatccgacagagttcggaccttattaacaaggttcgaagtcatttcaatttcgaccgcggagctggagagttatcgggtcttaagtggaagcttgacccgga

SEQ ID NO: 3373 - DNA, 420 bp, Arabidopsis thaliana
  unsure at all n locations
  Clone ID: LIB22-019-Q1-E1-D8
aaatattaaacttcggcgatgaaggtaaacgaagctccggaaacccggatccaagttcttattcgggtcaaacacaattcgaaaacaaaagaaagaggtcgatggttttgaacgaagataaagttctatcattcggagataaaaccgccggagaatcagatcactccgatctagaagcttccgtcgtgaaagaagtagcagtagagaaacgtccaaagaaacgaggaagaaagccagcaaacggtagagaagagccactaaaccacgtcgaagcagagagacaaagacgcgagaaactaaaccaaagattctacgcgttacgagcggtttgtacaaacgtttcaaaaatggataaagcttcgttactcggtgacgcaatcgcttacatcaacgagcttaaatcanagtagtcaaaacaga

SEQ ID NO: 3374 - DNA, 410 bp, Arabidopsis thaliana
  Clone ID: LIB22-038-Q1-E1-F9
cccacgcgtccggcaaaaacaaaaccaacaaggaacttgtctctctctctggctctctttctcttaacgtgatcataacgtgattcgaaaattggatatagataggtttcttgttggatcttgatccctctggaaaaggaggggagaatagcagttcatgatgggattttgtatctgcccgttggagtcacctgcgagattactatggagtacaagcttcttccgccataagatcatgatcttctaatccttcctacttcttcccatctttttaatcatcttctcgctatctctgcttcctctttctctctgtttcctctttctcagaactcagaagtagttgttgttttatttctgttgatcaaaaatggaatccaattcgtttttcttcgatccatctgcttcacacg

SEQ ID NO: 3375 - DNA, 390 bp, Arabidopsis thaliana
  Clone ID: LIB22-060-Q1-E1-C4
ctcttttggactttctcaatccatatccctctctctgttttttctaatttgagcctctaaagtctcctcgttttgttcatgttgttgttcaagtgaagaagctcaattatgtttacaacattgttgtaatttcaaaacttcataagaatttctctgataataaagaaaaagctggagtagaactattttaaagtgtcatcatgaagagactaagcagctcagattcaatgtgtggtctaatctccacttctacagatgaacagagtccaagagggtacggaagtaattaccaatctatgcttgaaggttacgatgaagatgctacactaatcgaggaatattccgggaaccaccaacacatgggtctatcggagaagaagagaagattaa

SEQ ID NO: 3376 - DNA, 426 bp, Arabidopsis thaliana
  Clone ID: LIB22-076-Q1-E1-D3
cgtaacataatcttccaaacttcaccagaagaaattcttaacatacaattttcttcataatattaattctcaagatcttaaagattatattaatacgaagagaaaattcaaatgggtcttgatgattcatgcaacacaggtcttgttcttggtttaggcctctcaccaacgcctaataattacaatcatgccatcaagaaatcttcctccactgtggaccatcgtttcatcaggctcgatccgtcgttgactctaagcctatccggtgagagctacaagatcaagactggtgccggcgccggcgaacaaatttgccggcagacctcgtcccacagcggcatctcatctttctcgagcggaagggtaaagagagaaagagaaatctccgggggggatgggaaaaaagaggcgggagagaagacggat

SEQ ID NO: 3377 - DNA, 395 bp, Arabidopsis thaliana
  unsure at all n locations
  Clone ID: LIB22-067-Q1-E1-H9
aaagaactctttcgacgactaatgtgatttattgttcaccggagtattaaagaagatgatgatcggagaaactcgcaggacttatcccactgttgaaatacctccatggccggtacttgaagagcttacaacgtcggagtttttttttctccggtgatgaatagtccagattgtagcatgcttgaagctttggcggggttgcagcgttatttgccgtctaacgaaccggatccggagtcatacccggatctattgggtccggattcaccaatcgatgcttactcatgcgaccatttccgtatgtacgatttcaaagtcaggaggtgtgctcgtggccggagtcatgattggacggagtgtccgtacgctcatcncggagaaaaagctcgccggag

SEQ ID NO: 3378 - DNA, 417 bp, Arabidopsis thaliana
  Clone ID: LIB22-062-Q1-E1-G5
cccacgcgtccgcttaacaaacaattttcttcataatattaattctcaagatcttaaagattatattaatacgaagagaaaattcaaatgggtcttgatgattcatgcaacacaggtcttgttcttggtttaggcctctcaccaacgcctaataattacaatcatgccatcaagaaatcttcctccactgtggaccatcgtttcatcaggctcgatccgtcgttgactctaagcctatccggtgagagctacaagatcaagactggtgccggcgccggcgaccaaatttgccggcagacctcgtcccacagcggcatctcatctttctcgagcggaagggtaaagagagaaagagaaatctccggcggcgatggagaagaagaggcggaggagacgacggagagagtggtgtgttcg

SEQ ID NO: 3379 - DNA, 382 bp, Arabidopsis thaliana
  Clone ID: LIB22-025-Q1-E1-F10
acccacgcgtccgtcttaacaaacaattttcttcataatattaattctcaagatcttaaagattatattaatacgaagagaaaattcaaatgggtcttgatgattcatgcaacacaggtcttgttcttggtttaggcctctcaccaacgcctaataattacaatcatgccatcaagaaatcttcctccactgtggaccatcgtttcatcaggctcgatccgtcgttgactctaagcctatccggtgagagctacaagatcaagactggtgccggcgccggcgaccaaatttgccggcagacctcgtcccacagcggcatctcatctttctcgagcggaaaggtaaagagagaaagagaaatctccggcggcgatggagaaga

SEQ ID NO: 3380 - DNA, 444 bp, Arabidopsis thaliana
  unsure at all n locations
  Clone ID: LIB22-013-Q1-E1-D10
aggtttccttcttcgctcgctgttcagattttgctttgaggctttaggctccccagatctctaatcgccgcagctttaagaaatggagactttcctattcacatctgagtctgtgaacgaaggacaccctgacaagctttgcgaccagatctctgatgcagtccttgatgcctgccttgagcaagaccctgatagcaaagttgcttgtgagacatgcaccaagaccaacatggtcatggttttcggtgagatcaccaccaaggctacgattgactacgagaagattgtccgtgacacttgccgttccattggattcatctctgacgatgttggtcttgatgctgacaaatgcaaagtccttgttaacattgaacaacagagcccagacattgctcaaggtgttcacggtcactttcacaaacgtcnagaagacattggagctgg

SEQ ID NO: 3381 - DNA, 421 bp, Arabidopsis thaliana
  Clone ID: LIB22-004-Q1-E1-E12
cttcgctcgctgttcagattttgctttgaggctttaggctccccagatctctaatcgccgcagctttaagaaatggagactttcctattcacatctgagtctgtgaacgaaggacaccctgacaagctttgcgaccagatctctgatgcagtccttgatgcctgccttgagcaagaccctgatagcaaagttgcttgtgagacatgcaccaagaccaacatggtcatggttttcggtgagatcaccaccaaggctacgattgactacgagaagattgtccgtgacacttgccgttccattggattcatctctgacgatgttggtcttgatgctgacaaatgcaaagtccttgttaacattgaacaacagagcccagacattgctcaaggtgttcacggtcacttcaccaaacgtccagaag

SEQ ID NO: 3382 - DNA, 432 bp, Arabidopsis thaliana
  unsure at all n locations
  Clone ID: LIB22-024-Q1-E1-C9
accacgcgtccggtttccttcttcgctcgctgttcagattttgctttgaggctttaggctccccagatctctaatcgccgcagctttaagaaatggagactttcctattcacatctgagtctgtgaacgaaggacaccctgacaagctttgcgaccagatctctgatgcagtccttgatgcctgccttgagcaagaccctgatagcaaagttgcttgtgagacatgcaccaagaccaacatggtcatggttttcggtgagatcaccaccaaggctacgattgactacgagaagattgtccgtgacacttgccgttccattggattcatctctgacgatgttggtcttgatgctgacaaatgcaaagtccttgttaacattgancancagagcccagacattgctcaaggtgttcacggtcacttcaccaaac

SEQ ID NO: 3383 - DNA, 474 bp, Arabidopsis thaliana
  Clone ID: LIB22-011-Q1-E1-F11
tcacaacccagcacgatgaaaccgttaccaatgacgagattgcgcgtgacctcaaggagcatgtgatcaaaccaatcatcccagataaataccttgacgacaaaaccatcttccacctcaacccatcaggccggtttgtgatcgggggaccacacggtgatgctggattaactggacgtaagatcatcattgacacatacggaggatggggagctcatggacgtggtgctttctcatgcacagacccaaccagagtctacagaagtggagcttacatcgtgatgcatgcaacatagagtgtcgtggctaatagcatggctcgcagggctcgtgtccatgtctcatacgccattggagtacccgatccattgtctgtcgtcgatgtcacttgcggaagatggttgattccagacgaggatatcctgatgatcgtggaggagacattcgatttcataccagcgactgatgacaatc

SEQ ID NO: 3384 - DNA, 663 bp, Arabidopsis thaliana
  unsure at all n locations
  Clone ID: LIB22-011-Q1-K1-F11
tatcaacccagcacgatgaaaccgttaccaatgacgagattgcgcgtgacctcaaggagcatgtgatcaaaccaatcatcccagagaaataccttgacgacaaaaccatcttccacctcaacccatcaggccggtttgtgatcgggggaccacacggtgatgctggtttaactggacgtaagatcatcattgacacatacggaggatggggagctcatggaggtggtgctttctcaggcaaagacccaaccaaagtcgacagaagtggagcttacatcgtgaggcaagcagcaaagagtgtggtggctaatggcatggctcgcagggctcttgtccaggtctcatacgccattggagtacccgagccattgtctgtcttcgttgacacttacggaacagggttgattccagacaaggagatcctgaagatcgtgaaagagacattcgatttcagaccaggaatgatgacaatcaacttggacttgaagagaggaggaaatggaaggtttcagaaaacggcagcgtatggacatttcggaagagacgaccctgacttcacctgggaggtcgtgaagccactcaagtgggacaaacctcaagcttaaacttgatttatgtntcttctgtcttttactttaaacatctaccatggaccaataatca

SEQ ID NO: 3385 - DNA, 467 bp, Arabidopsis thaliana
  Clone ID: LIB22-059-Q1-E1-G6
catttctttagctcaaccttcattactaatctccttttaaggtttctttcgtgaatcagatcggaaaaatggaatcttttttgttcacatctgaatccgtcaacgagggacatcccgacaagctttgtgatcagatctccgacgctatcctcgatgcttgccttgaacaagaccctgagagcaaagttgcttgtgagacttgtaccaagactaacatggtcatggtttttggagaaatcaccaccaaggctaacgttgattacgagcagattgttcgtaaaacatgccgtgagattggattcgtctctgctgacgttggtctagatgctgacaattgcaaggttctggttaacattgagcaacagagtcctgacattgcacaaggtgttcatggtcatctcaccaagaagccagaggaggttggagctggtgaccaaagtcacatgtttgggtatgctactgatgag

SEQ ID NO: 3386 - DNA, 427 bp, Arabidopsis thaliana
  Clone ID: LIB22-049-Q1-E1-A1
acaaaactgtcaccaatgatgagattgctgctgacttgaaggagcatgtgatcaagcctgttatccctgctaagtacgttgacgataacacgatctttcacttgaacccatctggtcgttttgtcatcggagggcctcatggtgatgctggacttacagggaggaagatcatcattgacacttatggtggttggggtgctcatggtggaggtgccttctcaggaaatgacccaagcaatgttgacagaaacggtgcctatatcgtgaggcacgctgcaaagagcgtggtagcagcacgactcgcacgccgttgtatcgtgcaggtgtcatacgccattggtgtcgctgagccgctctcaatgtttgttgacacctacaagaccgggaccatcccatacaatgatatccttgtgttgataaaggaatc

SEQ ID NO: 3387 - DNA, 391 bp, Arabidopsis thaliana
  Clone ID: LIB22-015-Q1-E1-G12
aagacactgtcaccaatgatgagattgctgctgacttgaacgagcatgtgatcaagcctgttatccctgctaagtaccttgacgataacaccatctttcacttgaacccatctggtcgttttgtcatcggatggcctcatggtgatgctggacttacagggaggaagatcatcattgacacttatggtggttggggtgctcatggtggaggtgccttctcaggaaaggacccaaccaaggttgacagaagctgtgcctatatcgtgaggcaggctgcaaagagcgtggtagcagcaggactcgcacgccgttgtatcgtgcatgtatcatacgccattggtgtccctgagccgctctcagtgtttgttgacacctacacgaccgggaccat

SEQ ID NO: 3388 - DNA, 437 bp, Arabidopsis thaliana
  Clone ID: LIB22-013-Q1-E1-A12
agatccttttaaggtttctttcgtgaatcagatcggaaaaatggaatcttttttgttcacatctgaatccgtcaacgagggacatcccgacaagctttgtgatcagatctccgacgctatcctcgatgcttgccttgaacaagaccctgagagcaaagttgcttgtgagacttgtaccaagactaacatggtcatggtttttggagaaatcaccaccaaggctaacgttgattacgagcagattgttcgtaaaacatgccgtgagattggattcgtctctgctgacgttggtctagatgctgacaattgcaaggttctggttaacattgagcaacagagtcctgacattgcacaaggtgttcatggtcatctcaccaagaagccagaggaggttggagctggtgaccaaggtcacatgtttgggtatgctactgatg

SEQ ID NO: 3389 - DNA, 332 bp, Arabidopsis thaliana
  Clone ID: LIB22-034-Q1-E2-F6
aattcttaaactcaaccttcattacaaatctcccttgaacgtgtcattcctcaaccacatcagtcatatggaatcttttttggtcacatctgaatccgtcaacgacggacatcccatacaagctttgtgatcaaatccctaacaccaccctcgatgcgatccttgaacaggatcctgatagcaaaattgcttgtaatacttgtaccatgacgaccatggtcatggcatttggagaaatcaacaccacggctaactttgatgacaaatagattgttcgttcagtatgctgtcatattggaatcgactcagctgacgtaggtcaatatgctgac

SEQ ID NO: 3390 - DNA, 359 bp, Arabidopsis thaliana
  Clone ID: LIB22-047-Q1-E1-D5
gagagatatactttcttttgaggatcagatcgtgacagggtttagctcaaggagagggtgagaaaaagaagaagaaggtgagaaaagtgaaggcaaggctttgaggatgtcttttacaggaactcaacagaaatgcaaggcttgtgagaagactgtttatgctgttgagcttctctctgctgatggagttggatatcacaagtcttgcttcaaatgcactcactgcaaaagcaggcttcagctgagtagttactcatcaatggaaggtgttttgtactgtaagcctcattttgagcagctctttaaggagagtggtagtttcaacaagaactttcagtcaccctgcaaaatcggctgac

SEQ ID NO: 3391 - DNA, 362 bp, Arabidopsis thaliana
  Clone ID: LIB22-031-Q1-E1-F10
cccacgcgtccgtcttcgtcttctacttcgtcctcatcatcgtcacatagatcctcctttttcgttaattggggagagatatactttcttttgaggatcagatcgtgacagggtttagctcaaggagagggtgagaaacagaagaagaaggtgagaaaagtgaacgcaaggctttgaggatgtcttttacaggaactcaacataaatgcaaggcttgtgagaagactgtttatgctgttgagcttctctctgctgatggagttggatatcagaagtcttgcttcaaatgcactcactgcataagcaggcttcagctgagtagttactcatcaatggaaggtgttttgtactgtaagcctcat

SEQ ID NO: 3392 - DNA, 388 bp, Arabidopsis thaliana
  Clone ID: LIB22-079-Q1-E1-G7
atcgtcgtcatttctctctctaaccccttctctcttcagtctctctctctctagacgatctctatcttgaataaaataccgataatgacctcaaccaatccggtggtcgccgaagtaataccggcggaaacttctacagatgctacagagacgacgattgcaacgacggaagctggtgaagcaccggagaagaaggtgaggaaagcttacacaatcaccaagtctagagagagttggactgaaggagaacacgacaagtttctggaagctcttcaattgtttgatcgtgactggaaaaagatagaagattttgttggttcaaagacagttattcagatcaggagccatgctcaaaaatactttctaaaagtccaaaacaatgggaatt

SEQ ID NO: 3393 - DNA, 398 bp, Arabidopsis thaliana
  Clone ID: LIB22-042-Q1-E1-H2
ttcatcgctcgcggttcagattttgctttgaggctttaggctccccagatctctaatcgccgcagctttaagaaatggagactttcctattcacatctgagtctgtgaacgaaggacaccctgacaagctttgcgaccagatctctgatgcagtccttgatgcctgccttgagcaagaccctgatagcaaagttgcttgtgagacatgcaccaagaccaacatggtcatggttttcggtgagatcaccaccaaggctacgattgactacgagaagattgtccgtgacacttgccgttccattggattcatctctgacgatgttggtcttgatgctgacaaatgcaaagtccttgttaacattgaacaacagagcccagacattgctcaaggtgttcac

SEQ ID NO: 3394 - DNA, 422 bp, Arabidopsis thaliana
  Clone ID: LIB22-035-Q1-E1-D10
gatgcaagtggagcataagctattctattttgatcttaaggagaatcctcgtggaaggtatctaaagatatcggagaagacgtcggcgacgaggtcaaccatcattgttccttcctccggcatctcttggttccttgatctcttcaactactatgtcaattctgaggaacacgagctttttagcaaagaattgcagcttgattccaaggtgttttacttcgatatcggtgagaacagaagaggacgcttcttgaaggtgtcagaagcatcggttagtagaaatcgaagtaccattattgttccagctggaagctctcctgatgaaggatgggcagctttcaggaatatattggctgagatacatgaagcatcaggactttttgtgatgccaaatcagaaaccttctgatggacaggaacact

SEQ ID NO: 3395 - DNA, 397 bp, Arabidopsis thaliana
  Clone ID: LIB22-088-Q1-E1-E11
cccacgcgtccgcccacgcgtccgctctcaaaaccaaaatcactaaagaggagaagattgctaaagtttgataaaacattccaaaatcaatggctgataggatcaaaggtccatggagtcctgaagaagacgagcagcttcgtaggcttgttgttaaatacggtccaagaaactggacagtgattagcaaatctattcccggtagatcggggaaatcgtgtcgtttacggtggtgcaaccagctttcgccgcaagttgagcatcggccgttttcggctgaggaagacgagacgatcgcacgtgctcacgctcagttcggtaataaatgggcgacgattgctcgtcttctcaacggtcgtacggacaacgccgtgaagaatcactggaactcgacgct

SEQ ID NO: 3396 - DNA, 408 bp, Arabidopsis thaliana
  Clone ID: LIB22-016-Q1-E1-D11
tgttcttttaaggcaaaaaggctcgagccacagagatctgagtttctcttcttcgagatctgatcgccgaatctcataatctcccatcgaagcagaatggagacttttctattcacatctgagtctgtaaacgagggacacccagacaagctctgtgaccagatctctgatgcagtcctcgatgcctgccttgaacaagaccctgacaggaaagttgcttgtgagacatgcaccaagaccaatatggtcatggtctttggtgagatcactaccatcgctactgttgactacgagaagattgtccgtgacacctgtcgcgccattggatttgtctctgatgatgttggtcttgatgctgacaaatgcacagtcctagtcaacattgagcaacagagccagacattgctc

SEQ ID NO: 3397 - DNA, 319 bp, Arabidopsis thaliana
  unsure at all n locations
  Clone ID: LIB22-012-Q1-E1-F1
atcttttaacacttgttcttttaaggcaaaaaggctcgagccacagagatctgagtttctcttcttcgagatctgatcgccgaatctcataatctcccatcgaagcagaatggagacttttctattcacatctgagtctgtaaacgagggacacccagacaagctctgtgaccagatctctgatgcagtcctcgatgcctgccttgaacaagaccctgacagcaaagttgcttgtgagacatgcaccaagaccaacatggtcatggtctttggtgagatcactnaccaagctactgttgactacgagaaagattgtccg

SEQ ID NO: 3398 - DNA, 407 bp, Arabidopsis thaliana
  Clone ID: LIB22-026-Q1-E1-D12
atcaatttaacacttgttcttttaaggcaaaaaggctcgagccacagagatctgagtttctcttcttcgagatctgatcgccgaatctcataatctcccatcgaagcagaatggagacttttctattcacatctgagtctgtaaacgagggacacccagacaagctctgtgaccagatctctgatgcagtcctcgatgcctgccttgaacaagaccctgacagcaaagttgcttgtgagacatgcaccaagaccaacatggtcatggtctttggtgagatcactaccaaggctactgttgactacgagaagattgtccgtgacacctgtcgcgccattggatttgtctctgatgatgttggtcttgatgctgacaaatgcaaagtcctagtcaacattgagcaacag

SEQ ID NO: 3399 - DNA, 446 bp, Arabidopsis thaliana
  unsure at all n locations
  Clone ID: LIB22-002-Q1-E1-A7
cacatgttcttttaaggcaaaaaggctcgagccacagagatctgagtttctcttcttcgagatctgatcgccgaatctcataatctcccatcgaagcagaatggagacttttctattcacatctgagtctgtaaacgagggacacccagacaagctctgtgaccagatctctgatgcagtcctcgatgcctgccttgaacaagaccctgacagcaaagttgcttgtgagacatgcaccaagaccaacatggtcatggtctttggtgagatcactaccaaggctactgttgactacgagaagattgtccgtgacacctgtcgcgccattggatttgtctctgatgatgttggtcttgatgctgacaaatgcaaagtcctagtcaacattgagcaacagagcccagacattgctcaaggagttcacggtcacttcancaaatgtcctg

SEQ ID NO: 3400 - DNA, 361 bp, Arabidopsis thaliana
  Clone ID: LIB22-010-Q1-E1-B7
gacaaacatggtcatggtccttggtgaaattaactaccaaggctactgttgactacgagaagattgtccgtgacacctgtcgcgccattggatttgtctctgatgatgttggtcttgatgctgacaaatgcaaagtcctagtcaacattgagcaacagagcccagacattgctcaaggagttcacggtcacttcaccaaatgtcctgaagaaattggagccggtgaccatgggcacatgtttggttatgccactgatgaaatccctgagttaatgcccctgatccatgttcttgccaccaagctcggtgctcgcctaacatgagtcagaaacaatggcacatgcgcctggctaagacctga

SEQ ID NO: 3401 - DNA, 396 bp, Arabidopsis thaliana
  Clone ID: LIB22-032-Q1-E1-D5
ggcaaaaaggctcgagccacagagatctgagtttctcttcttcgagatctgatcgccgaatctcataatctcccatcgaagcagaatggagacttttctattcacatctgagtctgtaaacgagggacacccagacaagctctgtgaccagatctctgatgcagtcctcgatgcctgccttgaacaagaccctgacagcaaagttgcttgtgagacatgcaccaagaccaacatggtcatggtctttggtgagatcactaccaaggctactgttgactacgagaagattgtccgtgacacctgtcgcgccattggatttgtctctgatgatgttggtcttgatgctgacaaatgcaaagtcctagtcaacattgagcaacagagcccagacattgc

SEQ ID NO: 3402 - DNA, 414 bp, Arabidopsis thaliana
  Clone ID: LIB22-050-Q1-E1-D9
cggacgcgtgggcggacgcgtgggcaaaaaggctcgagccacagagatctgagtttctcttcttcgagatctgatcgccgaatctcataatctcccatcgaagcagaatggagacttttctattcacatctgagtctgtaaacgagggacacccagacaagctctgtgaccagatctctgatgcagtcctcgatgcctgccttgaacaagaccctgacagcaaagttgcttgtgagacatgcaccaagaccaacatggtcatggtctttggtgagatcactaccaaggctactgttgactacgagaagattgtccgtgacacctgtcgcgccattggatttgtctctgatgatgttggtcttgatgctgacaaatgcaaagtcctagtcaacattgagcaacagagcccagaca

SEQ ID NO: 3403 - DNA, 378 bp, Arabidopsis thaliana
  Clone ID: LIB22-005-Q1-E1-A9
gtttccttcttcgctcgctgttcagattttgctttgaggctttaggctccccagatctctaatcgccgcagctttaagaaatggagactttcctattcacatctgagtctgtgaacgaaggacaccctgacaagctttgcgaccagatctctgatgcagtccttgatgcctgccttgagcaataccctgatagcaaagttgcttgtgagacatgcaccaagaccaacatggtcatggttttcggtgagatcaccaccaaggctacgattgactacgacaagattgtccgtgacacatgccgttccactggattcatcactgacgatgttggtcttgatgctgacatatgcaaagtccttgttaacattgaacaacaga

SEQ ID NO: 3404 - DNA, 394 bp, Arabidopsis thaliana
  Clone ID: LIB22-071-Q1-E1-A5
cgctgttcagattttgctttgaggctttaggctccccagatctctaatcgccgcagctttaagaaatggagactttcctattcacatctgagtctgtgaacgaaggacaccctgacaagctttgcgaccagatctctgatgcagtccttgatgcctgccttgagcaagaccctgatagcagagttgcttgtgagacatgcaccaagaccaacatggtcatggttttcggtgagatcaccaccaaggctacgattgactacgagaagattgtccgtgacacttgccgttccattggattcatctctgacgatgttggtcttgatgctgacaaatgcaaagtccttggtaacattgaacagcagagcccagacattgctcaaggtgttcacggtca

SEQ ID NO: 3405 - DNA, 420 bp, Arabidopsis thaliana
  Clone ID: LIB22-035-Q1-E1-C11
cggacgcgtgggcggacgcgtgggcggacgcgtggggtttccttcttcgctcgctgttcagattttgctttgaggctttaggctccccagatctctaatcgccgcagctttaagaaatggagactttcctattcacatctgagtctgtgaacgaaggacaccctgacaagctttgcgaccagatctctgatgcagtccttgatgcctgccttgagcaagaccctgatagcaaagttgcttgtgagacatgcaccaagaccaacatggtcatggttttcggtgagatcaccaccaaggctacgattgactacgagaagattgtccgtgacacttgccgttccattggattcatctctgacgatgttggtcttgatgctgacaaatgcaaagtccttgttaacattgaacaacagagcccag

SEQ ID NO: 3406 - DNA, 390 bp, Arabidopsis thaliana
  Clone ID: LIB22-063-Q1-E1-C10
attccttcttcgctcgctgttcagattttgctttgaggctttaggctccccagatctctaatcgccgcagctttaagaaatggagactttcctattcacatctgagtctgtgaacgaaggacaccctgacaagctttgcgaccagatctctgatgcagtccttgatgcctgccttgagcaagaccctgatagcaaagttgcttgtgagacatgcaccaagaccaacatggtcatggttttcggtgagatcaccaccaaggctacgattgactacgagaagattgtccgtgacacttgccgttccattggagtcatctctgacgatgttggtcctgatgctgacaaatgcaaagtccttgttaacattgaacatcagagcccagacattgc

SEQ ID NO: 3407 - DNA, 397 bp, Arabidopsis thaliana
  Clone ID: LIB22-015-Q1-E1-D12
aggacgcgtgggtcttcgctcgctgttcagattttgctttgaggctttaggctccccagatctctaatcgccgcagctttaagaaatggagactttcctattcacatctgagtctgtgaacgaaggacaccctgacaagctttgcgaccacatctctgatgcagtccttgatgcctgccttgagcaagaccctgatagcaaagttgcttgtgagacatgcaccaagaccaacatggtcatggttttcggtgagatcaccaccaaggctacgattgactacgagaagattgtccgtgacacttgccgttccattggattcatctctgacgatgttggtcttgatgctgacaaatgcacagtccttgttaacattgaacaacagagcccatacattgct

SEQ ID NO: 3408 - DNA, 410 bp, Arabidopsis thaliana
  Clone ID: LIB22-023-Q1-E1-A1
gattccttcttcgctcgctgttcagattttgctttgaggctttaggctccccagatctctaatcgccgcagctttaagaaatggagactttcctattcacatctgagtctgtgaacgaaggacaccctgacaagctttgcgaccagatctctgatgcagtccttgatgcctgccttgagcaagaccctgatagcaaagttgcttgtgagacatgcaccaagaccaacatggtcatggttttcggtgagatcaccaccaaggctacgattgactacgagaagattgtccgtgacacttgccgttccattggattcatctctgacgaagttggtcttgatgctgacaaatgcaaagtccttggtaacattgaacaacagagcccagacattgctcaaggtgttcacggtcac

SEQ ID NO: 3409 - DNA, 402 bp, Arabidopsis thaliana
  Clone ID: LIB22-026-Q1-E1-B1
agttaccttcttcgctcgctgttcagattttgctttgaggctttaggctccccagatctctaatcgccgcagctttaagaaatggagactttcctattcacatctgagtctgtgaacgaaggacaccctgacaagctttgcgaccagatctctgatgcagtccttgatgcctgccttgagcaagaccctgatagcaaagttgcttgtgagacatgcaccaagaccaacatggtcatggttttcggtgagatcaccaccaaggctacgattgactacgagaagattgtccgtgacacttgccgttccattggattcatctctgacgatgttggtcttgatgctgacaaatgcaaagtccttgttaacattgaacaacagagcccagacattgctcaaggtgtt

SEQ ID NO: 3410 - DNA, 404 bp, Arabidopsis thaliana
  Clone ID: LIB22-004-Q1-E1-F4
attggatttgtctctgatgatgttggtcttgatgctgacaaatgcaaagtcctagtcaacattgagcaacagagcccagacattgctcaaggagttcacggtcacttcaccaaatgtcctgaagaaattggagccggtgaccaagggcacatgtttggttatgccactgatgaaacccctgagttaatgcccctgagccatgttcttgccaccaagctcggtgctcgcctaacagaagtcagaaagaatggtacttgcgcctggctaagacctgacggcaaaacccaagtcactgttgagtactacaatgacaagggtgccatggtcccaatccgtgtccacacagtcctcatctccacccaacacgatgaaactgtgaccaacgacgaaattgcccgtgacct

SEQ ID NO: 3411 - DNA, 422 bp, Arabidopsis thaliana
  Clone ID: LIB22-004-Q1-E1-E8
aaacaaacagagagcgagtcacgcgccgagttttcctcacttgttctcaataaatctctctctctttcttctctatcgctttcatttttctcctccagatctcgattccaatctctctccctctctacttccttcaacagaaatggaaacgttcctatttacctctgaatccgtcaatgaaggacacccagacaagctttgtgaccagatttctgatgcgatccttgatgcttgcttagagcaagatcctgaaagcaaagtggcgtgtgagacatgcaccaagaccaacatggtgatggtgtttggtgagatcactaccgctgcgaaagttgactatgagaagattgttagatccacttgcagggagattggttttatctctgctgatgttggtcttgacgctgacaaatgcaatgttttgg

SEQ ID NO: 3412 - DNA, 400 bp, Arabidopsis thaliana
  unsure at all n locations
  Clone ID: LIB22-088-Q1-E1-A1
gtgccatggtcccaatccgtgtccacacagtcctcatctccacccaacacgatgaaactgtgaccaacgacgaaattgcccgtgaccttaaggagcatgtcatcaagccagtcatcccagagaagtacctagacgagaaaaccatcttccacttgaacccttcaggccgattcgtcatcggtggaccccatggagacgctggtctcaccgggcgtaagatcatcatcgacacttacggtggatggggagctcacggaggcggtgcattctcaggtaaagacccaaccaaggtcgacagaagcggagcctacattgtgagacaagcagctaagagcgttgtggctaacgggatggctcgtanggctcttgttcaggtctcatacgccattggagtccctga

SEQ ID NO: 3413 - DNA, 417 bp, Arabidopsis thaliana
  Clone ID: LIB22-042-Q1-E1-C11
agatcgtttcatctctctccaacgatcaattggactcttacgtactctctgagtccagcttctttgtctacccctacaaagtcatcatcaagacttgcggtaccactaagctcctcctctctatcccaccacttctaaagctggctggtgagctctctctgagtgtcaagtctgtgaagtacactcgcggctccttcctctgccccggaggccagccttttcctcaccgcagcttctctgaagaagtctctgttcttgatgggcactttactcagctgggcttgaacagcgtagcctacttgatgggcaatgatgatgagactaagaaatggcatgtctatgctgcctctgcccaggactccagcaactgcaacaacaatgtctacactctcgagatgtgcatgactggtctggaca

SEQ ID NO: 3414 - DNA, 425 bp, Arabidopsis thaliana
  Clone ID: LIB22-005-Q1-E1-A7
gatggccttatctgcaatcggtttcgaaggttacgagaaacggctcgaggtgactttctttgagccaagcatctttcaagactccaagggactgggactccgtgctctgaccaagtcccagcttgatgaaattcttacacctgctgcatgcacgatcgtttcatctctctccaacgatcaattggactcttacgtactctctgagtccagcttctttgtctacccctacaaagtcatcatcaagacttgcggtaccactaagctcctcctctctatcccaccacttctaaagctggctggtgagctctctctgagtgtcaagtctgtgaagtacactcgcggctccttcctctgccccggaggctagccttttcctcaccgcagcttctctgaagaagtctctgttcttgatgggcactttactc

SEQ ID NO: 3415 - DNA, 434 bp, Arabidopsis thaliana
  Clone ID: LIB22-042-Q1-E1-E5
ccacttaatcgtttcactcaaatttagggttttctcttttctcgaaagtcttgcggttttctgaatcatctctatctggtttgagggtttcgtttgatatctggagaaaggggtttctggaaacaaggagttcataattcgcgatcttgatctatcgatcttcatttatatataaaagcgtgaatgagattatgatggagtcgaaaggtggtaaaaagaagtccagcagtagtagttccttattttacgaagctcccctcggttacagcattgaagacgttcgtccaaacggtggaatcaagaaattcaaatcttctgtctactcaaactgctccaagaggccatcctgagtaccagcgtgcaccgatcttcataatatagttatagctttctttactttccagtttataattttcctctttcaaagctccctt

SEQ ID NO: 3416 - DNA, 426 bp, Arabidopsis thaliana
  Clone ID: LIB22-041-Q1-E1-F12
atcattgcttcatcattaccaaatcatcaacttaatcgtttctctcaaatttagggttttctcttttctcgaaagtcttgcggttttctgaatcatctctatctggtttgagggtttcgtttgatatctggagaaaggggtttctggaaacaaggagttcataattcgcgatcttgatctatcgatcttcatttatatataaaagcgtgaatgagattatgatggagtcgaaaggtggtaaaaagaagtccagcagtagtagttccttattttacgaagctcccctcggttacagcattgaagacgttcgtccaaacggtggaatcaagaaattcaaatcttctgtctactcaaactgctccaagaggccatcctgagtaccagcgtgcaccgatcttcataatatagttatagctttctttacat

SEQ ID NO: 3417 - DNA, 423 bp, Arabidopsis thaliana
  Clone ID: LIB22-050-Q1-E1-E6
atgcttcatcattaccaaatcatcaacttaatcgtttctctcaaatttagggttttctcttttctcgaaagtcttgcggttttctgaatcatctctatctggtttgagggtttcgtttgatatctggagaaaggggtttctggaaacaaggagttcataattcgcgatcttgatctatcgatcttcatttatatataaaagcgtgaatgagattatgatggagtcgaaaggtggtaaaaagaagtccagcagtagtagttccttattttacgaagctcccctcggttacagcattgaatacgttcgtccaaacggtggaatcaagaaattcaaatcttctgtctactcaaactgctccaagaggccatcctgagtaccagcgtgcaccgatcttcataatatagttatagctttctttacttt

SEQ ID NO: 3418 - DNA, 444 bp, Arabidopsis thaliana
  Clone ID: LIB22-023-Q1-E1-E3
gaatcatcattaccaaatcatcaacttaatcgtttctctcaaatttagggttttctcttttctcgaaagtcttgcggttttctgaatcatctctatctggtttgagggtttcgtttgatatctggagaaaggggtttctggaaacaaggagttcataattcgcgatcttgatctatcgatcttcatttatatataaaagcgtgaatgagattatgatggagtcgaaaggtggtaaaaagaagtccagcagtagtagttccttattttacgaagctcccctcggttacagcattgaagacgttcgtccaaacggtggaatcaagaaattcaaatcttctgtctactcaaactgctccaagaggccatcctgagtaccagcgtgcaccgatcttcataatatagttatagctttctttactttccagtttataattttcttctttc

SEQ ID NO: 3419 - DNA, 329 bp, Arabidopsis thaliana
  unsure at all n locations
  Clone ID: LIB22-010-Q1-E1-G9
aagcgagtcacgcgccgagttttcctcacttgttctcaataaatctctctctctttcttctctatcgctttcatttttctcctccagatctcgattccaatctctctccctctctacttccttcaacagaaatggaaacgttcctatttacctctgaatccgtcaatgaaggacacccagacaagctttgtgaccagatttctgatgcgatccttgatgcttgcttagagcaagatcctgaaagcaaagtggcgtgtgagacatgcaccangaccaacatggtgatggtgtttggtgagatcactaccgctgcgaaagttgactatgag

SEQ ID NO: 3420 - DNA, 374 bp, Arabidopsis thaliana
  Clone ID: LIB22-083-Q1-E2-D1
caaacagagagagagtcacgcgccgagttttcctcacttgttctcaataaatctctctctctttcttctctatcgctttcatttttctcctccagatctcgattccaatctctctccctctctacttccttcaacagaaatggaaacgttcctatttacctctgaatccgtcaatgaaggacacccagacaagctttgtgaccagatttctgatgcgatccttgatgcttgcttagagcaagatcctgaaagcaaagtggcgtgtgagacatgcaccaagaccaacatggtgatggggtctggtgagatcactaccgctgcgaaagtttgacaagagaaggattgttagattcacttgcaggggagaatggttt

SEQ ID NO: 3421 - DNA, 447 bp, Arabidopsis thaliana
  Clone ID: LIB22-076-Q1-E1-G8
aaatcatcaacttaatcgtttctctcaaatttagggttttctcttttctcgaaagtcttgcggttttctgaatcatctctatctggtttgagggtttcgtttgatatctggagaaaggggtttctggaaacaaggagttcataattcgcgatcttgatctatcgatcttcatttatatataaaagcgtgaatgagattatgatggagtcgaaaggtggtaaaaagaagtccagcagtagtagttccttattttacgaagctcccctcggttacagcattgaagacgttcgtccaaacggtggaatcaagaaattcaaatcttctgtctactcaaactgctccaagaggccatcctgagtaccagcgtgcaccgatcttcataatatagttatagctttctttactttccagtttataattttcttctttcatagctccttttctgct

SEQ ID NO: 3422 - DNA, 385 bp, Arabidopsis thaliana
  unsure at all n locations
  Clone ID: LIB22-066-Q1-E1-G10
cccacgcatccgcacgcgccgagttttcctcacttgttctcaataaatctctctctctttcttctctatcgctttcatttttctcctccagatctcgattccaatctctctccctctctacttccttcaacagaaatggaaacgttcctatttacctctgaatccgtcaatgaaggacacccagacaagctttgtgaccagatttctgatgcgatccttgatgcttgcttagagcaagatcctgaaagcaaagtggcgtgtgagacatgcnacaagaccaacatggtgatggtgtttggtgagatcactaccgctgcgaaagttgactatgagaagattgttagatccacttgcagggagattggttttatccctgctgatgttg

SEQ ID NO: 3423 - DNA, 405 bp, Arabidopsis thaliana
  Clone ID: LIB22-048-Q1-E1-G4
cacgcgccgagttttcctcacttgttctcaataaatctctctctctttcttctctatcgctttcatttttctcctccagatctcgattccaatctctctccctctctacttccttcaacagaaatggaaacgttcctatttacctctgaatccgtcaatgaaggacacccagacaagctttgtgaccagatttctgatgcgatccttgatgcttgcttagagcaagatcctgaaagcaaagtggcgtgtgagacatgcaccaagaccaacatggtgatggtgtttggtgagatcactaccgctgcgaaagttgactatgagaagattgttagatccacttgcagggagattggttttatctctgctgatgttggtcttgacgctgacaaatgcaatgttttgggt

SEQ ID NO: 3424 - DNA, 413 bp, Arabidopsis thaliana
  Clone ID: LIB22-082-Q1-E1-A11
tacagtgagtcagcgaatcacgcgccgagttttcctcacttgttctcaataaatctctctctctttcttctctatcgctttcatttttctcctccagatctcgattccaatctctctccctctctacttccttcaacagaaatggaaacgttcctatttacctctgaatccgtcaatgaaggacacccagacaagctttgtgaccagatttctgatgcgatccttgatgcttgcttagagcaagatcctgaaagcaaagtggcgtgtgagacatgcaccaagaccaacatggtgatggtgtttggtgagatcactaccgctgcgaaagttgactatgagaagattgttagatccacttgcagggagattggttttatctctgctgatgttggtcttgacgctgacaaatgcaa

SEQ ID NO: 3425 - DNA, 417 bp, Arabidopsis thaliana
  Clone ID: LIB22-004-Q1-E1-F9
aaaacaaacagagagcgagtcacgcgccgagttttcctcacttgttctcaataaatctctctctctttcttctctatcgctttcatttttctcctccagatctcgattccaatctctctccctctctacttccttcaacagaaatggaaacgttcctatttacctctgaatccgtcaatgaaggacacccagacaagctttgtgaccagatttctgatgcgatccttgatgcttgcttagagcaagatcctgaaagcaaagtggcgtgtgagacatgcaccaagaccaacatggtgatggtgtttggtgagatcactaccgctgcgaaagttgactatgagaagattgttagatccacttgcagggagattggttttatctctgctgatgttggtcttgacgctgacaaatgcaatg

SEQ ID NO: 3426 - DNA, 416 bp, Arabidopsis thaliana
  Clone ID: LIB22-039-Q1-E1-H2
cacacgcgtccgaaacaaacagagagcgagtcacgcgccgagttttcctcacttgttctcaataaatctctctctctttcttctctatcgctttcatttttctcctccagatctcgattccaatctctctccctctctacttccttcaacagaaatggaaacgttcctatttacctctgaatccgtcaatgaaggacacccagacaagctttgtgaccagatttctgatgcgatccttgatgcttgcttagagcaagatcctgaaagcaaagtggcgtgtgagacatgcaccaagaccaacatggtgatggtgtttggtgagatcactaccgctgcgaaagttgactatgagaagattgttagattcacttgcagggagattggttttatctctgctgatgttggtcttgacgctg

SEQ ID NO: 3427 - DNA, 402 bp, Arabidopsis thaliana
  Clone ID: LIB22-036-Q1-E1-F10
caaacagagagcgagtcacgcgccgagttttcctcacttgttctcaataaatctctctctcgttcttcgctatcgctttcatttttctcctcgagatctcgattccaatctctctccctctctacttccttcaacagaaatggaaacgttcctatttacctctgaatccgtcaatgaaggacacccagacaagctttgtgaccagatttctgatgcgatcgttgatgcttgcttagagcaagatcctgaaagcaaagtggcgtgtgagacatgcaccaagaccaagatggtgatggtgtttggtgagatcactagcgctgcgaaagttgactatgagaggattgttagatccacttgcagggagattggatttatctctgctgatgttggtcttgacgctga

SEQ ID NO: 3428 - DNA, 412 bp, Arabidopsis thaliana
  Clone ID: LIB22-039-Q1-E1-B12
accaaatcatcaacttaatcgtttctctcaaatttagggttttctcttttctcgaaagtcttgcggttttctgaatcatctctatctggtttgagggtttcgtttgatatctggagaaaggggtttctggaaacaaggagttcataattcgcgatcttgatctatcgatcttcatttatatataaaagcgtgaatgagattatgatggagtcgaaaggtggtaaaaagaagtccagcagtagtagttccttattttacgaagctcccctcggttacagcattgaagacgttcgtccaaacggtggaatcaagaaattcaaatcttctgtctactcaaactgctccaagaggccatcctgagtaccagcgtgcaccgatcttcataatatagttatagctttctttactttcc

SEQ ID NO: 3429 - DNA, 414 bp, Arabidopsis thaliana
  Clone ID: LIB22-007-Q1-E1-C9
ctctgcctcctttcggattcaaatctcagatctagctcaaccatggcgttgctcgtcgagaagacctcaagtggccgtgaatacaaggtcaaagacatgtctcaagccgatttcggtcgtctcgaactcgagctcgccgaagttgagatgcctggactcatggcttgtcgtaccgaattcggaccttctcagccattcaaaggcgctagaatcaccggatctcttcacatgaccatccaaaccgccgtactcatcgaaaccctaactgctctcggtgctgaagtcagatggtgttcctgcaacatcttttccactcaagaccacgccgccgcagccatcgctcgtgactccgccgctgttttcgcctggaaaggtgagactcttcaggagtactggtggtgtaccgagcgtgct

SEQ ID NO: 3430 - DNA, 412 bp, Arabidopsis thaliana
  Clone ID: LIB22-048-Q1-E1-B4
ctctgcctcctttcggattcaaatctcagatctagctcaaccatggcgttgctcgtcgagaagacctcaagtggccgtgaatacaaggtcaaagacatgtctcaagccgatttcggtcgtctcgaactcgagctcgccgaagttgagatgcctggactcatggcttgtcgtaccgaattcggaccttctcagccattcaaaggcgctagaatcaccggatctcttcacatgaccatccaaaccgccgtactcatcgaaaccctaactgctctcggtgctgaagtcagatggtgttcctgcaacatcttttccactcaagaccacgccgccgcagccatcgctcgtgactccgccgctgttttcgcctggaaaggtgagactcttcaggagtactggtggtgtaccgagcgtg

SEQ ID NO: 3431 - DNA, 415 bp, Arabidopsis thaliana
  Clone ID: LIB22-052-Q1-E1-C3
ctttcggattcaaatctcagatctagctcaaccatggcgttgctcgtcgagaagacctcaagtggccgtgaatacaaggtcaaagacatgtctcaagccgatttcggtcgtctcgaactcgagctcgccgaagttgagatgcctggactcatggcttgtcgtaccgaattcggaccttctcagccattcaaaggcgctagaatcaccggatctcttcacatgaccatccaaaccgccgtactcatcgaaaccctaactgctctcggtgctgaagtcagatggtgttcctgcaacatcttttccactcaagaccacgccgccgcagccatcgctcgtgactccgccgctgttttcgcctggaaaggtgagactcttcaggagtactggtggtgtaccgagcgtgctctaaattggg

SEQ ID NO: 3432 - DNA, 418 bp, Arabidopsis thaliana
  unsure at all n locations
  Clone ID: LIB22-008-Q1-E1-D11
atctctctgcctcctttcggattcaaatctcagatctagctcaaccatggcgttgctcgtcgagaagacctcaagtggccgtgaatacaaggtcaaagacatgtctcaagccgatttcggtcgtctcgaactcgagctcgccgaagttgagatgcctggactcatggcttgtcgtaccgaattcggaccttctcagccattcaaaggcgctagaatcaccggatctcttcacatgaccatccaaaccgccgtactcatcgaaaccctaactgctctcggtgctgaagtcagatggtgttcctgcaacatcttttccactcaagaccacgccgccgcagccatcgctcgtgactccgccgctgttttcgcctggaaaggtgagactcctcaggagtactggtggtgntacgagcgtgct

SEQ ID NO: 3433 - DNA, 427 bp, Arabidopsis thaliana
  Clone ID: LIB22-022-Q1-E1-D6
tctctgcctcctttcggattcaaatctcagatctagctcaaccatggcgttgctcgtcgagaagacctcaagtggccgtgaatacaaggtcaaagacatgtctcaagccgatttcggtcgtctcgaactcgagctcgccgaagttgagatgcctggactcatggcttgtcgtaccgaattcggaccttctcagccattcaaaggcgctagaatcaccggatctcttcacatgaccatccaaaccgccgtactcatcgaaaccctaactgctctcggtgctgaagtcagatggtgttcctgcaacatcttttccactcaagaccacgccgccgcagccatcgctcgtgactccgccgctgttttcgcctgtaaaggtgagactcgtcatgagtactggtggtgtaccgagcgtgctctagattggggt

SEQ ID NO: 3434 - DNA, 438 bp, Arabidopsis thaliana
  Clone ID: LIB22-045-Q1-E1-E2
attctctctctctctctctctctgcctcctttcggattcaaatctcagatctagctcaaccatggcgttgctcgtcgagaagacctcaagtggccgtgaatacaaggtcaaagacatgtctcaagccgatttcggtcgtctcgaactcgagctcgccgaagttgagatgcctggactcatggcttgtcgtaccgaattcggaccttctcagccattcaaaggcgctagaatcaccggatctcttcacatgaccatccaaaccgccgtactcatcgaaaccctaactgctctcggtgctgaagtcagatggtgttcctgcaacatcttttccactcaagaccacgccgccgcagccatcgctcgtgactccgccgctgttttcgcctggaaaggtgagactcttcaggagtactggtggtgtaccgagcgtgctctaga

SEQ ID NO: 3435 - DNA, 444 bp, Arabidopsis thaliana
  Clone ID: LIB22-087-Q1-E1-C11
cccaagcgtccgctctctctctgcctcctttcggattcaaatctcagatctagctcaaccatggcgttgctcgtcgagaagacctcaagtggccgtgaatacaaggtcaaagacatgtctcaagccgatttcggtcgtctcgaactcgagctcgccgaagttgagatgcctggactcatggcttgtcgtaccgaattcggaccttctcagccattcaaaggcgctagaatcaccggatctcttcacatgaccatccaaaccgccgtactcatcgaaaccctaactgctctcggtgctgaagtcagatggtgttcctgcaacatcttttccactcaagaccacgccgccgcagccatcgctcgtgactccggcgctgttttcgcctggaaaggtgagactcttcaggagtactggtggtgtaccgagcgtgctccagattggggt

SEQ ID NO: 3436 - DNA, 452 bp, Arabidopsis thaliana
  Clone ID: LIB22-083-Q1-E1-G5
cttcactctctcgctctctctgcctcctttcggattcaaatctcagatctagctcaaccatggcgttgctcgtcgagaagacctcaagtggccgtgaatacaaggtcaaagacatgtctcaagccgatttcggtcgtctcgaactcgagctcgccgaagttgagatgcctggactcatggcttgtcgtaccgaattcggaccttctcagccattcaaaggcgctagaatcaccggatctcttcacatgaccatccataccgccgtactcatcgaaaccctaactgctctcggtgctgaagtcagatggtgttcctgcaacatcttttcgactcaagaccatgccgccgcagccatcgctcgtgactccgccgctgttttcgcctggaaaggtgagactcttcaggagtactggtggtgtaccgagcgtgctctagattgtggtccaggtggt

SEQ ID NO: 3437 - DNA, 448 bp, Arabidopsis thaliana
  Clone ID: LIB22-082-Q1-E2-F5
cacatctctctctctctctctctgcctcctttcggattcaaatctcagatctagctcaaccatggcgttgctcgtcgagaagacctcaagtggccgtgaatacaaggtcaaagacatgtctcaagccgatttcggtcgtctcgaactcgagctcgccgaagttgagatgcctggactcatggcttgtcgtaccgaattcggaccttctcagccattcaaaggcgctagaatcaccggatctcttcacatgaccatccaaaccgccgtactcatcgaaaccctaactgctctcggtgctgaagtcagatggtgttcctgcaacatcttttccactcaagaccacgccgccgcagccatcgctcgtgactccgccgctgttttcgcctggaaaggtgagactcttcaggagtactggtggtgtaccgagcgtgctctagattggggtcca

SEQ ID NO: 3438 - DNA, 451 bp, Arabidopsis thaliana
  Clone ID: LIB22-011-Q1-E1-C4
cccacgcgtccgaagttgatcctaagaagtaccacaagatgaacgagagacttgttggtgtgtctgaggaaactaccactggtgttaagaggctttaccagatgcagcaaaatggaactcttttgttccctgccattaacgttaacgactctgtcaccaagagcaagttcgacaacttgtatggttgccgtcactcactccctgatggtctcatgagggccactgatgtcatgatcgctggaaacgttgctgttatctgtggatatggtgatgttggaaagggttgtgctgctgccatgaagactgctggtgctatagtcattgtgactgagattgatcccatctgtgcccttcaagctttgatggaaggacttcatgttcttacccttgacgatgttgtctcagaagctgatatctttgtcaccaccaccggtaacaaagacatcatcat

SEQ ID NO: 3439 - DNA, 438 bp, Arabidopsis thaliana
  unsure at all n locations
  Clone ID: LIB22-006-Q1-E1-F4
ctttcggattcaaatctcagatctagctcaaccatggcgttgctcgtcgagaagacctcaagtggccgtgaatacaaggtcaaagacatgtctcaagccgatttcggtcgtctcgaactcgagctcgccgaagttgagatgcctggactcatggcttgtcgtaccgaattcggaccttctcagccattcaaaggcgctagaatcaccggatctcttcacatgaccatccaaaccgccgtactcatcgaaaccctaactgctctcggtgctgaagtcagatggtgttcctgcaacatcttttccactcaagaccacgccgccgcagccatcgctcgtgactccgccgctgttttcgcctggaaaggtgagactcttcaggagtactggtggtgtaccgagcgtgctctagattgnggtccaagtggtggtcctgatctg

SEQ ID NO: 3440 - DNA, 534 bp, Arabidopsis thaliana
  Clone ID: LIB22-011-Q1-K1-C4
cccacgccgtccgagttgatcctaagaagtaccacaagatgaaggagagacttgttggtgtcgtctgagaaactaccactggtgttaagaggctttaccagatgcagcaaaatggaactcttttgttccctgccattaacgttaacgactctgtcaccaagagcaagttcgacaacttgtatggttgccgtcactcactccctgatggtctcatgagggccactgatgtcatgatcgctggaaaggttgctgttatctgtggatatggtgatgttggaaagggttgtgctgctgccatgaagactgctggtgctagagtcattgtgactgagattgatcccatctgtgcccttcaagctttgatggaaggacttcaggttcttacccttgaggatgttgtctcagaagctgatatctttgtcaccaccaccggtaacaaagacatcatcatggtcgaccacatgaggaagatgaagaacaacgctattgtgtgcaacattggtcactttgacaatgagattgacatgcttggac

SEQ ID NO: 3441 - DNA, 460 bp, Arabidopsis thaliana
  Clone ID: LIB22-059-Q1-E1-C1
ctgttatctgtggatatggtgatgttggaaagggttgtgctgctgccatgaagactgctggtgctagagtcattgtgactgagattgatcccatctgtgcccttcaagctttgatggaaggacttcaggttcttacccttgaggatgttgtctcagaagctgatatctttgtcaccaccaccggtaacaaagacatcatcatggtcgaccacatgaggaagatgaagaacaacgctattgtgtgcaacattggtcactttgacaatgagattgacatgcttggacttgagacttaccctggtgtgaagcgtatcaccatcaagccacagactgacaggtgggtgttcccagagaccaaggctggaatcattgtcttggctgagggtcgtctgatgaacttgggttgtgccactggtcacccaagtttcgtgatgtcttgctctttcaccaaccaggtgat

SEQ ID NO: 3442 - DNA, 448 bp, Arabidopsis thaliana
  unsure at all n locations
  Clone ID: LIB22-023-Q1-E1-E1
tggaaaggtgagactcttcaggagtactggtggtgtaccgagcgtgctctagattggggtccaggtggtggtcctgatctgattgttgatgatggtggtgacgctactcttttgattcatgagggtgttaaagctgaggagatctttgagaagactggtcaagttcctgatcctacttctactgataaccctgagtttcagatcgtgttgtctattatcaaggaaggtcttcaagttgatcctaagaagtaccacaagatgaaggagagacttgttggtgtctctgaggaaactaccactggtgttaagaggctttaccagatgcagcanaatggaactcttttgttccctgccattaacgttaacgactctgtcaccaagagcaagttcgacaacttgtatggttgccgtcactcactccctgatggtctcatgagggccactgatg

SEQ ID NO: 3443 - DNA, 416 bp, Arabidopsis thaliana
  Clone ID: LIB22-023-Q1-E1-B10
catcaggttcttacccttgaggatgttgtctcagaagctgatatctttgtcaccaccaccggtaacaaagacatcatcatggtcgaccacatgaggaagatgaagaacaacgctattgtgtgcaacattggtcactttgacaatgagattgacatgcttggacttgagacttaccctggtgtgaagcgtatcagcatcaagccacagactgacaggtgggtgttcccagagaccaaggctggaatcattgtcttggctgagggtcgtctgatgaacttgggttgtgccactggtcacccaagtttcgtgatgtcttgctctttcaccaaccaggtgattgcccagctcgagctctggaacgagaaagcaagcggaaagtacgagaagaaggtgtacgtgcttcccacgcatttgga

SEQ ID NO: 3444 - DNA, 366 bp, Arabidopsis thaliana
  Clone ID: LIB22-082-Q1-E1-E11
actttcggattcaaatctcagatctagctcaaccatggcgttgctcgtcgagaagacctcaagtggccgtgaatacaaggtcaaagacatgtctcaagccgatttcggtcgtctcgaactcgagctcgccgaagttgagatgcctggactcatggcttgtcgtaccgaattcggaccttctcagccattcaaaggggctagaatcaccggatctcttcacatgaccatccaaaccgccgtagtcatcgagaaccctaactgctctcggtgctgaagtcagatggtgttcctgcaagatcttttccactcaagaccacgccgccgcaaccatcgctcgtgactccgccgctgttttcgcctggaaag

SEQ ID NO: 3445 - DNA, 406 bp, Arabidopsis thaliana
  Clone ID: LIB22-060-Q1-E1-D7
cgttcggattcaaatctcagatctagctcaaccatggcgttgctcgtcgagaatgacctcaagtggccgtgaatacaaggtcaaagacatgtcacaagccgatttcggtcgtctcgaactcgagctcgccgaagttgagatgcctggactcatggcttgtcgtaccgaattcggaccttctcagccattcaaaggcgctagaatcagcggatctcttcacatgaccatccaaaccgccgtactcatcgaaaccctaactgctctcggtgctgaagtcagatggtgttcctgcaacatcgtttcgactcaagaccacgccgccggagccatcgctcgtgactccgccgctgttttcgcctggaaaggtgagactcttcaggagtactggtggtgtaccgagcgtgct

SEQ ID NO: 3446 - DNA, 409 bp, Arabidopsis thaliana
  Clone ID: LIB22-089-Q1-E1-E10
acggacgcgtccgcccacgcgtccgcatggcttgtcgtaccgaattcggaccttctcagccattcaaaggcgctagaatcaccggatctcttcacatgaccatccaaaccgccgtactcatcgaaaccctaactgctctcggtgctgaagtcagatggtgttcctgcaacatcttttccactcaagaccacgccgccgcagccatcgctcgtgactccgccgctgttttcgcctggaaaggtgagactcttcaggagtactggtggtgtaccgagcgtgctctagattggggtccaggtggtggtcctgatctgattgttgatgatggtggtgacgctactcttttgattcatgagggtgttaaagctgaggagatctttgagaagactggtcaagttcctgatcctac

SEQ ID NO: 3447 - DNA, 376 bp, Arabidopsis thaliana
  Clone ID: LIB22-022-Q1-E1-A6
ctttcggattcaaatctcagatctagctcaaccatggcgttgctcgtcgagaagacctcaagtggccgtgaatacaaggtcaaagacatgtctcaagccgatttcggtcgtctcgaactcgagctcgccgaagttgagatgcctggactcatggcttgtcgtaccgaattcggaccttctcagccattcaaaggcgctagaatcaccggatctcttcacatgaccatccaaaccgccgtactcatcgagaccctaactgctctcggtgctgaagtcagatggtgttcctgcaacatcgtttccactcaagaccacgccgccgcagccatcgctcgtgactccgccgctgttttcgcctggaaaggtgagactcttc

SEQ ID NO: 3448 - DNA, 393 bp, Arabidopsis thaliana
  Clone ID: LIB22-056-Q1-E1-A10
cactctgcctcctttcggattcaaatctcagatctagctcaaccatggcgttgctcgtcgagaagacctcaagtggccgtgaatacaaggtcaaagacatgtctcaagccgatttcggtcgtctcgaactcgagctcgccgaagttgagatgcctggactcatggcttgtcgtaccgaattcggaccttctcagccattcaaaggcgctagaatcaccggatctcttcacatgaccatccaaaccgccgtactcatcgaaaccctaactgctctcggtgctgaagtcagatggtgttcctgcaacatcttttccactcaagaccacgccgccgcagccatcgctcgtgactccgccgctgttttcgcctggaaaggtgagactcttcaggagt

SEQ ID NO: 3449 - DNA, 389 bp, Arabidopsis thaliana
  Clone ID: LIB22-080-Q1-E2-D10
atttcggattcaaatctcagatctagctcaaccatggcgttgctcgtcgagaagacctcaagtggccgtgaatacaaggtcaaagacatgtctcaagccgatttcggtcgtctcgaactcgagctcgccgaagttgagatgcctggactcatggcttgtcgtaccgaattcggaccttctcagccattcaaaggcgctagaatcaccggatctcttcacatgaccatccaaaccgccgtactcatcgaaaccctaactgctctcggtgctgaagtcagatggtgttcctgcaacatcttttccactcaagaccacgccgccgcagccatcgctcgtgactccgccgctgttttcgcctggaaaggtgagactcttcaagagtactggtg

SEQ ID NO: 3450 - DNA, 400 bp, Arabidopsis thaliana
  Clone ID: LIB22-063-Q1-E1-B3
cggacgcgtgggtttcggattcaaatctcagatctagctcaaccatggcgttgctcgtcgagaagacctcaagtggccgtgaatacaaggtcaaagacatgtctcaagccgatttcggtcgtctcgaactcgagctcgccgaagttgagatgcctggactcatggcttgtcgtaccgaattcggaccttctcagccattcaaaggcgctagaatcaccggatctcttcacatgaccatccaaaccgccgtactcatcgaaaccctaactgctctcggtgctgaagtcagatggtgttcctgcaacatcttttccactcaagaccacgccgccgcagccatcgctcgtgactccgccgctgttttcgcctggaaaagtgagactcttcaggagtactggtg

SEQ ID NO: 3451 - DNA, 416 bp, Arabidopsis thaliana
  Clone ID: LIB22-068-Q1-E1-H12
cccacgcgtccgcccacgcgtccgtgcctcctttcggattcaaatctcagatctagctcaaccatggcgttgctcgtcgagaagacctcaagtggccgtgaatacaaggtcaaagacatgtctcaagccgatttcggtcgtctcgaactcgagctcgccgaagttgagatgcctggactcatggcttgtcgtaccgaattcggaccttctcagccattcaaaggcgctagaatcaccggatctcttcacatgaccatccaaaccgccgtactcatcgaaaccctaactgctctcggtgctgaagtcagatggtgttcctgcaacatcttttccactcaagaccacgccgccgcagccatcgctcgtgactccgccgctgttttcgcctggaaaggtgagactcttcaggagtactg

SEQ ID NO: 3452 - DNA, 418 bp, Arabidopsis thaliana
  Clone ID: LIB22-081-Q1-E2-G7
cacttctctctctctctctctctgcctcctttcggattcaaatctcagatctagctcaaccatggcgttgctcgtcgagaagacctcaagtggccgtgaatacaaggtcaaagacatgtctcaagccgatttcggtcgtctcgaactcgagctcgccgaagttgagatgcctggactcatggcttgtcgtaccgaattcggaccttctcagccattcaaaggcgctagaatcaccggatctcttcacatgaccatccaaaccgccgtactcatcgaaaccctaactgctctcggtgctgaagtcagatggtgttcctgcaacatcttttccactcaagaccacgccgccgcagccatcgctcgtgactccgccgctgttttcgcctggaaaggtgagactcttcaggagtactggtgg

SEQ ID NO: 3453 - DNA, 408 bp, Arabidopsis thaliana
  Clone ID: LIB22-025-Q1-E1-G5
acccacgcgtccgatctagctcaaccatggcgttgctcgtcgagaagacctcaagtggccgtgaatacaaggtcaaagacatgtctcaagccgatttcggtcgtctcgaactcgagctcgccgaagttgagatgcctggactcatggcttgtcgtaccgaattcggaccttctcagccattcaaaggcgctagaatcaccggatctcttcacatgaccatccaaaccgccgtactcatcgaaaccctaactgctctcggtgctgaagtcagatggtgttcctgcaacatcttttccactcaagaccacgccgccgcagccatcgctcgtgactccgccgctgttttcgcctggaaaggtgagactcttcaggagtactggtggtgtaccgagcgtgctctagattggg

SEQ ID NO: 3454 - DNA, 403 bp, Arabidopsis thaliana
  Clone ID: LIB22-056-Q1-E1-F10
atctcagatctagctcaaccatggcgttgctcgtcgagaagacctcaagtggccgtgaatacaaggtcaaagacatgtctcaagccgatttcggtcgtctcgaactcgagctcgccgaagttgagatgcctggactcatggcttgtcgtaccgaattcggaccttctcagccattcaaaggcgctagaatcaccggatctcttcacatgaccatccaaaccgccgtactcatcgaaaccctaactgctctcggtgctgaagtcagatggtgttcctgcaacatcttttccactcaagaccacgccgccgcagccatcgctcgtgactccgccgctgttttcgcctggaaaggtgagactcttcaggagtactggtggtgtaccgagcgtgctctagattgggg

SEQ ID NO: 3455 - DNA, 412 bp, Arabidopsis thaliana
  Clone ID: LIB22-032-Q1-E1-B6
ggaaactaccactggtgttaagaggctttaccagatgcagcaaaatggaactcttttgttccctgccattaacgttaacgactctgtcaccaagagcaagttcgacaacttgtatggttgccgtcactcactccctgatggtctcatgagggccactgatgtcatgatcgctggaaaggttgctgttatctgtggatatggtgatgttggaaagggttgtgctgctgccatgaagactgctggtgctagagtcattgtgactgagattgatcccatctgtgcccttcaagctttgatggaaggacttcaggttcttacccttgaggatgttgtctcagaagctgatatctttgtcaccaccaccggtaacaaagacatcatcatggtcgaacacattaaggagatgaagaac

SEQ ID NO: 3456 - DNA, 436 bp, Arabidopsis thaliana
  Clone ID: LIB22-059-Q1-E1-A8
cggacgcgtgggcttctctctctctctctctctgcctcctttcggattcaaatctcagatctagctcaaccatggcgttgctcgtcgagaagacctcaagtggccgtgaatacaaggtcaaagacatgtctcaagccgatttcggtcgtctcgaactcgagctcgccgaagttgagatgcctggactcatggcttgtcgtaccgaattcggaccttctcagccattcaaaggcgctagaatcaccggatctcttcacatgaccatccaaaccgccgtactcatcgaaaccctaactgctctcggtgctgaagtcagatggtgttcctgcaacatcttttccactcaagaccacgccgccgcagccatcgctcgtgactcccgcgctgttttcgcctggaaaggtgagactcctcaggagtactggtggtgtaccga

SEQ ID NO: 3457 - DNA, 410 bp, Arabidopsis thaliana
  Clone ID: LIB22-036-Q1-E1-E9
cactgcctcctttcggattcaaatctcagatctagctcaaccatggcgttgctcgtcgagaagacctcaagtggccgtgaatacaaggtcaaagacatgtctcaagccgatttcggtcgtctcgaactcgagctcgccgaagttgagatgcctggactcatggcttgtcgtaccgaattcggaccttctcagccattcaaaggcgctagaatcaccggatctcttcacatgaccatccaaaccgccgtactcatcgaaaccctaactgctctcggtgctgaagtcagatggtgttcctgcaacatcgtttccactcaagaccacgccgccgcagccatcgctcgtgactccgccgctgttttcgcctggaaaggtgagactcttcaggagtactggtggtgtaccgagcg

SEQ ID NO: 3458 - DNA, 375 bp, Arabidopsis thaliana
  Clone ID: LIB22-032-Q1-E1-H1
acggacgcgtgggcggacgcgtgggttcaaatctcagatctagctcaaccatggcgttgctcgtcgagaagacctcaagtggccgtgaatacaaggtcaaagacatgtctcaagccgatttcggtcgtctcgaactcgagctcgccgaagttgagatgcctggactcatggcttgtcgtaccgaattcggaccttctcagccattcaaaggcgctagaatcaccggatctcttcacatgaccatccaaaccgccgtactcatcgaaaccctaactgctctcggtgctgaagtcagatggtgttcctgcaacatcttttccactcaagaccacgccgccgcagccatcgctcgtgactccgccgctgttttcgcct

SEQ ID NO: 3459 - DNA, 404 bp, Arabidopsis thaliana
  Clone ID: LIB22-021-Q1-E1-A11
atcggattcaaatctcagatctagctcaaccatggcgttgctcgtcgagaagacctcaagtggccgtgaatacaaggtcaaagacatgtctcaagccgatttcggtcgtctcgaactcgagctcgccgaagttgagatgcctggactcatggcttgtcgtaccgaattcggaccttctcagccattcaaaggcgctagaatcaccggatctcttcacatgaccatccaaaccgccgtactcatcgaaaccctaactgctctcggtgctgaagtcagatggtgttcctgcaacatcttttccactcaagaccacgccgccgcagccatcgctcgtgactccgccgctgttttcgcctggaaaggtgagactcttcaggagtactggtggtgtaccgagcgtgctc

SEQ ID NO: 3460 - DNA, 459 bp, Arabidopsis thaliana
  unsure at all n locations
  Clone ID: LIB22-089-Q1-E1-H4
ctctcactctctgnctcctttcggattcaaatctcaagatctagctcaaccatggcgttgctcgtcgagaagacctcaagtggccgtgaatacaaggtcaaagacatgtctcaagccgatttcggtcgtctcgaactcgagctcgccgaagttgagatgcctggactcatggcttgtcgtaccgaattcggaccttctcagccattcaaaggcgctagaatcaccggatctcttcacatgaccatccaaaccgccgtactcatcgaaaccctaactgctctcggtgctgaagtcagatggtgttcctgcaacatcttttccactcaagaccacgccgccgcaagccatcgctcgtgactccgccgctgttttcncccggaaanggggnaaccctcaaggnntacgggggggtgttccgaanggtgcncaaaattggggtcaaggtggggggcccngatt

SEQ ID NO: 3461 - DNA, 447 bp, Arabidopsis thaliana
  unsure at all n locations
  Clone ID: LIB22-089-Q1-E1-H5
acgcgtccgcccacgcgtccgatcgaagatggcgactgctctggtttctcctcttacttcacaactcaaccatgaagctgtctgttccaagtttgtgttacccaaatcgccgttcatgtcgggatctaagctcttttcatcgaacatgccttgctctactgttcctagacgcacaagaagatcacactgctttgcttctgctaaagatatgagctttgaccatatccctaaacaatttcgtggagacaatctcaaagacggagtgatgcagaacttcaagaacgtaccacaatatttttacgggcttaattcagctcaaatggatatgttcatgacagaagatagccctgtccgtangcaagcgggaaaaagttacaagagggaaagcatctccgtcctaaaaaataacnatttggaaaaagggggggaaatagggattattccggg

SEQ ID NO: 3462 - DNA, 447 bp, Arabidopsis thaliana
  unsure at all n locations
  Clone ID: LIB22-089-Q1-E1-H7
acgcgtccgttttgtacctaaacnnnnnnnnnnnnnnnnnnnnnnnnnnnnnnnnnnnnnnnnnnnnnnnnnnnnnnnnnnnnnnnnnnnnnnnnnnttcccacaagctcccattgatatagagagagagatttaaggaaggaatcatggcagggggtggagctccagcacccaaagcagacgaaccacaaccacatcctcctaaagatcaacttcccaacatttcttattgcatcaccagtcctcctccttggcctgaagctattcttcttggattccaacattaccttgtgatgcttgggacaacggtgctcatacctactgctcttgttccccagatgggaggtggatatgaagagaaagcaaaggtgattcaaactaatctctttggttgccggggatcaaaanaatggnccaaaaannntgtttcgggaaaaaaatttnccg

SEQ ID NO: 3463 - DNA, 412 bp, Arabidopsis thaliana
  Clone ID: LIB22-089-Q1-E1-H9
aaatatgggagaaatcggtggagaagaactggtcttagatgtggatgagacgattttcgtcgcggtggcggaagatgtggagagaagcaaaaccacggtgttatgggcggcgcgtaacttttccggcaagaagatttgcttgctttatgttcatcgaactgctcgcgctgcctcctggacgcacaagaaacttgttggtggtagctttaaaaagcatgatgtcaaggtgattgagcgagttgagaaacccaaagtggatgaactgatgaattcttatctccaacttttatctgaaactgagattcaaacagataaactttgcattgcggggcaaaatatcgaggaatgtatcgtagaactaattgctcggcacaaaattaaagttggttagtaatggggaactgcatcaaat

SEQ ID NO: 3464 - DNA, 119 bp, Arabidopsis thaliana
  Clone ID: LIB22-047-Q1-E1-A5
ctttcggattcaaatctcagatctagctcaaccatggcgttgctcgtcgagaagacctcaagtggccgtgaatacaaggtcaaagacaattctcaaagccgattccggcctctcgaact

SEQ ID NO: 3465 - DNA, 378 bp, Arabidopsis thaliana
  Clone ID: LIB22-066-Q1-E1-C5
atccatcactctcgctctctctcagcctcctgtcagattcaaatcacagatctagctcacaaaaggcgttgttcgtcaagaagacctcaagtggtcgtgaatacagtgtcaaagacatgtcacaagccgatatcggtcgtcacgaactcgagctcgccgaagttgagatgcctggacacaaggcttgtcgtaacaaagtcagagcttctcagccagtcacaagcactataatcaccggatctcgtcacatgagcatccaaaacgacgtagtcaacgaaacccgaaatgctctcagtgctgaagtcagatggtgtacttgcaacaacgtttcaagtcaagaacactccggcgcaggtatcgctcgagacaccgcagctg

SEQ ID NO: 3466 - DNA, 326 bp, Arabidopsis thaliana
  Clone ID: LIB22-003-Q1-E1-E4
aaaatctcagatgtagctcaaccatggtgttgctcgtcgataagagctcaagtggacgtgaatacggggtcagagacatgtctcaggccgttttcggtcgtctcgaactcgagctcgcggaagttgagatgcctggactcatgggctgtcgtaccgaattcgggccttcgcagccattcaaaggcgctagaatcagcggatctcttcagatgacgatcaaaaccgccgtactcatcgaaaccctaagctgctctcggtgctgaactcagatggtgttcctgctagatcatttccactcaagaccacgccgccgctagcatcgctcg

SEQ ID NO: 3467 - DNA, 346 bp, Arabidopsis thaliana
  unsure at all n locations
  Clone ID: LIB22-052-Q1-E1-B2
ctcagatctagctcaaccatggcgttgctcgtcgagaagacctcaagtggccgtgaatacaaggtcaaagacatgtctcaagccgatttcggtcgtctcgaactcgagctcgccgaagttgagatgcctggactcatggcttgtcgntaccaaattcggaccttccaagcaatcaaaaggcgccagaatcaacgggtttcctcaaaataacaaccaaaacggcgttatcaaccaaaacctaactggtcccggtgccgaagtcaaatgggggtcctggaacaacctttccaatcaagaacaagccggcggaaccatcgctcgtgactccgccgctgttttcgcctgg

SEQ ID NO: 3468 - DNA, 188 bp, Arabidopsis thaliana
  Clone ID: LIB22-065-Q1-E1-C12
ctctctctctctctctgcctcctttcggattcaaatctcagatctagctcaaccatggcgttgctcgtcgagaagacctcaagtggccgtgaatacaaggtcaaagacatgtctcaagccgatttcggtcgtctcgaactcgagctcgccgaagttgagatgcctggactcatggcttgtcgtaccga

SEQ ID NO: 3469 - DNA, 275 bp, Arabidopsis thaliana
  Clone ID: LIB22-040-Q1-E1-A8
gccacgcgtccgttcgcactctctcgctctctgccacctttcggagtcaaatctcagatctaattcacacatggcgttgtcccgcgacaacatctcaagtgggctttaatacaaaggcatttacatgtcacaatccgaattctggcctctcgaagtcgagctcccccaagttgacatgcctggactcatggcatgtcgtaacgaagtctgaccttctcaggcattcaaaagcgctagaatcaccagatctcttcacatgaccatccaaaacggcg

SEQ ID NO: 3470 - DNA, 353 bp, Arabidopsis thaliana
  Clone ID: LIB22-029-Q1-E1-A10
tctatgcctcctttcggattcaaatctcagatcgagctcaaccatggcgttgctcgtcgagaagacctcaagtggccgtgaatacaaggtcaaagacatgtctcaagccgatttcggtcgtctcgaactcgagctcgccgaagttgagatgcctggactcatggcatgtcgtaccgaattcggaccttctcagccattcaaaggcgctagaatcaccggatctcttcacatgatcatccagaccgccgtactcatcgaaaccctaactgctctcggtgctgaagtcagatggtgttcctgcaacatcttttccactcaagaccactccgccgcaaccatcgctcgtgactccg

SEQ ID NO: 3471 - DNA, 348 bp, Arabidopsis thaliana
  Clone ID: LIB22-073-Q1-E1-F7
gcctcctttcggattcaaatctcagatctagctcaaccatggcgttgctcgtcgagaagacctcaagtggccgtgaatacaaggtcaaagacatgtctcaagccgatttcggtcgtctcgaactcgagctcgccgaagttgagatgcctggactcatggcttgtcgtaccgaattcggaccttctcagccattcaaaggcgctagaatcaccggatctcttcacatgaccatccaaaccgccgtactcatcgaaaccctaactgctctcggtgctgaagtcagatggtgttcctgcaacatcttttccactcaagaccacgccgccggcagccatcgctcgtgactcc

SEQ ID NO: 3472 - DNA, 366 bp, Arabidopsis thaliana
  Clone ID: LIB22-055-Q1-E1-B5
cggacgcgtgggctctctctctctgcctcctttcggattcaaatctcagatctagctcaaccatggcgttgctcgtcgagaagacctcaagtggccgtgaatacaaggtcaaagacatgtctcaagccgatttcggtcgtctcgaactcgagctcgccgaagttgagatgcctggactcatggcttgtcgtaccgaattcggaccttctcagccattcaaaggcgctagaatcagcggatctcttcacatgaccatccaaaccggcgtactcatcgaaaccctaagtgctctcggtgctgaagtcacatggtgttcctgcaacatcttttccactcaagaccaggcggccgcagccatcgctcgtg

SEQ ID NO: 3473 - DNA, 346 bp, Arabidopsis thaliana
  Clone ID: LIB22-008-Q1-E1-F9
acgatcagatctagctcaaccatggcgttgctcgtcgagaagacctcaagtggccgtgaatacaaggtcaaagacatgtctcaagccgatttcggtcgtctcgaactcgagctcgccgaagttgagatgcctggactcatggcttgtcgtaccgaattcggaccttctcagccattcaaaggcgctagaatcaccggatctcttcacatgaccatccaaaccgccgtactcatcgaaaccctaactgctctcggtgctgaagtcagatggtgttcctgcaacatcttttccactcaagaacacgcggccgcagccatcgctcgtgactccgccgctgtttttcgcc

SEQ ID NO: 3474 - DNA, 474 bp, Arabidopsis thaliana
  unsure at all n locations
  Clone ID: LIB22-089-Q1-E1-H2
gggttnatagagaaaagagtaaaaaagcacatggcctcattaccattggggcctcagcctcatgctcttgctccgccgctgcagcttcacgacggcgacgctttgaaacgccgtcctgaattggattctgataaggaaatgtctgcagctgttattgagggaaatgacgctgttactggtcatatcatttccactactattggaggcaaaaacggcgaaccaaagcagaccattagttacatggctgagcgggttgttggaacaggttcattcgggattgtttttcaggcgaaatgcttggaaactggagaatcagtagccattaaaaaggtcttgcaagatcgacgctataaaaaccgtgagtttcaactaatggcgaacaaanggtttncccaaatgtcanccccttgaaancacngtttcttccctanaacgagtnanagatganctcttcctcaaccttgtttatggagt

SEQ ID NO: 3475 - DNA, 364 bp, Arabidopsis thaliana
  Clone ID: LIB22-068-Q1-E1-B11
aatcaaggaaggtctccatctcgctcacattaagtaccacacgatgaacgacagacttgttggtgtctctgaggtaactaccagtggtgtcaacacgctttaccacacgcagcaaaatggaagtctcttgttccctgccattaccctaaacgacactgtcatcaagagcaagttcgacaacttgtatggttgccgtcactcactcgatgatggtctcagaaagggcactgatgtcatgatagctggaaaggttgctattatcagtggatatggtgatgttggaaagggttctgctgctgccatgaatactgctggtgctacagtcaatgtgactgatattgatctcatctgtgcccttcacgct

SEQ ID NO: 3476 - DNA, 365 bp, Arabidopsis thaliana
  Clone ID: LIB22-029-Q1-E1-F1
tcccacaggctcctttccggattcaaacctcagttcaagctcaaccatggcgttgctcgtcgagaagacctcaagtggccgtgaatacaaggtcaaagacatgtctcaagccgatttcggtcgtctcgaactcgagctcgccgaagttgagatgcctggactcatggcttgtcgtaccgaattcggaccttctcagccattcaaaggcgctagaatcaccggatctcttcacatgaccatccaaaccgccgtactcatcgaaaccctaactgctctcggtgctgaagtcagatggtgttcctgcaacatcttttccactcaagaccacgccgccgcagccatcgctcgtgactccgccgctgttt

SEQ ID NO: 3477 - DNA, 378 bp, Arabidopsis thaliana
  Clone ID: LIB22-083-Q1-E2-G5
cttcactctctctctctctctgcctcctttcggattcaaatctcagatctagctcaaccatggcgttgctcgtcgagaagacctcaagtggccgtgaatacaaggtcaaagacatgtctcaagccgatttcggtcgtctcgaactcgagctcgccgaagttgagatgcctggactcatggcttgtcgtaccgaattcggaccttctcagccattcaaaggcgctagaatcaccggatctcttcacatgaccatccaaaccgccgtactcatcgaaaccctaactgctctcggtgctgaagtcagatggtgttcctgcaacatcttttccactcaagaccacgccgccgcagccatcgctcgtgactccgccgctgttt

SEQ ID NO: 3478 - DNA, 424 bp, Arabidopsis thaliana
  unsure at all n locations
  Clone ID: LIB22-088-Q1-E1-G7
attaggggaaaagtcaagacaagtatggctaggtgtacaggcagacccactggcgcantcagatgatctgctggcaaaagcatacaaccgaccctcagaggaancagtagcaaagccatcttcaaaatggttcatctcaaagaatgcaattgtctcagggctactcgggaagaagcaagaanattcantttcagattctccacctccaaaggctcggcgaaaaaggatagtgaggaagaaggtggctgcatctgcctcttaaataaccaacatnacctctaaaatgtcacaattttcanagtccatggaagaacaacagtgaggttttgttgttcatttgaggcacacatgacaaaggttttgttgccatangaaggaagaagggatcaccaaactttggaggaattgaaaaaaagctcnatag

SEQ ID NO: 3479 - DNA, 479 bp, Arabidopsis thaliana
  unsure at all n locations
  Clone ID: LIB22-088-Q1-E1-G8
ccaataccggtcaagnattcccgggccntaatcaacgatgcnattagttacatanaaggattacaatatgaanaaaagaagctcgaagctgagatcagagaacttgaatctacaccaaagagtagccttagtttcagcaaagattttgatcgtgatttacttgttcctgtcacatccaagaagatgaagcagcttgattctggttcttccacttctctcatcgaagttctcganttgaaggtaacattcatgggagagaggacaatggtggtgagtgtaacatgtaataagaggacagatacaatggtgaaactgtgtgaagtctttgagtcattgaatctcaaaatcctcacttccaatctcacctctttctctgggcatgatcttccacactgtctttattgaggcggatgaagaagaacaagaggtgttgcggttaaaaatagaaacaggaataggagcttataaatgaaactcaa

SEQ ID NO: 3480 - DNA, 449 bp, Arabidopsis thaliana
  unsure at all n locations
  Clone ID: LIB22-088-Q1-E1-G9
attcccnggtcgacccacgcgtccaacacgcnatccggtcctctggtggtttatggaactgaaggatctaagatagttaaggcgtttagaaaccttcctggtgttgagctttgtcatgtggagaggnttaatttgttgaagcttgctcctggtggtcaccttggtcggtttgtgatctggaccaagtctgcctttgagaagcttgagtctatctatggttcgtttgagaagccatcagagaagaanaaggggtatgtgcttcctcgtgcaaagatggtgaatgctgatcttgccaggattatcaattcagatgagattcagagtgttgtgaatccgatcaacaangatgcgaagagggctgttcttaagaagaatccattgaaagaaatctcaatgtgatgttgaagttgaatcccttatgccaaagaaccgcgaaagangatgtcact

SEQ ID NO: 3481 - DNA, 452 bp, Arabidopsis thaliana
  unsure at all n locations
  Clone ID: LIB22-088-Q1-E1-H11
gtacngctccagaattcccaaggtcgacganctcanncnaaantccctaaatttgccctcatttccctctgattagatcccttancccgacaaagacacnacaattcttganggcgacagagctgattgatgtctttggtatctggagccagggacanggggttnnnnnnnnnnnnnnnnnnnnnnnnnnnnnnggatggagatgatgngaactcctcctccagaacaagagccgacnacgatgctcntagtcgacanatgancgaatcttctctttgtgctaccgaggaggaagaagacgacgattccaaattgcaattgggtcctcagtacactatcangagaacatctcgagaaggacaangatgattagagtctgangaaatggaaggaacagcttctcggaagtgttgatgtcaccaacattggggagactcttgattcgggaagtn

SEQ ID NO: 3482 - DNA, 454 bp, Arabidopsis thaliana
  unsure at all n locations
  Clone ID: LIB22-088-Q1-E1-H2
acgcgtccgnccacgcgtccggctggttctaaacctgagatccttcttgctatgagctgcttgtgtaaaggtagccctgatgcctttcttgtgtgcaatggattcaaagatgctgagtatatatcattggctctgcttgggagaaaactggcgttgaatactgtgattgtgcttgagcaagaagaagagcttgatctggttattgagctgagccagaagatgaatgtgaggcctgtcattgggttaanggctaagctgaggactaagcattcgggtcatttcggatcaacttctggtgaaaagggtaaatttggattgactactactcagattgttcgtgtggtgaagaanctgcgtcaatccggtatgcntgaattgtccccaagcttctgcaatttcaaaattggggtcacaaaattccgttcaacttcgttgccccccgaaaggtgttcnc

SEQ ID NO: 3483 - DNA, 505 bp, Arabidopsis thaliana
  unsure at all n locations
  Clone ID: LIB22-088-Q1-E1-H3
actgttacccgcctgtaccggtccanaattcccggntcgacccacgcgtccgtggagatatgtantganaagaatcatgatgagatagattttgagtttcttggtaacattagagaaaaagaatggagagttcagacaaacatttacggtaatggaagtactcattcaggaagagaagagagatataatctctggtttgatcctactgaagattttcatcaatacagtatcctctggtctgattctcacatcatattcnttgtagacaatgttcctattanagaggtcanacgtactgcggaaatgggtggtcactttccatcaaagcccgatgtctctctacacaacaatatgggacggttctaaatgggcaactaacggtgggaaagtacggggtaaactacaaatatgccgccttacattgcgcggttctcgggatctagtccctgcaacgggctgcccccgttggaccctaaccgagcaatttcccgaaggtgcgaatgaa

SEQ ID NO: 3484 - DNA, 418 bp, Arabidopsis thaliana
  unsure at all n locations
  Clone ID: LIB22-088-Q1-E1-H9
atttcgatggcgggattagagaaaaacgctgatttctcagggaagacgacnaaatcggctacaacgacgtcgttcttcaacaggtcgcttacaattcacggnagaacantggtggattcgggccccaaatcccacaatctcaatccttctctcaatcgtaccacctccattaccaaattctacacccccgtagaatcgatgggaacttctcttaaaggcaaagtcaaagaacctttgtagattattcgagacttccaaacccgttaaacctgccttanctgagattcctcagaagcagaaatccggtaaatcccttttacccgaatcncggatatcgcctttttcgagcttaaacanctcggtcatccgtcctcncgggacaanaggacangattgtggngtattttaccaacttgag

SEQ ID NO: 3485 - DNA, 422 bp, Arabidopsis thaliana
  unsure at all n locations
  Clone ID: LIB22-089-Q1-E1-A10
acgcgtccgcctaatcatcactcggctgcttcctgacgcagcaggaactacttgtggtcaacgtctagagaaagtgtacggatctcagtattgtgatatcctccgtgtgccttttagaacagagaaaggaatcgttcgcaaatggatatcaaggtttgaggtctggccgtatctagagacttttaccgaggatgttgccgctgaaatctcgaaagagttgcaggggaagcctgacttgatcattggaaactacagtgatggtaatcttgttgcatccttgttagcacacaaacttggtgtcactcagtgcaccatcgctcatgctttggagaagactaagtacccggattctgatatctactgggaagaagctcgacgagaagtatcacttttcttgccagttcacggctgatcttancgcc

SEQ ID NO: 3486 - DNA, 413 bp, Arabidopsis thaliana
  Clone ID: LIB22-089-Q1-E1-A11
gggcataaacccattacaccaaaacctcatcgtagagagagaaacacaccaaccattgttacactctaagagaagagaagagagaaggaaaaatggacggtgtatcaccaaagtttgtgttgccggagacattcgacggcgtgaggatggagatcacaggccaactaggcatgatctgggagcttgtaaaagcaccagtgattgtccctcttcttcaattagctgtttacatctgtttgcttatgtctgtcatgcttttatgtgagagggtttacatgggaatcgtcatcgtcctcgtcaaactcttctggaaaaaaccagacaaacgttacaagttcgagcccattcacgatgatgaagagcttggtagctccaatttccccgtcgtcctcgtacaaatccccaagttcaaa

SEQ ID NO: 3487 - DNA, 515 bp, Arabidopsis thaliana
  unsure at all n locations
  Clone ID: LIB22-089-Q1-E1-A2
tttaccggcccaaaattcccgaatcgacccacgcntccgctttcttcgaatctcgacggctgaaacagattctaaatttatctccggtgagaaagagatagagagcgttgattccggcgaaaagatgtctgaattcgaagatcacgagggaaacggtacggttgctgacgcgatttacgacgaagagaatggtggccgcgacggcgaaatcgaggatcaattggactcgaaacccaagagagaatcgcgtgaccatgaaagagagacatcaagaagtaaagatagagaaagagagaagggtcgtgataaggacagagaaagagactctgaagtctctcgccgaagcagggatagagatggagaagaaaagcaaggagaggagtagagacaaagacagagatnatcntgagcgtcntcccaanaattatccctccacanggatnataccagggaaccntggtgaaaagaaananaacntggtgggtagggatgatgatgaattacccgtcgaancc

SEQ ID NO: 3488 - DNA, 533 bp, Arabidopsis thaliana
  unsure at all n locations
  Clone ID: LIB22-089-Q1-E1-A3
ttttacgccgccctntacgccggccagtaccgcgtcnnaacattccagggccnacgcattnttcccaggacgaatgagagctccacacantggctgcttgcgctactcactcctctctcatgctagcatacgccgccgcatccactcgttcccaggaccttacccctactccatctcttttctcttttgccangctccagacccaaccacttgagcttcccgcttcttctccttgggggttccagggaccggagatgtgctgctattgncagagcttccaaccacaagtttattgtctccgccgtggccgctgaggntgacctcgacacggaggaggacctgcagcaaacngccaccgccgtccttgatccgcccaagcctaagaaaggaaaagccgctttggttctcaangaagagatngaacaagggcctaanaaggtttttgggnaatcccanaaggctatggggaaaccaaanagggngttatgatgtcaacactgctatctcnttgcttaaacaaaactgccancaca

SEQ ID NO: 3489 - DNA, 520 bp, Arabidopsis thaliana
  unsure at all n locations
  Clone ID: LIB22-089-Q1-E1-A4
acgttacccgcntttaccggnccaanaattcccgaaancgacccacgcctccgagaaagattaacaaagttgaggaaatacgtggcttaaggggaagctgggttggaccccagatcagtgggggcacactcgtttcaaattattcaatggttctgctgatatggtgacaaatcaaaaacagttgaatgcactcatgcgtgcgcttttaaagacaatgcaagaccatgctgatgcttggcctttcaaagaaccagtggattctcgcgatgtccctgattactatgacatcattaaggatcccattgatctgaaggtaattgcaaagagggtagagtcggaacagtattacgtgacattggatatgtttgttgcggatgcgagacggatgtttaacaattgtagaacttacaactcccccgataccnattaatacaaatgttgcnaaccaagtttggaaccaancttccatngaaagtncaaancaggtcnccaaatcgggggccaaaacccaattagaana

SEQ ID NO: 3490 - DNA, 474 bp, Arabidopsis thaliana
  unsure at all n locations
  Clone ID: LIB22-089-Q1-E1-A5
acgcntccgnggacgcgtgggcacctaccatctcctctctcttttcagattcattcgttaagaaagcagatcgacatggcagctcaaggaggtgattcatatgaggaagcgttggctgctttgtcgtctttgatcacgaaacgaagtcgtgctgataagagcaataaaggggatcgctttgagttagtctttgattatctcaagctacttgacctggaagaagacattttaaagatgaatgttattcatgtcgctggtaccaaaggcaagggatccacatgtacctttacagagtctattattcgaaactatggctttcgaactggactcttcacttcacctcacctcattgatgtccgggaaagatttcgtttggattggtgtnggccataanttaananaaatttttggggaaaattcctgggtggtgctataacanggctcaagggagaaaactaacgaggagataccaat

SEQ ID NO: 3491 - DNA, 428 bp, Arabidopsis thaliana
  unsure at all n locations
  Clone ID: LIB22-088-Q1-E1-G5
acgcgtgggcanatanangcagattctcanatttgcaaacatgacgactcagatcancaacaagagaaagtttgtagcngacggtgtgttctacnctgaattgaatgaggttcttacaagagagcnagcatnggatggttacncnggtgtngaggttanggttactcctatgaggactgagattatcatcagagctacacgtactcagaatgttctcggtgacaaggggacganaattanggaattgacttcccttgttcagaananattcaagtttccanttgacagtgttgagctttatgccgagaaggttaacaacagaggtctctgtgccatcgctcangctgagtctttacgttacaagcttcttggtgggtctcgctgttcgtanggcttgcaatggtgtgttgatgtttgttatggacagt

SEQ ID NO: 3492 - DNA, 437 bp, Arabidopsis thaliana
  unsure at all n locations
  Clone ID: LIB22-088-Q1-E1-E5
acgcgtccgcttctcttcccaaaacattccgtgaagaagatctttttaaagatcctaattttctagatcaagaacccggttcaagatcacctaaaccgggatccgaagctcctgatcaagatccgggttcgacccggtcaagaacacaaaatatgataccgccgatgtgggcactagcgccaacgccagcctccacaaacggaggtagtgctttttggatgttaccagtcggaggaggaggaggtccggctaacgttcaggatccatcacagcacatgtgggcgtttaatccgggtcattacccgggtcgaatcgggtcggttcagctagggtctatgttagtgggaggtcaacagttagggttaggtgttgcagaaaataacaatttggggctattttccggcggaggagganacggtggncgggttggccccgga

SEQ ID NO: 3493 - DNA, 426 bp, Arabidopsis thaliana
  unsure at all n locations
  Clone ID: LIB22-088-Q1-E1-E6
ctgtaacccaacccactcaaacgaaatnnnnnnnnnnnnnnnnnnnnnnnnnnnnnnnnnnnnnnnnnnnnnnnnnnnnnnnnnnnncaatcggaactctcgattcgctttcttctccgttcttctgtggcggaccggttttgtggttttttatttgaacattcccgatcttgccctgagttccacgatcagtttctttaaaccctangttttacacaagcattctgtttctccagattatcncanactctttcgttctantctttgtagttttgtaaaaggtatttcggtagatttagggtttgtctgtgtctagttttcgagatcnagagagatttgtgatgaatactaanagaggaagatatccaccgggtgttggaacnggtcatggtgcgcctccgaagccagattatcatcaatcgtanc

SEQ ID NO: 3494 - DNA, 426 bp, Arabidopsis thaliana
  unsure at all n locations
  Clone ID: LIB22-088-Q1-E1-E7
acgcgtccgcccacgcgtccgcttgcatcantcgcatacctgagaaaggntacggaggaangttcccttaaggnctggccgtncgcatactccaactgatangctgcaaannanaaaatttnattcctacantgctangaaagagctattcaaggcagaatcaaaatattggaatgaaataattgggggctatgttcgcgccttaaaatgggaaaaagatgaaactaagaaatgttttggacatgagancaggctttggcggatttgcagctgcactaaatgatcataaactcnattgctgggttctaagcgtggttcctgtcagtgggcctaacacattgcctgtcanttatgaccgtggactgttangagtgatgcacgattggtgtgaaccatttgatacatacccacngacatatgacttct

SEQ ID NO: 3495 - DNA, 520 bp, Arabidopsis thaliana
  unsure at all n locations
  Clone ID: LIB22-088-Q1-E1-F1
ngttacgcctgcttttaccgagnccnanaattcccganaacgacccacgcgctccgcccacgcgtcaagcggacgcgtgggctaaagcgatctctgcaaatctctcgcgactctctctttcaagatgcaaatcttcgtgaaaacactcactggcaagactatcactctcgaggttgagagctctgacaccatcgacaatgttaaggcaaagattcaggacaaggaaggcattcctccggatcagcaaaagattaatattcgccggtaaacagctagaagatggccgtaccttggccgattacaacattcagaaagaatcaacccttcattggttctcccgtttaaagaagtgggtatgcaaatcctttgtcaagaatccngactngnaaagaacaataacttggganggtgaagaactcctgacactaattgacaacgttcaaagcaanagattcaaggacaaaggaaaggaatcccctcccggatnaagcaagagnactttatccttttgccgggttaa

SEQ ID NO: 3496 - DNA, 469 bp, Arabidopsis thaliana
  unsure at all n locations
  Clone ID: LIB22-088-Q1-E1-F5
attcccgggtccgacccacgcgtccgaanctctcacacaaccactgttctccgtcacggtggcgctttattctctcatcggagcgcctcaccggtggtanacggtgtcgttgttcctctccnaaaacntccatcatnnaccatctctttacacagagctctaatcaaaatcttcgagagatggggcanagtatgagctgtggaagtcgaccggagcacggaatattcgcctctgtacagtgcggcgatatcatcactatccgtcgtgtgatggcgacggagcctagtctgttgaatcaaantactccttatgatcgtcactctgttcttcaatgtcgctgctgctaaatggtcangatngaagattttgtcattgcttttggaacgatttacgaaatccaagatttggttgnatcngtcacnaagcaagactccgtttaatgtttgggctgcnatgtattggaaaaatc

SEQ ID NO: 3497 - DNA, 431 bp, Arabidopsis thaliana
  unsure at all n locations
  Clone ID: LIB22-088-Q1-E1-F6
acgcgtccgcccacncgtccgcccacgcgtccgcncacgcgtccgcccacgcntctgctctcgatttgtcttcttcactcagtttctcgcttgttctgtcaaagatcgaaactttccggcgtctattgtcttcgcactattnnnnnnnnnnnnnnnnnnnnnnnnnnnnnnnnnnnnnnnnnnnnnnnnnnnnnnnnnnnnnnnnnnnnnnnnnnnnnnnnnnnnnnnnnnnnnnnnnnnnnnnnnnnnnnnnnnnnnnnnnnngatatgttnaactacgggaacancanngtgggagatcanngattggcatgattttttcaannaggttcaantgattgacatacagtatgataagctagacaancttcnaaagaaactgcangcttcncatgangagtcaaaatctgtgaccaaagctcctgccatga

SEQ ID NO: 3498 - DNA, 426 bp, Arabidopsis thaliana
  unsure at all n locations
  Clone ID: LIB22-088-Q1-E1-F7
cntcttcgtttctancgacagcttcactaancanttccaaatccaacatttcattcgcttcctcagtatccccatccctccgcancgtcgttttccgctccacgactccggcgacttctcaccgtcgttcaatgacggtccgatcnaagattcgtgaaattttcatgccggngttatcatcaaccatgacggnaggcaaaatcgtgtcanggntcaaaacagaangcgaaganactcgccaagggagagagtgttgtggttgttgaatctgataaagccgatatggatgtanaaacgttttacnatggctatcttgctgcaattgtcgtcggaaaaggtgaaanagtccggttggtgctgcaattggattgttanctgagactgaanctgagatcgaagaagctaanagtaaagccgcttcgaaat

SEQ ID NO: 3499 - DNA, 457 bp, Arabidopsis thaliana
  unsure at all n locations
  Clone ID: LIB22-088-Q1-E1-F9
ggtacngcctcaaaaattccaggncgacccacgcgtccgggtttttttttcttagcacagctctctcttctcaatttccccaaatgaaataaattcctccgaaagtttatagatttcactctcccccgaactatacaaaattccctcaaaaggaaaaactaaaaagccgatcttggcttttttgtttctgagtgcatctcgatacttggaagcattctttggtgaggctgattcattctcatctgtgaaagtctttggcttttgaagcaatactatggaaggaattcagcatcctatacctcgcactgtcgaagaggtttttagcgactttcgtggtcgtagagctggtctcatcaaggctctctctactgatgtacagaagttttaccatcagtgtgaccctgagaangaaaacttgtgtcttaaggacttccaaatgangacatgggaaggttaa

SEQ ID NO: 3500 - DNA, 505 bp, Arabidopsis thaliana
  unsure at all n locations
  Clone ID: LIB22-088-Q1-E1-G1
tgttaccctgcctttaccggncccanaattcccggancgacccacgcgtccgcccacgcgtcagattccttaaccaacaatattacaaataagctcctatcttctttctttcttttagagatcttgnaatctcctcntagttaatcttctantgtaaaactaanatcaanagtctaaatggagattaacggggcacacaagagcancggaggaggagtggacgctatgttatgcggcggagacatcangacacagaacatggtgatnaacgcggaggattctctcaactggggagctgcatcggagcaaatgaaacggtanccatttgggtgnaattgaaaanaatggnttgccgaanttaangaaaccaatttgttaatccctgggggggtgagactcctgaaccaattgggacaaagttggctgccaattctcaaactaattgggtaaacaatgttgaaaaggtggagctatccggagaacagctaaaagcccngtggtgaaa

SEQ ID NO: 3501 - DNA, 419 bp, Arabidopsis thaliana
  unsure at all n locations
  Clone ID: LIB22-088-Q1-E1-G11
caagagacatttcatgaactgttctcttatcatttgtatctagcctcgcatcaaacatttcaatggttggaatcatgttacggatcgatcgtcgaacccaattgactagatcccctccttgctccagcggttgaactgggggctttcctgttattagctccagaagcacaactccaaagctatagatatcacatttctctgtcaccttcatcgtgtaagcatattctgaaacacagcaaaacatcaattagatatgttagataagcgattgtgggaagaaagaaaactgtgatgttttactcacctggagcgatgtatccgtaagacccagcaacaagctgacatggactttgagtaagagaagatnaatcaacttagccaggccaaaatctccaacatgagccttgaaacgttcanca

SEQ ID NO: 3502 - DNA, 426 bp, Arabidopsis thaliana
  unsure at all n locations
  Clone ID: LIB22-088-Q1-E1-G12
cgtttttgcaaacgaacatcagtctgaatgcgatcaagatcgtcccggggaaatacagttctctcaccgatcatcagtttcgtgcgccgtatcgaattaggtgcgccgccgcttcacctgggaaaaaacggtataacatcgctctgcttcccggagacggtatcggtccagaagttatctctgttgctaagaatgtgcttcagaaagctggatctctcgaaggactggagtttgatttcaaggagatgcctgtcggaggagcagccttggatttggttggagttccattgccggaggaaactttcacggctgcaaaactatctgatgccattcttcttggagctattggagggtacaaatgggacaaagaatgagaaacatctgagacctgagatgggctctgttttaccttanaagaaatttcaa

SEQ ID NO: 3503 - DNA, 440 bp, Arabidopsis thaliana
  unsure at all n locations
  Clone ID: LIB22-088-Q1-E1-G2
cggccaagncacagatctccgtggccatctctctctnnnnnnnnnnnnnnnnnnnnnnnnnnnnnnnnnnnnnnnnnnnnnnnnnnnnnnnnnnnnnnnnnnnnnnnnnnnnnnnnnnnnnnnncgtataaatcctccccattgttgagttaattagttcttgtaaacccatgacgttttccgtcaaagctgaaatggaagttctcatggtctcagatagccactgttgcttctgtcattgttctcgtttccttggttcatctgtttcttggtcctgtagtgccttcttttgattctattactgtaagacaagctcagaatctttgtggaccaagtaatgaatcaatctcacaagtgactaagaattcaagtcaatcccttgttgttgttgcctttggattgccgctttcctggctgactcacacggtgcaattagttta

SEQ ID NO: 3504 - DNA, 487 bp, Arabidopsis thaliana
  unsure at all n locations
  Clone ID: LIB22-088-Q1-E1-G3
accggnccaaaaattcccggaatcnacccacgcgtccgcacgctctcaattttgtgggattgtttctttaaaaggggttcttanggtttagtgaagctatagatttcaatttcatacatagttaacgtatagaaggaatcttgggttgatcaatggaaggttgtccaagaaacagagaaatcggtccaaaacttcttgatttgattccacaangaaggaaatggtaccaagaagacaagaacaacacagatcacgagaagaaacttgagctaangcttggaccacccggtggtgatgaagaagatcattcaagcaatcaagaaagaangaacacnagagataagaaacatcaaagaangaaacagaagacaaatctttccactgttttaatggcaatcacttctctccttccaacaaaaaccacttctgttcctcacatctcacaagaaaaagaactgctcctgggtccagtggtgggttggcctcc

SEQ ID NO: 3505 - DNA, 501 bp, Arabidopsis thaliana
  unsure at all n locations
  Clone ID: LIB22-088-Q1-E1-E3
tgttacgcctgcctttaccggnccnanaattcccggatcgacccacgcgtccgcangaaatcttcactttctctctagaaaaaattggnaagctgactcgataanagactctctttttcttcttcgtcctgcanatgggcgatcgaggatcaagagaacacaatccgtgaaatcaaacctaagaacaagaagaatcatgggagctggtggtccggaggaagaggagaaccggtggccgccatggttgaaacctttgcttaaagagcaattctttgttcattgcaagtttcatgganactctcataagantgaatgcantangtnntgcttanactgcaccaatggcccactttgcnctctttgtcttgctcatcacaaggatnatccgcaccattcanataagggagattcttcttatcatgatgttataacgggtgaatggagatacaanagtaaccttganatnanggtggggattcaaacctaaggtgttaantaatg

SEQ ID NO: 3506 - DNA, 428 bp, Arabidopsis thaliana
  Clone ID: LIB22-088-Q1-E1-B5
tttttcaaattgtcgtctaaagtctctaaaaccaccatcgaagtcttgacagagagaattcgaatcggacagagaatttcttccgtagtttttcttgtaagcgaaaaagaagtttagttagctcgtgtgagagaagggtgtaatgagctgttttggttggtgtgggagtgaggattttcgcaacgctactgacactggcccaaggccagcgcataacccagcaggttacaatggaggccactaccaaagagctgatccacccatgaaccagcctgttattcccatgcagcctatttctgtaccagccattccagtggatgagctgagagatataactgataactatggttcaaagaccttgatcggcgaagggttcctaaggaagaatgttttaaggtgttcttaaaagccgtggtgcagctgccatc

SEQ ID NO: 3507 - DNA, 457 bp, Arabidopsis thaliana
  unsure at all n locations
  Clone ID: LIB22-088-Q1-E1-B8
acgcgtccgcaacaactgtgttatctctatgaacagttcctttgatgaagaacacaaagtgaaagttgctgtctttataaccaggatttggtaattcccattgtttcatgggcaattcttgccgtggatctttcaaggacaaactcgacgaaggcgataacaataagcctgaagattactctaaaacctctaccaccaacttgtcttctaattccgaccattcaccgaacgctgcagacatcattgctcaagaattctcnnnnnnnnnnnnnnnnnnnnnnnnnnnnnnagatccagctcttgttattccctttaagagaaccaatcatgagggcgttaacccagacaatcaaagcttactaagttccttggtcataaagacaccaaacaattcgtggataatccnatacccctaanccgcaagcctanggtcaaagggtcaatttggaaccaactt

SEQ ID NO: 3508 - DNA, 448 bp, Arabidopsis thaliana
  unsure at all n locations
  Clone ID: LIB22-088-Q1-E1-B9
gccacanacattcccaaggtcnacccacgcgtccnatcgcgctctctctctctctcttcattgattgagtcatcatcttcttggacaagaagtggtccgaaccaaaaccaagccagagaatgaatctctcaggggatcgaacaactctaaagcgtcactcgtcgctttcaacacttgtggctcatttctttggcatcttagctgttgttctgatgctaatttggcttctccactaccgtgaaggcatcgagtatggctccgacaacccccttaaggttttaaatgtgcacccatttctcatgtactgtggatttctcttcctcgtgggccaagcaatgatgacttacaaaacggcgtacgcgtcgcaccaagttcaagaaaatggttcacggtgggcttcacttaatangcttaattctangtaatgtccggatccgggcccgccntt

SEQ ID NO: 3509 - DNA, 416 bp, Arabidopsis thaliana
  unsure at all n locations
  Clone ID: LIB22-088-Q1-E1-C12
tcagctcccctagttaaacttggggatgcatcaatggcatcccccttcanagctaaacatgcgtcagttgccccantgacanacataatccggcagggtcgtagcacacttgtgacgactcttcagatgttcaaaattctcggtctgaactgtctcgccacagcatatgtcctaagtgttatgtacttagacggtgtaaagcttggtgatgtccaggctacaatcancggagtgttaacagntgcgtttttcctcttcatttctcatgcccgaccgcttcaaaccctctctgcagaacggccccacccgagtgtcttctccgtgtacctcttcctctctctgataggacagtttgctgttcacttgaccttcttggtctactctgtgaaggaagctgagaaacacatgcccgacga

SEQ ID NO: 3510 - DNA, 481 bp, Arabidopsis thaliana
  unsure at all n locations
  Clone ID: LIB22-088-Q1-E1-C3
aactgttacgcagcctctaagcggnccannaattcccgnntcgacccacgcntccgtctctcccttcttctcgactctctgactcaatcaacctctataaatgtaaaacgagtcagaaggaacacagacgcacatcaagaanttaaatcactaaaatggattaccccatgaagaaggtaaaaatctttttcaactacctcatggcgcatcgcttcaanctctgcttcttaccattaanggntgctanagccgtggangcgtcncgtcgttccacacaagatctccaaaacttttacctctacttacaangcaaccanacatctntaaccatgttcttcntttacctcgctctcgggtcgactccttacctcatgacccgggccaaaaccgtttaaccccgttgactttagctgctaactcccaacgtcgcatctcaaagccagcanccaagangatnatgcaccacgtaaaggcttgtncg

SEQ ID NO: 3511 - DNA, 454 bp, Arabidopsis thaliana
  unsure at all n locations
  Clone ID: LIB22-088-Q1-E1-C9
attcccaaggncgacccacgcgtccnagaagataactccaataccaagagtgaaagcattcaggaaacatgcctcctcagaagattgaaactggtcatagcgacactattcatgatgtggtcatggattactatggaaagcgagtagcaactgcctcgtctgactgcacgatcaagataaccggagtaagcaacagcggtggatctcagcatctagctaccttaaccggtcatcgaggtcctgtctggcaagtcgcttgggcgcacccaaagtttggttcacttctcgcttcatgttcctatgatgggcaaattatattatgggaaagaaggtaaccaaaaccaatggacacaagctcatgtcttcacaagaccacaaagtatctgtcaactctatcgcntgggctcctcatgaacttggactccccttaaccttgcggagcatcctgatggga

SEQ ID NO: 3512 - DNA, 420 bp, Arabidopsis thaliana
  Clone ID: LIB22-088-Q1-E1-D12
caaataaacattaaacccaaatgatatattttggtagatcaatcgacaatcattatacaacaatgatgacaaaaacattggagattgatttgagatcagcagaagggcttaagctaaaccggagacccatcaagaaaaagactttcgccgtcgtaaaaatcgacgagaaatgtcgaaaatctaatcttgacgaatcgagaagaagcaatcctacatggaactataaatcagagatgcccatcaatggtaatgaacagtttatcttcattgaggtattttatcgaacaggttctgggcatgataaaaaaatcggagaagctaaaatcccaacgaatgatttcatgggaaggtattcacctgaaggtcacttaaacttcttgagctatagattgagagatgagtttggtgataagtgtggga

SEQ ID NO: 3513 - DNA, 484 bp, Arabidopsis thaliana
  unsure at all n locations
  Clone ID: LIB22-088-Q1-E1-D2
taccggnccaaagattcccgaatcgacccacgcctccgnnggacgcgtgggtgttggtataccaattcttacgtcaacgtcaatgaagaaacgactccatatttacgaataaaaaactgtagtagatctgtactctccctttttctttgtagagaagaagagaactgtgaaagaagatgaagattgaggaggatctaggtttcatcaacatactcaaacgagcaacaaagcttctatgtggtaacatcaatcttgttctcttcctcttcctttgctctctccccctcttttgtttcttgatcttcttcgagctttcactccaaaccactgtctcactcgcttctcaatanctcgttccgacaactcactaattgggattacnactacgttcctcaaagatgcntccgtcttggagaaatccggattccaatggcntatccagacatttctacnctacntggttcccgttanggggctcatagac

SEQ ID NO: 3514 - DNA, 500 bp, Arabidopsis thaliana
  unsure at all n locations
  Clone ID: LIB22-088-Q1-E1-D3
ttctacgcctgncctttaccgggcccaaaaattcccggatcgacccacgcgtccgnaacgancgaccagccatggacattggnggtccaaccaatatccgccacgtggctcacgttaccttcgatcgcttcgatggcttcctcggccttccctctganttcgagcctgatgtccccanaaaagctcccaatgcaagtgcaacggtgtttggggtatcgacagagtcaatgcacttatcatacgactcgagagggaactgtgttcctgtgatactgttgctattgcaanagccngctttaagatcaaagaggcttgcaagcaanaangattattcagaatcactgggagaaaaaaaccnanggaanaattttttaagggaacagcttaataanagggatnatacctgatggggattgatgtccantgtttaaccgggtcctaataaaggcttggttcaaagaanctgcccnagaagggtactggattctcctgccatccgn

SEQ ID NO: 3515 - DNA, 427 bp, Arabidopsis thaliana
  unsure at all n locations
  Clone ID: LIB22-088-Q1-E1-D5
atctgaacaaagttgggttttttattggtacccagaatctcaattctccttctttccttctgggtanaggaaaagtctcgcctttttttatatttatccaatcgcnccngttcattgattccccantaggattgtagtttttggttattgggaaaattgagtaaaggaggagatgggttgtttctcgtgttttgattcnagtgatgacgagaagctgaatccagttgatgaatctaatcatggtcaagaagaancaatcacaaccgacagtatccaataacatatcnggactcncttcangtgggganaagcttagctcanagaccaatggngggattaaaaagggagctactgcttccangggatggacntggacaaattgcngctcatacatttgctttccgcaagcttgctgcngcaactatga

SEQ ID NO: 3516 - DNA, 426 bp, Arabidopsis thaliana
  unsure at all n locations
  Clone ID: LIB22-088-Q1-E1-D7
cttagcaaaattcttctgaatgaataatcggcgattatgtcnttgaaaaacgatgcgagtagtagccacgacggtggaagcaacagagaaagcgtaatcnatgatcatggccgccgtaaaagcacttgcggctactgtaaatccccagctcggtccantatctctcacggtttatnagcacagactcttaccgtttatgactaccaagctcttattgaccgatgctggagaagatctggtacttatctttacaaacatgagatggataaaacgtgttgccctccttatacgatacgtttgaaagcaagtgattttgttcctactaaagagcacnancgagtttctagaaaactagaaaggttcttggatggcaaactaaatgtgcagcccagggaacaaananggtgcttcttctccgggngatgt

SEQ ID NO: 3517 - DNA, 479 bp, Arabidopsis thaliana
  unsure at all n locations
  Clone ID: LIB22-088-Q1-E1-D9
cttttacccgnccggtaccgctcaaagaattcccnggncgacccacgcgtccggtttttgtttcttcttctttcaaaatctcaagcaaaagaaaaaatggagctattcacaaaaggtaacaacgttaagttacgtagccacctagataagtttttagtcgccgacgatgaccaagaaaccatccgtcaaagccgtaaaggagatgcacggcgtgccgtttggacggtggagcccgtcgtcgataaacctaatctgataaggttaaagagcagccacggcacgtacttaacggcgagcaacaaaccgttattgttaggtatgaccggtgagaaagtgactcaaacggcgtcgtttaacaagctgatggattggcaaacgcagtgggaaccggagcgagatgggtttcaggtgaaagctaaaatccttgggtgcggtaagttggatgaaggctaacggtggnaacccgccgttggaaaaac

SEQ ID NO: 3518 - DNA, 421 bp, Arabidopsis thaliana
  unsure at all n locations
  Clone ID: LIB22-088-Q1-E1-E10
tgacatctccgtgcaatcgggagagaactttttttgtgttggtggtggttggctttcgtacatgcaggatcagtatataaatcacattatgaatgaaacaggagcaactgttgtattaagagggcgtggttcaggaagccttgagaatcaacatggagatgaagcacagctaccgctgcatctattattatccggcagcaacccaaagagcatcgacgatgcaaaacgtttagctgagaatcttatggatacaatcagtgtagaatttggggcttcaagggtttcctcaagcaaggtgtatggtgcagtaccaccaccacagcaactgatttctggagctccgggttctgaccaggagaaccaaaatttgatttcaacgtatggtttgatgacatcnatanccatcacaagcaacaacata

SEQ ID NO: 3519 - DNA, 436 bp, Arabidopsis thaliana
  unsure at all n locations
  Clone ID: LIB22-088-Q1-E1-E2
cactttcatctccaccaccaccatggatgatctctccaagcttctcttcttcctcctcctcactatctccattaccaccgcattacccgataaacccgggtcgggtcaaataaactcaaactccgtcctcgttgctcttcttgantcacactacacagaactagcagagctcgtcgaaaaagctcttcttctccaaaccttagaagaagctgttggtcaacacaacatcacaatctttgctcctcgtaacgatgccttagaaaaaaatcntgatcctgaattcaaatctttcttactccaaccgaaaaaactcaaatcattacaatctttattaatgttcacattcttccaaaaagaatcacttctccacaattctcctccgcggtcgttaagcaaccgttatctctcnaacgacnactccatttcaccaaangga

SEQ ID NO: 3520 - DNA, 490 bp, Arabidopsis thaliana
  unsure at all n locations
  Clone ID: LIB22-088-Q1-E1-B3
aacgttacccgcctttacccgccaanattcgcggaacgacccacgcgnccgagtgcagcacagagaagcctgccactcgatattgacctttctaaccgacatttttgacctcgagaagtctgtgaatgaagaacagttcgtacggatcagggacaatatcattattcctcggggagctacaatcaccagaatattgatngcctcattagctggggcacttcccagttctcggctagatacggtaacatattcgctgctagctctgacaagaacatacaggttacaagcagtgagttgggctaaggaaagtgtaagcctgatacctcgaacagccttgacaganaccgaatctaccaagttcttacaagcattgtccgatattgcttatggagcaaatgtgaattctctgataggacangttgaggagctctcanatgtttgtccgacgtaaccgtactgttcaagaaccttgttcaagnaagctttgaaa

SEQ ID NO: 3521 - DNA, 423 bp, Arabidopsis thaliana
  Clone ID: LIB22-086-Q1-E1-H8
gcacccggttcataagaagcaagctttctgttatgggtttgttgcgttattctaactctcgcgtcccagcttctggtgatcctcccgctcttccacctggagagcttgtttggtccatgagacaagctagaaccttcagatggaacttaacagcaaatgcagctagaccaaaccctcaaggatctttccactatggaatgatcagtccaacaaagacatttgtcttctcaaattcagctcctttgattaatgggaagcaaagatatgcagtcaatggagtctcttatgtgaaatcagagacgcctcttaaactcgctgatcactttggcatctcaggagttttcaagcaccaatgccattcaaagcgtcccatcaaactctccgccaaacagttgcaacatcagttgttcaaacatctcacca

SEQ ID NO: 3522 - DNA, 220 bp, Arabidopsis thaliana
  unsure at all n locations
  Clone ID: LIB22-087-Q1-E1-A1
ngtaccggtcacaaattcccgggccgacccacgcgtccnggtgtgtgtctgtgtggaaagtgtcttgttgttgtgataaaaccatttttaaaaggttatatatattccaatggtatgcgatgtagtagtaacatataaacttttgtcatggtttggtttcagacattactttatagagtgaaaatgtattgtatgtttttattaaaaaaaaaaaaaaagg

SEQ ID NO: 3523 - DNA, 421 bp, Arabidopsis thaliana
  unsure at all n locations
  Clone ID: LIB22-087-Q1-E1-A12
aaacaaagatggttttgacaaaaaccgcaacgaatgatgaatctgtctgcaccatgttcggatctcgctatgttcgcactacacttcccaagtatgagattggtgagaattcgataccgaangacgctgcgtatcagatcataaaagatgagctgatgcttgatggtaacccaaggcttaacctagcttcttttgtgactacatggatggaaccagagtgtgacaaactcatcatggantctatcaatangaactacgttgatatggatgagtaccctgtcacaactgagctccagaaccgatgtgtanacattatatctcgactgttcantgcgccactcgatgnatctgatacngcngtnggagtangggacagttggntccntcanaagncatcaggttagccggntttggcttcaag

SEQ ID NO: 3524 - DNA, 464 bp, Arabidopsis thaliana
  unsure at all n locations
  Clone ID: LIB22-087-Q1-E1-A6
cgccgcncaggaaacggtcaagaantcccgggncgacccacgcgtccncccacgcgtccggttatagggccgtgcttcttgatgctcagaaacaaactgagccatttgtatattattgtggtgtttttcttgtccccaagactcgtgctcatgagtggctgttctgttcagaagaaggacagtggcaggttgtcgagagttctcaggccgctcgtctcataatggtttttctcgacagtagccatagtggagccaccatggaggatatccagaatgatttatctccaatggtgacacaactagctcccagaaatgatgatgaagctcgcattccgtatatgatggcaagtgatgggataaaaaagcgtgatactgtccacgaggttacatctcctatgactgggaaagtggttgttgaagatgtggtttatgaaagcgctcctagtaatttagaagacttgtct

SEQ ID NO: 3525 - DNA, 519 bp, Arabidopsis thaliana
  unsure at all n locations
  Clone ID: LIB22-087-Q1-E1-A9
tnactgtctccctggtcgtacaagtccganattcccnggtcgacccacgcgtccgctcattctcccctctctctctacttctagtttttttttttgtgtgatgatgaacaaagacatgttacttcaccagcatcagcaaccacaacaagacgagaatatgtcgaatctaacatcagcttccggggatcaagcaagtgtctcttcaggaaatataactgaagcaagtggttctaattacttccctnnnnnnnnnnnnnnnnnnnnnnnnnnnnnnnnnnngttagttgttccagattcgcagactcaaaagaagaggagaaaccaaccagggaatccagacccagaatcagaagtgatagctctatcaccaaaaacactaatggcaacaaacaagattcgtgtgtgaaatctgcaacaaaggttttcaaaagaagaccagaatctacagcttcatangaaagaaggtcacaatctgccatgggaagctgaaacaaagattcaacaaagaantggttaggg

SEQ ID NO: 3526 - DNA, 506 bp, Arabidopsis thaliana
  unsure at all n locations
  Clone ID: LIB22-087-Q1-E1-B11
ctgccctacaatccganatcccnggtcgacccacgcgtccggaaacagcaaatctgaggttttagaaaatgggatcttcttctgggcaaagtggatacgatctgtcttttaagatcttgttgattggtgattctggtgttggtaaaagcagtttgcttgtcagcttcatttctagctccgttgaagatcttgctcctactattggtgttgatttcaagatcaaacaattgacagtaggaggcaaaaggctaaaactcacaatctgggacacagctggacaggaacggtttagaacactgacaagctcttactacagaggcgcccaaggaatcattctccgtttatgatgtgacgagaagggagacatttacaaacttantagatgtgtggggtaaggagattgagctttactccacaaaccaaagaatgtgttaaggatgctcntttgggaacaaagtccgataagagaatctgaaanaagganttagcaagagaaagaaagggat

SEQ ID NO: 3527 - DNA, 463 bp, Arabidopsis thaliana
  unsure at all n locations
  Clone ID: LIB22-087-Q1-E1-B3
tgtacgcctcaagaattccanggncgacccacncgtccgcccacgcgtccgctattttttattcagacgaacctagacaccattccaatggatgagcaggtccaagaacctctttctgatcaggtgtttatcaacttccgaggagatgagctgcgcgaaatctttgtcaaccatctagagctgcaattaagaaacgcagggatcaacgtcttcatagacactaaagagcagaaagggagaagactacaatatctcttcacaaggatcaagaagtcaaaaatcgcgcttgctatcttctccaagaggtactgtgagtcaaagtggtgtttggatgagcttgtgacgatgaatgaacagatgaaggaaaagaaactcgtggtgattccaatcttctataacgtaagatcggacgatgtaaaaagagcagccaatccccgatggagaangcaatcttgatggagag

SEQ ID NO: 3528 - DNA, 468 bp, Arabidopsis thaliana
  unsure at all n locations
  Clone ID: LIB22-087-Q1-E1-B4
ccgntcggtacgcctcaagaattccanggncgacccacncgtccncagaagctggggagcgaagttgctggacgaaaaaagactttgtttaggagtcaaagtgctcaaagtcgttcatttagagtccctcagagtgaaaaagaggatgagtcacttgagggagttaatataaaccgattaaagaagagcgttgcttcatttcaagaagataagtatccacctggaaagaagttttgctcagatgcatctcctcgtggaactagcatgagaaagttttccccaccttttgtaccaaatgcctggagacgactatctatgcctgtggagctaaagaaagctcggttggatttctctgaggaaaaagatgatgaagaaacagggaaatgggaatctgaaatgactcatgaacgtgagctgcgagatgatgattatgtttctggtgatgatggggaaaataatgaggtctta

SEQ ID NO: 3529 - DNA, 441 bp, Arabidopsis thaliana
  unsure at all n locations
  Clone ID: LIB22-087-Q1-E1-B7
anttcccgggccgacccacgcgtcnngagggaagaagatctcgttccctctaagccatgaatcgtcgtaatcgtggctcttcttcttcttcttctagggtttcgaatacttatgggaaccgccagttctctgataacccgaggactggatccggcggcggagttaatgaatcctttcagagaagatccgatgcaccgcacaaacgaaacaatgaaaaagacgaatcaaaacataaagacgaagatcctgctgacgtttcattgattgtaggaacttgttcttctangtgcccagttcttaggtcaattaggtactttcccttcancaattcatgatccttccgtgcatcggcagttcagaacaaagaattatcttttgctaggggtttagagagggaaagagtcacaagagaacgcctgcgtgatcttgcagtgtttgaga

SEQ ID NO: 3530 - DNA, 443 bp, Arabidopsis thaliana
  unsure at all n locations
  Clone ID: LIB22-087-Q1-E1-B8
tcccgggcccgacccacgcgtcaaagctgcttcacattgcctcacaagatcagccacacatcgtcccaatataagacaaatactgaggctactaagagatgaaaacgaagccgggaaatggattatggaagangaaggaaatgaagattgcttcgatgacgaggtttacccgaattccagcacagaattacacttaaaccttgcgatgcttgaggtggaagacgatgaaactgcatcaatcagcagcatggagagaagtaacancagccttttttcttctacttgttcatctagggagcttcaaacataaggaattatgcttttagctaatagagaggttangtacttangttanaggtttgtttcttagtgtatggagtttacttgatnactttatgtnggacctgagctccctgctgttatctggaccangaaaattcatt

SEQ ID NO: 3531 - DNA, 520 bp, Arabidopsis thaliana
  unsure at all n locations
  Clone ID: LIB22-087-Q1-E1-B9
tcgtgtctccctggntcctacaagtccgnnnatcccnggtcgacccacgcgnccgnnnnnnnnnnnnnnnnnnnnnnnnnnnnnnnnnnnnnnnnnnnnnnnnnnnnnnnnnnnnnnnnnnnnnnnnnnnnnctttctccactccaagcctgagcgagaccgaagagtctttcaacagntacgaggaaaattacccgnnnnnnnnnnnnnnnnnnnnnnnnnnnnnnnnnnnnnnnnnnnnnnnnnnnnnnnnnnnnnnnnnnnnnnnnnnnnnnnnnnnnnnnnnnnnnnnnnnnnnnnnnnnnnnnnnnnnnnnnnnnnnnnnnnnnnnnnnnnnnnnnnnnnnnnnnnnnnnnnnnnnnnnnnnnnnnnnnnnnnnngttaanggaagagtctttcccccgagaacaatgangacaacagagaaaaaangtcctacaactcctancgncntacggggacagaattngancgttgaaaccancggtncaagaggttcaagcccaaccttggngagaac

SEQ ID NO: 3532 - DNA, 470 bp, Arabidopsis thaliana
  unsure at all n locations
  Clone ID: LIB22-087-Q1-E1-C10
acgcgtccgaanaaaaaaaaaagatccaaattacaaccatgccttcggagttaacaccagaagaacgatcggaactaaaaaactcaatcgccgagttccacacataccaactcgatccaggaagctgttcatcactccacgcgcaacgaatccangcgcctccggaactcgtctggtcaatcgtacgacgattcgacaaaccacaaacatacaaacacttcatcaaatcctgctccgtcgaacaaaacttcgagatgcgcgtcggatgcacgcgcgacgtgatcgtcatcagtggattaccggcgaacacatcaacggaaagactcgatatactcgacgacgaacggagagttaccgggattcagtatcatccggagggcgaaacataggctgacganttacaaatcccgtttacgacggtgcatccggttcgagaaaagagaatcgggttctgggacgggtggnttttg

SEQ ID NO: 3533 - DNA, 462 bp, Arabidopsis thaliana
  unsure at all n locations
  Clone ID: LIB22-087-Q1-E1-C3
gtacgcctcaagaattccanggncgacccacncgtccgctgcgttnaactatgctgcaactgantacaantttgatgagcatgctcctccaatggctaagaaagtggtgantcaagcacatgtattgatctacaaggcgacagagaaagctcaaagctttgtgaaagaggctcgtaccggtggtcccaaagctgcgtttaactatgctgcaactgagtacaagtttttcgttgtgaccaactcggttaaagtctgggcnaaacttaaccagtataaaccaatccatgcaatgggtgacaaagctttgcctgtggctgcacacttttccaagtcggtacaacnatttggtgactgatatnactaatatgggttactctttggttggntatcttccgttggttcctgttgatgacattgttaaggcttatgaaaacgananatgcaaggagaaagaaaaggagg

SEQ ID NO: 3534 - DNA, 476 bp, Arabidopsis thaliana
  unsure at all n locations
  Clone ID: LIB22-087-Q1-E1-C4
nggaaactccaccgcacggtagcctcacaaattccangggccgacccacccgtcnntctctctgctcttcctctgtctacattaatgtaattttgatcatcggattgggtgaaagaaacatcaaactcctaaaagagaagcctttaaagtttttttttaatcaaaaacaaaaggaagaaaattttcctttttgttttagatggcatgaatcatcatcatcgctttgctttcttgattctctatttcgtttgatgggatttgtttttctgggaatttattcattcacctgctgccatggctaaattatctttcaaggattctcttaaagctcttgaagccgatattcaacacgctaatacactagctttagattatcctcgggagaaggatggagcgcgcgttcagatgagattatcatacagcccgactgctcaattttttctttttcntgtacaatggactgattgtaagcttgc

SEQ ID NO: 3535 - DNA, 440 bp, Arabidopsis thaliana
  unsure at all n locations
  Clone ID: LIB22-086-Q1-E1-H7
acgcgtccncccacgcgtccgcccacgcgtccgctttcttcaaataaattcaatgggtcgcttccgtctcatatctgccataactctactcaaattagggttgtgaaacttgcggtgaactacttcgccggaaacttcacttccgggtttgggaaatgtgtcttgcttgagcatctctgtcttggtatgaacgatcttactggtaacatccctgaggatttgtttcatctcaaaagattgaatcttttagggattcaagagaatcgtctctctggttcgttgagtcgtgagattaggaatctctcaagtcttgttcgtcttgatgtttcttggaatttgttttccggtgaaatccctgatgtgttcgacgaattgcctcagttaaagtttttcctaaggcagnccnatgggnttcnattggggggaatnccaaaatccgt

SEQ ID NO: 3536 - DNA, 514 bp, Arabidopsis thaliana
  unsure at all n locations
  Clone ID: LIB22-086-Q1-E1-F11
ctgtttccctgtccctaccgctccggaaatcccgangtcgacccacgcgtccgagcaactttggcccttggtgatcttttccagaatgaagctcttgctagaagcaccgatgcagcttctgcttgccgtgctttagtcaatgtccttgaagaacaacccacagaagaaatgaaagtagttgctatatgtgctctgcaaaatctcgtcatgtatagccgatctaacaaaagagcagttgccgaggcaggtggtgtgcaggtcgtcttggatctgatcagttccagtgatcctgaaacgtctgttcaggctgcaatgttcgtaaaactactcttctctaatcacaccgttcaagagtacgcatctagcgaaaccgtcaagagcaataactggctgccattgagaaagacttatgggccactggaaaccgtgaatgatgaatacctaaaaanccttaaactcctttgttnaacaacttcccgcgtctaagactacaaangcctggaacactaagttt

SEQ ID NO: 3537 - DNA, 466 bp, Arabidopsis thaliana
  unsure at all n locations
  Clone ID: LIB22-086-Q1-E1-F3
cgttacctncccggtgccggtcanagaattaacgggncgacccacgcgtccnggaatntgactcgtgtagatgagaatcggcggcgtcgaggttacgaaatttgcgtcggagatgatgtcgtcgtcgtcttcgtcggcggtggagatgttgaatctcaaagaagcttcgaattggtggtcagacgtaaacgaatctccgatttggcaggatcgtatcttccatgttctcgctgttctctacggaatcgtttccctcgttgctgtgattcaacttgtgagaatacaattgagagttcctgaatatggttggacgacgcaaaaggtctttcactttctcaatttcgttgttaatggagttcgtgctgtggtgtttgtcttcaggcgaaatgttcagtttatgcaaccagagattctgcaacatancctngcctnganaatccaaatncttgctttcctcaacaacctn

SEQ ID NO: 3538 - DNA, 481 bp, Arabidopsis thaliana
  unsure at all n locations
  Clone ID: LIB22-086-Q1-E1-F6
aacttctccgcgntcaggtaanggtcanagaattcccgggccgacccacgcgtcngcccacgcgtccggaagagagaagaagaagaagaatgaagctaacacataannnnnnnnnnnnnnnnnnnnnnnnnnnnnnnnnnnnnnnnnnnnnnnnnnnnnnnnnnnnnnnnnnnnnnnnnnnnnatgtggtgtacttcggagctcactctcatgtcggagagataacagaagatgccatggatcgagtcaaagaaactcactacgactttcttggttccttcactggaagccgtgagagagccacagacgccattttctactcatacacaaagcacatcaacggattcgctgctcatctagaccacgaccttgcttatgaaatctccaaacaccctgaagttgtgtctgtcttcccaaacaaagctttaaagcttcacacgactcgatcatgggactttttgggtttgggacataactctta

SEQ ID NO: 3539 - DNA, 472 bp, Arabidopsis thaliana
  unsure at all n locations
  Clone ID: LIB22-086-Q1-E1-F7
aacttttccgccgcncggtaacggtcanagaattcccgggncgacccacgcgtccgcttcaattcgtaaatgtcttggcctttgtcgttttcaaacttcaacatcagcatcacgtgattggctaatacaaataaaattttctctttattttattattttgccacaagccgtgaaaagatggagaaaatgaatgtccgttttatgattgtgttgatggtaatgtctctggttctgggtttttcgtcggcagttgatttcagatggaggaaaactgcaggattctcagatagattcaccagagctgtttcttcagtcgtgttcccagttcatggcaacgtttatcctcttgggtactataatgtaaccatcaacataggacaaccaccaagaccttattatcttgatcttgatactggtaatgatctcacttggcccaatgtgangcnccctggggtccgtgncttgaaggccc

SEQ ID NO: 3540 - DNA, 474 bp, Arabidopsis thaliana
  unsure at all n locations
  Clone ID: LIB22-086-Q1-E1-G3
ggtcanagaattaacgggtcgacccacgcgtccnattttatcaatggcgactcctaacgaagtatctgcactttggttcatcgagaaacatctactcgacgaggcttctcctgtggctacagatccatggatgaagcacgaatcatcatcagcaacagaatctagctctgactcttgttctatcatcttcggatcatcgtcctcttctttcgccccaattgatttctctgaatccgtatgcaaacctgaaatcatcgatctcgatactcccagatctatggaatttctatcgattccatttgaatttgactcagaagtttctgtttctgatttcgattttaaaccttctaatcaaaatcaaaatcagtttgaaccggagcttaaatctcaaattcgtaaaacgccaatggaagaattcgccttccaagctnaaacaagagtgggntcaaattcgcaagcttgaaaacnaccaaa

SEQ ID NO: 3541 - DNA, 433 bp, Arabidopsis thaliana
  unsure at all n locations
  Clone ID: LIB22-086-Q1-E1-G5
aattcccgggncgacccacgcgtccgcttttgggtccctaaaaaagctccttcgtttatcttgttttctaagttatctttttgtatgagtttcaaagcttatcattatctcactcttcttccatagctatgactactttaacgaagattcaagtgtacccacaagtcttggagcaccgtctcttcttcagagatccgatacgggtcgggtcaagattgacttgtagagaacgtagtaatagggtttatgtgcatcggtgtgagaaaaaagttgaaagaaagagaaaagttgagaaatttaagggaaatgggtcgtgggattctttgaaatctgggtttttagggtttagtaaattagggttcttgtctaaagatgagtataatcaagaaagttgaaaacntggagaagggtttcccctccggntgccggtcaa

SEQ ID NO: 3542 - DNA, 434 bp, Arabidopsis thaliana
  Clone ID: LIB22-086-Q1-E1-G6
acgcgtcaggaaataatggagaagctgtcatcagctgctgtagttcctcagctcctccgcaacatcatcgtcgccgtcgttgttttcgctgatgaatctctccttcaaatctccgggaattcaaagctcctcgagaaactccgtgtatttctcgtcacgtgtttcctcttcttcttacgctctcttccttcaatcgtctctttcgcaaaccctaattcgtcagtcgtctctttcgccaacccttattcatcgaagacgaagaagaagaataagatactggtgatcaaccattgcgaagaatcgggaatcggtcgagcaatttgggcagttattgtcagcgatgaatgaaattccggtgagttctaagaaagtaccaagtggttcgatcgttggcggagagactaatcaacgataatcaaggagaaaactcagtc

SEQ ID NO: 3543 - DNA, 462 bp, Arabidopsis thaliana
  unsure at all n locations
  Clone ID: LIB22-086-Q1-E1-H10
acgcgtccgccaaactgcatcttggtcccattctcttggcgtttgctttgcatgggacaatggtggtgattgtgcttcacttaccaataaaaacaatcagtctcatcagccagtcctttttccctctccaatttggggtgtacgaggatgagtttgtgtttggcttacttgttgcttatatgtgcctagtaatattcggtccccggtggttagccaatttaattagaccatccatcagacccatagttcacaagtgggttatcactatcagttctttgctcaagttgagtgatttcttgcttggagagccccgaaaacaccgtgcaaatcataatatgagacttcggtgtctagtatttggcataactgaangctctaaggtcaatttgcatggatctcaaagcgataccacctgtgaaaaaggatacaaaactaacaaaagagaataaaaagggttatggt

SEQ ID NO: 3544 - DNA, 440 bp, Arabidopsis thaliana
  unsure at all n locations
  Clone ID: LIB22-086-Q1-E1-H12
acgcnnccnaagatctcaaaaatattcctactacacatgggttctcttgacttgccttacgcttcatcgttcaagggaggaagtgaaacctttctccanaatgtatttgaaagtatactgaaaacgtatttgaggaanaacccgatggcgaagacgatatgggaactagttaactcggtggacaacgaaaagatctcttacgaccacttctttttcangacatttaaggtcgatggttatggaattgattccctggcgagttttttcatggattatggatataaagttggaggcagacttgattttccangagaagaaagtanaagttctctgggctttctcctccgggatgttcacttccccggataatggttaccngtattggcaatggcncttttgccanngactttgttaganncngaggcttcntgtggagggaa

SEQ ID NO: 3545 - DNA, 487 bp, Arabidopsis thaliana
  unsure at all n locations
  Clone ID: LIB22-086-Q1-E1-H3
ttacgctgnccggtaccggtcanaaattaacgggtcgacccacgcgtccncttcttcaccaccacacacagccacaatcttttgaattttcctcctcatcatcgtctctctccgatccatggcctttaacaatttcacccgcctcgatgctcactccgccgccgagaaagccgtctctgtaatcggattaggttacgatctctgctccgatgttcgtttctccgcttgtaaaaccacacccgacggttccaggttagtcgaaatcgacccgactcggaaccgtgacttaatcttccccggtggtatcgtcgttaacaacgtctcgagctcgattaagtgcgataaaggcgaacgtactcgattacgctccgatatactctcttttaatcaagatgtcggagaagtttaatcaagatatgtgtccctccggggaagatccggtcaggganngttaannantaagtttggggttaagtaaaatgttggg

SEQ ID NO: 3546 - DNA, 429 bp, Arabidopsis thaliana
  unsure at all n locations
  Clone ID: LIB22-086-Q1-E1-H4
gcanagaaactttgcaatttgcaacacattcattaacccaatctcttctttagctcaaacatatctacacaagaagataagaagcttaagattctctccacaaaacaaaaatagttatcagattcacaaacaaagccatcaaatttcatcattgatttgttcaataagaaatgggaagcaaatggcgaaaagcaaaggtggctttaggtctcaatttatgtctctacgttcccaaaacgcttgaagattcttctcctccaagaagatccgacgacgccgtttcactttctccggttattgttcaaagaccatcaacgccgactccttcctcctctggtctccgattacctcgttccatgagcaaatcctcatcaaagaaaacttgtgcgatatgtttgacggcgatgaaagctggggcaagggcacgcc

SEQ ID NO: 3547 - DNA, 402 bp, Arabidopsis thaliana
  unsure at all n locations
  Clone ID: LIB22-086-Q1-E1-H5
acgcgtccgcaacaattcacacaatttctcgtttttttttgtttatcatcaaaagttttaatctaaattacgtatcaaattccgagcaagatgactattcttgttgaacattttgttcctgattcaagagtggatgaaaagaaagtgatagaggaganggataatgaattggtgttggntggaggttttgnggttccaaaatcnaaggaaactgatgcantcnatgctcctganatgaatttcctgggccantccttcaaggantatgagaatggtgaaagccagagacaacaaggtgttgangaantttacagggtgcacaccacatccaccagccctangactttgngaagaatatgaggaaagagtatggaaaccttaacaggatggaaatgngtatgg

SEQ ID NO: 3548 - DNA, 504 bp, Arabidopsis thaliana
  unsure at all n locations
  Clone ID: LIB22-086-Q1-E1-F10
aactgtttccctgttccgtacngccccggaattcccgangtcgacccacgcgtccgcccacgcgtcngctcatcttctcttccattcaaatctcacattccctcttcacaacaacagcttcgtattcgctcatcttcttcgctttctgatcttggaaatcgcaggcattgttcgtctactcgaggatttcaattttggtcatnnnnnnnnnnnnnnnnnnnnnnnnnnnnnnnnnnnnnnnnnnnnnnnnnnnnnnnnnnnnnnnnnnnnnnnnnnnnaccggcggttcgtatttccgacgggaatctaatcatcaaaaaccggacgattctaaccggtgtaccagataatgtcatcacgacgtcagcatcggaagctggaccggtagaaggagtcttcgtcggagctgtatttaacaaggaagagagtaacacatcgtaccgattgggtacgcttcgcaattcccggttaagtctggtttccggttaaactctggtggatggc

SEQ ID NO: 3549 - DNA, 422 bp, Arabidopsis thaliana
  unsure at all n locations
  Clone ID: LIB22-086-Q1-E1-C7
agntgcccgccgcccggtaaaggtcanagaattcccgggccgacccangcgtcnanctcagtttttggtcgaagttggtgaagtcgccgccgggacaactcaggttgttacagatgataaacatgcgagataatccaacaatgcatgtcttacaagcttcaaagtttctatttttagctcttattttgatccagttgctgtctactcaactctttgctcaaagatctaaaagtccatggcaaacactcactggagatgctccccttgtcattgctcgtggtgggttttctgggttgttgccagattcaagtctcgatgcttacagttttgtatcgcagactagtgttcctggtgctgttctttggtgtgatgtgcaactaacgaaagatgcaattggactttgcttccctgatgtgaanatg

SEQ ID NO: 3550 - DNA, 497 bp, Arabidopsis thaliana
  unsure at all n locations
  Clone ID: LIB22-086-Q1-E1-D1
cttttacgctnccccgtgccggtcaagaattaacgggncgacncncgcgtccntcggtttctccgactctttccccttgaacctagcttaacagagaaaatcaaagagagaggaaaaatgagtggaggtggtggagaaatggaagagagactgttaaatgggtcagagacagaacaaaggagagagagtctctacttgagaaaaaagatttggagtgaagtaaggaagatgtggagaatagctttaccatcaactttgttcagagttatgtcgtttggatgcgtagtggtggctcaagccttcattggccactccagtgaaacgggtctcgctgcttatgctctccttcaaagcactttcattcgcttcatctacggtattatggcaagtatgtcaaatncgacananaccttatgtnggacnaacctacnggngcaagaacaattccccaagaatgggggaaaaaccttanaaangttccttggganaattaaaaa

SEQ ID NO: 3551 - DNA, 452 bp, Arabidopsis thaliana
  unsure at all n locations
  Clone ID: LIB22-086-Q1-E1-D12
acgcgtccgctcaaaatcaaaaagcacgtcggtgacttgtactcttcaatctcttcttcctctctttcacatctccttctctcgaacccatcgacctgcgctaattcatcatcgaccttgctcaaattcatcaacnatgtcttacgattatctcttcaagtacataatcatcggagacacaggtgtgggaaaatcgtgtctgcttctgcaatttactgataagaggttccaaccagtccacgatctcaccattggtgttgagttcggtgctcggatggtcaccgtcgatggacgccccatcaaactccaaatttggggacaccgctgganaagnatcttttagattcatcaccaagatnatactacagaggagcanccnggagtttactggntttatgacatcannaagaagagagacgtttaancatctgggcaagctggtttgganggat

SEQ ID NO: 3552 - DNA, 483 bp, Arabidopsis thaliana
  unsure at all n locations
  Clone ID: LIB22-086-Q1-E1-D2
tacgtgncggtgccggtcanagaattaacgggncganccacgcgtccnccaagctaaaaatctcatagatcagagtcgtcgtcgtcaacttcatcatcacaaaaatctcagctttgnnnnnnnnnnnnnnnnnnnnnnnnnnnnnnnnnnnnnnnnnnnnnnnnnnnnnnnnnnnnnnnnnnnnnnnnnnnnnnnnnnnnnnnnnnnnnnnnnnnnnnnnnccgttactcttgacaccatcaaccccaaggttatcaaatgtgagtatgctgtccgtggagaaattgtcaacattgctcagaaattgcaagaagatttgaagactaacaaggacgcttatccctttgatgagattatctactgtaatatcgggaatcctcaatctcttggtcaacagcctataacattcttcagagaagttccttgctttaagttcctaaacaagcctggttgggatgaaaagtgcaacacacggtttggttc

SEQ ID NO: 3553 - DNA, 487 bp, Arabidopsis thaliana
  unsure at all n locations
  Clone ID: LIB22-086-Q1-E1-D4
aactttaccttcccggtgccggtcaagaattaacgggtcgacccacgcgtccgaaagagagagaagagggaagacaaagggaagagggaggagagagaaggcaccaccctttggccctggagagaccaaagatggtcgaagagagacaactctgagatcatcatcatcatcctgcaaaaactaacgagaaatcgattttcaaaaatataatcaagatcgatttctagggatattttgatttctaaatcctctcaccaacattctcttgcttgccctacccgcttgctggtttcatccaagaaacataataatacattgtttgcattataaggaattcctttatacagtatcaagagatccacaagaagctgttagatcccaagagattaacactgtgatgaaaagggttttgtgaaaatcaattttcaaacctggaaaatgatgatnaaggacccttatatccgacaattttcctcttttcttcngt

SEQ ID NO: 3554 - DNA, 466 bp, Arabidopsis thaliana
  unsure at all n locations
  Clone ID: LIB22-086-Q1-E1-D7
aacttctcccgccgcncggtaanggtcanagaattcccgggccgacccacgcgtccnaatatggtatctgaaaaggaaattgatgcacctttgcagattggaattgttcgtgtctttgagcaacaaggtattgaagctcctagtgacgatgatgattttattgaggtaagatcaaaaaggcaaatgcttaatgatcgccgtgaacagagagaaaaggaaattaaagagaagtctcaggcagccaaggcattccgaaaacctcgttcaactttccagaacaatactactgcagccaggtccaacagaagcccaccagctagccgagctgcgaacaataagcagtttaatccagtctccaacagacagacgttagccccaattggcacaccttcacctaaaatagattcccatgttgatgaaaaatccgggaacaacaagtccactcaaggaaattatgnccctccca

SEQ ID NO: 3555 - DNA, 457 bp, Arabidopsis thaliana
  unsure at all n locations
  Clone ID: LIB22-086-Q1-E1-D9
acgcgtccgcanagataagcaaaccaggggagaaacagaaacctcttgagaaggatgcgggtgagaagactattgcatggctggacaggttgagaaactcaaacgggtctctacctacttcaactatcagattgaacatgcagaggattatgcagaacaacgcagctgtgttccgcacgcaagaaacattggaagaaggttgtcagttgattgacaaggcctgggaaagttttggggacgtccaggtgaaagatcggagtatgatatggaactcggatttgatagagacattggaactggagaaccttttgataaacgcatccataacaatgcattcagcaagaagcacgaaaggaaagcaagaggagcacatgctcgggaaaacttcacgaaannganaaggattggagaatgggttgaagcatacattggggatattgggaaaattgagaaattg

SEQ ID NO: 3556 - DNA, 476 bp, Arabidopsis thaliana
  unsure at all n locations
  Clone ID: LIB22-086-Q1-E1-E10
acgcgtccgcttcagtgacacaaacccaaagaaaagtagtgagaaacaaaatcgaggtaactactagatgaagacgatgacgcaattaaatattgcggttgtggttgtagtgacggttcttattggaatgttgagatcatcggaggctcaacttcaaatgaatttctacgcgaagagctgtccaaacgcagagaaaatcatttcagatcatattcaaaatcatatccacaatggtccttctcttgcagctcctctcatccgaatgcacttccatgattgcttcgttaggggatgtgacggatcggtgttgataaattcaacatctggtaacgcaagagaagaagatgcaccaccgaatcctaacacttnaaaggatccgggttccgtggaaagggtttaagggccctccttgaaaaaattgtgtcccaaagactggttccttgcgccagataacaattggctttgacctggctaaa

SEQ ID NO: 3557 - DNA, 480 bp, Arabidopsis thaliana
  unsure at all n locations
  Clone ID: LIB22-086-Q1-E1-E2
cgcttcccggtnccggtcaagaattaacgggncgacccacgcgtccncaaaaaaaaatcaaccatggtttcgaaaccgctattctccctattgcttctcacggttgcattggttgtgtttcaaaccggaacccttgtcaacgctgaagattccgagccttcgagttcaacgagaaagcctctggtgaagattgtgaaaggtaaaaaattatgcgacaaaggatgggaatgcaaaggatggtccgagtattgttgcaaccatacaatctccgatttttttgagacatatcaattcgagaatctattctctaagcgtaacagtccaagtggctcacgccgtcggcttttgggattaccgatcattcattactgcggctgccgagtaccaacctcttggtttcggtactgctggtgagaaacttcaangggatgaaggaagtcgctgcgtttcctggccacgttgggaacaaaacctcatgcn

SEQ ID NO: 3558 - DNA, 473 bp, Arabidopsis thaliana
  unsure at all n locations
  Clone ID: LIB22-086-Q1-E1-E3
gtnccggtcaaagaattaacgggncgacccacgcgtccncggacncgtggggtgttactcagtgcggtcgttgggtccttgataggatacttggtagtcctcatatgcagaccacctcctgagtttaatagattcaccattgttatgactgcttttggaaatactgggaatcttttgttagctattgttagctcggtgtgtcacacgaagacgaacccttttggaccgaattgtaactcgagaggggtttcgtatgtatcgtttgcgcaatgggttgctgtgattcttgtttatactgttgtgtatcatatgatggagccgcctttggagtactatgaggtcgttgaggaagaaggggttgagatagaggagatnaatgtggagaatcatgatgctantaagccccctccaattgaaactgaatnggcaaaggaattnanggacaanngnncagaacaattgcaagaacacct

SEQ ID NO: 3559 - DNA, 439 bp, Arabidopsis thaliana
  unsure at all n locations
  Clone ID: LIB22-086-Q1-E1-E5
acgcgtccnctttcaaaagtactatgatactgtcatgccttatctcaaaactattttgatgaatgcaactgacaagtctaagcggatgcttcgtgccaaatccatggagtgcatcagtcttgttggaatggcagttggaaaggacagattcaaggaagatgctagacaggtcatggaagtgctaatgtcattgcaaggttctcagatggaggcagacgatccaataacaagttacatgttacaggcatgggctaggctttgcaagtgtctaggtcaagatttcctcccatacatgaaggttgtgatgcctcctttgcttcagtcagctcaacttaagccagatgtaacaattacatctgctgattcagaagatgaagcanangantccgatgatgaaagcatggagaacaataaccctgggggaacaaaagaataaggg

SEQ ID NO: 3560 - DNA, 480 bp, Arabidopsis thaliana
  unsure at all n locations
  Clone ID: LIB22-086-Q1-E1-E6
aactttccgccgcncaggtaaaggtcanagaattcccgggncgacccacgcgtccnattatctccgagcattctcaagttgggtgattcggtacggattactgatttgggagagaaaaaccctagattggaattagattctgggttcttgggctaaaggtttcttcatctccttcgaatcatccttttagggagcaagacgatgagtagaaaccctttcctggatcctactcttcaagaaattcttcaagtgattaaacccacacgagcagatagggatacgaggatcacagtcattgatcagttgcgtgacgtcttacaatccgtagaatgtttaagaaggtgctactgttcaaccatttggatctttgtgtcaaatctcttcacacgatggggagacttagatatctctgttgacttattcagcggttcttccatcttgttcactggaaagaagcagaaacaaactttactcggacat

SEQ ID NO: 3561 - DNA, 429 bp, Arabidopsis thaliana
  unsure at all n locations
  Clone ID: LIB22-086-Q1-E1-C5
acgcgtccncccacgcgtccgggagactaactgtctcttttctatgtactgttgccaactacgagtatgggttttactggcacttctaccaggatgggaaaatcgaagctgaagtaaaacttactggtatcctcagtttaggagctctgcagccaggtgaaactcgaaagtacggtactactattgctcctgggttgtatgcaccagtccatcaacatttctttatcgctcgcatggatatgtctgttgactgtaaacctgctgaagcttttaatcaggtagttgaggtaaatgttagagttgacgancgaggtgagaacaatgtccacaacaatgcgttttatgcggnaagagaaattacttaaatnctgaagnaattggcgaanccttactgtggaccnccttttgggcncccattgggtttttagg

SEQ ID NO: 3562 - DNA, 486 bp, Arabidopsis thaliana
  unsure at all n locations
  Clone ID: LIB22-086-Q1-E1-F1
ntgttacgcttccagtgccggtcaagaattaacgggtcgacgcacgcgtccgctccgttccttagcttctcttccagatccaaactctcaccaaactttctcacaacacacacacaattcgattcgatccacactcttaaaatcccaaagatctctctgattttgaaattcgattcttccccagatcaacttgtgaatttttccacaattttggttcatgattttgatttcgtgaaggacttatggattcacacccttccctaatgggaaggtccattaccaattcgaaccgatcgagcttagatcttggtcgtccttcttcgtcttcttcatcttctccttcaccgttaaccaaatcgatctccgatgcaagtagtcaaagtctctcttcgattcttaacaatccacacngnngnnaatccgggngttaangggtccgaagcancctngggttggttggnggncttaatcgaaaatttgtagccc

SEQ ID NO: 3563 - DNA, 412 bp, Arabidopsis thaliana
  unsure at all n locations
  Clone ID: LIB22-085-Q1-E2-A9
aaccattcctctcctcaaaaccattaatctctcttctctctagcataacctctctcagatggcttctaactatgataagcttacttcttcgagagtagccatcatcggtgctggtgttagcggattagcagccgctaagaacttagttcatcacaacccgaccgtattcgaagcctcggattcagtcggaggtgtttggaggagctgcacttacgagacgactaaattacaatcggctcgagtcgattacgagttctccgactttccatggcccaataatagagatgacacaactttcccaccttaccttgagatattagattacttggaatcttatgccaaacattttgatcttctcaaattcaatgaagtttggctctaaagncatccgaagtaagggtcancggtgatg

SEQ ID NO: 3564 - DNA, 468 bp, Arabidopsis thaliana
  unsure at all n locations
  Clone ID: LIB22-085-Q1-E2-B10
ttttacgcttgccggtgccggtcanaaattaacgggtcgacncacgcgtccngtaaattaaagtcttctctacttcaccataaaaaatgcttgcgcacaagtctcttctctcctttaccacccaatgggctacactaatgccatctccgtctacttttctcgcctctcgcccccgtggaccggccaagatctcggccgtggcagcaccagtgaggccggctctaaaacaccaaaacaaaatccacaccatgccaccggagaaaatggagatattcaaatctttagatggatgggccaaggatcaaatcttgcctcttctcaaacccgttgaccaatgttggcaacccgcttctttcttacccgacccggccttacccttctccgagtttaccgaccaagttcgtgagctgaagggaaagaacggnctcgcctgccaagacgaatacttcgtgggtgtttgggttggag

SEQ ID NO: 3565 - DNA, 413 bp, Arabidopsis thaliana
  unsure at all n locations
  Clone ID: LIB22-085-Q1-E2-B11
cccttgnaaacgttaaatgatcttctcctccgatcattagtctctttaatctttctcagcctcttcttgttcgtgatctctcttcctccggaaaaagatgtcggccggtaacggaaatgctactaacggtgacggagggtttagtttccctaaaggaccggtgatgccgaagataacgaccggagcagcaaagagaggtagcggagtctgccacgacgatagtggtccgacggtgaatgccacaaccatcgatgagcttcattcgttacagaagaaacgttctgctcctaccacaccgatcaaccaaaacgccgccgctgcttttgccgccgtctccgaggaggagcgtcaagaagattcagcttcaatctatcagtgcatccgttaacatccttaacgagaagaatcaagga

SEQ ID NO: 3566 - DNA, 451 bp, Arabidopsis thaliana
  unsure at all n locations
  Clone ID: LIB22-085-Q1-E2-B12
agtgccggtcaagaattcacgggtcgacncacgcgtccnaaaagtttggattcctccaataaagaacatgannnnnnnnnnnnnnnnnnnnnnnnnnnnnnnnnnnnnnnnnnnnnnnnnnnnnnnnnnggcactaaacccaaatccgtcgttagcctccaccggtagcaacatcaacacaaacgacatcgtgacgcagtacagcacatacgttagaacgcgtgcaacgtaacgcgatacaaccgcctctgcgtccgaacgctatggccgtttgcaatcgtcgctcgaaacaacaccagcaagtgggctcgagctagcgtcgcggttaccataaccgacaccaaacgggtgctgaggctcttgctcaaaacgcagcgttcagcagttggcgaaagcgaagcgaatcgcgttgtccggattgccgagaactcntcgtggactctctcgaaca

SEQ ID NO: 3567 - DNA, 475 bp, Arabidopsis thaliana
  unsure at all n locations
  Clone ID: LIB22-085-Q1-E2-B4
nttctacgtggtcgggccgngtcannaatnaccgggtcganccacgcgtccgttctggtcatcgatcaagcctgctcattttggtgtaaagataacgtccaaatctctctttgggatattccgatatgttacacttggngtgtcacttggtttactttccaagttctccttcggaagatggcttcttttgaaattcccttcagttttcagccttggttggttccagaagaaaggtccaagtgaagaagaggtagaaagcgctacgtttaagatgtggttcataggtcgtgggtacagcgaatagagtctagcttcacaaggagaaacaaagcctgacttggaaatcattacaagaatttcaggacctgagattggatatataaccaccccgattacacttgttcaatgcggtttgatantcctggggccagcgcgaaaagctagtttaanggaggagtcaanacacccggcattg

SEQ ID NO: 3568 - DNA, 458 bp, Arabidopsis thaliana
  unsure at all n locations
  Clone ID: LIB22-085-Q1-E2-B8
cgacgcggnacaggtacaggtcacagaattcccgggncgacccacgcgtccnaattaagacgatggcggctgcaatggcttctcatgtttcgacggctcgatcaccggctctttccttctcttcttcgtcttcctccttcttccccggtactactcttcggagattctccgccgtttcactcccttctcctgctctccctcgccttcgtgtttcatgtcaagcctcctccgtcacttcgccttcttctccttccgatgtcaaaggaaaatctgacctgaaagactttctggcaatagatgattttgacacagccaccattaaaacgattttagacaaggcttcagaggttaaggccttgctgaaatcaggggagagaaaattatctaccttttaaagggaagtctatgtctaagatctttgcaaaaactttcaatgaaggacccgggtttcgttgana

SEQ ID NO: 3569 - DNA, 434 bp, Arabidopsis thaliana
  unsure at all n locations
  Clone ID: LIB22-085-Q1-E2-B9
tcangggccgacccacgcgtccncacagagctgacgttagcatttgtctctgaaatcccagatccgaaaacccaacaatggcgtcagagaacaacggatccagatccgattccgaatccatcaccgctcccaaagctgattccaccgtcgttgaaccgaggaagatagctctgatcaccggaatcaccggccaggacggatcatacctgacggagttccttctcggaaaaggctacgaagttcatggtctgatccgtcgatcatcgaatttcaacacccagcgaatcaaccatatctacatcgatccacacaatgtcaacaaagctctgatgaaactccactacgccgatctcaccgacgcttcctctctccgtcgttggatcgatgtgatcaaacctgacgaagtttataacctanctgctcaatctcacgtc

SEQ ID NO: 3570 - DNA, 452 bp, Arabidopsis thaliana
  unsure at all n locations
  Clone ID: LIB22-085-Q1-E2-C10
cggtaccggtcaaagaattcacgggncgacccacgcgtccncttggaggaggcatatgaagcattaaagactttggagattcttggaattgataaaaagtctgatcttagctcaaagacttgtgagaatgtggttaaagttcttcagtcgtcttcttctactcttaaggatgcattttatgcgttaaacgttaatgggattctaaaatgtaaaattggtgaagctggtcctaaggacattgtttctcaacttcaagctggtgttaaagatgcgaagctattgcttgatttctattattctgtcagaggcttggtgctggctaaggagcaatttcctggaactcatataagtcttggagatgccgaagccattttccgttccatcaagtctcttaaccagagtgatggaanatggcgcctacagctccaacaatccccgaatcaaagcacttt

SEQ ID NO: 3571 - DNA, 465 bp, Arabidopsis thaliana
  unsure at all n locations
  Clone ID: LIB22-085-Q1-E2-C4
gggcccggtcanaaataaacgggtcgacccacgcgtccnagcattttcgcttcaattcaataaaaggcgaaaaatctctcactgcactttatctcgagagctcagatctccgatctagagcctttcgcttctcctcttctgttcatataacaactgaataatgtcgatctccgcccaaaatccggatatttccggcgatagacaatccggccaagatgttcgtactcagaacgtgatggcttgtcaagctgtttctaatattgttaagacctcacttggtcccgtcggcctcgacaagatgttggtggatgatattggtgatgtgactattacaaatgatggtgctactattcttaggatgttggaggtcgagcaccctgctgctaaggttcttgtcgaagttagctgaacttcaagatanagaagtcggtgatgggactacatccgttgttaatgtagctgctg

SEQ ID NO: 3572 - DNA, 391 bp, Arabidopsis thaliana
  unsure at all n locations
  Clone ID: LIB22-085-Q1-E2-C8
anagtgagtcgtatctactgaatgcantctcagaagatggcagcctgtngacgatgccaccctgggttaacccgtggctgctcctgacaatggctgtctcatttggactccactttgtgatattgtangtcccattcttggctcaggtgtttggtattgtgccactgagcttgaacnagtggctgctagtgctggctgtgtcgctgccggtaattttgatagacgaagtgctcaagtttgtaggaaggtgcacgantggctaccgctactcatctcgcactccctcagctaagcacaaggangagtaataaaataattcannaggcattnttattacactcttanttttagctgangttaactttgttgctttactcatccntgcctaatt

SEQ ID NO: 3573 - DNA, 444 bp, Arabidopsis thaliana
  unsure at all n locations
  Clone ID: LIB22-085-Q1-E2-C9
caagaantcacgggtcgacccacgcgtccnggctgcttngagtanggcgctgtttaacaatggtatgagttgtggagcctgctttgagctaaaatgcgccaacgaccctcaatggtgtcactcaggtagtccttcgatcctcatcaccgcaaccaatttctgcccaccaaacttggctcagcctagcgacaacggaggatggtgcaacccaccacgtgaacactttgacctagccatgcctgtcttccttaagatcgctcaatatcgcgccggcattgtccccgtctcataccgcagggtgccatgtagaaagagaggaggcataaggttcacaatcaacggtcaccgttacttcaacttggttctgatnactaacgtggctggagcaagagacatcgtgagggctaattgttaaaaggatnacgggactggttgggatgaatt

SEQ ID NO: 3574 - DNA, 456 bp, Arabidopsis thaliana
  unsure at all n locations
  Clone ID: LIB22-085-Q1-E2-D1
aactttacgttcccgggccggtcaagaattaacgggtcgacccacgcgtccngcgtaaggttagcaatccttctttcattgccgcacagtcgaagtttgaggaactaacttcatctactggttcaaacaaagcaatgacgctgtcttctaaagatgatgttttgggtgaagaaggcaaaacagatatagattcaccagacactacaaacacactaaaggatcactctttggaagatgttactccagctgagcttagtggatccgagtgtggcaccgaactctctgtaacttcttctcttgacacacttgagaagaagtcagacgctgagggtgcagagcccagggtagaagctaagcttttagaggatgacacttttaaaacagaccaagcagagttgatagaaattgatgttaaagacgcaacgtcaatgggtactggttnaagaaccctaaggg

SEQ ID NO: 3575 - DNA, 430 bp, Arabidopsis thaliana
  unsure at all n locations
  Clone ID: LIB22-085-Q1-E2-D3
acacctaacanaaatcctccagccatgggcgggnagttactcaatttctctccaaaccttcatcaatcccgcggnaaccctaaatcagtaccaatttgaatcagacttcactctcaagaatcccatttttgtctctcaagtcaacattgaagccacttaaacgcctctccgtcaaagccgccgtttcccaaaactccaccaaaaccctcacgaaagaatctgcttcctctttcgaccactgtttcaagaaatcatcagatgggtttctctattgcgaaggaaccaaggttcaagatatcatggaaacagtcgagaaacgacccttttacttatatagcaaacctcaagatcacganaaaccttgaggcttataaagaagntttgggaaggattnnattcggtnatnggttacnccattaaagctaataac

SEQ ID NO: 3576 - DNA, 421 bp, Arabidopsis thaliana
  unsure at all n locations
  Clone ID: LIB22-085-Q1-E2-A8
ctttctatgggtacaangtggagggaatcagtccgcactccctgatatattccagccaaattttggtaatcaggctccaacctcaacaatgaatggttcgaaaaaagaagataccagagccttcgatttcatttctgatcatcttacatcagcccgcgacacaaagagagtatcttgatggttgcttacaaaattccgccttccagtgttaaatgctatttcatgagatgtggacacaagggtgcaggaagctaaaacattaatttatgagagctgtatanacttgaggagaaaatggagatagctttataattcatatggtaagggtttttgcttcttttatctgtttcctccgttttgtcnttggtttttcctcctccttggantccaattggtccttggaatgaacatgtagttgtan

SEQ ID NO: 3577 - DNA, 475 bp, Arabidopsis thaliana
  unsure at all n locations
  Clone ID: LIB22-085-Q1-E2-D6
taactctacgccgntcaggtacaggtcaaagaattcccgggncgacccacgcgtccggtttttttgttcatgtcttcttcttcttcttcaagaatgagctaatactcacagaagaagaagatttttctttggatttttcactactgaggcattgttgtgaaattggatggtagtagcattggaatggcagaacaaaagagtagtaacggaggaggaggaggaggagatgttgttatcaatgttccagttgaggaagcatcaaggcgttccaaggaaatggcttcaccagagtctgagaaaggagttccctttagtaaaagcccttctcctgaaatctctaagcttgttggtagtcctaacaagcctcctagagctccaaatcagaacaatgtgggtctaactcagaggaaatcttttgcaaggtcggtttactcaaaacccaagtcccggtttgttgattcatccntgtcccggt

SEQ ID NO: 3578 - DNA, 449 bp, Arabidopsis thaliana
  unsure at all n locations
  Clone ID: LIB22-085-Q1-E1-F7
acgcgtccggagaaaacttcgtctctcttctctgcttcgccctctcatttcctgtgagataaaggcggngtctctctccagttattttgctcatccatcgattcttanagttcaaaatggntgatcaagttcagcaccccactattgcgcanaaagctgccgggcagttcatgcgttcaagtgtttccaaggacgttcaagtgggttaccagaggccttctatgtatcaaagacatgcaacctacggaaactactccaatgctgcatttcaatttcctccgacatcccggatgttggcaacaaantgcntctcccgtgttttgtccaaacccccangaagaagaaaggggttcactaacctttgcccgntgcctttctgatngggtggtngtttctgctgncggtctcgaagncctgcntgctgctcctnattgaacgtgttaaggctt

SEQ ID NO: 3579 - DNA, 414 bp, Arabidopsis thaliana
  unsure at all n locations
  Clone ID: LIB22-085-Q1-E1-G11
agatgagcgacggagacgacgctgctagacgccgtaccgcggcggtgactgattaccggaagaagctccttcatcacaaggagctcgaatcccgtgtccgaacagctagggagaatttaagagcagctaagaaggaattcaacaaaactgaggatgatttgaagtctcttcaaagcgttggccagattattggagaagtactacgtcctcttgataacgagcgattgattgttaaggcaagtagtggccctcgttatgtggtgggttgtccgtagcanggtggacaacgaaaagcttacttctggaactcggagttgtcctggatatgactacgcngacaattatgcgagccctntcctcgtnaagttggatcctgttgtttatancaangttngcatganggatcaaggccaa

SEQ ID NO: 3580 - DNA, 419 bp, Arabidopsis thaliana
  unsure at all n locations
  Clone ID: LIB22-085-Q1-E1-G12
atcttcgtttatcgatgttataaaccctgctacacaagaggttgtatctaaagttccattgactactaatgaagagtttaaagctgcggtatccgctgcgaagcaagcgtttccgttgtggagaaacacgccgattactacccggcagcgtgttatgctaaagtttcaagagcttatacgcaagaatatggataaacttgctatgaacatcacanccgaccaagggaagactttaaaggattcacatggtgatatcttccgtgggttacaggtttgtggagcatgcgtgtggaagggcaaccttacanatgggtgaaatatctcccccaatgngtcgaacgggagtttgatacatatagtnttaggagaaccattangggttntgtgcctggcattttgtccttttaaagnttccaagg

SEQ ID NO: 3581 - DNA, 428 bp, Arabidopsis thaliana
  unsure at all n locations
  Clone ID: LIB22-085-Q1-E1-G2
gatgcgatttgctctgttttcatggcgggcgcctcatcaccggcgagtttgagagcttctcgtagccgtcggctggggaaggagacgaatcgatccgatctattcaaaaaacctgcagttccattcgcattcgcgctaattcttgctgatgcaatcctagtcgcacttattatcgcctatgttccatacacgaagatcgattgggatgcttacatgtcacaagtgggtttctcgggggagagagagactatgggaacttgnaaggcgatacagggccattgggtttatccaagcaaggtttcctctatgtttactctgcagtgcagaacttaaactgggaaggggaagtctaccctgctcaagattctttttgggtgttctcctacaattgtcaatcctgggggatncgtccntggatcatcctacgt

SEQ ID NO: 3582 - DNA, 454 bp, Arabidopsis thaliana
  unsure at all n locations
  Clone ID: LIB22-085-Q1-E1-G3
acgcgtccgctcctcttctctctctctcaatctcaatggctctgttttaaaaagggcaaattagagagatttctccttcaataacaaaaaatcgccagctttatctctctctttttcacatcccatggctagatggtgacgacgattcacgcataaactagggttcccccacaaatcatcttacacgtatcctctattccttccttcctttctccgtcatcatcatttttcccanccgacaacaatctctcggagtttgggtattattacttctctcatcaancaattgtnccactagatctcccagattccttcattatctctatcaataatggcgtttgaaagtcnagtttctgcctgatggtaaaaaccaagaaagctctgttcangatcttcaagtgggtttangnttanggttggcctcntttannttttgggaagcatgggcaaacng

SEQ ID NO: 3583 - DNA, 410 bp, Arabidopsis thaliana
  unsure at all n locations
  Clone ID: LIB22-085-Q1-E1-G7
ttagtgaaccggagagttcaaaggttgagccaagtggggaaacagatggtgacttgaaaagaaaacagtctgaggtagtctccgaggaacaaaaccgtcctaacaagtccccaaggagctttgacaaaccatcaccgagcaataaaaagggcaatggttttaagaaacccaagagcaagaaggtggactggagcgttttgaggccaccaaaacctcaaaccaaatagggtttaaattagctaactacagcaatctatatgctattagttacatcggttcatatgttctagtacatcgtttgttgctctgtctgtatcgtcattcccgtggtgttgcaacccgttggataaattatagccaaaagttttgaatttgtttggggttaaaanntgtccgttgttgtcnaaaat

SEQ ID NO: 3584 - DNA, 425 bp, Arabidopsis thaliana
  unsure at all n locations
  Clone ID: LIB22-085-Q1-E1-H1
ctctttgttgtaactgccgtcgctaccgacactcgtgccgttggagaattggcaggtatagccgttggagccacggtcatgctcaatattctagtcgcagggccatcgactggtggatctatgaatcctgtgagaactctaggaccagccgttgcatcaggaaactataggtcactatgggtgtatctggtggctcctacacttggtgccatatctggtgcagcggtctacacaggtgttaagcttaacgatagccgtgactgacccgcctcgtccggttaggagctttcgtcnttaagtgagtgagagacttgtttacaagtcttttgctttgtataattttactgtaagattaagtaatgatatcaaaaagctttggaaagcntgtgtnaagaatnaaaggcatgttacnaaaaagtcaccca

SEQ ID NO: 3585 - DNA, 442 bp, Arabidopsis thaliana
  unsure at all n locations
  Clone ID: LIB22-085-Q1-E1-H5
aagtcaacaagaaaccgggtttgtctacaatggcttcgagcaagcagatctttttattgatgggatcgccaaaatactacctgatgggcttttgcagttgacaaatactacagagttgcaaatgggtcatgctttcttcaagaagccgtttgattttgatccatcttcatcactatcgttctatacacattttgtgtgtgcgcttgtgcctcctaagttgggagctgatggtggccatgggattgtctttgttgtatctccttcccattgatctctctcatgcatacgcaactcagtacttgggggtccttcancaaacttancaaaatggggacttcctccttaacatcctgccnagctanntgancntccatnaccgttaangacattngagttnaaanggagctggancaaagccntcatgttcgggnattggatttgc

SEQ ID NO: 3586 - DNA, 420 bp, Arabidopsis thaliana
  unsure at all n locations
  Clone ID: LIB22-085-Q1-E1-H7
acgcgtccgaattcaacaagataagcctctcttctacttttgtgaaattttccgtaatcaaatccgtaatcagatttccccatcaatcgataattttctctcgccgcgttttctatttttctcgctcttcccttttaattttcatcccattttcttgaaggagatttctaattattctgtgatctaaagtctgaagctttgtttggttgcatctcgatgatgatgatgatgatggttgattgtaaatgggtagtttcggtttggttgtagcaagaagctaagtttgtcaagttaataagagtattttaagttttttttttgtnaaatcnatttggtgggttcaacaanccnacgatcgganaagttttccanccnttgantaatttgagantcnggggatttttacggagaanttcgagt

SEQ ID NO: 3587 - DNA, 406 bp, Arabidopsis thaliana
  Clone ID: LIB22-085-Q1-E2-A12
acgcgtccgcccacgcgtccgcccacgcgtccgaaaaaaagggttaggtggatctctcatgaaatcggtggagctcccccatatcttttttaaatagctttcttcttttggccccttacccagagatagattcttatatactactgagaatcttcaatttctgcaacttttgtatctcttcctgatggagtcttcaagtccccaccatagtcacattgttgaggttaatgttggaaaatctgatgaagagagaataattgtggcgagtaaagtctgtggagaagcaccatgtgggttttcaagattctaagaatgcttccggggatgctcacgaacgctctgcttctatgcggaagctttgtatcgccgtcgtgctgtgtccaatggtcaagaatgttgaaattgt

SEQ ID NO: 3588 - DNA, 479 bp, Arabidopsis thaliana
  unsure at all n locations
  Clone ID: LIB22-085-Q1-E2-A2
cgttacgttgccnggccggtcaaaatnncgggncgagcacgcgtccngaaantctattatcaattcctatcatttgttaagaaaaagagttagaagtattaataatcttacaatatttatagataagataacaacaatatgaagcattctcacgttttgcttcttctatttgttcaagtcattgcccttttgcctctcctttgtctatccgacgattttgttaactctagagctacttattatggcagccccgattgcaaagcaaatcctcggggacattgtgggtatggaagaatttggaagagatatcaataacggtgaaattgagtggtgtttcatgggcgactatggaacaaatggaactggctgtggtgcttgttaccaaggtgangtgcaaagataccaccacactgcagtgaaggaaaggagtatacgtagtggctacggactccggaaaaaggaaatggaacggacttcat

SEQ ID NO: 3589 - DNA, 485 bp, Arabidopsis thaliana
  unsure at all n locations
  Clone ID: LIB22-085-Q1-E2-A3
cnttacgcctgccggtgccggtccaaggantaacgggccnaggcaccgcgtccggctcangtcttccaaccaagtcacaggatgccaacaatgtgcatagaggatgctgggttaacagagatgaacataatgaatgattggcaagagcagacgaaaaaagccattgaagaagcaaccaccnnnnnnnnnnnnnnnnnnnnnnnnnnnnnnnnnnnnnnnnnnnnnnnnnnnnnnnnnnnnnnnnnnnnnnnnnnnnnnnnnnnnnnnnnnnnnnnnnnnnnnnnnnnnnnnnnncctcgcggtgcaggtaacaagaaactcacaccttgtggctgagactagagaccgagacacacattatttaacactttctccctctcttttgtttcttatttccaaaacctcttcgttcacttattataatgtcngtaatgttatcatccttccaancctaaanccttanccttcagattttggggttcacg

SEQ ID NO: 3590 - DNA, 476 bp, Arabidopsis thaliana
  unsure at all n locations
  Clone ID: LIB22-085-Q1-E2-A4
cttccacctggtcngnaccggtcacaaattnccgggncgacccacgcgtccanccacgcgtccgctttttgnananggatctgcttaggggaatatatgagaagggttttgaaaaaccatctcctattcaggaagaaagcattcccattgctttgactggtagtgatattcttgctagagccaaaaatggtactgggaanactggtgccttctgcattcctacccttgagaaaattgatccagagaacaatgtcattcaagccgtaattctagttccaacccgagagctcgcccttcagacatcccaggtttgcaaggagctttccaaatatttgaaaattgaggttatggtcaccactggcggtaccagtctgagggatgatatcatgcgattgtatcaacctgtccatttactggttggaactcctggtagaatantanatnctgccaaaaaaggtgtntgtgttttgaaaaat

SEQ ID NO: 3591 - DNA, 461 bp, Arabidopsis thaliana
  unsure at all n locations
  Clone ID: LIB22-085-Q1-E2-A7
aaancaaaaatcccgggccgacccacgcgtccngacgaactgaagaaaaacctctcggaagaagatgagcaattggaaaactcttctccttcgcatcggcgaaaagggacctgagtacggcacttcctccgactacaaagaccacatcgagacttgtttcggtgtcattcgtagagaaatcgagcgttctggagatcaagttttgccttttctactacaatgtgctgaacaattgcctcataagattcctttgtatgggactttgattggtttgttgaacttggagaatgaagattttgtccaagaagctagtagaaagtgtccacgctaatttccaggtcgctttagattctggcaactgcaacagtatccgtatattgcttcgctttatgacttccctgttgtgcaattaaggttatcaaactngcttctttgnattgncgnccttcgaaaacattggc

SEQ ID NO: 3592 - DNA, 420 bp, Arabidopsis thaliana
  unsure at all n locations
  Clone ID: LIB22-085-Q1-E1-E8
ctcttcttctgcatcgtctgcttcatcactattgaaggcactcgcttcaaccgtcgctcttctcagctcactcagagatgtcgttctcgctgagaaagctactggttccgattctggttttggtactgtttctggatctgtgcgttgaatccggattctctcagtcaacgccggcgcgtgacgatcacgtgcatcatcacggtggtgggtgtagtcattcncatgaccacgaccacgaccacgatcatgatcatcatgtgangaagacgacggcgaaggtggagatgaagttgccggangaacttgctgaataggacgatatgagattatgtgggtttggggccttgtcttcatgatcacnatcacgaatcaangttcactcntacgggggtttgctcggtgggcttantgcattgggaa

SEQ ID NO: 3593 - DNA, 422 bp, Arabidopsis thaliana
  unsure at all n locations
  Clone ID: LIB22-085-Q1-E1-A12
angcgtccgcccacgcgtccgcccacgcgtccgcccacgcgtccgaaaaaaagggttaggtggatctctcatgaaatcggtggagctcccccatatcttttttaaatagctttcttcttttggccccttacccagagatagattcttatatactactgagaatcttcaatttctgcaacttttgtatctcttcctgatggagtcttcaagtccccaccatagtcacattgttgaggttaatgttggaaaatctgatgaanagagaataattgtggcgaagtaaagtctgtggagaagcaccatgtgggttttcaagattctaanaatgcttccggggatgctcacgaancgctctgcttctatgcggnagctttgtatcgccgtcgtgctgtgtcctagtgttcatgagtgttgaaagttgt

SEQ ID NO: 3594 - DNA, 423 bp, Arabidopsis thaliana
  unsure at all n locations
  Clone ID: LIB22-085-Q1-E1-A2
attctattatcaattcctatcatttgttaagaaaaagagttagaagtattaataatcttacaatatttatagataagataacaacaatatgaagcattctcacgttttgcttcttctatttgttcaagtcattgcccttttgcctctcctttgtctatccgacgattttgttaactctagagctacttattatggcagccccgattgcaaagcaaatcctcggggacattgtgggtatggngaatttggaagagatatcaataacggtgaagtgagtggtgtttcatggcgactatggaacaaatgggaactggctgtggtgcttgttaccacgtgaggtgcnaagatacannacggggccntgaggnangggngtctacgtcagtggcnanggacntcccggaggaaaggagatggggacng

SEQ ID NO: 3595 - DNA, 429 bp, Arabidopsis thaliana
  unsure at all n locations
  Clone ID: LIB22-085-Q1-E1-A3
cangtcttccaaccaagtcacaggatgccaacaatgtgcatagaggatgctgggttaacagagatgaacataatgaatgattggcaagagcagacgaaaaaagccattgaagaagcaaccaccnnnnnnnnnnnnnnnnnnnnnnnnnnnnnnnnnnnnnnnnnnnnnnnnnnnnnnnnnnnnnnnnnnnnnnnnnnnnnnnnnnnnnnnnnnnnnnnnnnnnnnnnnnnnnnnnnncctcgcggtgcaggtaacaagaaactcacaccttgtggctgagactagagaccgagacacacattatttaacactttctccctctcttttgtttcttatttccaaaacctcttcgttcacttattataatgtctgtaatgtnatcatctttctactcttaagccttagactacnagattttggattcacgga

SEQ ID NO: 3596 - DNA, 426 bp, Arabidopsis thaliana
  unsure at all n locations
  Clone ID: LIB22-085-Q1-E1-A7
gaactgaagaaaaacctctcggaagaagatgagcaattggaaaactcttctccttcgcatcggcgaaaagggacctgagtacggcacttcctccgactacaaagaccacatcgagacttgtttcggtgtcattcgtagagaaatcgagcgttctggagatcaagttttgccttttctactacaatgtgctgaacaattgcctcataagattcctttgtatgggactttgattggtttgttgaacttggagaatgaagattttgtccaagaagctagtagaaagtgtccacgctaatttccaggtcgctttagattctggcanctgcaacagtatccgtatattgcttcgctttatgacttccctgttgtgcagtaaggttantcaacctgcttctttgattggtcgtcctccaaacatttgctatc

SEQ ID NO: 3597 - DNA, 453 bp, Arabidopsis thaliana
  unsure at all n locations
  Clone ID: LIB22-085-Q1-E1-A9
ccgaacggtcnaaggattcccgggtcgacccangcgtccgcaaaaccattcctctcctcaaaaccattaatctctcttctctctagcataacctctctcagatggcttctaactatgataagcttacttcttcgagagtagccatcatcggtgctggtgttagcggattagcagccgctaagaacttagttcatcacaacccgaccgtattcgaagcctcggattcagtcggaggtgtttggaggagctgcacttacgagacgactaaattacaatcggctcgagtcgattacgagttctccgactttccatggcccaataatagagatgacacaactttcccaccttaccttgagatattaagattacttggaatcttatgccaaacattttgatcttcgcaaattcatgaantttggctcctaangncatcgaagttaaggttcatcgggt

SEQ ID NO: 3598 - DNA, 428 bp, Arabidopsis thaliana
  unsure at all n locations
  Clone ID: LIB22-085-Q1-E1-B10
angcgtccggtaaattaaagtcttctctacttcaccataaaanatgcttgcgcacaagtctcttctctcctttaccacccaatgggctacactaatgccatctccgtctacttttctcgcctctcgcccccgtggaccggccaagatctcggccgtggcagcaccagtgaggccggctctaaaacaccaaaacaaaatccacaccatgccaccggagaaaatggagatattcaaatctttagatggatgggccaaggatcaaatcttgcctcttctcaaacccgttganncaatgttggcaacccgcttctttcttacccggacngcgggccttacccttctccgacgtttaccggaccangttcgtgaagctgacggaaangaacggncctcgctggcagacgaatactttcgtggtgttggttgga

SEQ ID NO: 3599 - DNA, 436 bp, Arabidopsis thaliana
  unsure at all n locations
  Clone ID: LIB22-085-Q1-E1-B4
tggtcatcgatgangcctgctcattttggtgtaaagataacgtccaaatctctctttgggatattccgatatgttacacttggagtgtcacttggtttactttccaagttctccttcggaagatggcttcttttgaaattcccttcagttttcagccttggttggttccagaagaaaggtccaagtgaagaagaggtagaaagcgctacgtttaagatgtggttcataggtcgtgggtacagcnaaagagagtctagcttcacaagganaaacaaancctgacttggaaatcattacnagaatttcaggacctganattgggtatatnaccaccccgataacacntgttcaaatgcnggnttggataagtctgggccaagcgcgaaaagcctagnttaaagggaggantnctacacacccgggcaatngtgtttgg

SEQ ID NO: 3600 - DNA, 409 bp, Arabidopsis thaliana
  unsure at all n locations
  Clone ID: LIB22-085-Q1-E1-B6
cagtgnnanaaacccaaagaaaagtagtgagaaacaaaatcgaggtaactactagatgaagacgatgacgcaattaaatattgcggttgtggttgtagtgacggttcttattggaatgttgagatcatcggaggctcaacttcaaatgaatttctacgcgaagagctgtccaaacgcagagaaaatcatttcagatcatattcaaaatcatatccacaatggtccttctcttgcagctcctctcatccnaatgcacttccatgattgcttcgttaggggatgtgacggatcggtgttgataaattcaaccatctggtaacgcaananaaagatgcaccaaccganttctagcaacttngagaggattcggtttccgtgngaaaaggattaacggctctgccttgaaanc

SEQ ID NO: 3601 - DNA, 421 bp, Arabidopsis thaliana
  unsure at all n locations
  Clone ID: LIB22-085-Q1-E1-B8
taagacgatggcggctgcaatggcttctcatgtttcgacggctcgatcaccggctctttccttctcttcttcgtcttcctccttcttccccggtactactcttcggagattctccgccgtttcactcccttctcctgctctccctcgccttcgtgtttcatgtcaagcctcctccgtcacttcgccttcttctccttccgatgtcaaaggaaaatctgacctgaaagactttctggcaatagatgattttgacacagccaccattaaaacgattttagacaaggcttcaagaggttaaggccttgctgaaatcaggggagagaaattatctaccttttaaagggaagtctatgtcnaatgatcnttgcaaaaacttccaatgagggactcgggtttcgtttgaaanctgggtttttccttg

SEQ ID NO: 3602 - DNA, 407 bp, Arabidopsis thaliana
  unsure at all n locations
  Clone ID: LIB22-085-Q1-E1-B9
agagctgacgttagcatttgtctctgaaatcccagatccgaaaacccaacaatggcgtcagagaacaacggntccagatccgattccgaatccatcaccgctcccaaagctgattccaccgtcgttgaaccgaggaagatagctctgatcaccggaatcaccggncaggacggatcatacctgacggngttccttctcggnaaaggctacgaagttcatggtctgatccgtcgatcatcgaatttcaacacccagcgaatcaaccatatctacatcgatccacacaatgtcaacaaagctctgatgaaactccactacgccgatctcancgacgcttcntctctccgtcgttggntcgatgtgatcaaacctgacgaagtttanaaacctagctgcncaatctcacg

SEQ ID NO: 3603 - DNA, 409 bp, Arabidopsis thaliana
  unsure at all n locations
  Clone ID: LIB22-085-Q1-E1-D11
agatctgattgtggttgtggttgacttcttcttcaaaggtttcacgagtacaataatgagtcaaaagggtttgatatatagctttgttgctaaaggaacagttgttctagcagagcatactccttattcaggaaactttagcaccattgctgttcaatgtctgcagaagctacccacaaatagcagcaagtatacttactcttgcgatggtcatactttcaatttccttgttgacaatggctttgtgtttctagtggttgctgatgagtccaccggaaagaagtgttcctttcgtgtttctcgaacgggtcaaggaagactttaagaagcggtatgaagcgaagtataaaagaatgatgagccgacatcctcttgccggatgangacgaaagatgatgatttgtttggg

SEQ ID NO: 3604 - DNA, 407 bp, Arabidopsis thaliana
  unsure at all n locations
  Clone ID: LIB22-085-Q1-E1-D8
aaaataaataaaagatctaactttgacggctctcttaatcttactcactccggttttaagtcggaatagactgatgggagcttgatggttattgttagatcagatgtggatttaaagccttcgctgaactaacaagtctatggaagaagcaaagacccttgttttacactgtatgttgtgaggaatttgtctgattttgggtgataaaggtgaagtctttgagtttgtaattttgagataagattggatggtgggaagagaggatgccgatggggaatgatgaagctcctcctgcgntctaaagaaaatgttttgggcggtctgccctcctggtcctgcttcacgggacngncatcancaagttcctgaanggtgacgaagcaaangcctgaacatttccggtntgc

SEQ ID NO: 3605 - DNA, 401 bp, Arabidopsis thaliana
  unsure at all n locations
  Clone ID: LIB22-085-Q1-E1-D9
aaatccaattgaccgaataaaatccagtaaaccgatccataaaccaaaattggaagaaaacaatgcctgtttaataggtgttgaaactttgctgaaaaaaaacgaagcgagcaccctctaaaatgccttcgatttctctggcgccattgatttagttttctctctctgactacaaagtatccattcgttcaaaccagtttcttcccattttcgatttctgtcaaaattcaccaaccaactccaaaaactctgttattgaataagtttcttgatcttaaaacaaacgatctcaaagaatggcacgacacgatcctaatccatttgctgatgaagagatcaatccttttgcgaatcatacaagtgttcctcctgcgagcaactcttatctcaagccaanttca

SEQ ID NO: 3606 - DNA, 401 bp, Arabidopsis thaliana
  unsure at all n locations
  Clone ID: LIB22-085-Q1-E1-E10
acgcgtccgcccacgcgtccgcccacgcgtccgaaaaaaagggttaggtggatctctcatgaaatcggtggagctcccccatatcttttttaaatacctttcttcttttggccccttanccagagatagattcttatatactactgagaatcttcaatttctgcaacttttgtatctcttcctgatggagtcttcaagtccccancatagtcanattgttgaggttaatgttggaanatctgatgangagagaataattgtggctagtaaagtctgtggagaagcaccatgtgggttttcanattctaagaatgcttccggggatgctcacgaacctctgcttcatgcggaagctttgtanngccntcggtgctntgtctactggttcatgagntgttgaa

SEQ ID NO: 3607 - DNA, 408 bp, Arabidopsis thaliana
  unsure at all n locations
  Clone ID: LIB22-085-Q1-E1-E11
acgcgtccggtctctctctctcgggtcaaaattagggtttcgtttcactatccagagtgtatacaaaggttgttgtggagcttttatcagatcacaggaataagatggaggtatttggaaaatctcccatggttgttacatctgccaatgttatttacttgtctgcaattctgggtcgcgattgcgatggacacaaatgtgattggaaatgtgagaatgaaaatgtttgtgggaatatgtatcgctgcaaactaactggactaactcatgtctgcgacaagaactgtnaccagcggattctctatgataaccatagctctttgtgccgagccantgggaggattttccctctctcgtccgtcganggagcaangcggtttaaagggtgttcggganggaaagccttga

SEQ ID NO: 3608 - DNA, 371 bp, Arabidopsis thaliana
  unsure at all n locations
  Clone ID: LIB22-085-Q1-E1-A11
ctctgcanctgatcgatatacaaaggaaanaagcagtattgttgtgattggncttagtattcacacagctcctgttgagatgcgtganaagcttgctataccngaagctgaatggccaagagctattgctgaattgtgtggtttgaatcatattgaanaagctgctgtgcttagtacntgtaaccgtanggagatttatgttttanctttatctcagcatcgtggagttaaagaagttactgaatggntntcaaagaccagtgggatcccaagtttcagagatttgtcaacacngttttctgttgtacaacaancgatgctacacaacataaatttnngagttctcaanctggtccntggactcctcttgt

SEQ ID NO: 3609 - DNA, 474 bp, Arabidopsis thaliana
  unsure at all n locations
  Clone ID: LIB22-083-Q1-E2-B8
acgcgtccgaggnaagcaagtggtatcatcaacaaacaaagcacttctcttttgattcgattctctctttaccttgaagcttcaatatcaaccaaatcttttttctcaaaatctcaaagaatctctcaaactcagtctcctatctgtctctctgcaaactattaccaaccagataatttagatatggaagctactcagaaacatatgattcaagaaggatcttcaatgttttaccatcaaccatcttcagtcaaacaaatggacctttctgttcagacatttgattcttactgcacacttgaatcctcttcaggcaccaagtctcatccttgtcttaacaacagaaacaactcttcttcanccacaagcttttcctctaatgaaagtcccatttctcaagccaacancaacancttatcaaaggtttaacaatcantcccctggaagaaaacaataactcctccccttgaancg

SEQ ID NO: 3610 - DNA, 506 bp, Arabidopsis thaliana
  unsure at all n locations
  Clone ID: LIB22-083-Q1-E2-C11
naaactgttacgcctggccgtaccggtccggaattcccgggtcgacccacgcgtccgaacatggggtacgacggctccaggtttgccttacgtanacgaggcgataactaatgctggaaactggctcattgggggtgatcttgaggttcttgagccagtgaagtacaatgatgggcttgatcgtttcaggctttcgcctgctgagttacgtaaagagttggagaagcgtaatgcggatgcggtgtttgctttccagctgaggaatcctgttcataatggtcatgctcttcttatgactgatactcgtaggagacttcttgagatgggttacaaaaaccctattcttttgcttcatccgttangtgggtttacaaaggctgatgatgttcctttagattggangatgaagcaacacgagaaggttctanaggatggtgttctcgatccggagactacagtggtttcgatattcccgtcacctatgcattacgctgggtccaaccgaa

SEQ ID NO: 3611 - DNA, 471 bp, Arabidopsis thaliana
  unsure at all n locations
  Clone ID: LIB22-083-Q1-E2-C3
acgcgtccggttttgagaatttgacaaaaatttgtttatgtaatcttagttttcgctgattttgagtaagttatcgacatggatattgatgtcggaccagttgatccatctgtcctatacgagcaagacctccatgtttcttctgctgtttgggaaggacaggaacgaggtctacttcgttgtcaagaacacacttcattgctacatcaatggaaactcactgatgaacaaattaacctcgtggacaaagctggtttcggttactttcgcaaaatcggtccaatgaagtttaaacaattcactgatctcctgcacttgttgagcgatggagaagagaaaccaatacttttcatccttcctttanggagaaaatgactataaccttaaacgaagtttgccttaantaacttgggacttgagaattgatggagattccaattgttgggtccnaaagtttggngatgaaggttg

SEQ ID NO: 3612 - DNA, 527 bp, Arabidopsis thaliana
  unsure at all n locations
  Clone ID: LIB22-083-Q1-E2-C8
actgtttccctggccctaccgagtccgganattcccgggtcgacccacgcgtccggctacgacaaagaaggacacccagtttgttacaatgcttatggtgtgtttaaagagaaagagatgtatgagagagtgtttggtgatgaagagaagcttaacaagtttctgagatggagagttcaggttttggagaaaggtgttaaaatgcttcattttaaacctggtggtgttaattccattattcaagttacagatcttaaagatatgcctaagagagagcttagagttgcttctaatcagatcctctctctttttcaagataattaccctgaattggttgctactaagatattcataaacgtgccttggtacttcantgtgatctactcaatgttcagcccattcctgactcaagagaacaangagcnagtttgtgatgtccaaagaaagcaatgcancanaaacactcnaaaattncatnaggccaaaaaattcccgggcnanacggggggcctnaacccttccaaaag

SEQ ID NO: 3613 - DNA, 475 bp, Arabidopsis thaliana
  unsure at all n locations
  Clone ID: LIB22-083-Q1-E2-D10
acgcgtccggttttgaaagtgttcctgaaagctccattacaaaactctcgaggtctgagattaagcaggaattagtgaacgctcaaagaaagcacttggaacaaatgatactgcccaatgttttggaactagaggaggttgatccctttttcgatcgtgactcagtggatttttctctacgcatcaaaaaacgccttgaggaatcaaaaaagctgcagagagatcttcagaatcgtatcagaaaacgtatgaaaaagtttggtgaagaaaagctttttgttcaaaagactccagaaggtgaagctgtcaagggatttcctgaagcagaggtgaaatggatgtttggagagaaagaggtggttgttccgaaagctatccagctccatctacgccatggttggaaaaagtggcaaggaagaagcaaaagccgattttaaacagaaacntttgggaaaagttgaattttggcaaacaa

SEQ ID NO: 3614 - DNA, 489 bp, Arabidopsis thaliana
  unsure at all n locations
  Clone ID: LIB22-083-Q1-E2-D3
acgcgtccgaacaaagagagagagagagagagtgttatgttatgtctttattgtcaattagtaattttcttcgaattagatgttgtttctccgtcgaatcgccgtcgtcttctttgtcttcacctctttctccgccgctcagaactccacgtgtcctctggacttttccgtccttgaaccgttccggcgtccgaaacccgatggcgccaccacctgccagtacctcctccaagggctacgcctcctctactctcaccatctccgtcagacgggttcctttctcccgccacctgagtctgctgcttcttgctgggctgctctccagtcttccgtcgccggtttcctccctcgctttgacgtccgattcaactgcggtttccaanacgccggtggatttcgcaaggggtgatggacatcaaccaaccaaggtctcaaattccaantcccttaaccctaaatcctccctcggcnacaacggccaatccgctg

SEQ ID NO: 3615 - DNA, 475 bp, Arabidopsis thaliana
  unsure at all n locations
  Clone ID: LIB22-083-Q1-E2-D4
acgcgtccggtgattcattaaccacttcatgataattataatcttccttctcttctgacgattgaattacatcttcttctgatagctgttctgatttttttctgtatacaaagtaaattcaaagtggacaaacatcggtattttaatctcctctcgataatgaagtgtttcttgttctctggtggggataagagaggggaacagaagacccctatttcggtttcattgacctctatcttctctgaccgcgaaataaaccgaagcgggtcagagttcaactctcgtgatgtctctgggacgagcacagaatcatccatggggaggaagaactcgtaccctccggtgtctactanagcaaagtaatctcagagagttcagcattactgatctcaantctgcaacaaagaactttagccgattctgttatgaattgganaaaggcggtttcggttgtgtcttcaagggggcacnattg

SEQ ID NO: 3616 - DNA, 478 bp, Arabidopsis thaliana
  unsure at all n locations
  Clone ID: LIB22-083-Q1-E2-D5
acgcgtccgctcgcttctatgctttttggatcagaggaatgtctagagtggaagataaggtataaagtggctctaggtatagctgatggtctgagttatcttcataatgcttgtccaagaaggatcattcaccgtgacatcaaagcttctaacatattgctcaaccacgattacgaagctcagatttcagatttcggacttgcaaaatggctcccagagaactggcctcaccatgttgtattccccattgaaggaacattcggatatctagctccagagtatttcatgcacggcattgttgatgagaagattgatgtgtttgcctttggagtattgcttctagagatcataaccagtcgccgagctgttgatacagcaaagcangcaaagcattgttgcatgggcaaaaccttttcttgagaaaaatancatgggaggacattgtngattctccgntaaggaaatatgttaaaccaac

SEQ ID NO: 3617 - DNA, 467 bp, Arabidopsis thaliana
  unsure at all n locations
  Clone ID: LIB22-083-Q1-E2-D6
acgcgtccgatcannnnnnnnnnnnnnnnnnnnnnnnnnnnnnnnnnnnnnnnnnnnnnnnnnnnnnnnnnnnnnnnnnnccaccaaggcaacagaggagtttgtccttgttgtttaagagataaactctctcgattacctaatactacgtcgtattacatcgttcacagannnnnnnnnnnnnnnnnnnnnnnnnnnnnnnnnnnnnnnnnnnnnnnggcggtgaaggatcatcggagagctggttcgatgtcgatgtctttcgctgttagggaagctttaaatggtaatctgatcgaagctttaggtggaggattaatgaaaagcagatctatggctcatgttcccaaggattatattgttanggatttgacgaaagaagaagacggggaaattgaatctacgacggttaagaagaagactgggttttggactaanttgctcacctaaagggaaaggcggtggcn

SEQ ID NO: 3618 - DNA, 472 bp, Arabidopsis thaliana
  unsure at all n locations
  Clone ID: LIB22-083-Q1-E2-D7
acgcgtccgagaaaagaaaaaattgcaaagagaggaagaacaaagaaacttgaatggagaagagaaacgagagacaagtgattctttttcctctaccattacaaggttgcataaaccctatgcttcagctagcaaagatcctttactcaagaggtttttcgatcaccatcatccacacgcgcttcaacgcgcccaaatcttcagaccatcctctcttcactttcttacaaatccgcgacggcttgtctgaatctcagactcaatctcgtgatcttttgcttcaactcacgcttctcaacaacaattgtcagatcccatttcgagagtgtttggctaaactcattaaacctagttcagattcaggaacagaggataggaaaattanctgtgtgatcgatgattccggttgggtttcacacaatccgtggcggaaagtttaaacctcctcgatttgcctccgtgctaaaagttc

SEQ ID NO: 3619 - DNA, 543 bp, Arabidopsis thaliana
  unsure at all n locations
  Clone ID: LIB22-083-Q1-E2-E1
gtnccctgttcgtacggccccggaattcccgantcgacccacgcgtccgctcgccgaacaagcagagcgttacgaagaaatggttgaattcatggagaaagtcgcgaaagctgttgacaaagacgaactcaccgtcgaagaacgtaatctcctctccgtcgcttacaaaaacgtcatcggagctcgtcgtgcttcgtggagaatcatttcatcgatcgaacaaaaggaggagtctcgcggtaacgatgaccacgtttcgttgatccgtgactacagaaagcaaaatcgaaacggaactttctgatatctgtgacggaatccttaagcttctcgatacgattctccgttcccgctgctgcttctggagattcgaangtgttttatctgaanatgaaaggtgattaacataggtacttggctgaattcaaatcctggtcaagaagaaggaaagatgcctgccggaacatactccttactgncttacnaannctggctcaanggataattggctaaattcctgaaattggggtccaangccaatcc

SEQ ID NO: 3620 - DNA, 462 bp, Arabidopsis thaliana
  unsure at all n locations
  Clone ID: LIB22-083-Q1-E2-E11
acgcgtccgaacagcaatggaagcatttgccttgacattttgaaagaacaatggagtcctgcactcaccatatcgaaggttttgctttcgatatgttcattgttaacggacccaaacccagatgatccattggttccagagattgctcacatgtacaaaaccgatagagcaaagtatgagtctactgcgagaagctggactcagaaatatgcaatgggatgaaagtttgtgtcctttgatccctcacagactcggttttannnnnnnnnnnnnnnnnnnnnnnnnngacttcttcacatagggatcttccatgaaataagttagattcctatgttttatcatctctttgtttgaaacctctttaatctcaaacaaaaacattacttcacctctttattatccatatgttccctatctttgtttctatgccttttcccaaaaaattataagaaaaattattta

SEQ ID NO: 3621 - DNA, 471 bp, Arabidopsis thaliana
  unsure at all n locations
  Clone ID: LIB22-083-Q1-E2-B7
acgcgtccgcatttctctctgactacttcatttcctcttcccaacagttaaaaaaagttctgattcgattcaagccaagatccacgtataaagatatgttcatgcgtagaggtttggtatacaacaatatatacatataatagtttgtcgttatgcctggctccctgtatgccacgagtggataccgattttggttttaaaatcggctgccggtggcgtacaaggagtcaagcatgaccagaagcatatggtaactcaattgcatctacaactaaatatgaaatatctagttatgtatatggtttgtgttctataagatgttttcttcgaattttgatttttgtgttcatttgaataagcaaacagaaataaaaccaagttttgtagttttttgctttctttctgatttggtccaatggctttgattcaggtttgagttgatcctttaaattcatattganttaaatttga

SEQ ID NO: 3622 - DNA, 484 bp, Arabidopsis thaliana
  unsure at all n locations
  Clone ID: LIB22-083-Q1-E2-A2
acgcgtccggtttcaatttctaaaattctcctctctcaacgcaatcaccaaatccaaatttagggtttcttttctctttctgcgatcgatctctgaaaactcataactgttgtttaatcgtgaagatggcatcaaacggatctttctctgctcagagaaacgcaaacgctagaacaacgatgaagagaagaagcgacaatcgcggttacggtggcggaatcggaggttatcaagaggagacgaaccgttacgcgccgccgcaaaaacgtttcagatcacaagcgcaacagcaattccgatctggtcataatcctctgtatcatcatcatggtaagtaataataataacgtgtctagggtttcttctcaatcatataacaattgcggtgttgatgtgattggttccaaatcaagttttgcnattacgttacaatgantccaacacaacaaattacangaaacccttggttgccgggtaaggaanc

SEQ ID NO: 3623 - DNA, 531 bp, Arabidopsis thaliana
  unsure at all n locations
  Clone ID: LIB22-083-Q1-E2-A3
ctggttccctgtccgtancgncntggaagtccngagtncacggntccactcanncatntnntaagatctgaaancatactcatggacntagatggccatgtgatgttaactgattttggtttagcaaaagaatttgaagaaaacacaagatcaaactccatgtgtgggactacggagtatatggcccctgagattgttcgtggaaaaggacatgataaggctgccgactggtggagtgtaggaatccttctgtatgagatgctcactggaaagccgccgtttctcgggagcaaaggaaagatacagcagaaaatcgttaaggacaagatcaagcttccacagtttctgtctaatgaagctcatgccttgctgaaagggctgctgcaaaaagagccagaaaggagactgggaagtggaccgagcggagcagaggagataaaaaaacacaaatggttcaaaggcgataaactggaagaaactgganggctagagaaatncaaccaaatttcaagcccggcggtttccgggaaa

SEQ ID NO: 3624 - DNA, 505 bp, Arabidopsis thaliana
  unsure at all n locations
  Clone ID: LIB22-083-Q1-E2-A4
acgcgtccgagaacaaccaatctccactcttgtcctctctgaatcaacaatggcctatggangcattctctcaagtgacaacgaaggcancttcagaggacctttgacactctctctcaaacaaggatctttgttggtgatgagagggaacagtgcagacatggcaagacatgtaatgtgtccatcacaatgacaaaagaagtaagcatcacattctttcgtattcgaccttgacacatatcatagccattcacaacccagcagtcctcgcaacgacggtgtcatgacaatgtggcnnccctaccaantgacaacaactccaatcctcaattgggtaagatnattcaanttgacatgngtgccaaaaacttggagtcccnacgtcctccaattggtcangattgnaccaacaaccgggttcaaccaanggattttcncaatttcccaaggttaatgggaaacccgttggggggnaccggggnttttcctaacaaaggggccccgg

SEQ ID NO: 3625 - DNA, 474 bp, Arabidopsis thaliana
  unsure at all n locations
  Clone ID: LIB22-083-Q1-E2-A5
nccgagagatcttaaacctgaaaacatactcatggacgtagatggccatgtgatgttaactgattttggtttagcaaaagaatttgaagaaaacacaagatcaaactccatgtgtgggactacggagtatatggcccctgagattgttcgtggaaaaggacatgataaggctgccgactggtggagtgtaggaatccttctgtatgagatgctcactggaaagccgccgtttctcgggagcaaaggaaagatacagcagaaaatcgttaaggacaagatcaagcttccacagtttctgtctaatgaagctcatgccttgctgaaagggctgctgcaaaaagagccagaaaggagactgggaagtggaccgagcggagcagaggagataaaaaaacacaaatggttcaaggcgataaactggaagaagctgggaggctaaagaagtncaaccaagtttcaagccngcggtttccg

SEQ ID NO: 3626 - DNA, 482 bp, Arabidopsis thaliana
  unsure at all n locations
  Clone ID: LIB22-083-Q1-E2-A6
acgcgtccggctacgacaaagaaggacacccagtttgttacaatgcttatggtgtgtttaaagagaaagagatgtatgagagagtgtttggtgatgaagagaagcttaacaagtttctgagatggagagttcaggttttggagagaggtgttaaaatgcttcattttaaacctggtggtgttaattccattattcaagttacagatcttaaagatatgcctaagagagagcttagagttgcttctaatcagatcctctctctttttcaagataattaccctgaattggttgctactaagatattcataaacgtgccttgggtacttcagtgtgatctactcaatgttcagcccattcctgactcagagaacaaagagcaagtttgtgatgtccaaagaaggcaatgcagcagaaacactctacaagttcattangccagaaagatatcccggtgcaatacngtgggtcctaaccctcccaac

SEQ ID NO: 3627 - DNA, 513 bp, Arabidopsis thaliana
  unsure at all n locations
  Clone ID: LIB22-083-Q1-E2-B1
ttcgcatggccgtggaagtcccgaatcgacccacgcgtccgcccacgcgtcngatnnnnnnnnnnnnnnnnnnnnnnnnnnnnnnnnnnnnnnnnnnnnnnnnnnnnnnnnnnnnnnnnnnnnnnnttatccttatccgataaacccacaaataaagacagactcttttgttctttaaacagagattgtaaatccagagccgccggaaaatacaaccgccggtttactctcaggattagttgatattattcgattttaaaaatcagtaggaagaagatgaagtacgtgcttgtaacaggaggtgttgtgagtggattagggaaaggagtaacagcaagtagtattgggtgttctccttaaagcttgtggtcttcgagttactctatcaaaatcgattcttatctgaacactgatgcctggaactaagtctccaatttgaacacggtgaaatttttgtcctggacgatggtggtgaaggtggtcntggatcttgggaactacaaaaggttccaa

SEQ ID NO: 3628 - DNA, 495 bp, Arabidopsis thaliana
  unsure at all n locations
  Clone ID: LIB22-083-Q1-E2-B10
nacaggtccggaaactcccgggtcgacncacgcgtccgcccacgcgtcngatntggtgtacctgttcagttacagaggttctggatttgggcaaagagacaaaaccatacctatcgtcccaatcgcccccttacgcctcaagaggaattacaaccggttggacaaataagggaagcatctaataaggcaaacactgcagaactcaagctttttttggaagtagagcacctggatttacgtcctattcctcctcctgaaaaatcaaaagaagatattcttcttttcttcaagctttatgaccccgagaaggcagtattaagctatgctggcaggctgatggtgaaaagttccagtaagcctatggatataactggaaaactgaatgaaatggttggctttgctcctgatgaagaaatagaactttttgaggaaatcaagtttgaaccttgtgttatgtgcgaacacttggataagaaaacttcattcagattgtgt

SEQ ID NO: 3629 - DNA, 492 bp, Arabidopsis thaliana
  unsure at all n locations
  Clone ID: LIB22-083-Q1-E2-B11
nggccgcaaaggtccggaactcncgggtcgacccacgcgtccgcntttaantgaaatcggtttcgagagacagtgagacgaanatgttaaggattttggggagaagagttgtttcagcttcgaaagagcttactagtattcaacaatggcggatccgaccaggaaccgattctcgtcccgatccttttcgaactttccggggactacaaaagggtttctgcgtgggcattttaccggacggagtcgacagaaattcggaggctttttctagcaattcgatcgccatggaagggatcttatcggagcttcgttcccatatcaaaanggtattggccggangtggagaggaagcggttaagaggaacagaagcagaaacaagcttttgcctananaanggatgatcggctacttgatcctggttcttcctttttggaactctctcagcttgcaggacatgaaattgtatgaggagccctttgccctcaaggtgg

SEQ ID NO: 3630 - DNA, 510 bp, Arabidopsis thaliana
  unsure at all n locations
  Clone ID: LIB22-083-Q1-E2-B2
acgcctccgggancatttgnttcaccctcatcaggtgtgatgcctgattccaccaatcctactatgagtgtgaatgcccaaggccatgaaatccaaaatggtggtggaacaacaagccagttctcatcggctttgtgggcattaatggactcaataccttcaacgccagcctctgcgtgtgagggtccccttaaccgaacctttgtacgtatgtctagcttcagccgtatgangttcaatggaaaggctaatggaacgccagtgagtactaccatagcaaagaanggtattaganacagangttttcttctattaacaatccgtgggtgctttgtgtgccatccttcctggggtgttggtanccacaattccgagtctcaaggttagaaagtcctccccttgaaangactaattggtgggttccccttgggaactccttaactaactgggtaagtttaagaangaagaaacccaggattccacattaattgttcaatggggaattattga

SEQ ID NO: 3631 - DNA, 524 bp, Arabidopsis thaliana
  unsure at all n locations
  Clone ID: LIB22-083-Q1-E2-B4
gcctgtccctaccgctccggaaattcccgngtcgacccacgcgtccgggganctctcatgctctacgtatccaagatgattccagcctctgacaagggtagattctttgccttcggtcgtgtctttgctggtaaggtttctactggtatgaaggtcagaatcatgggtcccaactatatccctggtgagaagaaggatctgtacactaagagtgttcagaggactgtcatttggatgggtaagaggcaagagacagtggaggatgtcccttgtggtaacactgttgctatggttgggctggatcagttcatcaccaagaatgctacattgactaatgagaaggaagttgatgctcaacccattcgtgctatgaagttttctgtgtctcctgttgttcgtgttgctgttcagtgtaangttgcntctgaccttcccaagttggntnanggtctcaagaagttggncaaatccgattctaanggttgtgtgtacaatgggaggaacaaggtgancacattgttgcc

SEQ ID NO: 3632 - DNA, 506 bp, Arabidopsis thaliana
  unsure at all n locations
  Clone ID: LIB22-083-Q1-E2-B5
anactcgcgggtcgacacangcntcnnannagagtcactatcatctcttaacaacacaacacaactttgaatttttcaccctcactttcatttatctcaaatctccttccagaaaagcgagggaatagtgttgttgagaggtttgtgatttccttttgaaaaaatgatggcttgtggcttaagcaagagccttggcttgtcttcctccttgaagaagcaacaaggcatagtgagtatccttggtggcatttcgtcgaacacttcatctgcaccttcacttaggcgaactttctccgccgatttgtcctccaagacttgggtttcccaaaatgggttttctcctatgaagagaatctcttcctcctgagaagcttcgtcctgacgaagaanatcagnangaangaatcaannttcgggantcnatntcctggggcaacagattcaacaangacaaggaacgataagcnngaagngaaggancagatcaagccggggtcaattccgga

SEQ ID NO: 3633 - DNA, 528 bp, Arabidopsis thaliana
  unsure at all n locations
  Clone ID: LIB22-083-Q1-E2-B6
aactgtttcccctggccctaccnagtccggaattcncgcggtcgacccacgcgtccgcccacgcgtccgatttggtgtacctgttcagttacagaggttctggatttgggcaaagagacaaaaccatacctatcgtcccaatcgcccccttacgcctcaagaggaattacaaccggttggacaaataagggaagcatctaataaggcaaacactgcagaactcaagctttttttggaagtagagcacctggatttacgtcctattcctcctcctgaaaaatcaaaagaagatattcctcctttccttcaagcctttatggaccccgaagaagggaantattaaccaatnccnggcaaggctggatggtgaaaagttccaagttaagcctaatgggatataactgggaaaaactgattgaaaatggttggctttgctccggatgaaagaaattanaacttttganggaaatcaagnttggaacctggggtaagttgcaaaaccttgggtaaaaaaacntcaatcaaaat

SEQ ID NO: 3634 - DNA, 487 bp, Arabidopsis thaliana
  unsure at all n locations
  Clone ID: LIB22-083-Q1-E2-A11
gtaaangtccggaaagtcccgggtcgacncacgcgtccggctctctttctggtacactcacctaccattactataagtctgaaagagtgattgaaacccacctcgaaaaatctatccttttttttgttttccttctccggcgaatccccggggagattggtaatcggtaatcacggctatttacgggataaagccacggcctttgagctttcatgtccaacgaaagggttgtttaatcataactaatcctttgcctcacggaggacgtggagctctgccgtctgaaggcggcagtccctccgatctcctcttcctcgccggaggcggttccacaaatagccactaaccctaaccctttttctaattaggtttttagttcttaagagtcctgtattaatctgttatttcgagattataatatttgtgagcaatgttgttgaagatnaaaagagtccaacagttgtatcgaattatcaaaaagatgaga

SEQ ID NO: 3635 - DNA, 478 bp, Arabidopsis thaliana
  unsure at all n locations
  Clone ID: LIB22-083-Q1-E1-E8
acgcgtccgagaacaaccaaatttgtttccgtcttctgctaacatatcctctttttcatctgggaaccctaatttcttgactaacttagggttttatttatccatttgagatactctgtaattgaaaggttgaatttttagaagagacatgggaggttcgtcggagacaaagatcttacaagaactcatactttacgcggcgagcgctgctttcagctgcttggttctctttgcgggtcttcgtcatctcgatcctaatcgtgaggcttctaaaaaagctctcgagcataagaaggaaatctctaaacgtttgggtcgtcctcttgttcagaccaaatccatacgangaatgtaattgcatgtgatgttgataaatccaagaaccacatttgatgttggagtttgggttcaattggaggggttggagacntccaagncaggctttgtatgaancttgtgatttaaccacggaaaaaga

SEQ ID NO: 3636 - DNA, 476 bp, Arabidopsis thaliana
  unsure at all n locations
  Clone ID: LIB22-083-Q1-E1-E9
acgcgtccggaaaggacgaagaagagaagaagaagaaccttacaattgcttttgtaaatattgtaggtagtttaaggacgtcacttcctacatacatggatttatgtggaactcagatgctgcgcctctcatcgcctcatttcaaaacccttcatttggtgaggcatgcacaaggagtccacaatatagcattagaanagaagggagagaaacctgaatcagaaaagctttttgacgcccacctttctccaaagggtttgcaacaggtttcggaaaggcgcanccaaatccttgaatcaggattacttancactgtcgagttagtgataacctcnccgctgtgcangagcantgganncttcaataggaatatttagggggacaaangatatgtaaatatatcccganggactttgcaaaagcctaacaacttnccctccaattngtagcanctttgagattctgttnaagaacgc

SEQ ID NO: 3637 - DNA, 471 bp, Arabidopsis thaliana
  unsure at all n locations
  Clone ID: LIB22-083-Q1-E1-F11
acgcgtccgatacnctcttttgatggctggaggagagaaaagaagaggacttagtaaatcttgtgctcttcccatagtgattgctgggatagagagatatgcattcaaaggagttgcatcaaacttagtgacatatctaactgatgtagtgaagatgagcaattcaagagcagccacgactgtgaacacttggagtggcttcactttcatgttgcctctcttctctgctccttttgccgattcttattgggacagattcttcaccatccttgcttcttcttctctctactttgtgggtctagtgggattgacatttacggcatttgctgggtcacgttcgactacanaaacaatctctcctttaacttccccacaactcacttttcctccgtcgctcctaggccttggggtccttaaaccccatcctctacaagnccttggtggctgnacaagctccgactacgaaccttt

SEQ ID NO: 3638 - DNA, 531 bp, Arabidopsis thaliana
  unsure at all n locations
  Clone ID: LIB22-083-Q1-E1-F4
ttccctgtcctacngctccggaattccgaggtcgacccacgcgtccgnnnnnnnnnnnnnnnnnnnnnnnnnnnnnnnnnnnnnnnattcatctaaaacaatttcgatccatttacacataaatatatgtaactggccgtagaagaaacacattgaaggaagannnnnnnnnnnnnnnnnnnnnnnnnnnnnnnnnnnnnnnnnnnnnnnnnnnnnnnnnnnnnnnnnnnnnnnnnnnnnnnnnnnnnnntgcggacatttccagangcagttttccaaagggctttgtcctttggnactgcttcttcggctttcagcatgaanganccggtgaangnagaacggcaganggcccnacgatatnggaacacattttcccacacctttgggaaaaatcnaccgnatttanccaatggctgatgtccccngttgattcagttatcaaccttacnagggaanaatgttcaacctnatngaacgaataatgggaaatggnccnctaacagaattttcccaattccttggaccccn

SEQ ID NO: 3639 - DNA, 467 bp, Arabidopsis thaliana
  unsure at all n locations
  Clone ID: LIB22-083-Q1-E1-F8
acgcgtccgcccangcgtccgcggacgcgtgggttcgacttttcctctctctcttatataaattatatattttgctttggttttttttttttcaccggatcgatcgagaagagagaaaagttcatcttcttcttgttctgattgtttgacaagttttacgacaatggcggtttacggcgagaagaagcattggtggctccgcaacaagaagatcgttgataaatacatgaaagaagcaaagagtttaatagcgagtcaagatccaaacgacgtgaaatcagctctaaatcttctggaatctgcantctctgtatctcctcgttacgaactcgctcncgaactcaaagccagatcccttctttacctccgtcgatacaaagacgtcgccgatatgcttcaggattacattcctagtcttaaattagccggcggcggcgaagattccggtatcngttcatctgagcttt

SEQ ID NO: 3640 - DNA, 461 bp, Arabidopsis thaliana
  unsure at all n locations
  Clone ID: LIB22-083-Q1-E1-F9
acgcgtccgaacaaagagagagagagagagagtgttatgttatgtctttattgtcaattagtaattttcttcgaattagatgttgtttctccgtcgaatcgccgtcgtcttctttgtcttcacctctttctccgccgctcagaactccacgtgtcctctggacttttccgtccttgaaccgttccggcgtccgaaacccgatggcgccaccacctgccagtacctcctccaagggctacgcctcctctactctcaccatctccgtcagacgggttcctttctcccgccacctgagtctgctgcttcttgctgggctgctctccagtcttccgtcgccggtttcctccctcgctttgacgtccgatccacctgcggtttccagacgccgtggatttcgcangggtgcatggacatcaccaccaggtctcaattcgagtcccttatccctaactcctccctcg

SEQ ID NO: 3641 - DNA, 502 bp, Arabidopsis thaliana
  unsure at all n locations
  Clone ID: LIB22-083-Q1-E1-G1
ctggttgcctgngcctaccggcccggaaatcccgngtcgacccacgcgtccggttttttattaccctgttttataaacagaggaagccctaaatttggattctctattctaaagttttctcatttcgctaattttggagaaaaacgattgttttttttaatcgtttcttcatttctgattcatttttcttggtttatgatctgttcaagtaaaggaacaatcttaatcgctagaggtaaaaattcaaatacaatccctagattacccctaaaagggtcatccacaaattacgcgaatcgaattcaaattcgaaacccaatcagtgtcaaaactttccggcgatcatcttcatcgtcaatggcggtggaaacaatgtcgatgggatcagattcatcaactttgattctaacatcangagcaaagcggtcgcgttanggtacccntcctcgatgccaagagcttaaagcgtctcgttaagantaancaatcgttgaatcctttc

SEQ ID NO: 3642 - DNA, 463 bp, Arabidopsis thaliana
  Clone ID: LIB22-083-Q1-E1-G11
acgcgtccggaaaaagtttaatttgtctctttctctatttatctccggcgtcaatttcacggcggctacacgacggttatcgatgtcattgactgtaccggagttcgatttcagattgacgccacagtttggtttctcacagtcaccgatcggggagcgtaatttcgcggatgttgataatctggagaactgtattaagtatttgaatcagagcttagtcacctctggattctctgcttcgcttgacctcttcgctaccgatcctgtttcgattgctagaacttgcaattgcgtatacgctttgattcaacagaggcaacgagatgtggaatttagagaatctgctaatgatcagagacaacgacttttatccgatatgggcgagactcgaagcaaaagttgaaaggcttgagactcaattggcaagctaaagaaagggaaacttggttcggtgacaagaacg

SEQ ID NO: 3643 - DNA, 505 bp, Arabidopsis thaliana
  unsure at all n locations
  Clone ID: LIB22-083-Q1-E1-G3
tgtactacggcnccggaattccnangtcgacccacgcgtccgtctanctcttcgatttcacgtcactcntcactcaataaaaaagctactgcttcaaagctctacttcntcaatttactctcattcgtttgcgttgatgtagcaaaacaaaaaccaaaatggttcccgtctcgttctgcttcntctttctccttctcttgctctctgctggagagagttcatcgcanttagtttctggtccacacatcaccgatgttaacatactcntacctcccaagatgaagaatccggttgagtatcgccttcaangaagtgatggctgcttcaaatggtcatgggatcatcatgatattctatcaagtcacacctgagtttaattcgagcagtcattgttcgaccagcgcgcgtctcaaatcgatttctccggtatagtggtagaaaaggagactgcagtttatgccactgatatacnagactgggatgggtgattcgctgcaangtcttt

SEQ ID NO: 3644 - DNA, 470 bp, Arabidopsis thaliana
  unsure at all n locations
  Clone ID: LIB22-083-Q1-E1-H5
acgcgtccgcgaanattcatcttttggggatgattatgagaaagagattggagtattacttggtgagcagcagagaaggcaagtagaagctgatgagcttgagagagagcttaatttgtataggagtggctctgctccaccgactgttgatggttctgttagtgctgctggagggctttttagcggcggaggtggggctccttttttggagtttggtggaggcaacaagggtaatgggtttggtggcgatgatgangagtttaggaaagatccggcttacttgtcttattactatgctaatatgaagttgaatccgaggttgccaccgcctttgatgtctanggaggatttgagggttgctcagaggcttaaagggagtaataaatgttttangtgggtgttggggataangaaggaaagttaattgatagtcaaatctttaanctctaatgccacctggttttgatcaa

SEQ ID NO: 3645 - DNA, 507 bp, Arabidopsis thaliana
  unsure at all n locations
  Clone ID: LIB22-083-Q1-E1-H6
ccctgggncgtacaaatccgggaattcgcgggtcgacccacgcgtccgccgtttcttcagcctctcgccgctaattaacgccgtctctggttgctaccaccgccgtaaccctaacggcatttttaatggcgtcgtgtgatgacgatttctctctacttggagacgatcagtcaaaccctaatcaacatcaccaccaccaccaagttcttcatcacacgccctacgctcctagacgattcaacccgaaaccatcgaatcagatccttttaccgcatcaccagaggaacggcgacgaggacgacgagaacgatgtcgttgtagaagcgtcttctgctttccacggtcacggtgttaatcctttcacggcggacgaaaattcgaatccgtatgatgataataacgcagctgtagacgaagacgaaagacgaaagatctcggtgccaacagatttagaatcggaggtgttcgtgttganaaanagggaagagtcagggaggaactaagtna

SEQ ID NO: 3646 - DNA, 495 bp, Arabidopsis thaliana
  unsure at all n locations
  Clone ID: LIB22-083-Q1-E2-A1
acgcgtccgcttcacacctacccctcaacaaacgttggcatcattgaattcaacaaagtacacaaacaagttctttctgctgctcttcatctttcacaaggttgtggctattgggtttgtaggcttccttgtcttcagaggcgttcaaggtctaattggatcaaatggtagcgtcaaaaggaaagagaaaaagatcctcagattcttacttccacaagtcgaagctgcatcgctcttgagcatcattcttgcattcctttggcaaatggcattcaggatttggcctgatttcatgattcacttcatactttggagtacgtttttgatgtctttatcctcaaggaatcctcctactgtgtttccagatgccagccactgatgctgttggggtttgcctcaattgccttctcaattgggcaattggttaanaatgccttgctgggtcactccgtaanaatcaagtttcngttccnaaagattttgggtcaaagtccg

SEQ ID NO: 3647 - DNA, 473 bp, Arabidopsis thaliana
  unsure at all n locations
  Clone ID: LIB22-083-Q1-E1-E6
acgcgtccgcttgtggattcccacttctttcttctgttttcttcttcctcttctttaaattggatgttttgggcaagaaacagagagaaacacgttaatttgagagtttgtcattgaatatttggtttgcaatggaaagagattttctgggtttgagcgacaagcagtatctaagtaataacgttaagcatgaggttaacgatgatgctgtcgaagaacgagggttaagtacgaaggcagctagagaatgggggaagtcaaaggtttttgctacttcaagtttcatgccttcttcagatttccaggaggctaaggcgtttccgggtgcataccaagtgggggatnagtttctgcgggcaatgttttccgcagatgccaanttggtggtgcgtttcaaaaacgcgacgccgcntttaataaggcgggtcaattcccttaacaactcaacccttccccttgttccaacgagtggc

SEQ ID NO: 3648 - DNA, 475 bp, Arabidopsis thaliana
  unsure at all n locations
  Clone ID: LIB22-082-Q1-E2-C12
acgcgtccgatttccattacccaatcccgctccttttctctgattttgaatcgaacccttaatacccagaaatctcacggttccgaggagtgggtttttgggggttagggttttcgagagatgttgaatgtcaggttcattgatgaatctgttttctctctgcttcaagccattcgggcacgtctgtgataattccgaagctggatcgggtggtggtggtggcgtttctggtggaaccggcggtgaaggcaaagacggattgctttggttccgtgatctcggtaaatattgcggcggagatttctccatggctgtgattcaagccaatcaggttcttgaagatcagagccaaggtcgaatccggtaattttgggacttttgttggtgtttacgaaggtcatgggtggtcctgaaactgctcnttaagtcnggtgatnaatccccttaancaatttcnaagcttaagggtaagcaa

SEQ ID NO: 3649 - DNA, 489 bp, Arabidopsis thaliana
  unsure at all n locations
  Clone ID: LIB22-082-Q1-E2-C2
aggcntccgctctgttcnancgcagacatttttgtttatatgcatacataataataatacactcttgtcaggatttttgattctctcnttggntttctcggaaaaatgtctgcgatactccaaggagctggagctgcaacggctctctcgccgtttaattctatcgattccaacaaactcgttgctccttctcnctcttctctttcagtgaggagcaagagatacattgttgccggatctgatagtaaaagctttggttctagcctcgtanctcgtcgctctgaaccgttgataccaaatgctgttacnacgaaatgcggacactgctgccagctctacttcaatcaaagcctgggacattgagctatcaacttttcganggctcttcaagaangtcctannaagaaagaagatggacaagagattcacaatgttatgttgtcaagggtgaaanatgtnagggcaattacgganggctcaatacaaagt

SEQ ID NO: 3650 - DNA, 527 bp, Arabidopsis thaliana
  unsure at all n locations
  Clone ID: LIB22-082-Q1-E2-C4
ctggttccctgnccgtaccgntccggaaatcccgaggtcgacccacgcgtccgctgattcatctcctctgtttaagcaaagcacttttctaaaatcccacaggagaagagagatcggaagagatgacgaagctggcggaaaaatcgggaagcagaccaccgtgggtgggattagcggcagccgcatgggttcaggtctcggcgggaagtggttcgacgttcccgctttactcctccgctctcaaatcggttttgggttttagccagcagcaggtcacgatccttggcgttgcttgtgatttgggtgaaaacatgggtcttcttcctggatacgccagtaacaagcttcctccatggtcgatgcttctcatcggagcttcctcntgtttcctcggcttcgggcgttccttgggtctccgtcaagccaaatccttccttgggcttgcccttttggctgctttttggtaactccaaccttanctancaaatagcaactccgtgggttccggtacaancatctccttgtca

SEQ ID NO: 3651 - DNA, 473 bp, Arabidopsis thaliana
  unsure at all n locations
  Clone ID: LIB22-082-Q1-E2-C6
acgcgtccgagctctggtatctaacaatcatgaggcgtactcaagttgtctacctaaatgtgtcaaaatattagaacgccttgctaggaaccaggatgttcctcaggagtacacatactatggcatcccatctccttggctccaggttaaggcaatgagggctcttcaatattttccaaccattgaagatcccagtaccagaaaagctctctttgaggtccttcagcgaatattgatgggcacagatgttgtgaaaaatgtgaataaaaacaatgcgtctcatgccgtgctgtttgaagctctctccctggtcatngcancttgatgctgagaaggaaatgatgtcacagtgtgtttgctcttcttggcaaagttaatttctgtccgttagcccaacatcagatatctagggcttggaaaatatgacgcgaatgctgatggtcacaagatgttcaagatatcataaagaagca

SEQ ID NO: 3652 - DNA, 452 bp, Arabidopsis thaliana
  unsure at all n locations
  Clone ID: LIB22-082-Q1-E2-C7
ggggtttttcattccagaatagccctaatccaaattcgaaatctttcttctgattttgatctttccgatcatgtcatcggtctgtgttaacgaagcattaaccgatgacgagctgagatgggtattgtcgagactagacagtgataaagataaggaagtgtttggtttggtctgcaagaggtggctaaatctgcagagtaccgaccggaagaagctagcggcacgtgctggtccacatatgctccgccgtctcgcttctaggttcactcaaatcgtcgaattggatttgtctcagtcaatttctaaggtccttttatccaggagttactgattctgacctcgctgtnatctctgagggattcaaagtttctcagagttcttaaatcttcacaactgtaaaggtattacagatactggattggcctcaattggaaggtgtccttccttaactg

SEQ ID NO: 3653 - DNA, 516 bp, Arabidopsis thaliana
  unsure at all n locations
  Clone ID: LIB22-082-Q1-E2-C8
aactggttcncctggccgtacnagtccggaaattcccgggtcgacccacgcgtccgattcgcgcgacacatagagtgtagagacgctttcacgagcgtttccgacgtcggactttcagctcatcatctccacatctttaacggtaaagattaatcatgcctgaaattcatttgggtgctcatacaataagatcccatggagtaacagtcgcgaggttccacatgcatgactggctcattcttctgctgctaatagtcattgaaattgttcttaatgtcatcgaaccctttcatcgttttgttggagaagatatgctcactgatctcagataccctctgcaggacaacacaattcctttctgggctgtcccgttgatangctgttgtgctaccttttgctgtcatttgtgtttactacttcattagaaatgatgtttatgacctgcatcatgcaatactagggcttttgttctctgtacttataaccggtgtcataaccgatgctataaaggacgct

SEQ ID NO: 3654 - DNA, 465 bp, Arabidopsis thaliana
  unsure at all n locations
  Clone ID: LIB22-082-Q1-E2-C9
acgcgtccgagaaaagtctgtttttttattgagatttttttgtttctatagattctatcgaaatgccgatgtttcagccgttaaagagagatgggttaataggatttgaaggtggtggtgatgggcaagtcttagatctggatactgcagtgaaannnnnnnnnnnnnnnnnnnnnnnnnnnnnnnnnnnnnnnnnnnnnnnnnagaaattggatctgaagaagatgataaaggagctagatttacaagatataccttctgttttcatttgtcctatctccttagagccgatgcaagatcctgtgactttgtgtactggtcaaacctatgaaaggttaaacattcacaaatggtttaacctaggtcacttgacttgtcctactacaatgcaagagctttgggaagatacggtaactccctaataaaactcttcatcatttgatctatacttgggttctctcagaa

SEQ ID NO: 3655 - DNA, 499 bp, Arabidopsis thaliana
  unsure at all n locations
  Clone ID: LIB22-082-Q1-E2-D11
taccggtcccggaattcccggntcgacccacgcgtccgaccgtccccttgttatacacatttaatgggagtttacactagggacagtgaaatgagttcttcattgactttgacttgcactgacggtgctcctgccttaaaacaaaganccatcggtctcgctaacacccacttgtcgattccctcgcagctcatctccatgtaccagcttcctcataagatagctctttgtttgccttccaccgaacgaagtcagtctcataatggtgacctttggatcggtaaaggggaatattattatctgccttacgataaagatgtctctaagatctttgcctccacgcctctgatcggtaatggcaagtccggcgagtacttaatcgatgtgaagtccatccaaatcggtgcaaagaccgttcctataccctatggagccacaaagatcagcactttggctcccttacaccgtattccaaactttcccttttacaagggctctg

SEQ ID NO: 3656 - DNA, 529 bp, Arabidopsis thaliana
  unsure at all n locations
  Clone ID: LIB22-082-Q1-E2-D2
ctggttccctttccgtacggcctcgggaattcccnangtcgacccacgcctccggtttnttacaggttcaaagattcttanccntccggggagttttggtangaaaaagacggagtcacagccaccgtcacccctgagtacaangaactatcagaatggtgctgctaataccccaaaggttcgtcaatcaagaccttcaccagtagctntgaagaagacgccagttccangaagcgaacaaatctttacactctttatcgtctgatggaatctctattgacctcaacggtcagaatgattcttttaaccataagcangagaagccatcgcgaactgttcctctatccccaanacagcatggctgatcntgggaaacccttatnancaacgancctccaaggggcattgaacacanntggcaagaattnacacagccaagtgagattaagtttgtttaatgttgttaagcccctccannnnnnnnnnnnnnnnnnnnnnnnnnnnnnnnnnnnnnnnnnnnnnnnnnncn

SEQ ID NO: 3657 - DNA, 538 bp, Arabidopsis thaliana
  unsure at all n locations
  Clone ID: LIB22-082-Q1-E2-D3
aactggttccctgtccgtacngccccggaattcccgangtcgacccacgcntccgtgacaacattaggaactgtgtataccgaaagaagtcgcgtcgcggatcttctaactatatggagaaacaaatacagtttacaggaatacttagcaataaagctcaagaaaatccagactttttcaactggaatcgagttaagcttcgttactgcgatggtggttccttcagtggagatagtcagaacaaggctgcacggcttcagtttagaggagagaagatatggagagccgcaatggacgatttgaaggcaaagggaatgcgaaatgcgaaacaggcacttctatctggttgctctgcaggtggtctagcagttattttacgctgttacgaaattcagaaaccttgttttcctgggatgggaccaagagttaaatgccttaaagttgatgcaaggcttgttccttgggacacgccctgatgttatcccgggtgggacacactataaaggaantttatataaccggcgnttgtgcaagttgc

SEQ ID NO: 3658 - DNA, 510 bp, Arabidopsis thaliana
  unsure at all n locations
  Clone ID: LIB22-082-Q1-E2-D4
gtacgnctccggaattcccgaggtcgacccacgcgtccgtacagcttttgttacgagtgacntgttntcagcacaaaacnaangtcagctcaggcgaagaacagatggctcgtaccaagcaaaccgctcgtaagtccaccggaggtaaagctccaaggaagcaacttgntactaaggctgctcgtanatctgcaccaactactggtggagtnaaganaccacatcnttaccgtcctggaactgttgctctccgtgaaatccgtaagtaccagaatagtactgagttgcttaccatgaaactgccatttcagangctantccgtgagattgctcaanatttcaagactgatttgcgtttccatagccatgctgtcttanctctccangaagctgcagaagcatatcttgttggtcncattgaagacantaaactttgtgccaatcatgccaagcgtntnaccaattaatgcccaaagnncatcaagctcgctccgtcgtatcagatggtga

SEQ ID NO: 3659 - DNA, 518 bp, Arabidopsis thaliana
  unsure at all n locations
  Clone ID: LIB22-082-Q1-E2-D6
aactgtttcgcctggcccgtaccgagtccgganattcccgggtcgacccacgcgtccgcccacgcgtccgcggacgcgtgggttcatcaatccctcctgctaccgcgagagagtaacaactcaccggacgtttcaaatccatcctccgataactatattcgtttcgttagatctagatctgagcgtcggtgagagattttctggatctgtgatacgttccaggaaacatggcgacgatgaaaagtttgataggtctgataaacaaaatccagagggcgtgtactgtcctcggagatcatggcggtgaaggaatgtcgctttgggaagctctcccaaccgtcgctgtcgttggtggccagagttccggaaaatcttcagttctagaaagtgttgtgggaagagattttctgcctcgtggatctggtatcgttacaaggaggccattggtgttgcaacntcataagactgangacgggacaactgagtacgctgagtttcctcatgctcctaanaagaga

SEQ ID NO: 3660 - DNA, 467 bp, Arabidopsis thaliana
  unsure at all n locations
  Clone ID: LIB22-082-Q1-E2-C11
acgcgtcnnnnnnnnnnnnnnnnnnnnnnnnnnnnnnnnnnnnnnnnnnnnnnnnnnnnnnnnnnnnnnnnnnnnnnnnnnnnnnnnnnnnnnnnnnnnnnnnnnnnnnnnnnnnnnnnnnnnnnnnnnnnnnnnnnnnnnnnnnnnnnnnnnnnnnnnnnnnnnnnnnnnnnnnnnnnnnnnnnnnnnnnnnnnnnnnnnnnngaggatccacatcgtgtggtactgctggagctctatacgcnttgatagccgtagtaactggttgtgcatgtatatactcatgtttcatccgtggaaanatgagagctcactattaatatnagaangagatgattgtactgattgccttanacatttctgctgttgagctttgttctttgacccaacantaccgtganctcaagcaccgcggttacgatatgaagtcttggatgggcggggaacgtggagaagacaccacaatc

SEQ ID NO: 3661 - DNA, 505 bp, Arabidopsis thaliana
  unsure at all n locations
  Clone ID: LIB22-082-Q1-E2-A10
ttcccggnctacggccggaatccggacgaccacgcgtccgggaagttaaaccccaatctgtacgaagaagcaaagtctgtcttagccttctcaatacctggacaggcagggganatgaagtctggggatcccaaatcatctagcatccttcaagttcttgtttcactccanggattggtgttgaattcaaagccttatttcaatgaagccgggtatgataagcangtcggaactgcggaaggagaaaaaaaactcactgggatacaacgagaatactttcttgctaaattgtaaaaccatgatgtatcttatgcggaaaccaccanagggattttgaagaactcatcaaagatcatttcaagaaaacgcgggatattacattttgaangcatgtgacgcctacatganaggatatctcatangttcctcaccaaaagatgcctcngttatcgatgaacgcagcaaccgctaattcaacttcagttgggtttaagcntaagctggc

SEQ ID NO: 3662 - DNA, 477 bp, Arabidopsis thaliana
  unsure at all n locations
  Clone ID: LIB22-082-Q1-E2-A12
acgcgtccggattcttttcttgcgaagatgagcaacgacaaggacagcatgaacatgtccgatctctccaccgctcttaacgaggaggatcgtgccgggcttgttaatgctcttaagaacaagttgcagaatttggctggacaacactctgatgtccttgaaaacttgactccaccagtcaggaagcgtgtcgagtttctaagagagattcagaaccaatatgatgagatggaagcaaaattctttgaggagagagcagctcttgaagctaagtatcaaaagttatatcagcctttatataccaagcgatatgagattgtgaatggtgtggtcgaagttgaaggtgcagctgaagaagtaaaatccgaacaaggagaaagataaatcagctgaagagaaaggagtancaaatttcctggcttaatgcattgaaagaacaatgaaantaactgcgggaagaaataactgagcgagatt

SEQ ID NO: 3663 - DNA, 528 bp, Arabidopsis thaliana
  unsure at all n locations
  Clone ID: LIB22-082-Q1-E2-A2
tggtcccgtgcgtacggctccggaatccnaggtcgacccacgcgtccgctaagatactataactactctttccaaaagcaattttaaatggtgtcattttgcggtagaaggttcgccttcttgattatctttctctttgcagcacaatatgagcgtgtctacgctggtagctttcacaaggacgttcagatacattggggtgatggccgtggaaaaattctcgacaatgtcggaaatcttctttctctctcgctcgacaaattctctggttccggttttcagtcccatcaagagtttctttatggcaaagtagaggttcaaatgaaacttgtacctgggtaactctgctggaacaagtgacaacattctatctaaaatctccctggaaactacatgggnatgaaataaaattttgagttcctggggaaaacataagtgggtcatccatatacccntcatactaaatgtttacacaaaaanggcacaaggagaacaaaggaacaacaagtttcatctatgggtttgacc

SEQ ID NO: 3664 - DNA, 512 bp, Arabidopsis thaliana
  unsure at all n locations
  Clone ID: LIB22-082-Q1-E2-A3
ctggtaactgtttcgcctggcccgtanaagtccgaanattccnngcatgcctcagccggntnnagaaacantcttcgatgataaagaaggctacgcaggaggaggctgtggctgtgacatcggtcttttgggacatcagtatgtgtctggttctcccttgctttgatcctcgtcgggtccgtccgtgtattaaacgggttttggagaattctcttgtcctctcaacatcactgccgttggcgtactaaaagacgtccagaatgacatcctgagatgagtctattccagtggaatcgctcttactaacgtcccctaaggttctatggacattttggntcntatttatagatttacccgtgaggatccacctccagctaatataatggtcataacccgattcggaacctgggtctttttgacntcctacanatgatgggatacaaccttctgcagcccgtttccatataaatcctttcaaaaacttcntcctggcaagattcaangggcacttg

SEQ ID NO: 3665 - DNA, 470 bp, Arabidopsis thaliana
  unsure at all n locations
  Clone ID: LIB22-082-Q1-E2-A5
acgcgtccgctgncttttgcaacatggattccacgagaaagccctagcagctgttgaggctagtgaaggacgaaccgaactaattgataaggtgggagctgggtatcttgatcatttgattgtggaaagaaaatatgctgaagcggcatctttatgccccaaattgttacgaggatctgcttcagcctgggagaggtgggttttccattttgctcaactacgccagctgcctgttcttgtcccatatatgcctacggataacccaaggcttaaggatactgtgtatgaggttgctctagttgcactaagcaaccaatccctcataccacaaggagcttttgtcagcggttaaatcttggccacgttctgtatattctgctttgactgttatctcagcaatagancctcaactgaacacatcctcaatgacagatgccctcaaagangcgctggcaanaactgttatgtaa

SEQ ID NO: 3666 - DNA, 523 bp, Arabidopsis thaliana
  unsure at all n locations
  Clone ID: LIB22-082-Q1-E2-A6
actggttcgcctggccgtaccgagtccggaattcccgggtcgacccacgcgtccgcaaaaaccaatcccaagatctgaatctcaacctaaacctcagattcatcatcatggcttcttcttctaactacgatggaatccttctcggtatgggtaacccactcctcgatatctctgccgtcgtcgacgacgaatttctcaccaaatacgacatcaagttgaacaatgcgattctcgcggaagacaaacatttgcccatgtatgatgagatgagtancaagttcaatgttgaatacattgccggaggtgctactcagaactcaatcaaagtggctcagtggatgcttcaaattcctggggcaaccaattacatggggattcattgggaaaggacaaatatggagagggcatganagaangatgctacattgctggattcttcctcacagtatcgcctgaatccattcaagttggnatccgagcacgctgctgcaaaacaaaaaggggttcaacaatgnaccttttc

SEQ ID NO: 3667 - DNA, 524 bp, Arabidopsis thaliana
  unsure at all n locations
  Clone ID: LIB22-082-Q1-E2-A8
antgtttcgcctggcccgtaccgagtccgganattcccgggtcgacccacgcgtccgcaaattccttgatagaaacaaaatggaagacaataaaagaaaagtattagatgaagaagcgaaagcttctctagacatatggaagtatgtctttgggtttgcagatatagcagctgcaaagtgtgccattgatcttaaaataccagaagccattgaaaaccatccttcttcacagcccgtaacactagccgaactctcctccgccgtctccgcctctccctcgcatctccgccgtataatgaggtttcttgtacaccaaggaatctttaaagaaatccccacaaaagatggtttagctacaggctacgttnatacgccactctctcgccgttttgatgatcacaagacgtgatgggaaaatcgctggctccttttgttctccttcgaaacanctcncgaagatgctcgctccaatgggtttgagacttagctcagtcgtntcttcgccggtcaacggttcaactcca

SEQ ID NO: 3668 - DNA, 524 bp, Arabidopsis thaliana
  unsure at all n locations
  Clone ID: LIB22-082-Q1-E2-B1
nggttaactggttccgcctggccgnanaagtccggaagntcgncccangcntcngggaaagaganaaaagaagagcgaacaaatnnnnnnnnnnnnnnnnnnnnnnnnnnnnnnnnnnnnnnnnnnnnnnnnnnnnnnnnnnnnnnnnnnnnnnnnacaacaacaacaacaacanaataatcttgcaaagtttcagtctcaggtggttcacagttaatgctacttgcaatgatgaatccatcccaatttcgataacctctactgaggcatccaaatgttgaacggaaaagaagagcctaagcagaagaaaggttggtcagagtcgctgctagaatttcggtcagggtttggggaaaagatgaaagttgtgtcgaagaaacgttggaaatctcttggtcntcttcatcctgaaaagcanatcagttgcacggttttgccttcttttcgaagttgaagtcanacaaccatggtccaangccgttgcaccaatgtatctcantgtttaagaccttgactcctattna

SEQ ID NO: 3669 - DNA, 514 bp, Arabidopsis thaliana
  unsure at all n locations
  Clone ID: LIB22-082-Q1-E2-B10
cggccggaatcccggancgaccacgcgtccgcacgtcacatgtgcactgggtttatgagaaaatgccaactgggcanggattcataagggagtgtgttccacttgggatgaagaatgctgtgccttacgaagaagagtgaaaactgttcctcggcgccgatatttgttaggcaatccaacttcaagcttccttctgattctaaggtaccgatcatcatgatcggtccagggactggattagctccattcagaggattccttcaggaaagactagcgttggtagaatctggtgttgaacttgggccatcagttttgttctttggatgcagaaaccgtngaatggatttcatctacgangaagagctccagccgattttgtttgagaagtggtgctctccgcanagctaagttgtcgccttctctcgtgaaaggacccaccaaaagaatacgttacaagcacaagatgatgggacaaaggcttctgatatcctggaataatgatctcctcaangga

SEQ ID NO: 3670 - DNA, 520 bp, Arabidopsis thaliana
  unsure at all n locations
  Clone ID: LIB22-082-Q1-E2-B7
actgtttcgcctggcccgtaccnagtccggaaattcccgggtcgacccacgcgtccgtgangttcatcatctccgggccgataccagtgtgcgtttggatcgggttgacatgagcctcgacagggtgattcagcaagtgggttccatgaaaattgggggaggtggcttgatatcagaggccatgaagagagccgaggctatggagattgagaccaacgacgattcggagaaatttggggttggattggaattgggaaaggttaaggttaagaagatgatgttcgaatctcaaggaggggtttttgggatcagtggaatgggcggtgttggtaaaaccactcttgccaaagaacttcaacgggaccatgaagtccaatgtcactttgagaaccggattttgtttctgactgtatcacaatcctccgcttcttgaaggagctgaaggaaacttatatggggtttccttanctggttgtgaanctggaaatcccngttcctgactgtaattttccgtttgatg

SEQ ID NO: 3671 - DNA, 513 bp, Arabidopsis thaliana
  unsure at all n locations
  Clone ID: LIB22-082-Q1-E2-B9
antgtttcgaacgctcttaccgggccgnaattntcgggancgncccacgcgtccgcaaaaaactcatccatggcgattcttagttacatctcagcaacatcaaccacaccaccaattcctcaagatcaatctcccaattctcgtctaccaaccaaaatcattctacccaataagaaacctgagaaatggtccaccggagttgctcccggagagtacggtggtcctccgactaccaccaagctccgaaagtactggggaggtgaaaaagaagatcccattacttccacagacttaatctggaacagagattttatggatcaaatgaagaaattgtttgatgatcctaatgattcttctctcgacccatctccttcaaaggaaaagtcttctgggtttctgagctttagcagagttatgagtcttgacagtatggatgttgatttaagtaaagagcttgcatcgtcttctaaatccgttgtgaaaaatcgtcttgacacctccaangtcaagaag

SEQ ID NO: 3672 - DNA, 428 bp, Arabidopsis thaliana
  unsure at all n locations
  Clone ID: LIB22-082-Q1-E1-H12
acncacgcgtccacccacgcgtccgctctcttcgtcttccctcccgagaaagctcaacggagccctaagactggttttatcactctcgccaacaccaaccacgctttttctctctttacctccatttttgtattcgtcaccggagtagatggatacgagagaaatcaacggttttgcctccgccgcgagatcgatatctcttcctacgcagcctaattacagtagcaagcctgttcaggaggcgttgaaacatttggcatctataaacctcagagaattatgtaatgaggcaaaagttgagcgatgtcgtgcaacaagagacttagctagctgtggnagatttgtgaactatgtgttgaatccatgtggtcatgcctccttgtgnacagagtggttgtcaganggtgtgatgtttggtccnaactgta

SEQ ID NO: 3673 - DNA, 453 bp, Arabidopsis thaliana
  unsure at all n locations
  Clone ID: LIB22-082-Q1-E1-D9
aggtaccggtcnaagaattnacgggncgacccacgcgtccnctcgattatacaagttttcctctctttcactctctccgtagtctgagactcgccggaaaagcttgtattggcttctcttcgatttctggcggaagtaaggatatcacgtgagctatgaagttcctcatgcaatccatttctgggaggaatcgatctctggttcgagctctagttagtcggcgttacttcgcttcatcgccggaggaaatcgcaaagagaaattacgccaacgatctgtcggaatacaacaccgctgtcaactccgtcacagctcagcgcaggcactatttgctgagggatgtttatgatgatatgaagcttgatggtgtgcaagcctacagctgatatcttccattcatttgtcgtgggaacgatgaagggtgctcggttaagcgatgcgttctttttccgg

SEQ ID NO: 3674 - DNA, 411 bp, Arabidopsis thaliana
  unsure at all n locations
  Clone ID: LIB22-082-Q1-E1-E2
caactgatttctacacatcccatgaggtgtttgcttctgccttatgaacagtcccttacaaggttggattcaacttctgggtctctactatgattgttctgcacacatggtctggtgcggagagcgtaccangacanttggatggcgctcatgtcgagtttctcagggggattgctaatcctctgggcattaaggtgagcaacaaaatggatccctttgagctggttaagctagtagaaatcctgaatcctaataacaagcctgggaagaatcactgtaattgtgagaatgggtgccganaacatgagagttaagcttccccacctgatcaagangcagtccgcagatcaggccagattgtgacatgggtctgcgatccaatgcatggaaacaccatcaaagcaccttgcg

SEQ ID NO: 3675 - DNA, 394 bp, Arabidopsis thaliana
  unsure at all n locations
  Clone ID: LIB22-082-Q1-E1-E8
caactgatttctacacatcccatgagtgtttgcttctgccttatgaacagtcccttacaaggttggattcaacttctggtctctactatgattgttctgcacacatggtctggtgcggagagcgtaccagacaattggatggcgctcatgtcgagtttctcagggggattgctaatcctctgggcattaangtgagcaacaaaatggatccctttgagctggttaagctagtagaaatcctgaatcctaataacaagcctggaagaatcactgtaattgtgagaatgggtgccgagaacatgagagttaagcttccccacctgatcagagcagtccgcagatcaggccagattgtgacatngggtctgcgatccaatgccatngaaacaccatc

SEQ ID NO: 3676 - DNA, 455 bp, Arabidopsis thaliana
  unsure at all n locations
  Clone ID: LIB22-082-Q1-E1-E9
ccagtaccggtcaaagaattcacgggncgacccacgcgtccnagaattttttttctttttcttatctgaatgctttcattctaattaaagattttaatatatgaatattcgcacgtggatatttgtataagatatgcattaatctccgaggctatgtatagttcagaatttgaagtgaagtttaggagaggaagagagatggaggtatttagacttggngagctgagacacctactggtgacggttttcttgtcggggctcgccgaatacttgataaggccagtgatgactgacgtcaccgtagccgcggtttgctccggcctagacgattcatgttctttggccgtctatctcaccggagtacaacaagtgacggtaggaatgggggacaatggtaattgatgccagtgatcggcaatctatcgggacagatattggaatcaanagcatgctcc

SEQ ID NO: 3677 - DNA, 453 bp, Arabidopsis thaliana
  unsure at all n locations
  Clone ID: LIB22-082-Q1-E1-F12
ccttccagtnccggtcaagnattancgggncgacncacgcgtccncccacgcgtccgagctaaaatactgtgttctttgtttcttccatcgaaatcgaaaaaagctaagatcnttgcgttttgaaacgatggcggaacgaacataagcatgatgaatctgtgatcgctcctgagccagctgttgaggttgtggagagagaatcgttgatgganaagatatcggagaagatccatcacggtggtgattcttcttcgtcttcttcatcttctnnnnnnnnnnnnnnnnnnnnnnnnnnnnnnnnnccctcttctccttcgtcttctatgaaatcgaaagtttaccgcttgttcggacgagagcagcctgttcataaggttctcggcggtggaaagccgggctggatatantcatgtggaangaacaagaagattctgggggtgnactttggtggg

SEQ ID NO: 3678 - DNA, 433 bp, Arabidopsis thaliana
  unsure at all n locations
  Clone ID: LIB22-082-Q1-E1-F2
aaccttccggtgccgtctaaaaattcangggtccgacnnacgcgtccgaaaaacattaagtagcactctttttcccctcctaatatccctcactccacactttttcnctatatcttctcctcaacttggatatggggtgaagccgtagaggtcatgttcgggaaatgggttcccggagattcacaaagccacatcacccactcaaaccctccactctaaccagcangactgccattggtatgaagaaaccatcgatgatgatctcaagtggtcttttgccctcaacagtgttctccatcaaggaactagtgagtaccaagatattgctctgttggacaccaaacgttttggaaaggtgcttgtgattgatgggaaaatgcaaagtgctgagagagatgagtttatctaccatgaatgtttgatccancccgct

SEQ ID NO: 3679 - DNA, 434 bp, Arabidopsis thaliana
  unsure at all n locations
  Clone ID: LIB22-082-Q1-E1-F6
ggtgcccggnaaaggtccaagaattcccgggctttcaagaaacaaaaacaagataatgatctcttcagattcctacactccaacaaatataagtttcattagattctttcttagctagagaatgaaactgattgagaagacgatgagcatgaaccagtttaggactatggaggaggagaagcaagacggtggtgagcttttccataccatcgaggtagctaaagttgaccggaacaacgtgtctcagccgccgccggctgctactgcagcactgctagaagttcccggtgatgaacttaacctaattccaccgttgaacttttcgatggtcnataatggtatattccggtctggattccnggactcggcgaacttcnccttcagcaagactcttggccttcgctcaancatatcgttgtgtccagagccatanc

SEQ ID NO: 3680 - DNA, 407 bp, Arabidopsis thaliana
  unsure at all n locations
  Clone ID: LIB22-082-Q1-E1-F8
acgcgtccnaatggatcgtcttaagctttatttctccgttttcgttttgtctttctttatcgtctcggtttcgtcgtctgatgtcaacgacggcgatgatctcgtgatccgtcaggtggttggtggagccgagcctcaggttttgacctcagaggatcacttttctctcttcaagcggaagttcgggaaggtctacgcgtccaacgaggagcatgacnatagattctcggttttcanagcgaatctcaggcgancgaggcgtcacnagaagttggatccgtcggcgactcagnggngttacgcagttctcagatntgacncggtctganttccgtaaggaagcacttgggnggttacaantgggctttaagcttccnanttgatgccagcagggntcccattctccc

SEQ ID NO: 3681 - DNA, 441 bp, Arabidopsis thaliana
  unsure at all n locations
  Clone ID: LIB22-082-Q1-E1-F9
gaattaacgggncgacccacgcgtccgtttttttattctcatcggcaaaatatatatccccaaaattttatcatatttctcgatagagaaaaatcattaactaaatatccattcccactcaaaaccctaaaaaagagagcctcaaaatctttgagtgttttgcgtcgtcggttttaaacaaaaaggttcaataactttttctctcctttgtttcttttttgtttattatctcctctcatcccattttcccaacacgacgtcgttacagattcctccgatggacttcccggacgatcacccttaaccaccttacaaaacgacgacggaggaagaaaaggaaccggtacagccggagcggttagggttaaaccgtggttcacttggagatcaagatccgaatcggacttcaaatcgttttccggttaaccaagaagagtcctt

SEQ ID NO: 3682 - DNA, 383 bp, Arabidopsis thaliana
  unsure at all n locations
  Clone ID: LIB22-082-Q1-E1-G2
acacacatttgtcgaaatcntaacaccaatcccaaatcagaaaaatcaaaactttttantttattttatcaaaatggngcttatgaatggaagcatgaatcnatcatcggtcaaatcatcgatgatcaaccaccgtcaaccanacttctcctccgccgtctccagacccacttctttccggatctccgccgtgcaaaccgacccaaaaacaccaggctgcttcatcggcgtcggcggcgacgacnactccggnaacgttgacgaagcccgttggagttaangtgggtaaaggaaaatgggcaccagagagttggaggacgaaganagctttacagnancccgggctatccagatttagctgcgcttgaaggctgtgccagacn

SEQ ID NO: 3683 - DNA, 367 bp, Arabidopsis thaliana
  unsure at all n locations
  Clone ID: LIB22-082-Q1-E1-G8
acgcgtgggctctctaacttgaaagttgtttcctttttttgaatctgagctggttttggaattttggtgtcaagatttggaatttgaatctgtagtaagattcaggtttagtgggggagggaacaagttggaagcttttgctagttttgtcaaaggtgtcactaaagtactaactatcagaaaacattttcagccagaagcttggtgatgtatcttcagattttcaacaacccatctcatggcttagctcatttatgctactctagtcggggtttcgtgtagggtaagactgagtcgtgtccttgccatgccaccgtcttcagtcctccttgcatatggacgaaagcaatgatcttcccaagccang

SEQ ID NO: 3684 - DNA, 460 bp, Arabidopsis thaliana
  unsure at all n locations
  Clone ID: LIB22-082-Q1-E1-G9
cgctgcccaggtaccggtcaaagaattcccggggccgacccacgcgtccnctttgtctctgtcgcaatctcaaccatatggagaaagacatggcaatgatgggagacaaactgatactgagaggcttgaaattttatggtttccatggagctattcctgaagagaagacgcttggccagatgtttatgcttgacatcgatgcttggatgtgtctcaaaaaggctggtctatcagacaacttagctgattctgtcagctatgtcgacatttacaagttagttttaattactaatatgagaggatttgctagagatagttaactaaattctcccctttactcttgaccaatccatttttattgtgacctcatccaaaaatgacaagctttgcttatataacaatttgtcancactatctgtgtcactgagtgatgcattgattataggatatgaaaatgatt

SEQ ID NO: 3685 - DNA, 454 bp, Arabidopsis thaliana
  unsure at all n locations
  Clone ID: LIB22-082-Q1-E1-H10
aggcanaggttaacgggccgacccacgcgtcnaagagagacacacgcagattttgagctgcgtgctctgttttaagcttgaaggaggaaaaacatggcagaccaagaatcaagataagaacattgagatttggaagattaagangctaatcaaaggacttgaaaccgcaagaggtaatggaacaagtatgatctctcttataatgcctcctagagatcaagtagctcgtgtcactaagatgcttgctgatgaatacggnaccgcctcaaacatcaagagtcnagtgaatcntcaatctgttttatctgccattacttctgctcaacanagattgaangctttacaacaaagttcctccgaatggncttgttctcnatactggaaccattgttactgatganggnaangngaagaaagtgaccaattgatttcgaacccttttaaaaccgaggan

SEQ ID NO: 3686 - DNA, 466 bp, Arabidopsis thaliana
  unsure at all n locations
  Clone ID: LIB22-082-Q1-E1-H11
tcacgctgccagtaccggtcaagaattcccgggncgacccacgcgtccnagaggtgccaagtgaacactgaggcccgtagtttatctctgcagaagcaactccagagatattctccagtcaccctcgaagccaagttgacagaactttctgaagcagatcagaaagcgttgggtctaattgtgaaggctgcaaaaattatggacgatatattctatgagcaggtttggaacagcaatccaagccctaagagattggctgaaggatcatgccaatgcatcaaaactggacaaactaaaatgggattacttcacgatcaacaaaagtccatggtcgtctcttgatgaaaatgaagcattcttgagtactgcggattcagctgtaaagttgcttcctggagcaacaaaagccataanctggctggaaagggtccttgaatatagagcagccttccanttgactaaacca

SEQ ID NO: 3687 - DNA, 401 bp, Arabidopsis thaliana
  unsure at all n locations
  Clone ID: LIB22-082-Q1-E1-D6
acgcgtccgcggacgcgtgggttcatcaatccctcctgctaccgcgagagagtaacaactcaccggacgtttcaaatccatcctccgataactatattcgtttcgttagatctagatctgagcgtcggtgagagattttctggatctgtgatacgttccaggaaacatggngacnatgaaaagtttgataggtctgataaacaaaatccagagggcgtgtactgtcctcggagatcatggcggtgaaggaatgtcgctttgggaagctctcccaaccgtcgctgtcgttggtggccagagttccggaaaatcttcagttctagaaagtgttgtgggaagagattttctgcctcgtggatctggtatcgttacaaggganggcattgggtgttgcaacttcn

SEQ ID NO: 3688 - DNA, 440 bp, Arabidopsis thaliana
  unsure at all n locations
  Clone ID: LIB22-081-Q1-E1-F5
acgcgtccgagaaaagggaaaattaccagacaagagtnnnnnnnnnnnnnnnnnnnnnnnnnnnnnnnnnnnnnnnnnnnnnnnnnnnnnnnnnnngaaaatctagaagaagagaaagctacaaaaatctcaacatcgaggtaagagttttggctacagagcaaccatgctaacttgcgccttctcccaaaatcttatccactaatctcggtaaggaaagtgatgttggcaaaatggtgaagaaaggaagttggttttctgctatcaaaagggtttttactccanattccnnnnnnnnnnnnnnnnnnnnnnnnnnnnnnnnnnnnnnnnnnnnnnnnnnnnnnnnnnnnnnttttgggaagctaaggcatgngcgagaccaattcatttcttcccatcttcagangagcctantagtatcganaagatcttggggcgaa

SEQ ID NO: 3689 - DNA, 432 bp, Arabidopsis thaliana
  unsure at all n locations
  Clone ID: LIB22-081-Q1-E1-F6
caagatgacctaaagcgtgcaactggagaattcaccaaggacgagaacgatgctaacaaacttaaccgcattcttcaactcacaggattcagtgacccagtctatgctgaagcacatgtgacggtacaccattatgatattgctcttgaagttacagtaatcaaccganccaaggaaacccttcagaacttgtgcttggagttagcaancatgggtgatcncanacttgttgagcgtcctcaggaactacagtctggcacctggaaagaagcatgcagattnaagcnaanatnnaggtgtcgtccacaagangacngggagtcatattcggggaanatcngtcnatgagacatcaaatgtaatgggncgaaaacntcgttgntcttantgaacatncacatttntatcattggactatatctcccntgctgt

SEQ ID NO: 3690 - DNA, 427 bp, Arabidopsis thaliana
  unsure at all n locations
  Clone ID: LIB22-081-Q1-E1-F8
cgatgcaagagattgtgagagatatgatccctcgtattaaccgcactagcagatcggatattattctccggcaccgccacatcatcaaaaacctcaaacttcaactccggcaacatctcctccttcctcatctcacaaatgttatgcaacacacaacaagctccaagcacgtacggcagatcctgaagcttcacctccgtccgtttctgcaaacaagcccaccgtcctttgagcctctcaaacgcagccgtcgcaatcccctgaatctctccgatactctcgttaaacgcgtgctgcgtccacgtcagattctgtctcgtgtacggtacaagaagataatcaagtcaacggaaacccagagtttccaactatccagctgtcacgtaacatcccanngcgccgctctttgccgtgnaaagcgaagatt

SEQ ID NO: 3691 - DNA, 491 bp, Arabidopsis thaliana
  unsure at all n locations
  Clone ID: LIB22-081-Q1-E1-G1
acgtntgcagtaccggtccnagaattnccgggtcgacccacgcgtccgctcttcctccatcggtggaaacttgttacccttgttcaaccgctcctcacgctaaagctccctctcctcctgagattattgctcctgttcctcttggaatttatgatggtggtcaaaagaatgttgtcaagaaacgtgtgtcttttgctgaaccggtagaagaagtcaaaccaatagaaaccattaaagagcnnnnnnnnnnnnnnnnnnnnnnnnnnnnnnnnnnnnnnnnnnnnnnnnnnnnnnnnnnnnnnnnnnnnnnnnnnnnnnnnnnnnnnnnnnnnnnnnnnnnnnnnnnnnnnnnnnnnnncagttcaangctatggaaatgaggaatatgaagtcgtagcataaaaggagaagtgaaagctttgtaagttccgtctggttacggattagaangcgaccgatntnctgtgaaggttnatattttgggagggtta

SEQ ID NO: 3692 - DNA, 423 bp, Arabidopsis thaliana
  unsure at all n locations
  Clone ID: LIB22-081-Q1-E1-H3
gaaatcaaaccaaccattaangaacttgtaatggcggcgccagacaacccatcaaacgccgtggaatgggccattgcgcgagatgataaacaaaccggagatcctccacaaagctatggnagagatcgataggagtcgtcggnaaagaaagattcgtccaagaatccgatataccaaaacttaactatgttaaagctattatccgagaagctttccgtcttcatccccgtcgcccgccttcaacctcccacacgtggcactctctganacgaccgtcgcaagttancatattcctaaaaggaangtcaagttttacntangccgttacggtctttggnncgtaaaccccaacngtttgggtctgatccactntagccttcaanccaagnaaagggcatctcaatggagtgtttcgggnagtga

SEQ ID NO: 3693 - DNA, 468 bp, Arabidopsis thaliana
  unsure at all n locations
  Clone ID: LIB22-081-Q1-E1-H4
ttgcagtaccggtccaaaattcncgggtcgacncacgcgtccgaactctctaatcaaaaagcttttaacctcagccgttaaatctttctccgatcatgccganaagaaacatcgccattggnggagtccaagaagaggtctatcaccccaatgcacttanggcggcgctcgctgagtttatctcgactttgatcttcgtcttcgccggctcaggctccggaattgctttcaacaagatcactgacaatggancaacnactccttccggcctcgtcgncgctgccttagctcatgctttcggtctcttttcgctgtcgcntgtttggcgctaacatttccggtggccangttaccctgctcgttaacttcggtgtcttacacggnggtaanatcactctccnccgtggnattccctacnggattgctcanctttcttggggtcccgtcggccggctgtgtttcctncct

SEQ ID NO: 3694 - DNA, 423 bp, Arabidopsis thaliana
  unsure at all n locations
  Clone ID: LIB22-081-Q1-E2-A1
attctctcttcttctccttcttccttctcctccaccacaaagcggtaggtttctctcttcaacaatcgtctccccattaggcacattgttgagggcagggtagtctcgtgagttctcttctcctgagtgtaactgtggttaaaagcttagccaagatgcagggggagagggccagtcttggctatttatcagaggccttgaactttgagcatggttcttcttcaagtaatggtgtgatagatcattgggagaatattcacagtcttggtgataatgacttgcaggattacatgattgcaaattctgaatcaaatacttcgcttgcaaactcagtttatcacgagcaacaaggtttacgcagatttagccttggtgangctagctctantggcacgaaaggatgaaacctccaagtcacaaatg

SEQ ID NO: 3695 - DNA, 394 bp, Arabidopsis thaliana
  unsure at all n locations
  Clone ID: LIB22-081-Q1-E2-A11
cgcanctctcttgaaaattcgatcaatcgaagatggcactcttctgaagtccntccancatttgcttcaccgaantaaganagttgatttcattgaacaattcaatgaaaagcttctagttgagcaagagancgagaatctacggatacttgacgttcgaaangctgagctgatagaagttagcagaactgacttcatgacaccatcaagcattcagnatttttgtatgagaatcagttgtttcnaagattcaggaaccganatgtntctgtgtggaatttccgcggagagcttgtgacctcgtttgaggatcatcttcnttggcntccagactgtaacacangnaanatctacataacaagcgatcaagatctgatcatcncataatgcaaag

SEQ ID NO: 3696 - DNA, 417 bp, Arabidopsis thaliana
  Clone ID: LIB22-081-Q1-E2-A6
tctcccttaacaagaaccatgagctcctccgatggcggctcctctagggtttcgattccttaccatctccgcaaaacccttcagaaaatcagagagtataccggaaagcagcactcggatgaggatatctttgccgtctataaggattccttcaatgatcctcatgagaccgctcagaagctcctcttcttagatacatttcatgaggtgagaagtaaaagggagaaaaagaaggagcctatagtgccagttacacaaccaagtggcagaggtggtcggaggaactttgcttcaagtaactcttatcaaggtagtggaagaaatgcttcttttaaaagggaaaatggagctaatcatgtaacaagaggttctagaactgctcagcctgccactaacaaagcaaagcaacatcacagt

SEQ ID NO: 3697 - DNA, 400 bp, Arabidopsis thaliana
  unsure at all n locations
  Clone ID: LIB22-081-Q1-E2-A9
gattatgccggttaaaggttcaggtcaatgtagctacgccggttgtgttagcgatctaaaccagatgtgtccggttggtttacaagtccggtcacgtaacgggaaacgtgtagtagcctgtaaaagtgcttgctctgccttcaattcaccacagtactgttgcaccggcttgttcggtaacccacagtcttgcaaaccaacggcttactccaaaatcttcaaagtcgcttgcccaaaagcttactcttatgcttacgacgacccaaccagtatcgccacatgttccaaggctaactacatcgtcaccttttgccctcatcatcgccattaaattagccagtaaagaagaagaaacatttctctattaacaacaaactcctgtcangtttccaaattcctg

SEQ ID NO: 3698 - DNA, 444 bp, Arabidopsis thaliana
  unsure at all n locations
  Clone ID: LIB22-081-Q1-E2-B3
accgggtcgaggcacgcgtccacccacacgtccgcttcatcttcttctcccgtaaagctctcgcgtctatggcggtcaaatgtttctctctttatctgattctggcggcgattgtaatcggcggcgtcacctccgagtacatagagtacaacacaaaaccgagaatcgtccctgagaaaatcaatgttcacttagttcctcactcacacgacgatgtaggttggcttaagaccgttgatcagtacnacgtaggctccaataactccattaggggaagcttgtgttcanaatgtattggattctgtaatcgcttcattgcttgatgatgaaaatagaaagtttatttatgttgaaatggctttctttcaaagatggtggaggcaacaaagcaatgctaagaaagttaaagtcaagaancttgttgactctggtcaacgttgagtt

SEQ ID NO: 3699 - DNA, 481 bp, Arabidopsis thaliana
  unsure at all n locations
  Clone ID: LIB22-081-Q1-E2-B4
ctgtttacgcttgcccggtaccgggtccaanaattnccgggtcgacccacgcgtccgattctgaatacgtttgatgaacgtatcagttcatttgctgaacaaaagttcacgcgagatggtattgatgttcagactggaatgcgtgtaatgtctgtgactgataaagatatcacagtgaaagtcaaatcaagtggagaactcgtaagtattcctcatggattgatattgtggtccactggagttggaacccgtccagttatcagcgacttcatggagcaagttggccaangaggcagacgtgcggtggcaactaacgagtggttacaagtgacaggatgtgagaatgtatatgcagttggcgattgtgcttccatagctcaacgaaaaatcttgggggatattgcaaacatattcaaagctgcagatgcggacaactcaggaaccttgaccatgggnagagttanaaaggcgtggtttgatg

SEQ ID NO: 3700 - DNA, 426 bp, Arabidopsis thaliana
  unsure at all n locations
  Clone ID: LIB22-081-Q1-E2-B5
acgcgtccncttctttttccgtacttttttatcagaacttgtagggtttcttctgtttcaattcgtggaatattttgcaacttcgatacgtaaattacgtaattagggtttgataatgttttatgtaaccagccccgaattgaattagttccaaagttagggtttttctctctcaaattagggttttgccccaattgtgttcttatattgaatttaccatttgcgcaggttatgtggtggaggttgtttccaatttaaagtatgtacctttaggttagaaattaggcttatttgtttctccagtgggtttcattgtagaaacaaattgaattttaggtgttaatgtgagattaggaaacaagaatctctgcttttaacaaggtaataggagaatagggtttaagtanaagaaaggttaaaactttg

SEQ ID NO: 3701 - DNA, 380 bp, Arabidopsis thaliana
  unsure at all n locations
  Clone ID: LIB22-081-Q1-E1-F10
aaatcagtttccaaacgtggattttgcaagcccagcaaaactgaagcggcagattttacgtcaggaaaggagaggtcaacgaactttagagctgatccgacaagaaaaggaaactgatgagcagatgcaagaagcagccattcagaagtcaatgagctttgaaaactcagtcatagggaaatacagtatatggaggagagactatgagagcccaaatgctgatgctatcttgaagcttatgagagaccagatcataatggcaaaagcatatgcnaatattgccaaatcaaaaaatgtaaccaatctgtacgttttcttgatgcagcaagtgtgggagaaaataaacgtgttataggtaaagcaacctcctgatgccgacc

SEQ ID NO: 3702 - DNA, 400 bp, Arabidopsis thaliana
  unsure at all n locations
  Clone ID: LIB22-080-Q1-E2-H10
acgcgtccgctcgccaagaagtttcctttcctttgattgcacaactaatctcaaactaaaagatcttctctttaggcatacccagatctttctctctctaaagtctccacctttcacggttttttgcttctcacctgaatccaatcaatctcgccggagtgaattcaccttcctccggttgactcgtcggacttagtccgacctttcaattcgtagattctgtttacaattcactgatcgtttgattagaaatgggttacttgttcttctaagtctctctttagctgaaagtttgttgctttacgactcttcgatttacccttacttgttcaagttcttcatcaaattcgtaggttatggggataaagaatcactttcacttactccaaccaagttggcn

SEQ ID NO: 3703 - DNA, 470 bp, Arabidopsis thaliana
  unsure at all n locations
  Clone ID: LIB22-080-Q1-E2-H2
aattctccgccgnccggtcaagaataaancgggncgacncacgcgtccggtcaaaggtgaaagaaaatctgaaagcaaagcagagagcagctcccttcccctcgnnnnnnnnnnnnnnnnnnnnnnnnnnnnnnnnnnnnnnnnnntcatcgcagcttctcctccgaccatttgactgcgactgtgattacaacacaccgttgatcctacgaaaaagaggtaatggatactggcggcaattcgctggcgtccggacctgatggtgtgaagaggaaagtttgttatttctatgaccctgaggtcggcaattactactatggccaaggtcatcccatgaagccccatcgcatccgcatgacccatgccctcctcgctcactacggtctccttcagcatatgcangttctcaaagccctttcctgccccgcgaacgtngatntctgccggcttcaaagccgaacaactatgtn

SEQ ID NO: 3704 - DNA, 458 bp, Arabidopsis thaliana
  unsure at all n locations
  Clone ID: LIB22-080-Q1-E2-H7
actttgccgccgccaggtacaggtcanagaattcccgggncgacccacgcgtccgctctcgttctcatctttctctctaagagattttgtaggtgacaatcaaaagtttgacaaaatggtgaagtttacagctgatgagcttcgaaggattatggactacaaacacaacatccgtaatatgtctgttattgctcatgtcgaccacgggaaatccactcttactgattctttggttgctgctgctggtatcattgcccaagaggttgctggtgatgttcgtatgactgataccagagctgatgaggctgaacgtggtatcactatcaagtccactggtatttctctctactacgagatgactgatgaatccttgaagagtttcactgggagccagagacggnaaaccaataactcaacaaacctaatgatccacctgggcacgttgaactttcctccng

SEQ ID NO: 3705 - DNA, 471 bp, Arabidopsis thaliana
  unsure at all n locations
  Clone ID: LIB22-080-Q1-E2-H8
tccgcggcccgtaaaggtcanagaattcccgggccgacccacgcgtcngcccacgcgtccgacgaatattcaaaaaaaaaaatttcttttctctttctaacaccacagatttcgcaatcgtgttttgatctgattcttccaggattctcccggtggcggagagaagaaacaaaggaaacccagaaagcatttttctcaatggcgtcgactacacgagaaaagtttgtatctttcataaacaacagatggctcgtcttcgtggctgccatgtggatacagtcttgtgctggcatcggttatttgttcggaagcatttctccggttatcaaaagctccttaaactataatcaagaaggagctttccagacttggagtcgccaaggatctcggtgatagtgtcggattcatcgccggtactctctcctgagatcttgcctccnttgggccgctccttcctggttgggcgccgtt

SEQ ID NO: 3706 - DNA, 435 bp, Arabidopsis thaliana
  unsure at all n locations
  Clone ID: LIB22-080-Q1-E2-H9
cgttacctnccggtgccgtcnaaaattaaagggtcgacnnacgcgtccggagaagtcgaggtctctctatctctctctttcgtacacttcgcgcttctcttcctgtcagaggcgtttctcatggctcctcttactctctccgttgatgtgaagagctcttcagcgacctctcatgatgtttcnaagagggtaatgcagagttcacagctcaaaataaacaaaggnttttttgcatctgttaatacacaagaagataaaccctttgatttcttccgcactctctttgaggggtttatagcaggaggtacagctggagttgtagttgaaacagctttatacccaattgatactattaagactagacttcaggcaggcagctcgtggaggtggaaaaattgttttgaagggtctttattcaggattanctgggaatat

SEQ ID NO: 3707 - DNA, 453 bp, Arabidopsis thaliana
  unsure at all n locations
  Clone ID: LIB22-081-Q1-E1-A1
acgcgtccgntcattctctcttcttctccttcttccttctcctccaccacaaagcggtaggtttctctcttcaacaatcgtctccccattaggcacattgttgagggcagggtagtctcgtgagttctcttctcctgagtgtaactgtggttaaaagcttagccaagatgcagggggagagggccagtcttggctatttatcagaggccttgaactttgagcatggttcttcttcaagtaatggtgtgatagatcattgggagaatattcacagtcttggtgataatgacttgcaggattacatgattgcaaattctgaatcaaatacttcgcttgcaaactcagtttatcacgagcaacangggtttacgcaagatttagccttggtgaggctaagctcctaagtgggcacgaaaggatgaagcttccaantcnaaaatggagcaaacgaat

SEQ ID NO: 3708 - DNA, 489 bp, Arabidopsis thaliana
  unsure at all n locations
  Clone ID: LIB22-081-Q1-E1-B3
gtttacgttgcccgnccgggtccaaaattaacgggtcgacccacgcgtccgnccacgcgtccgcttcatcttcttctcccgtaaagctctcgcgtctatggcggtcaaatgtttctctctttatctgattctggcggcgattgtaatcggcggcgtcacctccgagtacatagagtacaacacaaaaccgagaatcgtccctgagaaaatcaatgttcacttagttcctcactcacacgacgatgtaggttggcttaagaccgttgatcagtacnacgtaggctccaataactccattaggggaacttgtgttcagaatgtattggattctgtaaatcgcttcattgcttgatgatgaaaatanaaagtttatttatgttgaaatggctttctttcaaagatggtgggaggcaaacaaaacantgctaangaaagttaaagtcaagaagcttggttgantctggtcaacttgagnttcataaaatggtg

SEQ ID NO: 3709 - DNA, 336 bp, Arabidopsis thaliana
  unsure at all n locations
  Clone ID: LIB22-081-Q1-E1-B5
ctttttccgtacttttttatcagaacttgtagggtttcttctgtttcaattcgtggaatattttgcaacttcgatacgtaaattacgtaattagggtttgataatgttttatgtaaccagccccgaattgaattagttccaaagttagggtttttctctctcaaattagggttttgccccaattgtgttcttatattgaatttaccatttgcgcaggttatgtggtggaggttgtttccaatttaaagtatgtacctttaggttangaaattaggcttatttgtttctccagtgggtttcattgtaganacaaattgaattttangtgttaatgtg

SEQ ID NO: 3710 - DNA, 413 bp, Arabidopsis thaliana
  unsure at all n locations
  Clone ID: LIB22-081-Q1-E1-B6
ctctgcttttgtctcccccaaacaaaaggataaagaaagttgcagaaaacaatctctctgttctttgagctttccctttgagctctcacacgagcggcttcttttgtcatctcaccttttccttcattctttcttccttcaaattctggtttttttcacagatcgttttctcagattttgactctttttggtgttgttgttgttcttctccttcgtgaagtggaagaagaanataacaaaactgggttttttatatctggaattctgaagaaattcttcacggatttgatctgtttaaactanaaaagtcttgatttttagaaatnagctaaaaataagacacggtttangggtttanggtttgactagaaacaacantactgaaanggggtgtgaggtttcaaagttanggt

SEQ ID NO: 3711 - DNA, 411 bp, Arabidopsis thaliana
  unsure at all n locations
  Clone ID: LIB22-081-Q1-E1-C5
anttatggacgaagcaattgattacctaaagttgctgaaacgagacttaatctccacagaggttangaaccaaagctccaccactcacaagtcaccaatcttgttgcttaaagagacaacatggggaacaagaaatctgcanacagataaggcgtgaaagattctgacgagttaaaacgtgtgaagtgggtttttgggtacgtatcctctgcaccagctttttagctgtanatantggactacttttaagtattatatatgctactgcaaatttcaaaaagttaangaatgaaaagaggtcactttcttcttctctctgtgtggaatgnaaagccaanagtcntcaagggncantgatggacaatgantatcgtttttggctgaagtgttggntggtgaaatcacaagcgc

SEQ ID NO: 3712 - DNA, 396 bp, Arabidopsis thaliana
  unsure at all n locations
  Clone ID: LIB22-081-Q1-E1-C6
tgttaactcagatgatacaatacgaaggataagggaatggagacaatctggaggaatgcagccaagtatgcgcaatgctgctcaagtggttcacgatacattgccaagcccttctgtttcagcttctatgaagacgcacanaccaaaccaggccaattccttctcaaccattcgctagttcttcaccttcttttcatcctcaagctgatcccactcacccgtttgcttcatcgacagctaaacgaggacctgttcctattgtcaagggcaaaaaaacacaaaccaagtttttcctggctcgtcttccacaaaacatgccccataccatccttcagatnaacctccacgaggacaaagtcatgaacagattaccatctgttcctgccaagttnaaag

SEQ ID NO: 3713 - DNA, 443 bp, Arabidopsis thaliana
  unsure at all n locations
  Clone ID: LIB22-081-Q1-E1-D3
acgcgtccgataaaatcaaaactaacaaaaaggaaaanaaaaaaaaaanaagtatctcaccggaaacgatttcttcgccgattccaagacttttcttcctaagctttttaacagatccggtgaaaatttcaaaatccgaagaattctctaaagctagggtttcttaattcacgagacggaggtgatataattcccccccgtcgtagctatgatgatttcgagaggtttgtttggttggtctccgccgcatatacaaccgttaactcctgtttctgaaagtttccgagcctcctgagtctccatctccttaccttggatcctggtgctgaccacngtggtacaggaacagcggcgcaaagcngatgatgaaggaggaaaatgganggagccggangagatggagcctcctcctgctgctgttcctttctcncaagcctatttgc

SEQ ID NO: 3714 - DNA, 426 bp, Arabidopsis thaliana
  unsure at all n locations
  Clone ID: LIB22-081-Q1-E1-D8
agcatacaatacaatgtctactcttgttttattcctccaacttttttccatcctaccattagcacttgggttgaaccacccaaattgtgacctgaccaagactcaagaccaaggctctaccctaagaatcttccacatagacagcccttgctcccccttcaaatcatcatccccactctcatgggaagcgcgtgtgctccagacgctggctcaagaccaggcccgtctccagtacctgagcagcctcgtcgccgggagatctgtagtccccantgcctcaggggcgtcaaatgttgcaaagcactacntacattgtcaaggctttgatcggtactccggctcagccgctgctcctagccatggacacgancagtgacntggcttggattccttgctcnggctgcgttggctgtcccttctaacagg

SEQ ID NO: 3715 - DNA, 435 bp, Arabidopsis thaliana
  unsure at all n locations
  Clone ID: LIB22-081-Q1-E1-E1
gattcttgcggaacgaagcgacctacagttccagagagaactccatcaatggcttcaagggaactgcttcagctaagganaaagacaaactgtctctggcttaanggaagggttccataacgggagggaaaatattgtccatgaaaatactagcaacactgataatgataatagcaatacttccacaaatgctcttgcaattgcaatcactgctgggaattctcagcgtgtaaccnatgagagttcaacttcttccanacaagggaatgatantcccattttgcctgataactcagaaagcagcctancaaatgcggntagagactgggaacgaggataccantcaaanaaangatctggcangaaaatggtcccagtagatgaganggccaaatttggtgcaagngaactctaaacgcaatttgantgggtttg

SEQ ID NO: 3716 - DNA, 458 bp, Arabidopsis thaliana
  unsure at all n locations
  Clone ID: LIB22-080-Q1-E2-H1
tttacnttccgggccggtcaagnananacgggtcgagncacgcgtccntaataatcacaaactacaaaagtagaaagaagaaaaaagaacaaagtatcagttcttgaatatttgcatcaatggaggaatccaaaacacctcacgttgcgatcataccaagtccgggaatgggtcatctcataccactcgtcgagtttgctaaacgactcgtccatcttcacggcctcaccgttaccttcgtcatcgccggcgaaggtccaccatcaaaagctcagagaaccgtcctcgactctctcccttcttcaatctcctccgtctttctccctcctgttgatctcaccgatntcncttcgtccactcgcatccaaatctcggatntccctcaccgtgaatcngtnaaaacccgggagctccggaaanttctttnanctctttgntcggaaggaaggtctttttng

SEQ ID NO: 3717 - DNA, 458 bp, Arabidopsis thaliana
  unsure at all n locations
  Clone ID: LIB22-080-Q1-E2-E11
tgcccggcgccggtcaaaaaactcccgggtcgacncangcctcnngnatnattcattttnagtgcagttacatcttccactgttatccctccctgtggtgggcgtacagagaaggatagctctttatattttgaaaaagataacaaacatcgaaatccatcatccactggcatagagatttgtgaagcagaagcagaagctgctgcttcagctattgctgtggcagccataactaatgatgaaaccagtgggaatgccttgagtactggctctgtattacctgttgaaaccaaaatttatggaggaacagagttagatgatggggcagcaagtggtactgttggtgggcagactagtcgatcaaaagctgaggaatctctcattgtttctctaccagcagatctttcagtggacaccccaatctctctgtggccacaattaccaagtccacanaatca

SEQ ID NO: 3718 - DNA, 407 bp, Arabidopsis thaliana
  unsure at all n locations
  Clone ID: LIB22-080-Q1-E2-E4
acgcgtgggcggacgcgtgggcggacgcgtgggggcaaattttcccatttttgattccgaagataatagatattatcaacagaggataaggataaaacccagaacaatcattataatttagtggtgaagttgaccaaatttataaactgatccaattttaaaatctaagagatatggagaacatggacgatttctcaccggagaatgttttagcaccaccaccaccacctcctccaatgaagaagtcaacggatctgtttatgcaaagaagcaatagctttgtttctaaagctacgagagattcatgggatcgtatgttcgacgaagctcatggagctgatgttttgattcatactgatgataatgggttgattacgcccaatccnaagtccancggaatgggcttc

SEQ ID NO: 3719 - DNA, 371 bp, Arabidopsis thaliana
  unsure at all n locations
  Clone ID: LIB22-080-Q1-E2-E7
acgcgtccgattaagttctcttgatgatgtctggttcaagattagcctctagactaataataatcttctcaataatctccacatctttcttcaccgttgaatcgattcgactattccctgattcattcgacgatgcatcttcagatttaatggaagctccagcatatcaaaacggtcttgattgctctgttttagccaaaaacagactcttgttagcttgtgatccatcagctgttcatatagctatgactctagatccagcttacttgcgtggcacggtatctgcagtacattccatcctcaaacacacttcttgccctgaaaacatcttcttccacttcantgcttcgggtaaaaagtcangggttccc

SEQ ID NO: 3720 - DNA, 405 bp, Arabidopsis thaliana
  unsure at all n locations
  Clone ID: LIB22-080-Q1-E2-E9
ttctctttctctacatcactgtcttgactgttatgggagtgaaaaggtcaccgaacatgtgtgcttccgtcggaatccaaggaatcgcttgggctttcggtggtatgatatttgccttagtctactgtaccgctggtatctccggtggacacatcaacccagcggttacttttggtctgttcttagcccggaagctgtcgcttactagagctctgtactacatagtgatgcagtgcttgggagctatctgtggtgctggagtggttaaagggttccaagcctaagcaataccaggctctaggaggaggagctaacactgtggctcatggttacaccaagggaagtggtcttggagctgagatnattggcacattcgttcctgtanacacaatcntcctcaacaac

SEQ ID NO: 3721 - DNA, 405 bp, Arabidopsis thaliana
  unsure at all n locations
  Clone ID: LIB22-080-Q1-E2-F1
tcntgttccctgttcttgaatctgttgatcgagggatgtgtaaaagtgcaaatgaagaacatgggagagaattaccaatgatgaatggtatcaaagaagatatcaaatctattggagttttggattctgggatttgttcagaagctctctttagtcttgcttctcgtttcaaatcattgcagatgatgtgtaaaacacattttgaagaggaagagaaagatttattgccaatggtggaagctgcagaaatggggaaagagaagcagaagaaattgatgaatcaaagcttanaagttatgagtgggactcattctaactcgtttgatttcctactagaaagncccantccacaagaagctatgcctaanatnnnctngcccangacattgggggatccaaaanctt

SEQ ID NO: 3722 - DNA, 408 bp, Arabidopsis thaliana
  unsure at all n locations
  Clone ID: LIB22-080-Q1-E2-F10
aattctgctttacggacctcctggatccgggaagactcttattgctcgtgctgtggctaatgaaaccggagcattcttcttctgtatcaatggaccggaaatcatgtcgaaactagctggtgagagtgagagcaacctcaggaaagcatttgaggaggctgagaagaatgccccgtctatcatattcattgatgagattgactctattgcaccaaaaagagagaagacgaatggtgaggttgagaggaggattgtctctcagctccttacgcttatggatggactaaaatcacgtgcccatgttattgttatgggagcaacaaatcgtcccaacagtattgatccggctttgagaangtttggaagattcgacanggaaattgataaccgtgtttccgaatnaaattg

SEQ ID NO: 3723 - DNA, 404 bp, Arabidopsis thaliana
  unsure at all n locations
  Clone ID: LIB22-080-Q1-E2-F12
tcgacaaatatttccatagtaatgataatcctatcattgctggagcactgctgggagttgggattgtaaattgtggcattaagaacgattgtgatcctgcattggcacttcttggagactatatagacaaagaggattcatctgtcagaatcggtgctatcatgggtcttggaatttcatacgcaggttcccaaaatgaccagattcgaaacaaattgtccccgatactgaatgatgcaaaagcgcctcttgatgtgattgcatttgcttcactttctttgggaatgatatatgttggttcctgtaacgaagaagtagcccagtctattatatttgctttgatggatcgaagtgaggcagaactgggtgatgccctcactcctttcctggcactngggcctggg

SEQ ID NO: 3724 - DNA, 456 bp, Arabidopsis thaliana
  unsure at all n locations
  Clone ID: LIB22-080-Q1-E2-F5
ccgccgccaggtaanggtcaagaattcccgggncgacccacgcgtccgcgatgacggatcctcccagacccgacccgtttcctgttacccgactcgattccgacgccggtgctctcttcgtcctccaatcaaaaggcgagtggtggcacgccggatttcatctaacgacggcgattgttggtccgacgatattgacattaccatatgcgtttagaggattaggatggtggttagggtttgtttgtttaacgacgatgggactcgttactttctacgcttattacctcatgtctaaggttcttgatcactgtgaaaaatccggccgccgtcacatccgtttccgggaactcgccgccgatgttcttggatctggattgatgttttatgtagtgatctttaatcaaacagctttcaacacctgggaattggaattgggccaattcnacttgcagggtc

SEQ ID NO: 3725 - DNA, 460 bp, Arabidopsis thaliana
  unsure at all n locations
  Clone ID: LIB22-080-Q1-E2-F6
cgccgcccangtaaaggtcanagaattcccgggncgacccacgcgtccgccggattgagttttttaatctctgattgacagatttgaagagcgtgacaaaggaagaatcttttattaaaacaaattcttctgttttaatcttgggatggcctcggtgggcatagagcctagtgccgcggttagagaatctactggaaacgttactgatgctgatagattacccgaggagatgaaggacatgaaaattcaagatgataaagaaatggaagctacgattgttaatggcaatgtgactgagactggccatataatagtaactactataggaggaagaaatggccagccaaaacagacaatcagttacatggcggagcgagttgttggacatggctcctttggtgttgtgtttcanggcaaatgtttaaaaacaaggagaaactgttgcaataaagaaagttct

SEQ ID NO: 3726 - DNA, 398 bp, Arabidopsis thaliana
  unsure at all n locations
  Clone ID: LIB22-080-Q1-E2-F9
tccccaaaaacaaaggaaacaaaaaatcagtcggcgaaacgggaagagatctatcggaaatcttacggcggcggaagtcatggcgaacatagaatcagaagcagtcgatttcgagccagaggaggatgaccttatggacgaagaaggtacagctattgacggagctgatgtttctccacgcgcgggacatccgaggcttaagtcggctattgccggagctaatggcgaatcagcaaagaagaccaaaggccgtgggtttcgcgaggagaaagattccgatcgtcagcgtcgtctttcctcacgcgatttcgaatcacttggttcagatggccgtcctggtccgcagagatccgttgaaggatggattatcttggtctctggagttcatgaaganaccc

SEQ ID NO: 3727 - DNA, 412 bp, Arabidopsis thaliana
  unsure at all n locations
  Clone ID: LIB22-080-Q1-E2-G10
atctgaaatttctacgtatccccttggacacgtctacgagagaggggacttcagatggagttgcatctcaaanaattaccatgttcaagaatattagtggccaccagggattttttctttctggctcaaggccggggtggtgtatgttgttcagagagcgactacnatttcattcacagctgtgcgacggatcaattgcggcctttactgttcttcacaatgtgaattgcaatcacgggttcatatatgtcacagcacagggagttttgaagatttgccaattaccttcagcatcaatctatgataattattggccagtgcagaagattcctctaaaggccacacctcaccaagttacttactacgcgggagaagaacttgtancccctgaaaataacataaccgggccanc

SEQ ID NO: 3728 - DNA, 443 bp, Arabidopsis thaliana
  unsure at all n locations
  Clone ID: LIB22-080-Q1-E2-G2
cttacgttnccaggccggtcaagaatnacgggccganccacgcgtcnantgatngcagaactaacaggattcttacggaaggctaatcgggttctaaggcaagcaacactgattactatgaataccttggtaacagcctatggtgataaaattggttcagaagcttatgaagttattcttgtggagctttcatctctgataagtgtttcagacctgcacatgacagctcttgcactcgaactctgctgcactctgatgactggaaagagttgtagtgaaaatatcagtttggcggtccgcaacagagttcttccgcaggcactaactttagttaaaagcccattgctccagggtcaagcacttttggatctgcaaaaattctttgaagctcctggtgtatcatgcaaatacgagtttctacaccttgctgggnatcaatgcta

SEQ ID NO: 3729 - DNA, 457 bp, Arabidopsis thaliana
  unsure at all n locations
  Clone ID: LIB22-080-Q1-E2-G4
gggcccggtcacagaataancgggncganccacgcgtcnacaaancttgggatatccaacaccagtcctgaggagcttactcccgaggagataaagaagtttgcgaggcttgatattgatcctgcttctatcacttggagaagagtgatggatgttaatgatcggttcttgaggaagattactattggtcagggacctgaggaaaaggggatgactagagaaactggttttgacatttctgttgctagtgagattatggctgttttggctttgacaacctcactaggtgatatgananagaggcttggtaaaatggtgattggtaacagcaaggcaggggatccnataacancaagatgatctcggtgttggaggagccttgactgttcctgatgaaanacccattaanccgacactccatgcanacactggaagggacccctgtccagtcatgcct

SEQ ID NO: 3730 - DNA, 417 bp, Arabidopsis thaliana
  unsure at all n locations
  Clone ID: LIB22-080-Q1-E2-G5
acgcgtcnnagacgatggtccaattcattacccatcaatcgattcaacaccagtcgatctcccatctgctgcttctcttccagcttcaacagaaggtgaaaggaaagaagacgggaacactggaacgtgtgcgatatgtctcgatgctccatctgaagcagtctgtgtcccgtgtggacatgtcgcgggatgtatgtcttgcttgaaggagatcaaatccaagaattggggatgtcccgtctgtcgagccaagatcgatcaggttattaagctgtaccgtgtctgaaaacaggtatcaacaacaacatgggattatctatatccttcattgaactattgaaactatatctctctatttacacaagctaaaatcaatancaaggtttccttttaaccaaaggctaaacaantagttgg

SEQ ID NO: 3731 - DNA, 413 bp, Arabidopsis thaliana
  unsure at all n locations
  Clone ID: LIB22-080-Q1-E2-E10
acctgaagtanagccatctaaggaagtcacagagattctgatttataaaattgaccaaaacaagtcacagaggagaccccggaaaccaaacagtcgacgattacgaagatgaggatcactgtcatgaccgccggtgaacaaatcatcactctcgatgtcgattctcaggagactgttgagaatgttaaagccttgctcgaggttgagtccaatgttccgattcagcagcagcagctgttgtataatggaaacgagatgggaaattccgataaattgaagtgccttgggtgttaaggatgatgatttattgatgatgatggtttccaatgcctcatctgggtgccactaagtgcgggcgggggaaatgganttggggcatgaaatcccgnatggggtcaacctttgganccctg

SEQ ID NO: 3732 - DNA, 387 bp, Arabidopsis thaliana
  unsure at all n locations
  Clone ID: LIB22-080-Q1-E2-G9
ttactgatgatgattttagagatcttgtggacaaggttcctccaggttgcagaatgacaatcatttcagactcttgtcacagtggtggcctaatcgacgaagccaaggagcagattggagagagcactaagaaagaagccgaggacgaagatgaatctgaagaatcttcttcaagattcgggtttaggaagttcttgcgcagcaaagtggaaggcgccatcgagtctcgagggtttcacattggagggaacaagaaggatgaagatgaggcggaagaaatcgagactaaggagattgagcttgaagacggagaaacgatccatgccaaagacaaatctcttcctctgcagaccttgattgatattcccaagcagcaaacangggaat

SEQ ID NO: 3733 - DNA, 426 bp, Arabidopsis thaliana
  unsure at all n locations
  Clone ID: LIB22-079-Q1-E1-C8
acgcgtccncccacgcgtccggctgttcccacgggaagcgccaatctctttctccggcctctcatcctcgccgttctctcctttcttcttctctcttcattcgtctcctctgttgagtggctcgatatcgattcctcagatctcaaagctcttcaggtcatcgaaacagagctcggagtcaacagtcaacgttcttcggccagtgatgtcaacccttgcggtcgccgaggagttttctgcgagagacggcactctgccaccaccggagaatacgttctccgtgtcacgaggctcgtctaccgatncaggagcttgacggggactatctctccggtcatcggaatgttgtcggaagctcaaggaacttactttgtctaataaccaagttgggtcaaacgctgttccggtggatatcttaanctgtta

SEQ ID NO: 3734 - DNA, 402 bp, Arabidopsis thaliana
  unsure at all n locations
  Clone ID: LIB22-079-Q1-E1-C9
tctctaattaaaatggctgttcccacgggaagcgccaatctctttctccggcctctcatcctcgccgttctctcctttcttcttctctcttcattcgtctcctctgttgagtggctcgatatcgattcctcagatctcaaagctcttcaggtcatcgaaacagagctcggagtcaacagtcaacgttcttcggccagtgatgtcaacccttgcggtcgccgaggagttttctgcgagagacggcactctgccaccaccggagaatacgttctccgtgtcacgangctcgtctaccgatncangagcttgacggggactatctctccggtcatcggaatgttgtcggagctcaaggaacttactttgtctaataaccagttgggtcaacgcctgttccngtgg

SEQ ID NO: 3735 - DNA, 478 bp, Arabidopsis thaliana
  unsure at all n locations
  Clone ID: LIB22-079-Q1-E1-D1
ctgtttacgcttgccagggccggtcaagaattaacgggaaactctgtgtgtaggcggaactacagaaccaagagcctctttctaatcggagttactttaatccccttgaaccatgtcaaagagaaagactaaagagccaaaggtcgatgttgtgactcttggaccatctgttcgtgagggagagcaagttttcggtgttgtccacatctttgcttcattcaacgacactttcattcatgttactgatttgtctggtcgtgaaactcttgtccgtatcaccggtggaatgaaggtgaaagctgatagagatgagtcctcaccttacgcagctatgcttgcagcacaggatgttgctcagcgatgcaaggaacttggtatcactgccatgcatgtgaagctccgtgccacaagtggaaacaaagaccaagacacctggtcctggagcanaatccggccctaaaanccctggcccgttccg

SEQ ID NO: 3736 - DNA, 411 bp, Arabidopsis thaliana
  unsure at all n locations
  Clone ID: LIB22-079-Q1-E1-D2
aaacactccaactacgaatctacaatcatcgagcacatacaaagaggaagatttcaaatccaatcatcaatcatctcttttgaatgatccgattccatctacttgctccttaaatttattgttgatccgtttgaatttggtgtttgttgaggcggagatctcgaagatgaagcagcttctatgttatcttccatggcttcttcttctctctcttgtggtttccccttttaacgaggctcgattcgttgtggagaagaatagtttgtcggtgacttcgccggagagtataaaaggaactcatgatagtgcaattggtaacttcgggattcctcaagtacgggtggaagtatggctggtacggtggtttaacctaaagagaatcagaaatcgtgttaaggaanttaacgaatt

SEQ ID NO: 3737 - DNA, 416 bp, Arabidopsis thaliana
  Clone ID: LIB22-079-Q1-E1-D9
actgaaagcacaagagataagattagaacagctaagataaggttggtggctgctagaaagatgaaggaagcggccagagaggctgaggcggttgcaatcgcagagattgaggctgttactggaagtatgaatgttggtaaggccgaggctgtgactatctctgctgaagagtattctgtgcttgctcgtagtgctagagacgcagaggaagaggcgagaaagcgagtggaagatgcaatgtcgagagttgaagaagctaatgtttcaaagaaggatgttctgaagaaagttgacgaagcggctcaagaaattgaaaccagcaagagagtattggaggaagctgtggagagagttgacgctgcaaatgcttcgaagatcgaagcagaagaagcgctgcgaaaatggcggtcagagaa

SEQ ID NO: 3738 - DNA, 413 bp, Arabidopsis thaliana
  unsure at all n locations
  Clone ID: LIB22-079-Q1-E1-E10
aatccttcacttgtagcccacaagaggtcatctcaggaggtgatttcggtcagtgcacgtattgtcatctcctacttggtctccattactccagccaagtagagtttgtcgcctctgctttttcttacaccattgtccaagctttctcctttttcgaagaaatctggagagagatatgtgctgacatcaaggaaggtaatcttagctcaagaatcactctgcccaagatgagaaaagctgtattggctctgatcagaccaaacccgtctcttgcttctcatatcgaggagatctgcttagagctggaaacaaatctcggatggttcggtttgatttcaaagctttgggccaaatgcaaaatttatctcctcaatcatgacgggttctatgctgccgtacctgaataagctgan

SEQ ID NO: 3739 - DNA, 342 bp, Arabidopsis thaliana
  unsure at all n locations
  Clone ID: LIB22-079-Q1-E1-E12
gcattgggttcctaaatgtccttcgttgccggagaaatggagttgtgggtttcggtggttctcttttgtcccaagcttgtctgcttctgtttagttgttatatgatgatggattgatgtctgtattcatctttgttatagagtatttgttattgtttgcgttcaaatcttcattttttggggtcttctatcaattgtttctttggtatctctttgtgaaataaaagattggtaatattgggtattgtttgttttcattttccatgtgtacgtacttttnnnnnnnnnnnnnnnnnnnnnnnnnnnnnnnnnnnnnnnnnnnnnnnnnnnnnnnnnnnnnnnn

SEQ ID NO: 3740 - DNA, 436 bp, Arabidopsis thaliana
  unsure at all n locations
  Clone ID: LIB22-079-Q1-E1-E4
acgcgtccggtttatctctttcgcagcttctcaggccgcgaagactttcattttccgtatcgatggtggatctatgccttctattttcccgacgcactaccattggtatagcaccgagttcgccgaagaatctcgaatcgtccatgtttaccacacagtcttccatggtttctccgccgttgttactccagatgaagcagataatctccgtaaccacccagcagttcttgctgttttcgaagaccgacgtcgagagcttcacaccacacgttctcctcaatttcttggtttacaaaaccaaaaaggactatggtcagaatctgattacggatcaagacgtaatcattggcgtttttgacaccggaatttggccgggagcggangagtttctcagattttaacctcgggccaattccaaaaagggggagaagcgttt

SEQ ID NO: 3741 - DNA, 403 bp, Arabidopsis thaliana
  unsure at all n locations
  Clone ID: LIB22-079-Q1-E1-E7
tcaccgtctcctcaaaatcacaacaccaacaaaacaaaaaaaaggttttgatcaaagagatcactgttaaaccctcacaaaatttcctcaggactaataatctgcgatcgatcgtcgttatgataagtctctaaagaagattgatgattctggattacattatcatgggaggagcttgttcaaggaagagagatcaacaagttgaggatattttaaacagaggtgtctctggaaaatatagcaagagttcaagttcgaaatggttagctacttcgctctctaggtctggctccgatgttaaacggaagaatggagaatgcccgtcgcttatggagctctgtgtccgcaagatacagggaggacattggntagatataccaaggttctccgganctaacctaga

SEQ ID NO: 3742 - DNA, 394 bp, Arabidopsis thaliana
  unsure at all n locations
  Clone ID: LIB22-079-Q1-E1-E8
cngttaatattggaaagcgtggaaatatattggaggttgggcctcagaatgtttcacaggttgttttgtctggtcctgtgctaaatgaacgggagcttgagggtttgcttggtgatccactgttaaaatctcaaatcttgcccacattttttgacattcgtagaggaattgaaggatctttgaagaagggtcttcnaaaactttgtgaagctgcagatgaagctgttcgtaatggttcccaagtacttgttctctcaagacagatctgataatccggaaccaactcgacctgcaattccaatgttgttggctgtggggtgctgttcaccaacatctgatccagaacgggtcttcnggatgtcancttccnntanttgcagatacaagctcantg

SEQ ID NO: 3743 - DNA, 415 bp, Arabidopsis thaliana
  Clone ID: LIB22-079-Q1-E1-E9
acctctcctgatcccgtaatgaagaaaacgaagacgatggtggcttccatctccacccttattagacggacctatccttcaactaaccagtgtaattcactcgcgacgattcaatcacaaacccaattgcctcgcgaatctctgcaacatcattcttcagctgagggacgactccgattctccgggagagttttctgctcggaatctggcgccggatgctggaactgtggcgagaaagctgcctttttgttctgtaactcatgccgtagcattcaacctgttgatgactccgtcgactattttcagatttttgggcctggagaagaagtatgagatagatcctggaagccttgaaggcaagtacaaagattggcaaaagaagctacatcctgatttagttcataacaaatctaag

SEQ ID NO: 3744 - DNA, 308 bp, Arabidopsis thaliana
  unsure at all n locations
  Clone ID: LIB22-079-Q1-E1-F1
tcttcttactttcagacttgtgtccctgatttacttaaggttgctctgacctgtttggataacgtagctgacactgatggatcaatcaggggcatgagatctaagattgctgggtttcttgcaagcaacacacagcggaactggcctcgagatttgtacgagaagatagctcgaagcttttgaatctaagaaattcgaatacttgtctaaaaaagatcttgtaagaagctgttaaacccatttttgttacttaacctcgaggatcactttttgttnnnnnnnnnnnnnnnnnnnnnnnnnnnnnnngg

SEQ ID NO: 3745 - DNA, 423 bp, Arabidopsis thaliana
  unsure at all n locations
  Clone ID: LIB22-079-Q1-E1-F3
acgcgtccgccagaaaccaaatcacacttacatcataaatcctctgtacataacccaaaaaaaaccctagaaacgaagaaagatcaagatgggtttgattagcanagaagagataagcaaaacaagaagatattcatcttctctttggagaggtatcaaaacgatctttgttctcttcactatgtttctctctttcatcatcttttctgctccgatcttcctcgccgtcgccgacgccgtcctcccctccgcaatcctctcatcctcctcaccctccctcaaccgcctatctccttctagttttccggcgacgatttattcttacctcagtaactacgatttccgttactctctcatcgacatacctctcatctccataattagatttggcaatnaantaagcctttaacgggcttggtancg

SEQ ID NO: 3746 - DNA, 423 bp, Arabidopsis thaliana
  unsure at all n locations
  Clone ID: LIB22-079-Q1-E1-F8
acgcgtgggcggacgcgtggggtttaatctcacccaagaagacaaaaacacagagagagaaagagagagaaatggcgacgacaacaacanaagcaacgangacatcatcgaccaatggagaagatcagaagcagtctcagaatcttcgacatcaagaanttggtcacaagagtctcttacagagcgatgatctctaccagtatatactggagacaagtgtgtatcctanagaaccagnatcantgaatgaactcagggaagtgacagcaaaacatccatggaacataatgancacatcagctgatgaaggacagttcttaancatgcttntcaagctcgttaacgccannancacaatggagatngggagttttanantgggctacgctccgttttcgccannggntccttgcccctcccggg

SEQ ID NO: 3747 - DNA, 419 bp, Arabidopsis thaliana
  unsure at all n locations
  Clone ID: LIB22-079-Q1-E1-G1
aaaaaaaaaaaaaaaagcacatgcggtttcctctgcttcttccttcttacaagttggatgtctccgtcttccacggtgcttataaattagtgaaacaacaaaagctttggtcagtatttatattatcatgcatttctaatctctactttgtcaattcctatactttcactctcttccaattatataatctctggtccatagaaaacatcggtctcttgtcaccgttgattttatttggtcaaaatcattcttcttctcgctgaataatcgttgatttcacttcttcttctggtcttaaaaaaattcaagatctatacgagaaaacacaaaacaagtaaaactttttcaaccgtttttcctgtcggtaaagtttggattcctcctaataaaatttgggcctaatgtncaccaaaagaaaa

SEQ ID NO: 3748 - DNA, 417 bp, Arabidopsis thaliana
  unsure at all n locations
  Clone ID: LIB22-079-Q1-E1-C7
agaaaagtacccaaatatattttcccaagagttcagtttttgggaggtttccatattttctgccgagcttagttatatccgtctatgctactgcggttctcatcgcttgctggtggcttcctgaaactcttcatacacgttgtagaattgcacaagggagacttaatccaacagagctaaacgatgatgaaagtagaggaggaggacttgatgaacagaaaataattaataagccaagtctcttgaggaatcgtccattgatggctatcatcattgtttattgtgttttttccctccaagagatagcatacaatgagatattctcactctgggctgttagtgaccgaagctatggaggattgagcttctcatctcaagatgttggtgaagttttaactatatcangacttgggcctc

SEQ ID NO: 3749 - DNA, 494 bp, Arabidopsis thaliana
  unsure at all n locations
  Clone ID: LIB22-078-Q1-E1-H7
acgcgtccgcgatgaattgatacaatctcttctatctgctgagttttttgttttctggtaaacaattttatctgtggagttttctggagttgctagtggaagaatctgtctcacagaaccagaaatagtgtttgtgggagttacatgttttgcaatagagatgacatatcggggtaatgtgcatgattttagtggtgattaangagtctgaagttgggangaatgtcggacttgtacattcatgagctangcgattatctttcggatgaatttcatggggaaacgatgatggtatagttgccagactcagcgtaatgaggatgngaggtcagtttccaaattcctagtttagtaaacanggaaagaaaacgaaacaaaatgatgataatgggtaatgggaccaaaccatcctaaaagnagtaatacnttttatcaanngngnagaaggcaanaccatgntaacggaaaaaaatcccatgggccctngacgaaaa

SEQ ID NO: 3750 - DNA, 498 bp, Arabidopsis thaliana
  unsure at all n locations
  Clone ID: LIB22-079-Q1-E1-A4
ncggtaccggtccaagaattcccggggtcgacccacgcgtccgaaacaaacgtgaagtttgattcctcggtggtgaaaacgttctttgtatcatcctccctaagtggggagttatagccttcaagttggtggtaaacaaacaaatgggcgggcggtgggaaaacgtcaaagcccggtgttaaagccgggaactggacggtgatgggatccgatgggatcaagaacaagttcaagaacaatcataccccgaagggagtttctcaattgtcatcatcgaatttcgggtcagagccgtcagtatcgggacaagatgaacatagattgtggaattcgatggtggaggaagcagaacgaatgcagtattcaaatattgacgattcgttggatcaggagacgaagaagcggttcgtgtcccatgtaaagctccaagtanaaacaaangaagacactggggtacntcaaaacaaagctnaagtttccaaacaanaatgtccccaa

SEQ ID NO: 3751 - DNA, 404 bp, Arabidopsis thaliana
  unsure at all n locations
  Clone ID: LIB22-079-Q1-E1-A5
taagcagataatggatctcatgaacgacaacagcaacaattcacaagacggcgatcatcagaactaccgtgtcggcgataatggattggaatcgaagaaggaagctatcttccctagctatgatttccaacctatgcgccctaatgcctccgccggattgtctcaccacgctttagatctcgccggatctgttaattccacggctgctanggtttgggatgcgtctgatcctaaaccggtttcaagcttcttccgcaagaagttatggctctatggactctctcgaaccttcaaagttgtttgctgagaaggatcgaaattcccccgagtcagcgattatatctgcgatcgattggacaatgaaaggccatgctgataaattgttacaagttaagggaagngtc

SEQ ID NO: 3752 - DNA, 421 bp, Arabidopsis thaliana
  unsure at all n locations
  Clone ID: LIB22-079-Q1-E1-B12
nnnnnnnnnnnnnnnnnnnnnnnnnnaaacaagattattagattaaggaggagaacacatatcatatttcangaaagggtgaaaaaacagatcctaaattagatgtagaacaanaactattttgtctagttgtcattttttcntgtcttgtcctaatttacaacttgtcatttcaatacaaaatattganaaaggngaaacaaattgaagaaaaaaaaccaaaaganaagaatttgtcacaagatgttgataatcgcctgcttcttggaacaccctaacgaaaaacaaatcatcttcccgangatctcttcttgccaaacacactctactgcgacgtcgtttggtttctcgttactcacattganaaatgttgactccgaatangcctaaccacagtctgaaccgggactanaccgggact

SEQ ID NO: 3753 - DNA, 308 bp, Arabidopsis thaliana
  unsure at all n locations
  Clone ID: LIB22-079-Q1-E1-B2
tgatgtccctgcttctgttattgcagctttcaatagtcagcttcctggaactcaatctcttggtgctactttgtttggttctactcctcctgttcctgacaacatcttggctcaagcctttcagacttctccaggaactgttaaacacatcaaatccaagttccaacccaagaaatgatcatcacccttcctttatattcattactacagttctgtttttttctaaagggaagatctttttatcttctttgatttgtcttctgtnnnnnnnnnnnnnnnnnnnnnnnnnnnnnnnnnnnnnnnnnngg

SEQ ID NO: 3754 - DNA, 267 bp, Arabidopsis thaliana
  unsure at all n locations
  Clone ID: LIB22-079-Q1-E1-B3
gacacagagagtcacagtttctatctgcgaaggccaacaaatgaaatatttcaggttaagaaactatgtctgatgatgttattgtgaactagttttgagttataacactatttttactacatctctgaaaagaagactgttgatattagttttgaagagattattcccaaacaccatttgttttggtcaacatgaacaacttaattgttctttgtttattgttgcnnnnnnnnnnnnnnnnnnnnnnnnnnnnnnnnnnnnnnnngg

SEQ ID NO: 3755 - DNA, 410 bp, Arabidopsis thaliana
  unsure at all n locations
  Clone ID: LIB22-079-Q1-E1-B8
taaaaaaactgattgagacagagagaagaaagattgcttgaagaagacgaagacaaaaggaggaaactttcttctcatttcaattaaaaaatccatttttttctctgggtttttctttctcatgtgattgtgtaattgattcttatcgttttctcgcaatcattacggcttcttctgaaatcaacacgctcaatttccttccttggaaaattttggggttttggttttgttcctgtttcattcgtgtgagatttgattacttaagcgctcagatgaaatcatgataattaagaagcacaagagagaggaaattagagtcctttggtcaatttattggggaacttgattgggatttagtcagcttcaaagtgaggaactgaagatggagaatggccatgangaaagattgg

SEQ ID NO: 3756 - DNA, 415 bp, Arabidopsis thaliana
  Clone ID: LIB22-079-Q1-E1-B9
ttgattcgttcgacgttttgtctcctacgattcgtagagcgtttcagttttcgatttctccgtcgtctaactcgccgccggtgagtccacgaggtgactcggactcgtcgtgttcgttactgagtcgttcactcgggtctaatctgggaaacgacgtcgttgcgtctctcaggaatctgcaacttaataaagtgaagtcttctctttcgtcgtcatacaacaatcaaatcggaggatacggatccggattcgggtcgcctcgtggatcggttttgggtcctggtttccgtagcttaccaactacaccgacccgacctggttttatgaacatttgggagaatggcttggaggaagaaccggcgatggaacgggtcgagtcgggtcgtgaactgcgagagcaactgttcgagaagct

SEQ ID NO: 3757 - DNA, 416 bp, Arabidopsis thaliana
  Clone ID: LIB22-079-Q1-E1-C10
acgcgtccggttccaacagctgctatagcacctgcttcagcttgtgctaagagctgtacatagtgctcttgttggcatcagaaatagtcttgatcctgaacataaaaaggaatccatggaaaaatacttaggccccgacaaacaaaggaagcaggaccaacaccgataaactcagattatccatgttggtgtgacttcccttttacatatagcatgtgtataggtttgaatagagtaaaagtgcagaaccattcttttaaccatcgaaaagccaaagagatgggaaaatttttggtatagaatataaatcttttaaacattatagaatcattcagtttgtttgtttcctgtacataaacattttcgatcttgctccattgtaaatttaccccaccaagtttgccaaatgagtgaaa

SEQ ID NO: 3758 - DNA, 416 bp, Arabidopsis thaliana
  Clone ID: LIB22-079-Q1-E1-C11
acctctcctgatcccgtaatgaagaaaacgaagacgatggtggcttccatctccacccttattagacggacctatccttcaactaaccagtgtaattcactcgcgacgattcaatcacaaacccaattgcctcgcgaatctctgcaacatcattcttcagctgagggacgactccgattctccgggagagttttctgctcggaatctggcgccggatgctggaactgtggcgagaaagctgcctttttgttctgtaactcatgccgtagcattcaacctgttgatgactccgtcgactattttcagatttttggcctgggagaagaagtatgagatagatcctggaagccttgaaggcaagtacaaagattggcaaaagaagctacatcctgatttagttcataacaaatcctaag

SEQ ID NO: 3759 - DNA, 461 bp, Arabidopsis thaliana
  unsure at all n locations
  Clone ID: LIB22-079-Q1-E1-C2
taacttctacgttgnccngncccggtcaanaatncccgggtcgacccacgcgtccnaatcaattgcagagctataagagaaggaatgcaaaatgggtctctccaatagcagctgttgtacctaacttccatcttcctatgcgcagtctcgaggataaaaacaggacaaacacagacgacataaggtcccttagagtgatcacagccattaagacaccgtatttacctgatggaagattcgacctccaagcatacgatgacttagtcaacacgcagatagaaaacggtgctgaaggtgtgattgttggtggtacaactggtgaaggccaattgatgagctgggatgagcacataatgcttatcggccatactgtaaattgttttgggggaaggatcaaagtcattggaaacactgggaagtnactcgactagggaagctattcatgccactgagccaggant

SEQ ID NO: 3760 - DNA, 475 bp, Arabidopsis thaliana
  unsure at all n locations
  Clone ID: LIB22-079-Q1-E1-C3
actttgcccggcccggtcnaagnataaacgggtcgagccacgcgtccgcaaaangacacaaatgctctcacactcttccgtctccaaaccgacacacacggcaacctcgccggaaactggaccggctccgacgcttgtacctcctcatggcaaggcgtttcttgctcaccatcttcacaccgcgtcactgaactatctctcccttccctctccttacgaggaccattaacctctctctcctccttagaccaacttcgtcttcttgacctccacgataacagactcaacggcaccgtttcaccactcacaaactgtaaaaacctcagactcgtttatctcgccggtaacgatctctccggtgagattcctaaagagatatcctttcttaaacggatgatacgtcttgatcnctccgataacaatatcccgtgggagttattncanggagagaattccgggggttacccggggttta

SEQ ID NO: 3761 - DNA, 386 bp, Arabidopsis thaliana
  unsure at all n locations
  Clone ID: LIB22-079-Q1-E1-C4
acgcgtccgtttctctttcgccatnaaaactctgtttcctttttcaganattctcaggagaagattcattttaccctaagaaaanaantgtcnaacattcttcagaatcggcgatcttcgttttcctcttcgacgaaatcttcattagcgagtcgtcaagcaccatcttcatcggagaattctgttaaacttatgccggcgatgacgaanaaangagcaccgttaagtnacattaccaatcannanatcgcctcacgattacaaaattctgattcggtacattgttcaaacaagtcaancgaaattganngatagcaccaagtgtttgcgttaatgccagtttctctancaatctgcancaaagcatagttcctcanaaagttgct

SEQ ID NO: 3762 - DNA, 410 bp, Arabidopsis thaliana
  unsure at all n locations
  Clone ID: LIB22-079-Q1-E1-C5
acgcgtccnctggaacactctttgtcggatctgatggccatggcaaccacccagagaaggatagtgaaaattgtaaagagaaaaatgttgtaccacctgttaatgaatcgccacatgctaaagatactgatgatggcttgatagagattacagtccctgagctggagatcacccgtgcagaagcagaagcagaagcagaagcgcatgtttgtgagagtgatgaggacttacccaattattctgacattgaggctatgatacttgacatggacttggaacctgatgatcaagataattttgatctcgaagtctccaagtatcaagagccaagacatgaaaagaacaatcataagacttgagcaggctgctcattcatatatgcaaagagccattgcttcccgtggtncaat

SEQ ID NO: 3763 - DNA, 416 bp, Arabidopsis thaliana
  unsure at all n locations
  Clone ID: LIB22-079-Q1-E1-C6
acgcgtccggcatgctcgagaattcatgatccaaagttgaaagaaagcttcgagaactctccgaggcatgattcctatgtgcctaaattcgaggctgagcttgcacagttttgcgagaagttggtgaatgatcttgataggaaagttaggcgtgggcgagaacgtcttgcacaagaagttgaaccggttccaccaccttctctatcagcagagaaagctgaacaattgtctgtcttggaggagaaagttaagaaccttttggaacaagtggaagcacttggtgaagaaggcaaagtggatgaagctgaagcgctaatgaggaaggtggaagggctaaatgctgagaagacagtgttgttacaacgaccaactgacaaggtactcgcgatggctcaagagaagaagatggcantgtg

SEQ ID NO: 3764 - DNA, 495 bp, Arabidopsis thaliana
  unsure at all n locations
  Clone ID: LIB22-078-Q1-E1-H4
gcctacaagtccggaattcccgggtcgacccacgcgtccggtggaagtgtgataggatcaatggtcattatcgtgggactttatatacttttatggggaaaaagcaaggataagtctgcatcagtgaccaaacaagaaccattagatcttgatattgaaggttgtgggacagcaccaaaggaactcaatagtactgcccatcaagtgtctgcaaaataataacttcaagatatatctaactgtttcccatatcgtcaatgaatgatttctaacttgaacttttattaagttcaagcccacgcgtccgcggacgcgtgggtcggagaattgtagtgatcggagaaaatgagtggcgtggttgggtttgttggtcttgantctttcagcttcgaattngcttcntcgcttcttccgtcctgggtttaaaggttcaagcattccgggataagntacagaaatttatgggnnaagttcattgaaattgggaaggncaca

SEQ ID NO: 3765 - DNA, 453 bp, Arabidopsis thaliana
  unsure at all n locations
  Clone ID: LIB22-078-Q1-E1-F4
nagagaagtaattgatgttgatgatgagcttggngatgttganatgatatctgatgatacaagtanggagggtgtcgaaaacgtggctatggangtggacgacgtggaagagaaggcggagatgggaaatggattgttttctgaggttgccagtctgaaaaatgggagcttgagggtgggtgaatgttctaaagctaatagtagttcactcgttgtgaatcgccctgtgactgatcgtcacaagttttgaagcatacagaaaggttcttgagagtgctgtgaancggacttctaaactgaaagacagacgctttgttgatttttttaaannacagaggtcgttnctttactacgaanccntgtcctcctttttggnnaccagnataangnacccagttnnaggttgtacaacntncaggcatttgtnccccctttccacaacaaggangacga

SEQ ID NO: 3766 - DNA, 480 bp, Arabidopsis thaliana
  unsure at all n locations
  Clone ID: LIB22-078-Q1-E1-F5
acgcgtccgaagaagagaatcgttgagatggagagtgaagatgcttatagaatggcgttgaagactatggttaaatgggtgaagaagaatatggatccattgaagacgagggttttctttgctaccatctctcctactcattacaagggcgaggattggggaggcgaacaatgaaaaaattgttacaatcaancgacaccgatccangacatgaaccattggccatcanactgcagcanaaccttaatgaaagtgatangagangaattagnccaaagagcanagtttccggtgacngtacttaacattacaacaactctctggctatccggaaaagacncgcacacgtcaatccaanacgaaaccattggaaccccattngaccgaaanggatcaagctagncaaatcccggctaagctactcaagactgtatnacattgggtgccttgccctggncntcaagatacttggaaccancc

SEQ ID NO: 3767 - DNA, 507 bp, Arabidopsis thaliana
  unsure at all n locations
  Clone ID: LIB22-078-Q1-E1-F6
ggnggaacggtccctgttctacggcccggaatcccgatcgacccacgcgtccgtgataacaatcttccaccatgggaacaaagtttttagctctgggtttgtctctgtgtcttgttctctcaagcttctatcaagtttcttgccaggatgaaggaactggaagtttgagtactttagatctaattgagcatgaatatcaaatgtcaattctctccaaggcaatgaagcagtagatcaaactgagaccagtggtcagaaaaacagtacagtgtctgataacaacactatttctttgtctctatctgaagaacctgcantgggaaactcttaaagaatctgttgatacatcaagctgagttaaggagctgttactggatgaagtcgataaaccttcaaagtatgttggaccatattgaacttgaagttccgaagcacatatcaatgaacttaaagaagctgggttctgatggnaacaacnaagttgaggaatccaaagatgatgnaaga

SEQ ID NO: 3768 - DNA, 505 bp, Arabidopsis thaliana
  unsure at all n locations
  Clone ID: LIB22-078-Q1-E1-F8
aantggttacctggcctacggcccggaatcccggntcgacccacgcgtccgagacaaaaaaaaatcacgaaatctgattttcctctcttttgctcgaagccaagtctctgcttttactttgatccaccaacttcatcttcaacctctcgattttaggtaagattcttagagtgattttgacttatctaagaatggagctaaagagcattaaggatgcgtttgatcgtgttgcgacgaagcagaagctctcttatagcaaaactaatgagattgttcatatgttgtctcaagaaatcgataaggctttgagcatattagaggagacaccatcatcaagatactatgcttcttgatcatagatctatcctcgctgatgtgaagaaagtgtttatggagattgctccaatcactcaacttgaagctactgagaaagagctacatgcggntttgaccaaagtacccaaagttcttgagaaacaactgaatccagacatatcaaanggtt

SEQ ID NO: 3769 - DNA, 454 bp, Arabidopsis thaliana
  unsure at all n locations
  Clone ID: LIB22-078-Q1-E1-G1
acgcgtccgtgaaaatatcgtaattatcctatcgaaaagtgagaaagagtaagcagagaaataagcgattgatctctccnnnnnnnnnnnnnnnnnnnnnnnnnnnnnnnnnnnnnnnnnnnnnnnnnnnnnnnnnnnnnnnnnnnnnggcgctctcttctacttctctcgatccgaccgtgaatcactatcggagcaatgactatgatgactccgccgccgctagatcagcaggaagacgaggagatgcttgttccgaatccggatttggtcgagggacctcagcctatggaagttgcccaaactgatcctgctgctaccgctgtggagaatccaccacccgaggatcctccaagtctgaaattcacgtggaccatcccaatgttcactaggctcaataccaggaagcattactcctgacgtatttgttgtaggcggttataagtggcgtata

SEQ ID NO: 3770 - DNA, 474 bp, Arabidopsis thaliana
  unsure at all n locations
  Clone ID: LIB22-078-Q1-E1-G12
gaactggttccctggcctaccgggcccggaattcccgggaacgacccacgcgtccggggaagtccaagggctttgggtttgtcaactttgaaaatgctgatgatgctgctagggctgtggagtctctcaatgggcacaaatttgatgataaggagtggtatgttggtagagcccagaagaagtcagagagggaaacagaattaagggtccgttatgaacagaatttgaaggaagctgcangnaacttncacagttcaanacttgtatgttanagantttgggtcctaagcatttcagatgaggaaacttaaagagatctttctcccttttggtaccgttacatcctagcaagggtgatgccggattctaatgggaacaagcaaaaggctcaagttttgttgctttcncnaactcccgaanaaagcaactgaagctatttcacagttnagcggtaaaatgatcnaaagcaaacca

SEQ ID NO: 3771 - DNA, 465 bp, Arabidopsis thaliana
  unsure at all n locations
  Clone ID: LIB22-078-Q1-E1-G2
acgcgtccgatgataatgatgattcgtgtgctcaaaagaagcaacgtgttgtttggactgttgagctgcataagaaatttgttgcagctgttaaccaattgggatatgagaaggctatgcctaaaaagattttggatctgatgaatgttgagaagctcactagagaaaatgtggccagtcatcttcagaaattccgcctttacttgaagaggatcagtggtgtggctaatcagcaagctattatggcaaactctgagttacattttatgcaaatgaatggacttgatggtttccatcaccgcccaatccctgttggatctggtcagtaccatggtggggctcctgcaatgagatcttccctccaaacgggattcttggcaaactcaatactcccttccggggatcggtgtccgcaacccttcctcctcctcctggcanggaatggttccttgcaaaaaccaagaa

SEQ ID NO: 3772 - DNA, 459 bp, Arabidopsis thaliana
  Clone ID: LIB22-078-Q1-E1-G3
acgcgtccgaaaaattatcttctttttcttgtgaatttttttttggggatattgcatgtaattttttggggatttttgaggtttaatctccattgaaagaagctctggcatttctctgctacagtgttggttttcagctgcagaattggtgaaaaaagtttggtgaatttcaggagcagagtatttaagtaattttggggaattagtgagaaaatggaggagaaaggtgaaataagtccaagtggggtcgtcacagttaagggagatgaagctttggttccaagaacagagtttcaacaaaaccctagttttctccaattcgtgagtcccacaacggtagtgactcctctccctcctccaccaagctccgtcttccggctccggtaccaaccaccgtgactcctggctcagccacaagcatcaaccggatcagatccacgaaaaaagaacagagggaag

SEQ ID NO: 3773 - DNA, 435 bp, Arabidopsis thaliana
  unsure at all n locations
  Clone ID: LIB22-078-Q1-E1-G7
aagcgtccgcggacgcgtgggtttcgattttaccttacgcagaaaggttcgttgaaaccctanattcgttctcagttttcgtgttggctaatggcgagcgcggcacggggagagagcagcaatccatacggcggcggattgggaaccggangaaagttccggaagccgacggctcgtangtctcagaaaactccttatgatcgaccaacgacttctgtgaggaacgctggacttggtggcggagatgtcagaggcggcggctggttgtcaaaattggtggatccggcgcagagacntattacntatagtgctcanaggctcttcnggtccctaanccccggnnaaccgcctcngggtctgggtgaggacgccttttacaantccncgggatcacancanagcaactttccaatanagaaggtgtgaaatncaggg

SEQ ID NO: 3774 - DNA, 489 bp, Arabidopsis thaliana
  unsure at all n locations
  Clone ID: LIB22-078-Q1-E1-G8
ctangggcccggaattccggntcgacccacgcgtccgggcgcagcagagccaacgtccaatctcaaaccgtcacannnnnnnnnnnnnnnnnnnnnnnnnnnnnnnnnnnnnnnnnnnnnnnnnnnnnnnnnnnnnnggtgtattcttacctttgacaaaannnnnnnnnnnnnnnnnnnnnnnnnnnnnnnnnnnnnnnnnnnnnnnnnnnnnnnnnnnnnnnnnnnnnnnnnggcgcgactattcccttgctcaagccgttaagtttgttgctaagaacgagactgtgatcgtctgtgctgttagctaccctttcttgccttttcttaacaactggttgattagcatttctagacaagaaacatcaagaaaaagttcttgtgatcgctgaagactatgctactttgtacaaagtcaacgaaaagtggcctgggcatgctgttctcantcctccggggttggattctcaatccgcaaaaaaatttggg

SEQ ID NO: 3775 - DNA, 515 bp, Arabidopsis thaliana
  unsure at all n locations
  Clone ID: LIB22-078-Q1-E1-G9
ttgcctggnctaccggcccggaatcccggancgacccacgcgtccgcccacgcgtccgcggacgcgtccgcccacgcgtccgatagtcaccattttttttgtttgtttgacctcaaaaactcctacgtttctaagctcttctctttgcttcgattcccaaaacgactatttccaaaagggtttaaagaagttatgaacactaatccagtgactaatgggtttgttaaacctgttcctactgaagaagaacaagcaaagattgaggaagtgaggaagctattaggtccattaccggagaagctttcgagtttttgttccgatgatgcagttttaaggtatctaagggcaaggaattggcatgtcaagaaagctactanagatgcntaaagaaacttttgaaatggagagttcaatacaaacctgaaggagatttgttggggaaggaagtanctggttgaaaccagagacagggaagatatatagnatcgagtttgtgtcnataaaaccttgggccg

SEQ ID NO: 3776 - DNA, 468 bp, Arabidopsis thaliana
  unsure at all n locations
  Clone ID: LIB22-078-Q1-E1-H10
agacccacgcgtccnaaataagacaanaaaataaanacaangaananaaaggagaatgaaccctcacctgcctcttaagaggcaagagtnnggcaagaagaagaactcacggttcaactaacactcacaacaacagaaaggaggatcgtggtggaacaaaatcatggcanacaagacggatataatttcatcatcttccgataaagcttctccaccaccaccatctggctttcagaaactacttatcctcaangaagtaangaaccagtgcttctcttgggatcanctggtnanngnatcttgttgcatctttagagtcccctgangagcttcgcnagcattgaatcccaaaggctataagcccaaaagttgtttccattgggtccttaccattacggtgaaaaagcacctccaaatgattcaacagcacaangcctcggcntctaacagcttttcccnagacgaagg

SEQ ID NO: 3777 - DNA, 454 bp, Arabidopsis thaliana
  unsure at all n locations
  Clone ID: LIB22-078-Q1-E1-H3
acgcgtccgcaggaatatccacctggtgttatgattgtgccgatgcatagcaaaacattgaaacctttcaggacaacaaatttggttgtgtttgctccagaaaatggtttgggggaccatcaaggggctgattttgtagctcatggggatgcgttgatagtggatcctggatgtctctctaaactccacgttgagctcaagaaaatcgttgatgctttacctagaaagctaattgtctttgttacacatcaccatcgtgatcacattgatggtctttctgctatacaagagagcantcctgatgctattctagtggcacatgctaaaactanggatcgcattggtggttggctggtaaactataccccaagtttctggnnggataaaacatctatgttaacgggtcaaaanactgancggttcatttttgctnccggggaacacancagaatgg

SEQ ID NO: 3778 - DNA, 452 bp, Arabidopsis thaliana
  unsure at all n locations
  Clone ID: LIB22-078-Q1-E1-F3
acgcgtccgggatagagaagtaattgatgttgatgatgagcttggagatgttgaaatgatatctgatgatacaagtagggagggtgtcgaaaacgtggctatggaggtggacgaggtggaagagaaggcggagatgggaaatggattgttttctgaggttgccagtctgaaaaatgggagcttgagggtgggtgaatgttctaaagctaatagtagttcactcgttgtgaatcgccctgtgactgatgtcacaagttttgaagcatacagaaaggttcttgagagtgctgtgaaccggacttctaaactgaaagacagaggctttgttgatttttttaaagagagaggtcgtgctttactacgaagcttgtcttccttttggagacaagatgaagaaccagtagaggttgtacaacgtgaggcatttgtacctctttctanagaggaggaac

SEQ ID NO: 3779 - DNA, 376 bp, Arabidopsis thaliana
  unsure at all n locations
  Clone ID: LIB22-076-Q1-E1-E10
actcaccgctccctgaacctggcttgctctccacgagccagcaacatcgagttcttattgatcattctttggaggcaagtcacaatagcaagcgttcaagaaaatcaaggagattgggcggttctgatttgaggattggtgtgagccttggatcgtctcataggaatatanaggctgagcaggcggctgctggttggccagcttggctttgttctgctgcggctgaggctgtccatggttgggttcctctaaaggcagaggcgttccagaagttggagaagattggacaaggaacatatagtagcgtgtttcgagcacgtgaagtagaaacgggaaagatggtggcattgaagaanggtaaagtttganaatcttc

SEQ ID NO: 3780 - DNA, 409 bp, Arabidopsis thaliana
  unsure at all n locations
  Clone ID: LIB22-076-Q1-E1-E12
ttctctaccattttcttttgctttaaagctctctcaatcatgatcatgaagacccccatcacagcattccattcatcctcatgaataattctacatcagtgaagaggctggtttcatctaaggcaatgaaatgtttctacttcagcaaagacaaaactcaggatgatgaagctaagactagaaagtttggttcagctacgatggctagaggaggatcagggtctgagtttaattcagatacaagtactgctacttccattacttcttccttgcacgtcctctcagagacacacagtantaatctcaaaggtatttgtcctcgatgaccttaaaaccgctaccangaacttcagccgcnccttgatgatcggtgaangnggctttgggtggngtcgttcgttgcgtgaat

SEQ ID NO: 3781 - DNA, 399 bp, Arabidopsis thaliana
  unsure at all n locations
  Clone ID: LIB22-076-Q1-E1-E7
gtttcaggtttatgaaaagggagctgaggtcgtcaggatgtacaaaactctactatgaactcaggggttccgaaagggaattgatctctattttgaaagacatgatgagcaagcagtgacttgtgaagacttctttgctgctatgcgtgatgcaaataatgcagactttgctaatttcttgcaatggtactctcaanctggnacgcccgttgtcaaagtggtatcctcttacaatgctgacgctcgtactttctctttaaaattcagtcaggagatacctccaactccaggccagccancaaagagaacctacatttattccagtgngttgttggccttttcgactcaagtgggaaagacattactctttccnctgttcatcatgatggtacaatncag

SEQ ID NO: 3782 - DNA, 407 bp, Arabidopsis thaliana
  unsure at all n locations
  Clone ID: LIB22-076-Q1-E1-E9
acgcgtccgagctaaaatactgtgttctttgtttcttccatcgaaatcgaaaaaagctaagatctttgcgttttgaaacgatggcggaagaacataagcatgatgaatctgtgatcgctcctgagccagctgttgaggttgtggagagagaatcgttgatggataagatatcggagaagatccatcacggtggtgattcttcttcgtcttcttcatcttctnnnnnnnnnnnnnnnnnnnnnnnnnnnnnnnnnccctcttctccttcgtcttctatgaaatcgaaagtttaccgcttgttcggacgagagcagcctgttcataaggttctcggcggtggaaagccggctgatatattcatgtggaaagaacaagaagatgtcctgggtgggtggtacntggggggg

SEQ ID NO: 3783 - DNA, 388 bp, Arabidopsis thaliana
  unsure at all n locations
  Clone ID: LIB22-076-Q1-E1-F11
aggagagaatcagctgttccctaaccagaaaatagtacagctcacattcctctttctggctctggtttctgtgccgtggatgttgttgccaaagccattcatcctgaaaaaacaacatgaagctagacatcaaggactgtcatatgcacagcttgacgagacagatgagagtcttcaagtagaaacaaatgggggaggacatggacacgaagagtttgaattcagcgaaatctttgtgcaccaactcattcacaccattgagtttgtgcttggagctgtttccaacactgcttcttatcttcgtctctgggctctcagtctcgcccactcgggagttgtcgtcagtcttctatgagaangtcctcttatggcttgggggtttcaacaa

SEQ ID NO: 3784 - DNA, 471 bp, Arabidopsis thaliana
  unsure at all n locations
  Clone ID: LIB22-076-Q1-E1-F2
acgcgtccgcccacgcgtccgaaaacattactaattattacaagaaacantcagaaacatcatggaggagcaaagcaagaacaagatcagtgaagaagaaaaacaactccatgggagaccaaatcgaccaaagggaggattaattaccatgcccttcatcttcgcgaacgagatatgtgaaaaattagcggtggtggggtttcacgcaaacatgataagttacttaacaacacagcttcaccttcccttaaccaaagcagccaacactctcacaaacttcgccgggacatcgagtcttactcctctccttggtgcctttatcgccgactctttcgccggccgattttggancatcacttttgcttccatcatctancanatcgggatggacgttgcttacnaatancnggcanataataccaacgctaaggcnacccancaatgtanaggagaaaaaggtttgtgtactan

SEQ ID NO: 3785 - DNA, 465 bp, Arabidopsis thaliana
  unsure at all n locations
  Clone ID: LIB22-076-Q1-E1-F7
acgcgtccgtctatctctctcttaatcgatcgatgaagatcaggtgcgacgtctgcgataaagaagaagcgtcggtgttttgcacggccgacgaagcatctctctgcggcggctgcgaccaccaagtccaccacgctaacaaactcgcctctaaacatctccgtttctctctcctttatccttcttcttccaacacctcctctcctctctgcgacatctgtcaggataaaaaagctctgttgttctgtcaacaagatagagctattttatgcaaagattgcgattcatcgatccacgctgcgaacgaacacacaaagaaannnnnnnnnnnnnnnnnnnnnnnnnnnnnnnnnnnnnnnnnnnnnnnnnnnnnnnnnnnnnnnnnnnnnnnnnnnnnnnnnnnnnnnnnnnnnnnnnnnnnnnnnngtcctgggatnatcantctctaatcctccncctctcaag

SEQ ID NO: 3786 - DNA, 466 bp, Arabidopsis thaliana
  unsure at all n locations
  Clone ID: LIB22-076-Q1-E1-F8
acgcgtccggtcatcttctcggtactctgganagagtgagagagaagcaacaatggaggttttctactacttggtgtttggagtcatggctgccntantggcagcgttggagcttancaagacgaacaaggatcggatcaacacttcgtcttccttcaattcattcaagaacaattacctccncgttttctctattatgatggctggggattggcttcagggtccttatgtgtattacctttacagcacttanggttttggaaaaggagatattggtcagctattcattgctggttttggttcgtcaatgttgtttggaactattgttggatctctggctganaancagggtccaaataggnnatgtgttanatanngtagtagtntacanactaagttncatcancaaagcactctccacantanaacngtttggatggttgggccgtatccntgggtgggattt

SEQ ID NO: 3787 - DNA, 389 bp, Arabidopsis thaliana
  unsure at all n locations
  Clone ID: LIB22-076-Q1-E1-F9
caatcaccaatcccggaaaaggcaacgacttccttcaatcgatgaaaatgaagaagacgccgagacctccgacgccggaagttccggtgaagaagacgaagacgaaactcagaatcaaggaatgagaccagaatctgaggatcgaggatcaacgagcgatgatagcgatcgtgaagttgtgattgaggagagacgatttggtaaatttgtaaatagtcagagttcttcttctagcaaagattcgcctctttctgtaacgttattgggatccagatgttcttgattgtcctatttgttgcgagccattgaagattcctatctttcangttttgcttcctcattgattacacaatccattgaaggcactccgattttagggtagaagttcc

SEQ ID NO: 3788 - DNA, 506 bp, Arabidopsis thaliana
  unsure at all n locations
  Clone ID: LIB22-076-Q1-E1-G2
agcttggncgtaccggtccggaattcacgggtcgacccacgcgtccgcttatttgagatgcttcgtgctttctcaaggcgttgcctcagtacatccacaaagtattgtgttgttgacaatccttacactggcgagatccattgtaaaatcccctatttaagttccgatcaaatcaccaaagtggtggatcgtagcgctgctgttcaaaagagctactatcatgaatcgactttggatagtcgcattgaactttgtnaaaaatttatggatgagatgaaagcccggactgattctatcgccactgacatttcaaaacagatgggaaagcccctaagccaagccaagggagagattaaggggttgatcgagcgagcgacagcgatgattgacctgncaccaaaggcactcgcagacgaagtgctgcccanacaaggcttttaccgcaagctcgcccgcgagctgttggtgtgggtgttggtgtantggccccttgngaaatagcctct

SEQ ID NO: 3789 - DNA, 469 bp, Arabidopsis thaliana
  unsure at all n locations
  Clone ID: LIB22-076-Q1-E1-G3
acgcgtccgaacaaagattcttgggaagcttccatggcttatgtttctggaaatccaatcttgaatgatgaagaatatgataagctcaaactcaaactaaagattgatggtagcgacattgtgagcgagggtccaagatgcagtctccgtagtaaaaaggtgtatagtgatctcgctgtagattatttcaaaatgttattgttgaatgttccagcaaccgttgttgctctcggactctttttcttcctggacgacattacaggttttgagatcacatacatcatggagcttccagaaccatacagtttcatattcacttggttcgctgctgtgcctgtgattgtatatctggctttatcaatcaccaaattgatcatcaaggacttcttgatcttgaagggtccttgtccgaattgtggaaacggnaaacacctcccttctttgggaacaattctgtcaaatctccanc

SEQ ID NO: 3790 - DNA, 471 bp, Arabidopsis thaliana
  unsure at all n locations
  Clone ID: LIB22-076-Q1-E1-G4
acgcgtccgctcatctcactcacaagagagagatagagagagaaaaaggctctgctttctacattatttacgattatacactttccaacatggcggcctctgtagataatcgccaatacgctcgtctcgagccaggtttgaacggcgtggttcgttcttacaaacctcccgttccaggccggtccgattcccctaaggcgcaccagaaccaaaccaccaaccaaaccgtgttcttgaaaccagccaaggttcatgacgatgacgaagacgtgtcgagcgaagacgagaacgagacacacaacagcaacgccgtgtactacaagggagatgatanganantccaacgccgancttgaaccgtccgttttggaccccgagggacgaaatacacggctgatagctggatcgagcgtaacccttccatgggnacgtctcacaaggaaacatcccttcaantccgaggggggcctc

SEQ ID NO: 3791 - DNA, 456 bp, Arabidopsis thaliana
  unsure at all n locations
  Clone ID: LIB22-076-Q1-E1-G5
agacttgacctttttcacttccttctcactgatcgtcgaacaataaggccgtcgcatctcccagttatggctatggccggagaatcttccggcaaaaaaattggagactgtgacggtaaagtcgcggggaacagacagcgaaaggtgggtcttatttacgacgagacgatgtgcaacacgacacacctgacggcgaggatcaccctgagtgtcccgaccgcatcaganttatctgggagaagcttcagctcgccggagtttctcaaagatgtgtggttcttggtagtagcanagcagaagataagcatctccaattggttcacanaaaggaccatgtnaatttagttaaggagtantagcacaaggcagaaagattancgagagaaacnaggattgcntcacatgntgnagttngatttatctgaangggggttcatcctgaangccgcaaatctt

SEQ ID NO: 3792 - DNA, 463 bp, Arabidopsis thaliana
  Clone ID: LIB22-076-Q1-E1-G7
acgcgtccgagaagttttactaatttaaatccttgctacgttctcttaccgttcttccttgtcctagccacgaatgcaacacatacaaacaatttcctcccaaggccacggactgggtattacggtagtgcatgctggaatgtagaatcgatagttcggtccgtggttgagtctaactatcttgctaatccagccaatgctccaggcattttgcgtatgcactttcacgattgtttcgttcaaggctgtgacgcctccgttctcctagccggacctaactctgagcgaacggcgattccaaatctatcgttgagagggtttaatgtcattgaagaagctaagactcagcttgagatcgcttgtcctcgaacagtctcttgtgctgatatcctcgcactcgctgcacgtgacttcgtccatttgggccggtggaccatggtggccagttccattggggagactc

SEQ ID NO: 3793 - DNA, 508 bp, Arabidopsis thaliana
  unsure at all n locations
  Clone ID: LIB22-076-Q1-E1-E1
gttccttggccgnaccggtccggaattcacgggtcgacccacgcgtccgcccacgcgtccggtgatctagcagagagaatcaatgaacacgtcttgccattagaggagaccaaccatttctctcctctctcttgaaaaatctataaccgatttctgcaatggcgacttcagattcgaggtcttctccttcatcatccgacaccgaattcgccgatccaaatcctagctccgatccagagacgaattcggagcgtgttcaaagtcaattagagtcaatgaatttatctcaacctagcgaagtctctgatggtagccacaccgaatttagcggtggcggcgatgataatgatgatgaggttgcatcggctaacgggaacgaaggcggagttagcaatggaggtttattgcgtgaaagtgtggcgggaactagcggaggagaagttttgttaanggcggaaaatcccggtgggaatgggaancaggtgaagaancaccgagttccgactat

SEQ ID NO: 3794 - DNA, 447 bp, Arabidopsis thaliana
  unsure at all n locations
  Clone ID: LIB22-076-Q1-E1-A8
acgcgtccgnnnnnnnnnnnnnnnnnnnnnnnnnnnnnnnnnnnnnnngctcgtcactccgctaccgaccactcacatcacaagtcacaacctccgccttgagatgagannnnnnnnnnnnnnnnnnnnnnnnnnnnnnnnnnnnnnnnnnnnnnnnnnnnnnnnnnnnnnnnnnnnnnnnnnnnnnnnnnnnnnnnnnnnnnnnnnnnnnnnnnnnnnnnnnnnnnnnnnnnnnnnnnnnnnnnnnnnnnnnnnnnttaaccgtccactcgccgcangtttcagttcctcttcatcagggtgctanctctggattcgncctacgacgttnttgttgttggtgccggacangctggatgcgaggcgggtttagcctcggctcgantaggaggctagtacnctgcttctnanattaaacctcgatngaataggcttgggagnccgtgt

SEQ ID NO: 3795 - DNA, 498 bp, Arabidopsis thaliana
  unsure at all n locations
  Clone ID: LIB22-076-Q1-E1-B1
ggaattcangggtcgacccacgcgtccgactttttgcttcttctctctcgatttgctctcacggaaggattcttcagaatatctgatccgatatcaagaagccccaagttcgcttgaattccgtctgagcaatggctttggtcttgcacacgtacaagggaaacaaaagtgctgagaaggcactcattgcagcagagtacgttggtgtgcaaatcgatgtgccctctgactttcagatgggtgtcactaacaaaacccctgcgttcctcaagatgaaccctattggaaaggtcccgtacttganactcccgaagggtcaagtattttgaaaagcaaacgcaattgccccgttaangttaacccgattgaatggngacaactcccttgaacggattctccctgntcgantatgcncaaattganccaatgggatgatttnncctcnantggnagatntaagcaaanancctnanggggggtncggcccaagaaaggggc

SEQ ID NO: 3796 - DNA, 420 bp, Arabidopsis thaliana
  unsure at all n locations
  Clone ID: LIB22-076-Q1-E1-B12
ttttctccattttcttcaaaacgattcgggtcanggttattgactttctcattcagcantgaagcttgaatcatggnctcgagaattgctaaagatgtgactgaattgattgggaacactccattggtgtatttgaacaatgttgctgaaggatgtgttggtcgtgttgctgctaagcttgagatgatggaaccgtgctctancgtcaaagacaggattggttttangcatgatttctgatgcagaaaanaagggtcttatcaaaccaagnagagagtgtgctgattgagccaacaagtgggaacactgggagttgggttagcattcacggcagctgccaaagggctacangcttaactattacaantgccaagcgtccaaggagtactgtnnagganggaatcattccgcttaacnctt

SEQ ID NO: 3797 - DNA, 381 bp, Arabidopsis thaliana
  unsure at all n locations
  Clone ID: LIB22-076-Q1-E1-B9
aaacctaacaaaagcttcagacttcaattctttagctacctctctcccatggcacgttcgaatgtaccaaaatttggaaactgggaagctgaggagaatgttccttacacagcttactttgacaaagctcgtaagactcgagcacccggtagcaagatcatgaacccgaatgacccggagtataactctgactctcaatcacaagctcctcctcatcctccttcttccagaaccaaacctgagcaagttgacacggttagaagatcacgtgagcatatgagaagccgagaagagagcgagttgaaacagtttggtgatgctgggtggttcatcaaatgaaggctgctancaaagagncagggaagagcttctcagancaat

SEQ ID NO: 3798 - DNA, 468 bp, Arabidopsis thaliana
  unsure at all n locations
  Clone ID: LIB22-076-Q1-E1-C1
acgcgtccgcacgatccgagcatcttccggatccggatcccttaacccggatcaaaaccgtaagaaatctgctgcttggtgggctcctctcttcggtttaccctccgatccagattacctcaacatcgaaagctcatgctccaccgtgaatccggataaaaccgatatttccgggtcgggtcaaaagtttcgtcgcggttgttttacggaggagaaagctaagcagttgaggaggaaaaccgcagaagcttccacgttccatgacgtaatgtatcactccgccattgcttctcgacttgcgtctgatatcaccggccgagtcgaggattgaaacggattcggggtcagatctggagacgaatcaattaatgaataattaatcntttttttccnaattcaagtgttcctgtaggatgcaaancatcttccaaccggtgctcctttttcatttgaanccgttgggccttg

SEQ ID NO: 3799 - DNA, 398 bp, Arabidopsis thaliana
  unsure at all n locations
  Clone ID: LIB22-076-Q1-E1-C10
tatcaggaaatgttggcaaaagcgcttgctaaacagtttggggccaaattgatgattgttgattctcttttgttgcctgggggatcaccagccagggaagctgaatcctctaaagaaggttctaggcgtgaaaggctgtctatgcttgctaaaagagctgttcaggctgcacaagtattgcagcataagaaaccgacttcaagtgttgatgctgatataacaggtggctcaacattaagctctcaggctttgccaaaacaagaagtgtcaacagcaacttctaaaagttacacattcaaagcaggtgacagagttaaatttgtaggtccttcggcttctgcaatttcttctcttcaaggccancttangggaacgggcaactggttcccaanggaaaa

SEQ ID NO: 3800 - DNA, 407 bp, Arabidopsis thaliana
  unsure at all n locations
  Clone ID: LIB22-076-Q1-E1-C11
atgatcataccaataacagagctttagatgtagcagtaaatggaacaaaaagaagaaggaccagtgattcccctaccttacccaacaagttggatggcaaaaatccaagtaatatcctaaagaaggctcctggagatacgagctgggcaacaaaagaactcctcgagtttgtgtcgttcatgaaaaatggcgatacatctgttctatctcagtttgacgtgcagggtcttctgcttgactatatcaaganaaaaaatcttagggatcctcttcagaagtctcaagttctttgtgaccagatgcttgtgaagttgtttggaaaacagcgagtggggtcactttgaaatgcttangcttctagaagtctcangtccttattcaaggagaaacccgaaanggggctaaag

SEQ ID NO: 3801 - DNA, 468 bp, Arabidopsis thaliana
  unsure at all n locations
  Clone ID: LIB22-076-Q1-E1-C3
acgcgtccgcaaaaacgccgtcgacgataataacctcaccggcgccaccaacaccgcccattctatcaaccaaacaaaatctcgccgctaatttctctctctatggcgctttattgccgtgatacactaatcatcatcttccaaaagctcaccgtcgccgatctancgcgtgcgagctgcgtctgtaaggtttggaattctgtagccacagaagacgatcttgttgtatctgctttcacggctccatggcggatcaaagaacttgttggaagaccagcttctgtttcgttttggagagataacggaatctggaaatttgctatttctcatcggatttgtcgtggtgatagtgtgactagcctcgccgtcaaatacgccgttcaggttatgggacataaaagcggctaaacaacatgatgagcgancattggtatttactcaaggagacagacngcttatcccaataag

SEQ ID NO: 3802 - DNA, 454 bp, Arabidopsis thaliana
  unsure at all n locations
  Clone ID: LIB22-076-Q1-E1-C4
gaatcttcatctccgaatccaccaccttctcangctccatctccgcctccctctcatcttcctccagttcacccncctcctttcgctgttgcaccccattgaacctcaaatcgctgcgttctcatcgccgtcctaagatttctcatatttgttgcgacggaagctctatttccggatctggcctcggcgatcccgatctcgagtttctccaagcctcngtcntcgttgcagngacaagtatgcattacaaaatgcggcgacatggtttccggcaagattcaatgtggcaaacttcnaggcntttgcctcccttttctattatagctaatgaatccaaggttggtgttctccctatngggacttggatttctccgtcaattcaagcanncccacnaanttttctcangatccctggtgatggtgactaattgcntccctgttattngttggggga

SEQ ID NO: 3803 - DNA, 471 bp, Arabidopsis thaliana
  unsure at all n locations
  Clone ID: LIB22-076-Q1-E1-C6
acgcgtccggtagctctctcacttcagctttccaattaaagggaacaaagctttgatttttgccgcagtcagaagcattactttgcaagaacaagtgtgtaaacaaagatgaggagctcccaaaacggcggcgcaatgggtggacgagctgccggaaccggcggaggaggaccgtcggctccagttgacaaagaagttgactacgctcagtacttctgtacttactccttcctataccaccagaaggatatgctctccgaccgtgtccgtatggatgcttacttcaacgccgtcttccagaacaaacatcactttgagggcaagactgttttagacgtgggcaccggggagtggaattcttggaanttgggtcangctcaaagctggtgccaaggaaggtttaagccgttgaagctactaaganggntgntcatgctcgtgnccntgtcaaagccaagaaaccttgaccat

SEQ ID NO: 3804 - DNA, 462 bp, Arabidopsis thaliana
  unsure at all n locations
  Clone ID: LIB22-076-Q1-E1-C8
acgcgtccgcccacgcgtccgcccacgcgtccgactctctctctctctcgttgcaagcaacttgttttctgaatccaaagaagacgataacgatgaatggagctataggaggtgaccttttgctcaattttcctgacatgtcggtcctagagcgccaaagggctcacctcaagtacctcaatcccanctttgattctcctctcgccggcttctttgccgattcttcaatgattaccggcggcgagatggacagctatctttcgactgccggtttgaatcttccgatgatgtacggtgagacgacggtggaaggtgattcaagactctcantttcnccggaaacgacgcttgggactggaaatttcaagaaacggaagtttgatacagagactaaggattgtaatgagaagaanaagaagatgannatgaacagagatgacctagtagaagaaggagaagaag

SEQ ID NO: 3805 - DNA, 459 bp, Arabidopsis thaliana
  unsure at all n locations
  Clone ID: LIB22-076-Q1-E1-D1
acgcgtccgctcttttaaatcaaaacaaaatatctctttcctgttagagacaatggacggattgatcagaggtttggtcgacgtggctatcggaggaaaccaacgccgcggcggagacgatggtggtgatgatgaaggcaactcgagggacgagagatccagatctacttgggctaatgtggtttccggtgaggaagaggatcagaatcgcgcgggaggatcgtcgcacggccgtcgccanaattcagaggagaatcaatgggagaagaagggcgaaaggcttcccacaaggcattcacaatcacatgaggaggaccaggaagagaatacatatgcggctaaaagtgagcgagaaacaanacttctcggagaagccagcaanaggaaaatgatggttgggaaactgtgggcaaaaagaaacctgcaaggcaatcacataaggtccagaanggagcaatg

SEQ ID NO: 3806 - DNA, 381 bp, Arabidopsis thaliana
  unsure at all n locations
  Clone ID: LIB22-076-Q1-E1-D12
tctctctgcgcgacttcgaagatcaacatccatggcgtcacaggtaagggtcantaaaagttggcaatctctcttcaggagcaactgaccatgatattaaagagtttttcnctttcncnggtgaanttgaaancatcgatatccaaagtaacgagcatagtgcttatgtcacatttaaagaaactcaaggagcaganactgctgtgctcttatctggagcgattattgccgntcaatcagtcatcattgagttggctcccaactacagtccaccagcagcccctcatgctgaaacacagagcagcggtgcagaatctgttgtccaganggcagaagatgttgtgagcagcatgttaagcanagggtttcattcttgggnaa

SEQ ID NO: 3807 - DNA, 501 bp, Arabidopsis thaliana
  unsure at all n locations
  Clone ID: LIB22-076-Q1-E1-A6
gtaccggtccggaattcccgggtcgacccacgcgtccgtggagcttaaactagccaccgccgagaaacaagtgcttgacgagttggtgaagctattgcagagtcgagatttgcgtggcgaaaatggaaactggaaggaatttttacatgtttacgacaaaaatgctgattcaccaagtgatccttcgaggcgttctcatgaagatttggttcagtttctgacaacttttaagaagaaagaagatttgcaacttctgaaatgtcacgccantcatcntctgattganaatttgaaccaagantcccaagatgaagacactcctgagcagatgctaagttagattgacagttgagcatccganttacncgttagactattctttcaaggccatactcagaggactgggtttgtatcccgatgttggaatgannatganaaagggtgaatgngaatcaactaacatggganctgttgantgtgacaagggttccgttgttgaag

SEQ ID NO: 3808 - DNA, 383 bp, Arabidopsis thaliana
  unsure at all n locations
  Clone ID: LIB22-076-Q1-E1-D9
cgatgccattttccgcatcaatctcatcgccttcttcttctgtcgcgcttcttcgatcgcctctctctttcttcatcttcactcccaaaaccctaatcttcaccagaaccaggatctctggtttcccttatcttgcttcccggcgatcccgcgatttcatcaacgggagggatgatttcgctgacgatacgaggagctggaaccggaagatcaaaccggagtatgggttcnnnnnnnnnnnnnnnnnnnnnnnnnnnnnnnnnnnnnnnnnnnnnnnnnnnnnnnnnntggatctgttacttagatttgtanaaaatgttttcagaaagatttcnaagagagcaaggaaagctgtccgattaattttgcccggttcgatntcg

SEQ ID NO: 3809 - DNA, 382 bp, Arabidopsis thaliana
  unsure at all n locations
  Clone ID: LIB22-075-Q1-E1-C6
ctaatgagattgcaacacaaaacaacaatcaaagttttggaacagaacgtcagataaagataccagcatacatggtgagtaggaactctaatgatggttatggttggagaaaatacggtcagaaacaagtgaagaagagcgaaaaccctaggagttacttcaagtgtacgtatcctgattgtgtttccaagaagattgttgagacggcttctgatggacanatcactgagatcatttataaaggtggtcataatcatcctaagcctgagttcaccaagagaccatctcaatcttcattaccatcatcggttaatggggaggcgcttgtttaatcctgcttctgttgttantgaaccctcaatgatcaagtcagagaactctn

SEQ ID NO: 3810 - DNA, 421 bp, Arabidopsis thaliana
  unsure at all n locations
  Clone ID: LIB22-075-Q1-E1-C8
catttgaagcgcggtcttttgaagcatctaaagcatccattgatatgaaggtatccacctccgcaatggcttcaagcatcagccccgctattggtaaaattgaacacatggacgcaggctctcctgcaaggccaaccccaattcctaatggaattgaggcaatgtcaagaactatggaaaagccaagaaacttggactctgttgataagtctaaacctttagagctcacagaaattgttgatccgactcagtgccgacaagtgacaatgccagatagcaaggactctgttagcaaggttgctcggcttctttacacaaattctggcgttggtgttttggctcctggatnaaatggtgttcaaagactatggaagtggatncgcaatgagcaaaatccanctgggaaagnaactgcctagtg

SEQ ID NO: 3811 - DNA, 432 bp, Arabidopsis thaliana
  unsure at all n locations
  Clone ID: LIB22-075-Q1-E1-D3
aaaaanaanagatccaaattacanccatgccttcggagttaacaccaggaagaacgatcggaactaaanaactcaatcgccgagttccacacataccaactcgatccaggaagctgttcatcactccacgcgcaacgaatccacgcgcctccggaactcgtctggtcaatcgtacgacgattcgacaaaccacaaacatacaaacacttcatcaaatcctgctccgtcgaacaaaacttcgagatgcgcgtcggatgcacgcgcgacgtgatcgtcatcagtggattaccggcgaacacatcaacggaaagactcgatatactcgacgaacgaacgggagaagttaccgggattcaagtaatcatcggaggcgancatanggtggacnnaattannaaatccgttacgaacggtgcatcnggttcgagaaaa

SEQ ID NO: 3812 - DNA, 423 bp, Arabidopsis thaliana
  unsure at all n locations
  Clone ID: LIB22-075-Q1-E1-D6
actttcaacgatgccatgggtcttcgctcatgcaggttacgacgtaggcaagaaggcgccaggacgttgttctcgctaccttaaaggttgtgaagaccgagatggacgatcaggttatgaggcttatctagttagtcacaacctcctcaacgctcatgcagaagctgttgaagttttccgccaaaaggttaaaggtgggaaaattggaatcgcacatagtccggcttggttcgaaccacatgatcttaaagattcaaatgacgttccaactgttanccgtgtacttgactttatgttgggatggcatctanacccaactacttttggcgattatccacannatcatgaaagaccttcttggncacagattgcccaaattcacttcttcacnaagcaanacaantgaaacgttcgacccgantt

SEQ ID NO: 3813 - DNA, 420 bp, Arabidopsis thaliana
  unsure at all n locations
  Clone ID: LIB22-075-Q1-E1-F5
atcctcttcttccatctccactgcttcctaattccccggaattcttcacaacccataaagggaagagagagttattcactggtatgagttcgtcgtttcattgagattatacacaaaacaagattataacttttttgctgggttttggagactatggctggtggtaacgaagtcaaccttaacgaatgcaagagaattgtcccactcaacacatgggtcctcatttccaatttcaagcttgcttacaaagtcctccgtcgccctgacggttctttcaaccgcgacctcgccgagttccttgaccgtaaagttcccgccaactctttccccctcgacggcgttttctccttcgaccacgtcgactcaacaactaancttctcaccangaatctaacaaacctgcgtctctccttcatcang

SEQ ID NO: 3814 - DNA, 417 bp, Arabidopsis thaliana
  unsure at all n locations
  Clone ID: LIB22-075-Q1-E1-F7
atggggaattacaagttcagaatttcagagatgctcccaaatgcatggttccacaagctcaaagacgtgactaaacactctaaacccaaaaacaaagcttcttcttcttcctcaaacacttgtagcaagaagaaaccttcctcagattctcttcctcaacactcttatttctccaacagcttantagcnaacaatcctcctcaccataactcaccangaaantctcttcacacaaaanagatgagtannaganagacactttacaagccatcccttaaanctttgactcctccntcgtcttcttgtatcngcaaggtttcaanaangagcaagatcaaccgatnanngattcgtcttaanagcttgttcccgggcnatttgaaacctccccctgagtcgtttgtgtagaagtttcna

SEQ ID NO: 3815 - DNA, 428 bp, Arabidopsis thaliana
  unsure at all n locations
  Clone ID: LIB22-075-Q1-E1-F8
gcattgcaaaagttccctctcctggggcttctttttctcataaccattgtcgtctcttcgacaatagccgtcgatgatcctgtgtgcccaacgacgtccaaactaagccgagcaagtttccctaatgggtttgtgtttggcacagctactgctgcgtttcaggttgaaggtgcaattaatgaaacttgtcgtggacctgctctatgggatatcttctgtaagagaaatccagagagatgtagtggccacaacgccgatgtggccgttgatttcttccatccgttataaggaagatattcaactaatgaagaatcnaaacacagacgcattcagactctcaatcgcatggtcaagaatatttcctcatggngagaaaaggagaangganttnagtcaagctggnngtgaaattctaccangacctgaat

SEQ ID NO: 3816 - DNA, 445 bp, Arabidopsis thaliana
  unsure at all n locations
  Clone ID: LIB22-075-Q1-E1-G8
aagtttctgagaaacaggtcacaggtctgtcttacatagttacattgatgggttgctcctggttatcgtgtcacaggagagaagctacagaagttgatggagaaatcgcagcgatagacaatgtaaagatatacaaatatagagagatacgtcaggccactgatgatttcagtgctgaaaataaaattggagaaggagggtttggttctgtgtacaagggctgtcttaaagatggaaaactcgcggctatcaaagtcctctcggctgagtcaagacaaggtgtaaaagaattcttgactgagatcaatgtgatatcagaaatacagcatgagaatttgggttaagttgtatggatgctgcgtggaggggaatcataggattcttgttacaatttccttgagaacaataagtccntgataagacgccttcctagctgggggggcta

SEQ ID NO: 3817 - DNA, 489 bp, Arabidopsis thaliana
  unsure at all n locations
  Clone ID: LIB22-075-Q1-E1-H2
tacgccgccaggtanccgtccaagaattcacgggtcgacccacgcgtccgcccacgcgtccggcaactgtggctcggtcgactttagatcggtctcttcttgcaatgactacaataaacaaaaaggtttcgacacganggagcttgaagagctctaatcttgttgtgcccttgacggattcgcactctgctgttgtttcttctcagccaagaaaccgtggaggtagagtaatgtcttggttattccctaagttaaagaaganacannagagtaattcgatctttanttcacctaagtataactgagaagtcagaggaagtttctgaggtgttgaangattctggttctggtgttgagaagttgaagaggagaattgatgnaagcaaaacagaagtagggatgctgcgttaacacaaagtctcaaanatgaaatcctcattgggagagttaaagtgacnaagcttcagtaccttgggnaaagttactgtg

SEQ ID NO: 3818 - DNA, 420 bp, Arabidopsis thaliana
  unsure at all n locations
  Clone ID: LIB22-075-Q1-E1-H5
ggacacagcttttacttctataactgagcgaagcaggtgaaaaaatggcgaatcggaagttagagaagatggcatcgattgatgttcatcttcgtcaactggttcctggcaaagttagtgaagacgacaagcttgttgagtatgatgctttgcttcnagatcggtttctcgatatcctccaggatttgcacggtgaagatctccgtgaaactgttcaagagcttnatgagcattctgcagaatacgaagggaagcatgaacctaagaagctagangagctagggagtgtgctaacgagtttagatccaggagattccattgttancgctaaagctttctctcanatgcgctaaccttagccaatttggctgancgaantgcannnttgcttatccnccgtagcgatcaagaagctgaagn

SEQ ID NO: 3819 - DNA, 409 bp, Arabidopsis thaliana
  unsure at all n locations
  Clone ID: LIB22-075-Q1-E1-H7
cttctttgattttgggaatactgagggaagaagaaatgcatatcgagctatcgtgcaagcaaggcctcctcacttaaacaatatttacctagcaactcagaggccggaacagcttttgagaagaactcagttaatggagcgctgggctagatgggagatcagcaattttgaatacttaatgcagcttaacacgttggctggccgtacttacaatgacattactcantatcctgttttcccgtggattatttctgacaacagttcagaaagtctggacctttcaagatccatctancttcaggagatctttccaagccanantggtgcattgaanccangagcggctcanngnantttcaaggagccggtattccanncttccgaagatccagttattcccaaaanttcc

SEQ ID NO: 3820 - DNA, 427 bp, Arabidopsis thaliana
  unsure at all n locations
  Clone ID: LIB22-075-Q1-E1-H8
ctgttaaaaaagtttgaattatttgatcataaaatgttatgttcataactttgattatattttctaatgtatttttgctaaaagagtttaaagttaatcacttggagatgaaagttagtaactttagtggatcaatctcttttttcttctttgcaggggatattacagatgtagtagctcaaaaggatgtccggcgaggaagcaggtggagagaagccgtgtggacccttctaagcttatgattacttacgcctgcgaccacaatcaccctttcccttcctcctccgctaacaccaaatcccaccaccgctcctccgtccgtcctcaaaancgcaagagaaagaggaagaatacnaagaggaggaanaagaactaaccgtcaccgccgcagaggaaccaccggcngggacttgattcaangccacgt

SEQ ID NO: 3821 - DNA, 451 bp, Arabidopsis thaliana
  unsure at all n locations
  Clone ID: LIB22-076-Q1-E1-A1
acgcgtccgctttttttgtnnnnnnnnnnnnnnnnnnnnnnnnnnnnnnnnnnnnnnnnnnnnnnnnnnnnnnnnnnnnnnnnnnnnnnnnnnnnnngggaattttgatcctttggnccccattgctcgcttgaattacgaatcagatatcgccgatcgtcgtagatctgcgttgatactgtccggctgagtaaacagggtgaacaaaaaccaaaaacagagagggggtttaaaaatcctgaagaaaatcgcatgaatttgtttggaagcctgattttttcatcttcgatttcgagccacttcacgacttgtcntctcatctttantccntcatttctctccccagntnnnnnnnnnnnnnnnnnnnnnnnnnnnnnnnnnnnnnnnnnnnnnnnnnnnnnnnnnnnncntttggatcaaatgganaaaggaaatcattggnggtccaagg

SEQ ID NO: 3822 - DNA, 424 bp, Arabidopsis thaliana
  unsure at all n locations
  Clone ID: LIB22-075-Q1-E1-C4
tcttccctcgtaaacatcgctgtctctaaagatggcctctctctcaggcctatactcttcttctccatctctcaaacctgccaaaaaccattcctttaaagcattgccggcgcaatctcgagattccttctctttcccacatacctccaaacccaccaatctaccgttgactctctcctcggctcgttctgtggcacgcgacatttctcatgcggattcgaagaaagagcttcttaaggatccggatgcgttgtggaagcgatacctcgattggttttatcagcanaaagagcttgggttgtatctgggatnttactcgggtcggatttaccgatgagtttgtggctnanatggagccaaggtttcaagctgcgtttaaggctatggangatcntgaaaaagggtctatagccaaaccctgatg

SEQ ID NO: 3823 - DNA, 499 bp, Arabidopsis thaliana
  unsure at all n locations
  Clone ID: LIB22-076-Q1-E1-A5
gctttgnccggccgtaccggtacggaattcccgggtcgacccacgcgtccgcccacgcgtccgctcttccattcaaatctcacattccctcttcacaacaacagcttcgtattcgctcatcttcttcgctttctgatcttggaaatcgcaggcattgttcgtctactcgaggatttcaattttggtcatnnnnnnnnnnnnnnnnnnnnnnnnnnnnnnnnnnnnnnnnnnnnnnnnnnnnnnnnnnnnnnnnnnnnnnnnnnnnaccggcggttcgtatttccgacgggaatctaatcatcaaaaaccggacgattctaaccggtgtaccagataatgtcatcacgacgtcagcatcggaagctggaccggtagaaggagtcttcgtcggagctgtatttaacaaggaagagagtananacatcgtaccgatcggtacgcttcgcaattcncggtttangtcntgtntccgggtttaagctcctggtggatggccnag

SEQ ID NO: 3824 - DNA, 385 bp, Arabidopsis thaliana
  unsure at all n locations
  Clone ID: LIB22-071-Q1-E1-G10
ctttagggtttataagacccaaacaaanaacattcatcagtctcaattcaaaatcctccatcaatggagaaatacgagaagctcgaaaaggtcggtgaaggaacctanggaaaagtctacaaagcaatggagaaaaccaccggaaaactcgtcgctctgaagaaaactangctcgaaatggacgaanaaggtataccaccaacggctctccgtgagatctctcttctccaaatgctttctcaatcaatctacatcgttcagtctcctctgcgtcgaanatgttattcaatcgagnagattcgactgtttcncantctcccaaatccaatctcganctcgtttttgagtanctcgacacngatntcaagaaatttatagattncca

SEQ ID NO: 3825 - DNA, 443 bp, Arabidopsis thaliana
  unsure at all n locations
  Clone ID: LIB22-071-Q1-E1-G2
cgtccgnaagcagttacatgatcaagtgattgttgtgtcttgttangaaagcctttggtgtcgggtgctgcgcttggtatggaagggcagcttacggtttataatcataacggaggcccgtgttaccggtgtctttttcccactcctccacctacctcagcgtgccaaagatgttctgatagtggagttcttggagtagtgccaggtgttattggttgtctacaancgctagagacaattaaactcgcaagcctggtgggagaaccactctctgaacggatgcttctttttgatgctttatcagcaaggatgcgcattgtcaagatcagaggcaggtcatcacagtgcancgtgtgtgganacaattcatctttcaataagcanacntttaaagattttgactaagaagacttcactcaatttccgttatttgcgggccattg

SEQ ID NO: 3826 - DNA, 449 bp, Arabidopsis thaliana
  unsure at all n locations
  Clone ID: LIB22-071-Q1-E1-G4
gtacanatcataaattcccgggcccatcgtccgantctacttctttttcccatcaccatatgaaaaggcagagacnnnnnnnnnnnnnnnnnnnnnnnnnnnnnnnnnnnnnnnnnnnnnnnnnnnaggttacaatgatgtttaatgagatgggaatgtgtggaaacatggatttcttctcttctggatcacttggtgaagttgatttctgtcctgttccacaagctgagcctgattccattgttgaagatgactatactgatgatgagattgatgttgatgaattggagaggaggatgtgggagagacaaaatgcggnttaaacgtctcaaggagcaggataaaggtatnnaacgtgttgatgctgntaaacaggangcagtctcaagagcanagctacgagggaacgnnaatgtccangagctcaaggaatnggatcttgaagttag

SEQ ID NO: 3827 - DNA, 425 bp, Arabidopsis thaliana
  unsure at all n locations
  Clone ID: LIB22-071-Q1-E1-H1
tgctttcaccaacccactcgacggagtctccaacgccttcctcctcattctccactctcacaccaccaacttctgattccagatctcaacgatgcaaagctccgccgtantctccctcnctccgtcgcttcctctcctaaaaccacgtcggctctctctccgccaccatcccataaccaccgccgcttcttcaagcgatctaaacgtttctccaaatgttgtctctattccttctttatctcgtcgatcttggngtctcgcttcgtctgattcgnntctccgtgcttggtccggtgttccttctccgatntctcantccttanganncnaatcgtttnangaancgccgntantgcagttcctgaaagtgctgangaaggtgataanagtgggtaaattgangaagggttttgggaacgtggngt

SEQ ID NO: 3828 - DNA, 412 bp, Arabidopsis thaliana
  unsure at all n locations
  Clone ID: LIB22-071-Q1-E1-H10
acgcgtgtancanaagtgccaagttccctggagtgccatacacattcttctcgcagagacaaggctgcaaagtttctctgtaccaagatgctcatattccagacaactttgtccctaagaattcctctcgctggagggaagaactatnagcctcaaagatgttgggaggatatttttgatgctnttagcaatgcanaacacttgatcnacattactggttggtctgtttacgccnagattgctttagtgagggactcgaggaggcctaagcctggaggtgatgtgaccattggtgagctactcangaanaacgctactggaangtgtcanggttcttntncntgtttgggatgacagnacttctgttgaggtgctgaanaaaggatnnggctcatgggctactcatgnatga

SEQ ID NO: 3829 - DNA, 435 bp, Arabidopsis thaliana
  unsure at all n locations
  Clone ID: LIB22-071-Q1-E1-H3
caactcangtagtcagcgggggaataaataaagtcaaagatggttctaatgggacatgctcgaagaaaagcacaccaggtggtctgatatatcctaatcagatcagcatgtctgctcacgcgagtgcaaataaggtcggcagacctgggaagaaaagcaaagtttttatggaagctgctgctaatggatttgttgagaaccctctgagatctgtttcagtatcaaagacagcgaatacagatgccaaaatggatcaggattacaaacttcatatccaaagttcaactagacgttggtctgctgcntcagtattggatacacggaagcccttaattcaaaaggccagaacangatatcaagcanagattggngatgatgagattggctttagaggcaggcagcggctgcagaggatgcagcacccccntggatgaa

SEQ ID NO: 3830 - DNA, 493 bp, Arabidopsis thaliana
  unsure at all n locations
  Clone ID: LIB22-071-Q1-E1-H4
acgtttgccnggcccggtccaaaattaacgggtcgacgcncgcgtccggttttcggcatacttttcatggagattaaccgtggtggccatcccaacacttgttcttcttctaatcccagggttgatctatggcaaataccttgttcacttatcaaagaaatcttttaaagaatacaccaaagcaaactccatcgtggaacaggctctaagctccatcaagacaattctttcattcacagccgaaactcaaataatcaagaaatactcggaagtcttggaaagacacaaaaagcttgggttaaagcaaggtcttgccaaaggtttagccgtgggaagctcaanggatttcattcaccatttgggcttttcttgcttggtacggaagcagattggtgatgcacaaacaagaaaccgggtggacgcatttatgcagctgggatcnccttcgtcntgggtggaatctctctaaggacggnactgactgaaataagga

SEQ ID NO: 3831 - DNA, 385 bp, Arabidopsis thaliana
  unsure at all n locations
  Clone ID: LIB22-071-Q1-E1-H9
tatctctctcttaatcgatcgatgaagatcaggtgcgacgtctgcgataaagaagaagcgtcggtgttttgcacggccgacgaagcatctctctgcggcggctgcgaccaccaagtccaccacgctaanaaactcgcctctaaanatctccgtttcnctctcctttatccttcttcttcnaanacctcctctcctctctgcgacatctgtcaggataaaaaagctctgttgttctgtcaacaaggatagagctattttatgcaaagattgcgattcatcgatncacgctgcgaacgancacacaaagaaacacgatnngtttcttcntanaggggttaagctctcnngcaacatcgtctgtttacaaacctacttcggaaatcnt

SEQ ID NO: 3832 - DNA, 393 bp, Arabidopsis thaliana
  unsure at all n locations
  Clone ID: LIB22-073-Q1-E1-A2
gaaaagtacccaaatatattttcccagagttcagtttttgggaggtttccatattttctgccgagcttagttatatccgtctatgctactgcggttctcatcgcttgctggtggcttcctgaaactcttcatacacgttgtagaattgcacaagggagacttaatccaacagagctaaacgatgatgaaagtagaggaggaggacttgatgaacagaaaataattaataagccaagtctcttgaggaatcgtccattgatggctatcatcattgtttattgtgttttttccctccaagagatagcatacaatgagatattctcactccgggctgttaatgaccgaaactatggnngattgagcttctcancccaagaaattngggggaaattt

SEQ ID NO: 3833 - DNA, 427 bp, Arabidopsis thaliana
  unsure at all n locations
  Clone ID: LIB22-073-Q1-E1-B5
ttttgaagtaactatagtaagattgatcagcaagcaaaatatggctcaaaaggttgaagcaaaaggagggaaaggaggcaaccaatgggacgatggatccgatcatgacgccgtgaccaagattcaggttgcagtaggcggaatgggaattcaatacattcagttcgattacgtcaagaacggacaaaccgaacaaactcctcttcgtggtatcaaaggcagtaccattccaactgatccgtttgtgattaaccatcctgaggagcatctagtttctattgaaatttggtataaacctgatggtcttattcaagggcttaggttcatatccaacaaaaagacttctcgtttcaatggntacnattgtgggacnaacannnnnttccccaanttttnngncacncgnaanttcatgggctttccaggg

SEQ ID NO: 3834 - DNA, 413 bp, Arabidopsis thaliana
  unsure at all n locations
  Clone ID: LIB22-073-Q1-E1-C5
gaggacacattcattgctgacttagccgttggcttgtccactggacaaatcaaaaccggtgctccttgcagatccgagcgtcttgccaagtacaaccagcttttgcgtattgaggaggagttgggatcagaggcaatttacgctggagtcaacttccgcaaacctgtggaaccctactaaatggagcttttagaagcaaagtggtcttctttgtgacgaggagaanatgacctgagtttgatcatttgctttaattaaataaaacgttctgtttttgtttcttctttgtttggtttcttanngtcttttgttgaaccctttttgggaaaagttactcatttttgtaaagggaaacatganaatgcncnggcnttggtcgagggnncgntgcccccctaaggtcaccccaagtt

SEQ ID NO: 3835 - DNA, 383 bp, Arabidopsis thaliana
  unsure at all n locations
  Clone ID: LIB22-073-Q1-E1-C8
acgcgtccggtcaactccaagaacaaaaagcacctctgctctgttttgagatccaaccacagttcaaactaatcaaaagtcccaatttctaacttcagtctaggctttttctctccatggatccttgattctgagatcaaccaatcgaaagaaaccaaaatgggcttcaacgttgttgtgttcttgagttgtctgcttctacttcctcctgttacttttggtagcaacatggaacgaaccaccttggttatagacggctcacgtcgaatcgctgagaccgatgagaactttatctgcgcaacgcttgattggtggccacctgaaaaatgcaactatgatcaatgtccttggggttacgcatctctcaacaatttggaacttan

SEQ ID NO: 3836 - DNA, 507 bp, Arabidopsis thaliana
  unsure at all n locations
  Clone ID: LIB22-073-Q1-E1-D1
tgttacgcctgccagttaccggtccaagaatcccgggntcgaccaacgccgtccgcaccgccatctaaacaacactccttcaactgaagccgcggcgaaagaagggggaaagcgaaatctattaagattaggggtttataacgattatagggagggacgaaaatcaagnaagacgagctagaaggaagctgcgatttttctggaagataaacaatggcacaagattcagagaagagattccaccaaatcatggataaactctttaccccatcgaaatctcagcttccttcttcctccaccagttcttctgtagagcaacaatcaagaggcaagaagcgtcaaaatccttcatctgcgttagcattggttgagccaaaagattgtattaactaccattgataggtcctcanncntttgaagggttcccgctggaaaannccccntcngggctttttnaaggccttgggaannangggnattnnttctnnggagggtttgctactttca

SEQ ID NO: 3837 - DNA, 366 bp, Arabidopsis thaliana
  unsure at all n locations
  Clone ID: LIB22-073-Q1-E1-D7
cttcttcttcatcttcttctatatattggtgtttcatttgttctgctttaaaagtacacaaagattcatcttttttcggtcctctgattgggcaaaagactagctcggtcgtgttttgaacaagagatacatgttttgaaaaattcctcgcaaaagaagagaaagaaagactcaaacttttgtttgaatttgataccattttttatatatataccaaaagtccaagactggtttcatttttgggtttggtctgaaacctctcttcgtgttgtttgttcatggtatgtcttaattagggtaaaaaaatacttgattgttttctctcaatcatcangcataagagtacgcaataaaccggntaaatcc

SEQ ID NO: 3838 - DNA, 480 bp, Arabidopsis thaliana
  unsure at all n locations
  Clone ID: LIB22-073-Q1-E1-E3
tgttacgcctgccagttaccggtncaagaattcccgggacgacccacgcgtccggctctgtgtantttgcttctttagggagaaagaaagcacaaggggcaaaatcggaaagattatcatggccgacggtagtactagttcttcggagtccactaccgcctgcgctggaagcggcacaagaagagagattatgctgttcggagtcagggttgtgcttgacccgatgagaaagtgcgtgagtttgaacaatctgtctgactatgaacagacggcggagactccaaagatcgacggcgaagatagagatgaacaagatatgaacaaaaccccggccggttacgcctcggcggatgaagctcttcccatgtcttcttctaacggnaaaatcganaggaaaccangagtttcatgggagngaannnagaacacaaaacngntnnctnccctggggnnncaaaaattccgtnaaggggaaattgg

SEQ ID NO: 3839 - DNA, 430 bp, Arabidopsis thaliana
  unsure at all n locations
  Clone ID: LIB22-071-Q1-E1-F8
acgcntccgcccacgcgtccgcccacgcgtccggttcagggaggaggctcgagaacagtgccccatatctgaaagctgaagctaagaatctggacgttcgtgtttaaaccgacgacgtatttgaaattggctttgaaggaaaggtgaaattaatggcggaatcgtcgtcgccgtcgcctactgaagagatcgttcggttgattaagcgtttaagcgcttacgttgctttcaaaatgtcaagccttttctccactacatcgattcgaaatctggattcaagatcaattggtgcgattgcggggcttgcgattgcngtgatatntacgtggangggcgataagaacgcccggagaagcaacgtntnnagaaggcagnccaagcgtatgattcacantgctgaaacgtctantgctgctgntgcttgcctctc

SEQ ID NO: 3840 - DNA, 394 bp, Arabidopsis thaliana
  unsure at all n locations
  Clone ID: LIB22-071-Q1-E1-A12
gaaacaatggtacactctcgttttttaaacgttgttttagtcctagtgaccattgcttccatattctccacatttgccgaggccaataggggctttgggtggggttggggtggacactccaacaattcaagtggttcaggttcaaactcgaggtccggatggggttggggttggggtcaaggctccaactattcaagtggttcagcttcaaccccannnnnnnnnnnnnnnnnnnnnnnnnnnnnnnnnnnnnnnnnnnnnnnnnnnnnnnnnnnnnnnnnncccaacaatacacacanctcaaggtctgngcggctcgggttggggcatggggccctaacaacaattacaagctcgggatttngcggctcgggttcaggctgggggatattgn

SEQ ID NO: 3841 - DNA, 418 bp, Arabidopsis thaliana
  unsure at all n locations
  Clone ID: LIB22-071-Q1-E1-A3
aaaaccaactctggagaatggcgaatctaccttcttctctctccatgggcacacctttcggtggtcctagcacctccgcacaaaatcctaccggagctccggccaacaaagatcgcaatttggcctctgctgaacagttggtactcgatctcagcaatcctgaactcagagaaaatgctcttctcgagctttccaagaaaagagaattgtttcaggatctggcgcctttgttgtggaactcttttggtaccattgctgccttgttacaggaagattgtatcaatctactctgttcttgcacctccaaatctgactcctgctcagtccaaccgtgtttgcaactcgctcgctcttcttcagtggcgtagcatctcattctgacacgagaatgtnattctcaaggctcataatccngttg

SEQ ID NO: 3842 - DNA, 431 bp, Arabidopsis thaliana
  unsure at all n locations
  Clone ID: LIB22-071-Q1-E1-A8
attgtccacgcctcggtgaattgcccaagaacctcagtaagctacaagctctcgaaatcttaaggctatatgcttgccctgagctaaagacattacctggagaaatatgtgagcttcctgggcttaagtatctcgacatctcacaatgtgtcagcctgagttgtcttccagaggaaataggaaagctaaagaagcttgagaagatcgacatgagagaatgttgcttctcggatagaccgagctctgctgtttcactgaagtctctgcgccatgtaatctgcgataccgacgttgcatttatgtgggaagaagttgagaaggctgttccagggttaaagatcgaaagctgctgagaaatgcttcagcctaaactgggcttgncgaattanagtgtaaactcantgtttannagtctggtanagttaaatggc

SEQ ID NO: 3843 - DNA, 366 bp, Arabidopsis thaliana
  unsure at all n locations
  Clone ID: LIB22-071-Q1-E1-A9
aagacaagtatattttcttatttactatataaagtaatttcactttctcagatcccgattcctcttgatcatcgtcttcttctaccaaaattgttgcgcgacaatggagaaatacaacagtttatcagattttctcaaggagttctacatccctacgtacgtcctctcggcggaaacagaagaggaggaggaggaggagagtcgtcctacacctgcganccccgtccttgtcttcatcaactccaaaagcggtgggtcagttgggtgggcgaactcattctcacctaccgatctcttctcaatcacaatcaggtctttgatcncgaccangganactccaggataaagtgctccgcaggaatctan

SEQ ID NO: 3844 - DNA, 429 bp, Arabidopsis thaliana
  unsure at all n locations
  Clone ID: LIB22-071-Q1-E1-B3
aacattgaatcgtgtctaaatcgatctctgagggagatatacctggaatcacgatcttagatttcgatgcttggatctgagctcctaaccattctgtggattgagaaatagattgggatatgagatccatactcgagatgtgtttttgctcaaaaattagcttgttcctgcaattccataggttccacaagatccaaatgggaagttgtccttgtccaattccgattggtggaagggtaacgaggagctttgagacttccaaaccctgtttcatacttgtgatccgggaagcttgaagcgtggttttgaaaggagaaagatcccaagaccttagaagcaaatgggcagaggaaaagcangatggagaattgattcagcctcgtcgcagtgaggacagagagcaagcggatttataccacgcagcctcag

SEQ ID NO: 3845 - DNA, 427 bp, Arabidopsis thaliana
  unsure at all n locations
  Clone ID: LIB22-071-Q1-E1-B6
ccaaaacacgagagatgtttgtggaggaagtgatggagttggtggagcttaaacctcttagaaactctatagttggtcttcctggtgtagatggtctttcaacagaacagaggaagaggcttactatagcagttgaattggtagctaatccatcaataatcttcatggacgagccaacatctggtcttgatgcaagagctgctgccattgttatgcgtactgttaggaatactgttgatacaggaagaactgttgtttgtacaattcaccaacctagcatcgacattttcgaatccttcgatgagttgctgttgatgaaacgaggaggacaagttatatatgctggaacactaggacatcactcacaaaaactcgttgaatactttgaggctattgaanggggttccaaagatcaaggacggataca

SEQ ID NO: 3846 - DNA, 400 bp, Arabidopsis thaliana
  unsure at all n locations
  Clone ID: LIB22-071-Q1-E1-B9
attttctccattctctcgttccaattattatttacttttttcacccaataaaaaaaaaaccatgcattcacttccggtgaatctcgtcctcaccgtacttacggtgttcctaacatcaccggcgcaagttatcggataccgtccatatccaccaaaaaccaanggctccgatcaaatcttcgacgcttcaaaaaaattcgaaggctcatcgaatctcgtccgcctccgttaccacatgggtccagtcttaaccaacaacatcaccgttcacccaatctggtacggcacgtggcaaaaatcccagaagaaaatcanccgtgagttcattaactcaatctcagccgttggatctaaacacccttcagtcnccgggttgggtggaaaaccgtacnaggtttac

SEQ ID NO: 3847 - DNA, 432 bp, Arabidopsis thaliana
  unsure at all n locations
  Clone ID: LIB22-071-Q1-E1-C5
gtaccaagtcatgaaattcccgggtccgacccacgcgtccgnccaaaaactctgtcgaattcgatcgttacatcgagcgcaaagctttcgacaatacaaaagaaggtgttaaagggctcatcgatgctaaaatcaccgagatccctcgaattttccacgtccctcaagataccttaccagacaagaaacgctctgtttcagacctagagatccctaccatcgactttgcaagcgtcaacgtggacacaccctcacgtgaagccatcgtggagaaagtcanatatgcggtggagaattggggattcttccaggtgattaatcatggngttcctttaaangttcttgaagagattaaagatggggttcngtaggtttcacgaggaagaagatnctgaggtcaaaganatcatactantcgcttgatttcaccaa

SEQ ID NO: 3848 - DNA, 419 bp, Arabidopsis thaliana
  unsure at all n locations
  Clone ID: LIB22-071-Q1-E1-C8
tctctcgctctctatctctctcaaacactatggaatcccaaacaaagttcgattatgaaagtcttgcgttcacaaagttgtctcactctcaatggactgattacttcctctctgttcccatcgatgattcggagttagacgctattacaagagagattgacataatcaagcctgaagttaggaagctcctatcttccaaaggtgatgatgagacatcaaagaggaaagtgcttttgatccaatcgcttcttagccttggcctcgcatttcattttgaanatgaagntcaaagatanattagaagatgcttttcgaangatagatgatntaactggtgatgaanatgacttgtcganaanctgcatcatgttccgcttttcaggaanatacgggcacagntttacaatcaaggtgtantt

SEQ ID NO: 3849 - DNA, 389 bp, Arabidopsis thaliana
  unsure at all n locations
  Clone ID: LIB22-071-Q1-E1-C9
aactgagaaagaagttttatttattaattaatggcggaagagaaaagctacaagtacgtgatcattggaggtggtgtagccggcggttacgcggcgagagagtttagtaatcagggcctgaagcctggtgaactcgcaatcatttccaaggaaccagtgcctccttttgancgtcctgaactanccaaggtatatattgacctcgaagtcaatccgacccttgcaaatatctatgtttgtgctggaactggagaagcgangcagtaccctaactggtacaaagagaaagggattgatcnaattgtgggcacagagatagtcaaagcagatcttgcttcanacacacttgttaantgatgactggcanaatttacaaagtaccaancttt

SEQ ID NO: 3850 - DNA, 439 bp, Arabidopsis thaliana
  unsure at all n locations
  Clone ID: LIB22-071-Q1-E1-F1
acgcgtccgtctaaatctctaatcttttgaaaccctaaatcaaagttttgtttttttttatcaactggggaagaagaaaggtgtaacctttatataaccatggattccggtgacgcgacatctttgcttttgacgaaaattcgaagcttggagccagattatgctcctaagattattgggtatttgcttttacatgattttggtgatagagacttgatgcatctggctcgtggacctgaatcgattttgcagtcgactatttcgaaagtgaagagtctcttggggattttctccaacaactcgccttcttctactccgacgtctccttctccgttgaatcctatctgtcgtcctcctcttaacggaagangaagctctcactccaatgggtttatggatttccgtagaaactctccgtcntctccttcttctacctctc

SEQ ID NO: 3851 - DNA, 381 bp, Arabidopsis thaliana
  unsure at all n locations
  Clone ID: LIB22-071-Q1-E1-F10
acgcgtccggtacaacccaacacactaccgtgaacctaaattttacacaaagcttttcaaagaatgccatatgaatgacgaagatgggaattcgtatgaactctctttggttagctgtaaatgcattggagcttatgtgagaaacaaaaagaaccagaaccagatatgctggctttggcagaaagtcagttcggataatgataggggcttccaacgcttcttggacaatgtccagtataagtctagtggtatcttacgctatgagcgtgtctttggagaagggtttgttagcacagggggactcgagacaacaaaggaattcgtggatatgctggatctgaaacctggccaaaaagttctagacnttgggtgcggaatagg

SEQ ID NO: 3852 - DNA, 487 bp, Arabidopsis thaliana
  unsure at all n locations
  Clone ID: LIB22-071-Q1-E1-F4
attttgcccnggcccggtccaaaataaacgggtcnacncncgcgtccgggaagaatggctacatgtcctcctttcgatttctcgaccaaatattacgatggtgacggcggatgccagaggcagagcagcttcttcggaggcacgacggtgctcgatcaaggcgttggctacgccgtgattcttggttttggtgctttctttgccgtcttcacatcttttttggtatggttagaaaaacgatatgtgggagctcgtcatacatcggaatggttcaatacagcgggaagaaacgttaagacaggacttattgcaagtgtcattgtatcacagtggacatgggctgcgaccatactgcaaagttcaaacgtagcatggcagtatggggttagtggaccgttttggtacgccangtggagccaccatacaggtgctgttgtttggtgtgattgcgantgagataaaaagaaaaggctcctaatgctcacac

SEQ ID NO: 3853 - DNA, 485 bp, Arabidopsis thaliana
  unsure at all n locations
  Clone ID: LIB22-071-Q1-E1-F6
acntcgcccgggaccgtacaagtcannaaattcccgggtccgacccacgcgtccgngaccgcttccttctttctctgtcacatacgaatcggggaaatttggatcccgatcgtgatctttagtttggtgaatttgagctggaattggagcttaaaggatcggttttttgactgatctaattgttttgaggatcggtctttcataaagttgttgtctttgaagcttttttgactggtgaggacgaaaaagttgtgattttgggaattagggttgttttgtttcgaattcgccatggatacgagcangagagctgtggaatcgtattggaggtcgcggatgatagatgcggttacgtctgatgaggacaaagttgcgcctgtgtacaaattgggaagagatctgtgacctcnttcgncttcncangtcagcatcgtcaaggaattttctgaantcatntttgaaacgtcttgataanaaaaagcccc

SEQ ID NO: 3854 - DNA, 487 bp, Arabidopsis thaliana
  unsure at all n locations
  Clone ID: LIB22-071-Q1-E1-F7
cttttacccgnccggtaccggtccanaaattcccgggtcgacccacgcgtccgngcttatgctctaaaagcgattgctcagttcatccaacctgcacttgaggctgtattcgacgatactcctaaagagtttgattcttttgaagatgttcttaagatctatgaagaaggaatcgatctaccaaaccaagctttgattgatagtatcgttaagaatataccgcttgagatgttaaaggagatattcagaacagatggccagaaattccttaagtttccagtgcctcangtcatcaaagaggacaaaactgcatggagaacagatgaggaatttgctangagaaatgttggctggactaaaccctgttgttattcaacttcttaangagtttcctccaaagagtangcttgacagtgaatcatacggtaaccagaacagtacaatcactaagaagccacatnggagnanaatttgggatggactcact

SEQ ID NO: 3855 - DNA, 419 bp, Arabidopsis thaliana
  unsure at all n locations
  Clone ID: LIB22-070-Q1-E1-H7
atattaancactttttcttttagaaaaaaaaacanatatggccgttgantcacctcntcaatctcggntggtttcagcgacgacttctgagaaagatgtgaaagctctcaagttcattgaagaaatgantcggaaccctgactcggttcaagagaaggttcttggatagatactgactcgtaactctaacaccgaatatctgaaacggttcgatcttgatggtgtcgttgatcggnaaacgttcangagcaaagttccggtggntacgtacgaagatttgaagccggagattcaacgtatatccaacgggtgattgttctccgatcttgtcttctcaccccatcaccgagtttctcacaagctcaggaacatctgctgggtganaagaaactaatgccaacaattgaagaaaacttatt

SEQ ID NO: 3856 - DNA, 184 bp, Arabidopsis thaliana
  unsure at all n locations
  Clone ID: LIB22-070-Q1-E1-F1
acaaatgcaaagcaaatnnnnnnnnnnnnnnnnnnnnnnnnnnnnnnnnnnnnnnnnnnnnnnnnnnnnnnnnnnnnnnnnncaagaatattttagatgcaaattctttttccatagatgtttttgtgttttcttcagtcaaatatatggagaaatttcatactaaaaaaaaaaaaaaaaaagg

SEQ ID NO: 3857 - DNA, 409 bp, Arabidopsis thaliana
  unsure at all n locations
  Clone ID: LIB22-070-Q1-E1-F3
ncatctggagctattgtcttacttcatgcatgtgcacacaatcccactggagttgacccaacctctgaacagtgggaacagattcgacagctgatgagatctaaaagcttattacccttttttgatagtgcatatcagggttttgctagtggtanccttgacacagatgcacaatctgtccgtacatttgttgctgatggcggtgaatgcttgatagctcaaagttacgccaaaaatatgggactttatggggancgtgttggtgcccttancattgtctgcaagtcaagcagatgtggctagtaaggttgagaaccaagtgaagcntgttgtgcggcccatgtattcgagcccccctattcatggaggcatcaattgttgccaacattctaaaaaaccagttgntatg

SEQ ID NO: 3858 - DNA, 421 bp, Arabidopsis thaliana
  unsure at all n locations
  Clone ID: LIB22-070-Q1-E1-F4
aatcctcgnnnnnnnnnnnnnnnnnnnnnnnnnnnnnnnnnnnnnnnnataatggcgtcgatccctccgccggagcttgacaacgactcactggcgtcatcgccgagatcggagtacgatagtcagccacgcgtacggttcatgtgtacttttggaggaaggatcttgccacgtccgccggataatcagctctgttacgtcggcggcgataatcgcatggtcgctgttcatcgtcacactactttcgcctctctccttagtaaacttgctaaactctctggtaaaagcaacataagcgtgaagtaccagctaccaaacgaagatcttgacgcgttgatttccgtatcaacggacgaagatgtagagaacatgatggacgaatacgaacgcgtcgcacaagaatccaaaaccaagcggnctc

SEQ ID NO: 3859 - DNA, 134 bp, Arabidopsis thaliana
  unsure at all n locations
  Clone ID: LIB22-070-Q1-E1-F5
caaattcncgggtcgacccacgcgtccnaccaagttgtgttgctacttggtaataagagtaagctttaaaaagagtatgttcactgnnnnnnnnnnnnnnnnnnnnnnnnnnnnnnnnnnnnnnnnnnnnnngg

SEQ ID NO: 3860 - DNA, 418 bp, Arabidopsis thaliana
  Clone ID: LIB22-070-Q1-E1-F6
ccacaaaaaggctggtgctatgaatgcactggtgagagtttcagcagttcttaccaatggacctttcatcttgaatcttgattgtgatcattacataaataacagcaaagccttaagagaagcaatgtgcttcctgatggacccaaacctcgggaagcaagtttgttatgttcagttcccacaaagatttgatggtatcgataagaacgatagatatgctaatcgtaataccgtgttctttgatattaacttgagaggtttagatgggattcaaggacctgtatatgtcggaactggatgtgttttcaacagaacagcattatacggttatgaacctccaataaaagtaaaacacaagaagccaagtcttttatctaagctctgtggtggatcaagaaagaagaattccaaagctaag

SEQ ID NO: 3861 - DNA, 403 bp, Arabidopsis thaliana
  unsure at all n locations
  Clone ID: LIB22-070-Q1-E1-F7
acgcgtccgcnttttttctctgctccagggggaaattaaaaaagtggaaccttttcatctcctgnagcgatcaatttctttttcatcatatcgctgactctcgtcttcgtcgtctttgatcgtatcgaggaattgggtttagttcgattcgatcatcagctatctcaatttttctggggattgttctaaaggtttctagtgacttgtttaaagtggttggtantggataatgccttctctcatctcacagnaatggnatgagangactagtgggntcttttcttcatcaggaacgaancttatggaagcagggcagactgctgggtagttttgtcngggaagttgctaaggatgcgaaagtgaatgttgcaaatgttgcacaaagattgggtcgntgtttaaa

SEQ ID NO: 3862 - DNA, 419 bp, Arabidopsis thaliana
  unsure at all n locations
  Clone ID: LIB22-070-Q1-E1-F8
gagattacaagggaaagagacaactccaattcaaagctctgattttttccaccaatccccattttttcccttttacaattcttaagctagttttatacttttcttcttcctttcatttgggttaagagaagccatggataccgagtttctccgaaccctagatcgtcagattcttttgggtgtcttcgttgctttcgtcgccgttggtgctggtgctgcttattttcttacatcctccaagaaacgcagagtgtgtttggatccagagaatttcaaggagttcaagcttgttaagagacatcaagcttagtcacaatgtggccaagttcgtttttgaactcccaacttctacttctgtgttgggtcttcccattggacaacacatcagttgcaagggaaaggatggtcaanggagaaga

SEQ ID NO: 3863 - DNA, 406 bp, Arabidopsis thaliana
  unsure at all n locations
  Clone ID: LIB22-070-Q1-E1-G10
tgggtcaggaccgantcataggaggttatgggttaaagaacgaaccacggactggtgggacagagtaagccggcctgattttccagaanacgagtttcggcgagagttccgtatgagcaaatcgacgtttaacctaatatgcgaggagctagatacgacggtgacgaagaaaaacacgatgttaatagacgcgattccagctccaaaacgcgtaggcgtttgcgtttggcgtttggcgacaggagctccgcttcgccacgtgtcggagcgtttcggtctgggaatctcaacttgccacaaactagtcatcgaagtctgccgcgcgatctacgacgttctcatgcccaagtatctccnctggccgtcggattcagagnataaactcaacgatagccaaantccgaat

SEQ ID NO: 3864 - DNA, 426 bp, Arabidopsis thaliana
  unsure at all n locations
  Clone ID: LIB22-070-Q1-E1-G2
gatgagtgctattcctgctctatccaaaccatcggtnaaggatattatttttgtgccacntgtgataaaaggntccacaaanaatgcgtcgagtgtccacttgagantagttatcctacccacaccaaacattctccccaactcntctaatctaaatatanatttgaccattgcatctactgtagaaaaagagcaacctatatgatttaattttgtgctctttgcgacagttatatgcatgtcctttgtgctcaagtcaaaaatacccttttttatagaccaagccaaaaaagacatgaccatactctcacccttttccctagacaagcttccttaacctgcaatatttgtggtttgataaanaaactccatttcacctacgtttgccctaaatgcgaattcgtaacccaaaagtgattgnaatta

SEQ ID NO: 3865 - DNA, 408 bp, Arabidopsis thaliana
  unsure at all n locations
  Clone ID: LIB22-070-Q1-E1-G7
aaactcaaatcttcctctcagtttctcccactcttcttcctcaaccttccgatttatcggattactctaaaatacccaaaatggaatctcatggaaaaacccatcagaaagagcacgataatgatctctctccgaaacccataacgttgtcaaagtattcgaaacgggtcgagttaaagactctgcttgatcggagcgaccgcggcgcaggattggctgggaaaagggttgtgattggtggttgggttaagtctgctagagcggttaagaaaaattctcctcctcctcctctgcctgtagttgccgccccttcgccgtcgagtggtggggatnaagctcatacgacgggcaacattaagtgcacgggagatatccaatcnaaaatgaataatttcaagagattttccn

SEQ ID NO: 3866 - DNA, 413 bp, Arabidopsis thaliana
  unsure at all n locations
  Clone ID: LIB22-070-Q1-E1-G8
gggctaaatctctctctgttgttaccttcccatgggatggtcactaagaactctcataagagcaatctgggcatgacaaagtccatgaatttctttcagaacatcattaaacctttcaaacgcagctccaatcgaggtcttgaagatgatattgagcgaattgctgctatggagcaaaaagttttcccatttcaagttttagtttccgctaccaaagattttcacccgacccataaactcggtgaaggtggtttcggtcccgtcttcaanggaagattacctgacgggagagacatagcagtgaagaagctatctcaggtttcaangcaaggcaaaaacgagtttgtgaacgangctaagttgttggctaaagttcagcatcgcaatgttgttaatccttggggttaatgtac

SEQ ID NO: 3867 - DNA, 469 bp, Arabidopsis thaliana
  unsure at all n locations
  Clone ID: LIB22-070-Q1-E1-H10
cgttacgctnccggtgggcggtaanggtcaaaangtccngggcccnncggancttaangagactgttgctcanacaattcaggaagttttgtgggacaatcctcccataccagagaaccaagcaacatgcgctttattttactctatttcttcaactcagcctggcttagctgggataaacctcggnaaatttctgatcaaacgagtgattacgttggtgaaaaaagacatgccacatgtttctacatttgcaacacttagccccattcctggattcatgcaatggntcctctcgaagttatcatctcaagtcaagatttgctgaagatgagcgtggtacacagagcaattcgccttcatctacgtttagtgagaaagtattactaccagaagaggaacatgccctcatgactctatcagatgaatcttcatccggtagcaacggtatggaagttctgttgaatttgct

SEQ ID NO: 3868 - DNA, 465 bp, Arabidopsis thaliana
  unsure at all n locations
  Clone ID: LIB22-070-Q1-E1-H2
cttngccggccagtaccaaacaagcnttggncggncgacgcntccnnatggccatcttggctcacttcctctctccggcgcatccaacgccaactccttcgcctccgtcaccggtttnagcttcctcaatgggaaaaacaagtgcgttagatangctttgtggccaagcgtacggagcaaagaagtacggaatgttaggaatacaaatgcaaaaagctatgtttgttcttacactaacttctantcctctctccatcatttgggctaacacagagcancttctcgtcttctttggacaaaacaaatccattgctacactcgctggctcctacgcaaaattcatgatcccaagcatcttcgcctacggtcttcttcaatgctttaacaggttcttgcaggcccaaaacaatgtgtttcctgtggttttctgctccggagtaacaacttctccanatgtcctccttt

SEQ ID NO: 3869 - DNA, 396 bp, Arabidopsis thaliana
  unsure at all n locations
  Clone ID: LIB22-070-Q1-E1-H4
gttattgcttgttcttggactacttgtttgttcgattgcgttcgcggtagtagccataatcaaagctagatcattgaaaaaggcgagtgagtcacgggcttggaggttaacagctttccagagactagacttcacgtgtgacgatgtcttggattctctcaaagaagacaacattataggcaaaggaggagctggtattgtctataaaggcgtaatgcctaatggtgatctagtcgcggttaaaagactcgctgcaatgtctcgtggatcttcccatgatcacggcttcaacgcagagattcaaaccttaggaaggataagacacaagacacatagtgaggcttctcggattttgctcaaaccacnaagacgaatctacttgtcnaagaagtacat

SEQ ID NO: 3870 - DNA, 437 bp, Arabidopsis thaliana
  unsure at all n locations
  Clone ID: LIB22-070-Q1-E1-E8
acccacgcgtccnggtgttttgatccaagtctatgaaggcgagagagcaagaaccaaggacaacaacctgttgggtaaattcgagctttctggtatccctccagcaccaagaggtgttcctcaaatcactgtctgttttgacattgatgcaaacggtatcctcaacgtctcggctgaggacaagacaacggggcagaagaacaagatcacaatcaccancgacaagggaagattgtcaaaggacgagattgagaaaatggttcaagaggcagagaagtacaagtcggaggatgaggagcacaagaagaaggtggacgccaagaatgctcttgagaattacgcatacaacatgaggaacacaatccgtgatgagaagattggcgagaagcttgctggagatgacaagaagaagattgaagactcaattgaagcaacca

SEQ ID NO: 3871 - DNA, 406 bp, Arabidopsis thaliana
  unsure at all n locations
  Clone ID: LIB22-070-Q1-E1-H5
acgcgtccgaaaaacctcttcttcttcttctctctctctatccattttcactaattagcgattaaaaaggattctttttgtgtgtattaattatcgcttaaatcttaaataattctcctaatcgtctctgcacgttggtgatggtgtttagttgtcaattctacatctcgaggaaatccagaaacagctcactgatctatcgaaacagttttttttctttttacagagtcaatagaacaagaaccagataacagagatagtgacaaaccatccgtgaccnnnnnnnnnnnnnnnnnnnnnnnnnnnnnnnnnnnnnnnnnnnnnnnnnnnnnnnnnnnnnnntaagacattgcttaaatcntcaaaactccntttggctttaaatatgtcccttccaaatnatcct

SEQ ID NO: 3872 - DNA, 462 bp, Arabidopsis thaliana
  unsure at all n locations
  Clone ID: LIB22-070-Q1-E1-H6
gggaccaaacaanaattggcnggncgacccacgcgtccggtggcaaaaccctaatcgacttcgatttanctcttttattggaaccatgtangcttcttggagttagtattggtgtgatctgtaatcttgtttttccgaactggttgattacgagtctcttcgctgtgtttcttgcgtggtcnacgttgaanacttttggaaatggactttattattggngattggaatcggagatggtgaagattanagaatcgaatanaattgaagaagatgatgaagaagataagattgagagtctaaagttgcctcncntggnggattatcagagaccaaagangtttccatggattangcttggagttttggtcattanttggctttcttacttcgcagtttatcttcctcgaggaaacanntatggcaatggaatcataacgatcgaaccatgtnggaacgcccaac

SEQ ID NO: 3873 - DNA, 460 bp, Arabidopsis thaliana
  unsure at all n locations
  Clone ID: LIB22-069-Q1-E1-B10
actttgacccgnccaggtaccaagtcnnagaattcccgggccgacccacgcgtccncacatagagaagtcacattttccttcttcttcttccttcatcatccccaaacacacacaaactaaaaaaaaggcaaaaccctagatccaagatcagacctaatctaatcgaaactcatagctgaaaaatgaagagagatcatcaccaattccaaggtcgattgtccaaccacgggacttcttcttcatcatcatcaatctctaaagataagatgatgatggtgaaaaaagaagaagacggtggaggtaacatggacgacgagcttctcgctgttttaggttacaaagttaggtcatcggagatggcggaggttgctttgaaactcgaacaattagagacgatgatgagtaatgttcaagaagatggtttatctcatctcgcgacggatactgttcaattatatc

SEQ ID NO: 3874 - DNA, 588 bp, Arabidopsis thaliana
  unsure at all n locations
  Clone ID: LIB22-069-Q1-E1-B3
attnacgggtcgacccacgcgtcccgnngacgcgtgggcgggacgcgtgggcggacgcgtgggttgccctctggcgttttctgtcttgagctnnnnnnnnnnnnnnnnnnnnnnnnnnnnnnnnnnnnnnnnctttttttttttgtttatttgttctttctccaaaactccttttttttctcaccattatctcatgaacgtgagtggaggctctctgagtagagagagcctacccttgaaaataacctagggatttctccaattttcaagctttacccattcaaaagaatcgtccttttttcctatttctgactttgagctatgatgatggtccattcgatgagcagagatatgatgaacagagagtcgccggataaagggttagattccggcaagtatgtgaggtacacgccggagcaagtggagtcncanaattaacgatgccnagcaantcctaagaagacacaactcatactgaatgtccgantccccccaacatcgagcctaagcagttaaanttgggttcaaaaacgcaanatgtcgtganaaagcanaggaaaagaaaccngctccgtcctcaaacagtga

SEQ ID NO: 3875 - DNA, 588 bp, Arabidopsis thaliana
  unsure at all n locations
  Clone ID: LIB22-069-Q1-E1-B6
acggcgtccgatcttcttctctaaactctcaacatgtcttgctcggccaccgatctcgctgtcctgttgggtcctaatgccacggcggcggccaactacatctgtggccaggttaggcgacgtcaacaacaaatttatcgacaccgctttcgctatagacaacacttaccttctcttctccgcctaccttgtcttctctatgcagcttggcttcgctatgctctgtgccggttccgtgagagccaagaatactatgaacatcatgcttaccaacgtccttgacgctgcagccggtggtctcttctattatctgtttggctacgcctttgcctttggatctccgtccaatggtttcatcggtaaacactactttggtctcaaagacatccccacggcctctgctgactatcaattccacaatggccttgatcctgcggtggatacaagtgggtcgattgctgaacggacacanttcgtggcttaactaatccnagtcctccttcctaaaccggggtttggttaacccgggtccgtccnctcaaatgggtttcngggtcaaattttaatnggatggggccaaaccccgtt

SEQ ID NO: 3876 - DNA, 454 bp, Arabidopsis thaliana
  unsure at all n locations
  Clone ID: LIB22-069-Q1-E1-D12
cangtaccggtcaaagaattcccgggncgacccacgcgtccnnccacgcgtccgctcttctccgttcatcttccggtntatctgccgccaaattagtcaaccgaaaccccaggcttccttctcggntcacccgcgcgtcacgccgctccatgtagctacctcctcggccgcgtcgccgagtatgcgacctcttcaccggcaagctctgctgcgccatcctctgctcctgctaaggatgaggggaaaaagacctatgattacggtggcaaaggtgcgatggggcgtgtttgtcaggtcatcggtgccattgtcgatgtgagattcgaggatcagggaaggattgcctccgatcatgacatctccttgaggttcaaggattatcccangaaggctggtgcttgaagggtgtctcatcatttgggtcaaaatgtcgttaggaccattngctatggat

SEQ ID NO: 3877 - DNA, 626 bp, Arabidopsis thaliana
  unsure at all n locations
  Clone ID: LIB22-069-Q1-E1-D3
ggtccanaattaaagggtcnacgcncgcgtccggcttaaagcattcggcaacttccaaaaagccacacctgaagaaagaaaccttagatttggtgtcagggaacatggtatgggagctatctgcaacggcattgcccttcacagccccggttttatcccttactgcgcaactttctttgtgtttactgactatatgagagctgcaatgagaatctcggctttgtctgaagctggtgttatatacgttatgacccatgactccattggtcttggagaagatggaccaacccaccaacccatcgaacacttatccagtttccgtgccatgcccaatattatgatgttccgtccagctgatgggaacgaaacagccggtgcatacaaaatcgctgtcacaaaacgtaagacaccttctgtcttagccttatctatcgnagctgctcactcagacatctattgagacgtcaaaaaggtggatacaccantttctgacaactcaaccggttaacaaaacccgatgntaattgttgatnnggaactgggatttagagcctnnaanatttgcctgctccaagcctgccanaagaaaattttaaggggaaacaaaggggcaaaaaattttttan

SEQ ID NO: 3878 - DNA, 611 bp, Arabidopsis thaliana
  unsure at all n locations
  Clone ID: LIB22-069-Q1-E1-D5
tacaantccatgaaattcccgggtcgacccaccgcntccgnatcaaggtaccaattgatgtatttgcaggaatcactgatgaagatgctgctaaggttgtggatggtctggctcccaaagctgctgacagaaaagattcgattgaacaagtgaagaagctatacgaactcttccgcaagactgactgcacaatgttggaaatcaatccccttgcggagacatcaactaatcaattggtagctgctgatgccaaattgaacttcgatgataatgctgcgttccgacaaaaagaggttttcgccatgcgtgatccaacacaggaggatccacgagaggtggctgctgctaaagttgacctgaactacatcggtttagatggagagattggttgcatggtgaatggtgctggattggccatggcaaccatggacatcataattcacgtggacaccgcaanttctgacttggtggaaatgcttctgagcaccaagtggtggaancgtttaagatactgacatccggacgagtaaagtgaaaaccaatccttggggaacatatttggtnggganaaatgaaatgtnaatgttaattgccaattggaaaccctnaac

SEQ ID NO: 3879 - DNA, 433 bp, Arabidopsis thaliana
  unsure at all n locations
  Clone ID: LIB22-069-Q1-E1-D9
gaattcccgggccgacccacgcgtccnggaccattaagagctttccataaaagcatcacaacggctgcaacagttaacaaatacaaggacgagtacagaaactggttcaggagtcatcatgcctcagaactgcatagcaccaaggcctgaagaagatggtggagtcatggttcaaggtttgccagatatgtcagacacgcagagcaagtctgtactagccttccctacgattacttcacaacctggtctccagatgtctatgtatcccataactctcaagtttgaggaggttgtgtacaaggttaagatagagcagacaagtcagtgtatgggatcatggaaaagcaaagagaagacgattttgaatggggataacgggaatggtttgtccccggagagtttctagccatgttaggtccatcaggcagttggc

SEQ ID NO: 3880 - DNA, 582 bp, Arabidopsis thaliana
  unsure at all n locations
  Clone ID: LIB22-069-Q1-E1-E4
cgggtcgaggcacgcgtccggacaaaatcgtttggttgggatacatatgattcttttatgcaacatgatgtacaagaactcaacagagttctctgtgaaaagcttgaggacaagatgaagggaactgttgtggagggaacaatacaaaagctatttgaaggtcaccacatgaattacattgagtgcattaatgtagattacaaatctacacggaaagagtcattttatgacctccagcttgatgttaaaggctgcaaagatgtatatgcttcttttgacaagtatgttgaagttgaacgccttgaaggagacaacaaataccatgcagaaggacatgatttgcaggatgcaaaaaaaggtgttctattcatagactttccaccaagttcttcaacttcagctcaagaggtttgaatacgatttntgaggaccatgggantatgtcggtatagttcctccccaactggatntcgacaganaanatggaaatattatcccctgatgcanacagnaagtgtccgcaatctccaaaacctccanantgtcctgggtcnaaattgggaggaattccattggangggc

SEQ ID NO: 3881 - DNA, 608 bp, Arabidopsis thaliana
  unsure at all n locations
  Clone ID: LIB22-069-Q1-E1-E8
gtacaatcanaaattcccgggtcgacccacgcgtccgtctctctctatctatcttcttcatctttgtttcagcttctcctttgaaactagattatctccgttaatggcgcctcagatctaaccttgggagttatataatatatacttgttcaactcttcttcgaacgctgtccaacttcttcctctggttcgatcatcgagatctcgaggttatttggccgcaatgcagaagcgaatagccttgtcgtttccagaagaggtactagagcatgtgttctcgtttattcagctggataaggataggaactcagtctctctggtgtgcaagtcatggtacgagatcgaagcggtggtgcaggaggaaagtcttcatcgggaactgctacgccgtgagtccagcgacggtgattaggaggttcccgaaagtgagatccgtgactaagaaaccacttgcgacttaattggtactgacggttggggaaggttacgtgtanccanggntttnnggcaatgtcctccgtcctaaaacnttggcttgaaanagaanaaggctgaanaaggattggtggtcaaccgnacnaattgccttggggcccaaaanccaaatt

SEQ ID NO: 3882 - DNA, 470 bp, Arabidopsis thaliana
  unsure at all n locations
  Clone ID: LIB22-069-Q1-E1-E9
actttgccccgcccaggtacangtcaaagaattcccgggncgacccacgcgtccnccaatcccaaaattccacttctgtccacaaaacacaaagcgattctcgatctttgatcgtcccaccaagatggccgggaacgattgggtaaacagttacttaagaggcgattctcgacgtcggtcagggtcttgacgatgctcgctcttctccatcacttcttcttagggagagaggtcgattcactcccagccgttactttgttgaggaagttatcactggttacgatgaagactgatcttcatagattctgggttaaggctgttgctacgaagagtccacaagagaagaacacgaagttagagaatatgtgttgganggatttgggatcctgctccgtcaaaaagaaacaagcatgagggaaaaaagnaagcacaagaggctggctaagcccaaggcttgaacntttagaaaa

SEQ ID NO: 3883 - DNA, 612 bp, Arabidopsis thaliana
  unsure at all n locations
  Clone ID: LIB22-069-Q1-E1-F1
aactgtttactttcccnggntcggtccnaaaattaaagggtcgacgcncgcgtccgaaagttgatccacacttttgttaaagaaaaacatcaagatgagattacattcggcgacaaatcaagattagggagagggggtatgactgcaaaagtcaaagctgcaagtcaatgcagcttatgctgggattcctgtcatcataaccagtgggtattcagctgagaacatagataaagtcctcagaggactacgtgttggaaccttgtttcatcaagatgctcgtttatgggctccgatcacaagattctaatgctcgtgacatggcagttgctgcgagggaaagttccagaaagcttcaggccttatcttcggaagacaggaaaaaaattctgcttgatattgccgatgcccttgaagcaaatgttactacaatcaaaagctgagaatgagttagatgtagcttcgccanagcggttgaaatcatggtgctccctaatttgacacctggaaagatttcaaccttgcaacntcantttcgtaanccaacctgatatggaagattcaaatcggncgtttttttaaagaaaaccananggtggcaaaatgggncctgtc

SEQ ID NO: 3884 - DNA, 606 bp, Arabidopsis thaliana
  unsure at all n locations
  Clone ID: LIB22-069-Q1-E1-B1
attcangggtcgacccacgcgtcccgcntcgccaacatgtccttaaattatctctttttaatgaattgatcgataaagttctcacctttatgcctcctcctactttttccacttaatcatcccacttccttcttcagatgtaagcaatgttgtctagagtcctcctctgattcagatttcgttgctgaatcttttgtaaaactctgttctttgtatgtcgagaagccaaattcagggaatttagggttttacaaaaaaataaaaaagagtttctttttttggatgatggaatcgaattactcaggtgtggtcaacggctacgatgtgagtttcttaccaacttcgattccggatcttggattcggtgttccttcttctagtgattttgatcttcggatggatcaatactatcaccaaccttcgagtgggtcaataagttacactttctcacaantgatganattgatccgaaaacacccttttgaaaaanttaaacaagctcccttaagggaangaaaatcncccctgaanaagcaattcaaacctccaagnaatncctttgggncccttcgaanaaaanccnangggaaaatgtttcaaccaagt

SEQ ID NO: 3885 - DNA, 389 bp, Arabidopsis thaliana
  unsure at all n locations
  Clone ID: LIB22-068-Q1-E1-F2
acgcgtccgcttgctccgacacgacaacaaatccagattttgagcttanggaaacttgagaaggagaaaaaaatgtcgaacatanacatanaagggatcttgaaggagctacctaatgatgggaggatcccaangacgaagatagtttgcacattacgaccagcttctcncactgtttccatgatcgaaaagcttttgaaagccggtantaatgtggntcncttcaacttctcacatngnagccatgaataccatcaagagacactcgacaacctccgctctgctatgcataataccggcattcncgctgctgtcatgcttgatactnangggcctganattcgtactggtttcttgaaagatgggaaccctatgaactgaangaagtc

SEQ ID NO: 3886 - DNA, 398 bp, Arabidopsis thaliana
  unsure at all n locations
  Clone ID: LIB22-068-Q1-E1-F3
tgacgctttacttgacgttgtttactctgccgttgaacgctcangcggtggatctctcccagtggntgtttccgagagcggntggccttctaanggtggnaacgccgcgagtttcgataacgcgngagctttttacacgaatcttgcgtcacgtgtgagaganaacagaggaacaccgaaganacctggaagaggagtggcaacgtatttgttcgccangtttgatgagaatcaaaagagtcctgagatcnagaagaattttggcttgntttttccnaatacacaaccaaaatttccgatcacattctctgccgcnacagacggtacnggggttgaatnatcattttanattctnagatttatgtgaataaatgggagattatcccagncaagggttc

SEQ ID NO: 3887 - DNA, 407 bp, Arabidopsis thaliana
  Clone ID: LIB22-068-Q1-E1-F5
tcttcttcatccaaaagaatccaatcttttcctcaaaagatagtttctggatcgaacgacaatggagattttctactacttggtgtttggggttttgggtctcgtcgtcgcggcgttggagcttagcaagaacaacaaggatcgaatcaacacttcttcagctttcaattctttcaagaacaattatctccttgtctattcgctcatgatggcgggtgattggttgcagggtccatatgtgtactatctttatagtacttatggatttggtaaaggggacattggacagcttttcattgctggttttggttcctctatgttgtttggtaccatcgttgggtctctagccgacaaacagggtcgtaagagggcatgtgttacctattgtattacctatatattgagct

SEQ ID NO: 3888 - DNA, 452 bp, Arabidopsis thaliana
  unsure at all n locations
  Clone ID: LIB22-068-Q1-E1-F6
aggtaccagtcaagaattcccgggncgacccacgcgtccnaattgctgaaggtgtggatttcattgctgtatcgtttgtcaagtcggctgaagtcattaatcaccttaaaagttatcttgctgctcgttcccgtggaggggaaattggagtgattgcaaagatcgagagtatcgattcactgaccaatttggaagaaattattctagcatcagatggggccatggttgcaagaggagatctgggagctcagatacctcttgagcaagttccagcagctcaacagagaatcgtccaagtatgcagagctcttaacaaacccgtcattgtcgcttcacagctattggagtccatgattgagtacccaactccaaccaagagcagaagttgccgacgtgtctgaagcagtaagacaaagatcaagatgcattgatgctctctggagaatcagcta

SEQ ID NO: 3889 - DNA, 410 bp, Arabidopsis thaliana
  unsure at all n locations
  Clone ID: LIB22-068-Q1-E1-G1
acgcgtccgctgaaaactcttttctctccacctctttctctcttaccccaaacacaaaatctcctctttaatggatatatcgcctctccgatctcattcttcctcgtttttatctgccaaacnnnnnnnnnnnnnnnnnnnnnnnnnnnnnnnnnnnnnnnnnnnnnnnnnnnnnnnnnnnnnnnnnnnnnnnnnnnnnnnnnnnagctttcggtttctttgataattccctttgaattcgtttttcttcttctttcaatttccgcaaataatcagccgccgataagataatcatggggaggaaatctcagcgtaagaacgcgacaatgtttgatagtgatgatgatacaagtagtgtaagctcttcctccancatgccatctgagagattgttgaatcctggtaaggat

SEQ ID NO: 3890 - DNA, 122 bp, Arabidopsis thaliana
  unsure at all n locations
  Clone ID: LIB22-068-Q1-E1-G11
acgcgtccgattttgaagttttttcagtaacatgtaaagaatgcttgttactgatttgtggtggtgcaaaataatttttatgaagattttagtgnnnnnnnnnnnnnnnnnnnnnnnnnngg

SEQ ID NO: 3891 - DNA, 411 bp, Arabidopsis thaliana
  unsure at all n locations
  Clone ID: LIB22-068-Q1-E1-G5
gggcattcaccaaatccacttgctcatacacgcgttcagttccatcaagaccagatacatgtacttgttgtccatgccagccagttagccatatatgaggctcctaaattagagaacatgaagcagtggataccgaaagagtcaagtggttcagtcacagatgcagtatattcatgtgatagccagtcaatctatgcagcctttgatgatggaagtgtgagtatcttgacggcaacaacattgcaactgaagtgccgcattggtcccaattcatatttgccttcagacccgagctcgagagtatatccagccacagttgcagcacatccgtctgaaccaaaccagtttgcagttggactaaccgatggtggggtccacgtgatcgaancancangtccagaagggaagttg

SEQ ID NO: 3892 - DNA, 412 bp, Arabidopsis thaliana
  unsure at all n locations
  Clone ID: LIB22-068-Q1-E1-G9
ccttctctctgcgctttcactggagaatacctatgcaagtcccaattacagagaagcactctcaaagtcattactctttttccaaggtcancggtctggtcgcctccctagtgaccaacaactctcatggaggtctagctctggcctctctgatggctcatctgctcacgtggacttgaccggaggctactatgatgctggggacaatgtgaagttcaatttcccgatggcgttcaccacaaccatgctttcctggagctctttggagtacggtaagaagatgggacccgagctccagaaactcccgtgtggccatccgttgggccacgggattatctactgaaatgtgccangggctacaccanggaagctttacnttggagtangagatcctaatggtgaccacaagtgc

SEQ ID NO: 3893 - DNA, 460 bp, Arabidopsis thaliana
  unsure at all n locations
  Clone ID: LIB22-068-Q1-E1-H2
ggttgnccggcaggtacaatctngcgggncgngcacgcgtccgcttcnccttcctgtctccaccagctccctccttctcaatcattagcttcttctcttctcttctctcacagagagagtaatcacaagccaagtgagaaaaagaannnnnnnnnnnnnnnnnnnnnnnnnnnnnnnnnnnnnnnnnnnnnnnnnnnnnnnnnnnnnnnnnnnntggtcttatgatctcatcaaacggagctttaatcgaacaacaaccatcagtcgttgtgaagaaaccaccggcgaaagatcgacatagcaaagtcgatggaagagggagaagaatccgtatgccgattatatgtgctgctcgtgtttttcagctaacgagagagcttggtcataagtcagatggccaaacaattgaatggttacttcgtcaagcagagccttctattatagctgcaacaggaactgg

SEQ ID NO: 3894 - DNA, 410 bp, Arabidopsis thaliana
  Clone ID: LIB22-068-Q1-E1-H6
agaaattaaatacacacaatgaccaaagaagtttgctccaacattggactttggttattgctcacgttacttattggtaactatgtcgtcaatcttgaagcctcgcaccatgtctacaagagacttacccaaagcactaacaccaaatctccttccgtaaaccagccctaccggaccggtttccatttccaaccccccaaaaattggatgaacgatcctaatgggcctatgatatacaaaggaatatatcatcttttctaccaatggaacccgaaaggagccgtgtggggtaacatcgtgtgggctcattccacgtcaacagacttaatcaattgggatccacatcctccagctatcttcccatctgcacccttcgatatcaacgggatgctggtccggttcagctacta

SEQ ID NO: 3895 - DNA, 411 bp, Arabidopsis thaliana
  Clone ID: LIB22-068-Q1-E1-H9
agcaatgcagaaagctcttcatctactccagtcatcagtgaagaacttaacatttcttctcacctccggaagtttactttcaatgatcttaagctatctactagaaatttcagacccgagagtcttcttggagaaggtggttttggttgtgtctttaaaggatggatcgaagaaaacggtactgctcctgttaaacctggtactggtcttacggttgcagtcaaaaccttaaatcctgatggacttcaaggtcacaaagaatggcttgctgagattaatttccttggtaaccttctccatccaaatctagttaagcttgttggttattgcattgaagatgatcaaaggttgcttgtgtatgagtttatgcctaagaggaagtctggagaatcaccttttcagaaggtcctt

SEQ ID NO: 3896 - DNA, 624 bp, Arabidopsis thaliana
  unsure at all n locations
  Clone ID: LIB22-069-Q1-E1-A1
cgtttagctgctcgtgccggtccaaaaattcangggtcnacncacgcgtcccganaaaatgtctcactcgttttgccttataatatttctttcaacaacaacccaaatctacaaaaaatcccaataaaaaaaaacttcagtctgtttgacattttgtcgaacacttggacggcatcacaaaaagctctaaactttctgactaccaatggcggattcgtcttccgacaaggagaagaaggaaaataataagcagcccgtgtatcgtggagtccgtatgaggagctggggaaaatgggtatcggagattcgcgaaccgaggaagaaatcgagaatctggctcgggacttttccgacggcggagatggctatgcgtgctcacgacgtggcggctatgagtatcaaaggaacttcagccattctcaatttccctgagctctctaaacttcttccccgaccttcgccanctctgactcaaactgcgggacaaactgctcccaatggacttcgatacgaangggtttccgttcngatactgagaactancgaaacgacgacgtcnaaataaaatgtcagagagttantgangaagttaacnaaacggtgtcgttcccaaccgtccgtcct

SEQ ID NO: 3897 - DNA, 605 bp, Arabidopsis thaliana
  unsure at all n locations
  Clone ID: LIB22-069-Q1-E1-A2
gaactgtttactttgcccgggcncggtccnaaaattaacgggtcgacgcncgcgtcccgggtanaacactcaatgggctagggtggccccatttcgccttaccaaccccagggaaactccgaatacaggccgttctcgtttgtacatnacagacttttggggtgcctaagatccaaagtcgatagggaaacagcccagatcntacgctaaggtccctaagcaatcacttactggaaanggaagtgatcgagcgatgacaaccaggaggtgggcttggnagcagccatcctttgaagaaagcgtantanctcantggtctagctccatggcaccgaaaatgtatcanggctcangtgattcaccgaagcgacgaagaccttgaaagctgctttttcaagtgtcagtancggaacgttctgtcaatcggggaaagtttttggtgacaagacctggngatatcagantgtaagcgcatattacataatcctgtgaaaaaagatncctgcantggnaaggnttccgcgttnatcaatcctacncaaaattgaatcgggtcccctaaaggaacccccgaaaagggcttgccgttcccaatggggttacac

SEQ ID NO: 3898 - DNA, 453 bp, Arabidopsis thaliana
  unsure at all n locations
  Clone ID: LIB22-068-Q1-E1-E9
gtaanggtcaagaattcccgggncgacccacgcgtccggaagaaacagaggctccaaaaaaatgatgatggagactagagatccagctattaagcttttcggtatgaaaatcccttttccgtcggtttttgaatcggcagttacggtggaggatgacgaagaagatgactggagcggcggagatgacaaatcaccagagaaggtaactccagagttatcagataagaacaacaacaactgtaacgacaacagttttaacaattcgaaacccgaaaccttggacaaagaggaagcgacatcaactgatcagatagagagtagtgacacgcctgaggataatcagcagacgacacctgatggtaaaaccctaaagaaaccgactaagattctaccgtgtccgagatgcaaaagcatggagaccaagttctgttattacaacaactacaacattaa

SEQ ID NO: 3899 - DNA, 515 bp, Arabidopsis thaliana
  unsure at all n locations
  Clone ID: LIB22-069-Q1-E1-A3
gcgtccgaagaaanagaacttcgatgcttacagattttccatttcatggtccaggatattccctgagggaagtggtaaagtcaactggaaaggagttgcttattacaatagattgattgattacatggttcaaaaagggattacaccttatgctaatctgtaccactacgatcttccattggctttggaaaacaagtataaaggcttgcttggtagacaagtagtgaaagattttgcggattacgctgagttttgttacaagacatttggtgatagagtgaaaaattggatgacgttcaacgagccgcgtgtggtaagctgctttaggttatgataatggtattttcgcaccgggtagatgctcaaaagcatttggaaatttgcactgaaggaaactccgcgacagngcctcatantaccacactacttggccaccacacatccaaagataccccaattttacaancgaaacaaggggaaaantttggnaannttttaaatttcctttgggaaan

SEQ ID NO: 3900 - DNA, 449 bp, Arabidopsis thaliana
  unsure at all n locations
  Clone ID: LIB22-068-Q1-E1-B5
tcntaaattcccgggccgacccacgcgtccaattctcctcaatttccgtgaaaccccttggaaaaacccatttctcnnnnnnnnnnnnnnnnnnnnnnnnnnnnnnnnnnnnnnnnnnnnnnnnnnnnnnggtgtggatttgaggcaagtggtggctggaatactcaccattaccatgtttgtgatgcttggacaaatgcttcatagagattactttgatgctgttcagganaaagttcanggagatgcacatgatattgaattccatggatcaaaagtagctgttgaanatggacttgttagagcctttgaggctgggactaaagggccttggatggaagatagtcatgaactcaaaccttgttggtcaatttctcaatctgatgaagcggtatcgtcaaaggggtacnttacnattcgccttaacaaatnggtccctgaactacaat

SEQ ID NO: 3901 - DNA, 456 bp, Arabidopsis thaliana
  unsure at all n locations
  Clone ID: LIB22-068-Q1-E1-B9
cccggaaggtcagaaattcccgggncgacccacgcgtccnaaaaagcgnnnnnnnnnnnnnnnnnnnnnnnnnnnnnnnnnnnnnnnnnnnnnnnnnnnnntcgaggagaaaaaagaaaaattggagaaataatttaactggttctcggagaatctagggttctttttagccacgccttgctgatctccttcgtgaattcgattccgattctcacctggtcttttgtggcctaaagctcataagtttatgctagtgcaagaagttatataggaatgacatattagatttacaatgatggaagtggggttctctcttattcagtggttgatcaagttctggtgctgacagtccgtttatatttggatggcttgtaactggatctgttggccttctggctgttatctacacatttcttaaatggcaagaaaaaaacttctttaaattgggttaaagct

SEQ ID NO: 3902 - DNA, 406 bp, Arabidopsis thaliana
  unsure at all n locations
  Clone ID: LIB22-068-Q1-E1-C1
angcgtccgcccacgcgtccgcaaaaattanaaaccatggcattgcaaaagttccctctcctggggcttctttttctcataagcattgtcgtctcttcgacaananccgtcnatgatccngtgtgcccaacgacgtccaaactaagccgagcaagtttccctaatgggtttgtgtttggcacagctactgctgcgtttcaggttgaangtgcaattaatgaaacttgtcgtggacctgctctangggatatcttctgtaagagaaatccananagatgtagtggccacaacgccnatgtggccgttgatttcttccatcgttataaggaagatattcanctaatgaagaatctanacacaagacgcattcagactcccaatccgcaaggtcaagaatatttccnca

SEQ ID NO: 3903 - DNA, 453 bp, Arabidopsis thaliana
  unsure at all n locations
  Clone ID: LIB22-068-Q1-E1-C11
gtaanggtcaagaattcccgggncgacccacgcgtccggacgaagaagctctcgtttagtaaattttagcttagaacacagaagaagcattttttcgnnnnnnnnnnnnnnnnnnnnnnnnnnnnnnnnnnnnnnnnnnnnnnnnnnnnnnnnnnnnnnnnnnnnnnnnnnnnnnnnnnnnnnnnnnnnnnnnnnnnnnnnnnnnnnnnggatagtggaagcttcccatttgtaggagctctgcattcaaaatcacgttcgtctcctctgttatcagtttgccttgttctcgtgggagcatgccttctcattggttatgcttacagtggtccaggtatgttcaaaagtatcagagaagtcagcaagattacaggtgactattcttgcacagcagaagttcaaagagccattcctattcttaagagtgcgtatgggagatagcatgcgcaaagt

SEQ ID NO: 3904 - DNA, 409 bp, Arabidopsis thaliana
  Clone ID: LIB22-068-Q1-E1-C12
acgcgtccggttcagttccatgccctagctttgctccatcagatacgccaaaatgatcgcttggctgttagcaaattggttggtagcttgaccaggggatctgtccgctctcccttggctcagtgtcttttgatacgttacaccagccaggttatccgtgacatggccaaccacggtcaatctggagaacgtccgttctatgaatttttggagagttgcctgcgccataaggcagaaatggtgatccttgaggctgccagggcaattactgagcttgatggtgtgacaagccgaagaactgactccagcaatcactgttcttcagctctttttgagttcccccagaccagtgttgagatttgccgctgtccggactctgaacaaggttgcaatgactcatcctatggct

SEQ ID NO: 3905 - DNA, 412 bp, Arabidopsis thaliana
  unsure at all n locations
  Clone ID: LIB22-068-Q1-E1-C3
ccatttagattagcagcgaatttcaaacggagatgtcagaatcagtgattcagggatcgaatccggatcgggttttatctccgacgagctcgaaatcagtgacgcagacggtgaacgggtcgcatcaattcgtgattcaaggatacagcttagcgaaagggatgggtatagggaagcacatagcgagtgataatttctccgtcggaggttatcagtgggggatcttcttctacccggacggtaagaatccggaggataattcgtcgtacgtctctgtttttancgcattggccantgaaggaaccgaagttagggcgcttttcgagctanctcttgttgaccaaagtggaaaggggaaacataaggttcataaccattttgaacggtcactccaaggggggccctaaaaaac

SEQ ID NO: 3906 - DNA, 408 bp, Arabidopsis thaliana
  unsure at all n locations
  Clone ID: LIB22-068-Q1-E1-C7
nnnnnnnnnnnnnnnnnnnnnnnnnnnnnnnnnnnnnnnnnnnnnnnnnnnnnnnnnnnnnnnnnnnnnnnnnnnnnnnnnnnnnnnnnnnnnnnnnnnnnnnnnnngaacgatatagtacctgaaccctagcggaggaaaatcaaaaattgtctaggagaaacaaacagagatatctttctttctttttatcagtggggaaaaaaaatgcagaatccgagactgannnnnnnnnnnnnnnnnnnnnnnnnnnnnnnnnnnnnnnnnnnnnnnnnnnnnnnnnnnnnnnnctctctttaccatcctggtgttttggctcctcctcagttagagcctgttccaagtggaaaccttcctcctggttttgatcccaagtacttgccgtagcgtgtatgttggaaacatcca

SEQ ID NO: 3907 - DNA, 414 bp, Arabidopsis thaliana
  unsure at all n locations
  Clone ID: LIB22-068-Q1-E1-D1
taatggagggagcgtgttgtcgctctctgctccacacttcccttactccgccaccattctccgacgtcactctccggtggcttccatatctttctcccttaagcaaccaccaccgcaaccaccaagaacctcctgagagtcctcctgacctccgccgcccggagaaatctattggnnnnnnnnnnnnnnnnnnnnnnnnnnnnnnnnnnnnnnnnnntaaaacccctcttaagattaatccactcaagggtttaaccaatcgctcttctgtgtctcctcttgttcaatcagaggtttcgagtaaagtttcttcctttggctcctctctagcatccaagctacgtttgtccagcaagnnnnnnnnnnnnnnnnnnnnnnnnnnnnnnnnnnnngttgaagaaaccaaccaatttc

SEQ ID NO: 3908 - DNA, 423 bp, Arabidopsis thaliana
  Clone ID: LIB22-068-Q1-E1-D11
acgcgtccggataaatataaggagattgatgaatccacctttgcctaaaggctactggggaaatggatgtgtgccaatgtatgctcagatcaaagctggagaactcattgagcaaccaatctggaaaactgcagagctcataaaacagagcaaatccaatacgagtgatgaatatgtacgctcctttatcgacttccaagagctgcatcacaaagatggaatcaatgccggtacaggagtgaccggattcacggactggcgatacttggggcattccacgattgattttggatggggaggacctgtgacggttttgccactatcaaacaagttgcttggaagcatggaaccatgttttttcttgccatattctactgatgctgcagctggaagcaagaaagacagtgggtttaagggtttggg

SEQ ID NO: 3909 - DNA, 410 bp, Arabidopsis thaliana
  unsure at all n locations
  Clone ID: LIB22-068-Q1-E1-D12
gtggacaaggttcctccaggttgcagaatgacaatcatttcagactcttgtcacagtggtggcctaatcgacgaagccaaggagcagattggagagagcactaagaaagaagccgaggacgaagatgaatctgaagaatcttcttcaagattcgggtttaggaagttcttgcgcagcaaagtggaaggcgccatcgagtctcgagggtttcacattggagggaacaagaaggatgaagatgaggcggaagaaatcgagactaaggagattgagcttgaagacggagaaacgatccatgccaaagacaaatctcttcctctgcagaccttgattgatattctcaagcagcaaacagggaatgataatatcgaagttgggaaaatcangccaagcctttttgatgcgtttgg

SEQ ID NO: 3910 - DNA, 408 bp, Arabidopsis thaliana
  unsure at all n locations
  Clone ID: LIB22-068-Q1-E1-D6
acatggagggtatggccatgcccctgctcatggctttggccatggtggtcatggtaaattcaagcacggaaagcatggaggcaaattcaagcacggaaagcatggaaagcacgggaaacatggcatgtttggaggaggaggcaaattcaagaagtggaagtaatctcaaaaaccccacctttgatcctctcctccagtatagtctcattacctgaccgatgtttctaataatcccccttcaaacatatttcattttaactatgtcggtttagagattactggttgaggaaataattggagagtgctantataaaccttatggtatctgcagcagaggtttctttaatctctcaatagtagatgctttgaaacttatctataatttgggaatgtnatgacagtttgtgt

SEQ ID NO: 3911 - DNA, 411 bp, Arabidopsis thaliana
  unsure at all n locations
  Clone ID: LIB22-068-Q1-E1-D7
tgatgagaaggagcttatgggtaaacctctaatgaagcgtgttatgcagacttggctccctgcaagtactgcactacttgagatgatgatctttcatttgccatctccccacactgcccagaggtaccgtgttgagaatctgtatgaaggtcctcttgatgatcagtatgcaaatgccatcaggaactgtgaccccaatggacctctcatgctctacgtatccaagatgattccagcctctgacaagggtagattctttgccttcggtcgtgtctttgctggtaaggtttctactggtatgaaggtcagaatcatgggtcccaactatatccctggtgagaagaaggatctgtacactaagagtgttcagaggactgtcatttggatgggtaaagaagcaaagaaacaant

SEQ ID NO: 3912 - DNA, 404 bp, Arabidopsis thaliana
  Clone ID: LIB22-068-Q1-E1-E12
aaaagtcattagttttaatcgcattacgctttcggataacacgaaaggttaaattataaaatgaacgattttacgaatccacatattcctggatcaacgggaacccttcgtttctttcccacccgcgtgttatcccgtttctcaaatttctcatctttccgggaaaattcactttttttttttcctgggaagattcgttgtgttgtgaattttagtgggcaccttcaaattttcgatttttttttttattttccttgtctcttacctgatttggtgatttattattacatcaaccactcgattcgttagatttccggatttgaaaaagagtcaccaacttgtacggattctcgttttggggatcgagtattgctgatttgtgattttgttgtttttgggtactt

SEQ ID NO: 3913 - DNA, 393 bp, Arabidopsis thaliana
  unsure at all n locations
  Clone ID: LIB22-068-Q1-E1-E2
ggggcagtttttcttattctcctgtcttgtctaaagaaaaaagagagaggaagaaatggagacttttgaggaaagctctgatttggatgttatacagaaacatctatttgaagacttgatgatccctgatggtttcattgaagattttgtctttgatgatactgcttttgtctccggactctggtctctagaaccctttaacccagttccgaaactggaacctagttcacctgttcttgatccagattcctatgtccaagagattctgcaaatggannnnnnnnnnnnnnnnnnnnnnnnnnnnnnnnnnnnnnntgaggttgagactgtctcaaaccggaaaaaaacaaagaggtttgaagaaacgagacattacagaggcgtgagaangaa

SEQ ID NO: 3914 - DNA, 412 bp, Arabidopsis thaliana
  unsure at all n locations
  Clone ID: LIB22-068-Q1-E1-E4
acgatgaaggaaaacgtacggcanagacgttgaccatggactatcaccgaggtgccaatgttgaggtcagaattgctaggatcttcaacacctatggtccaagaatgtgtatagatgatgggcgtgttgttagtaacttcgttgcacaggcactaacgaaagagccattgactgtttacggtgatgggaagcacacaaggagtttccaatttgtttctgatctgggttgaaggtttgatgagactgatggattctcgaaacaccgcttcaaccaagaattccgtggccctcctaggcgtcaactcattaccatcttccgggttagtttcncagttcttaacactagagcccgaagtttaccttttaaaccttattttccttctcctcttcactgttacaggtttancttctc

SEQ ID NO: 3915 - DNA, 466 bp, Arabidopsis thaliana
  unsure at all n locations
  Clone ID: LIB22-068-Q1-E1-B12
taatttccgccgncggtaanggtcanaaattcccgggncgacccacgcgtccncggacgcgtggggctgcacttgagagaggcttgtggtctacagcaactataaatattgaagttttgagaaccttaaatgtgattttctccaattttcctaagctccgtgcctcagaagctgctactttctgcatccctcatttggtaggggcgctcaaatctggtgttgaagacgtccagggattagtattggatattctttacttgctaagacactcctggacgaatatgtctatagatgttgcaaagtctcaagccatgattgcagctgaagcaattcccgtcctgcaaatgctgatgaaaacatgccctcctaggtttcacgacaaggcagatagcttattgcactgcttaccaggttgcttaacagtgaacgtcatgcgtgccaataacttaaagcagtctatggcaac

SEQ ID NO: 3916 - DNA, 416 bp, Arabidopsis thaliana
  unsure at all n locations
  Clone ID: LIB22-066-Q1-E1-E1
gatttttctgatgaagacgacgacgaaaactgttttggttctcgtttcaacnnnnnnnnnnnnnnnnnnnnnnnnnnnnnnnnnnnnnnnnnnnnnnnnnnnnnnnnnnnnnnnnnnnnnnnnnnnnnnngttttgcgtctgatttctataaggctggttctgattggtcttgtttagtggaagatgaagagactgtttcttcttctgtgaagaagatgaaacagtcgaacttgtttcagatttggggtttacaagagaattctcctgatacaacgaagaagatgaaacaaactgatttgtttcagagttggggtttacaaaagccttctcctttcacttcacctgcttcgaattcggcgaagaagacgacgagtgctcttggaaaaangcgtaaaagactcctcgtttaacaatg

SEQ ID NO: 3917 - DNA, 436 bp, Arabidopsis thaliana
  unsure at all n locations
  Clone ID: LIB22-066-Q1-E1-E12
gccgaccngcccgtccaaagggaaaccacatatcactccatctgatatacagagcctcatagaagtaaatgtacttgttcaagatttcaacaaatggctantgcaaccanaggtagcagcggaccagtcacgctgtttgttgaaatcttgaacaagtacatttacttctttgagaaanggaatccacatatcactccatctgatatacagagcctcatagaattgatcaacaatgagatgcaaagcgacaacggtaacacgacaatccactcagatcccttctttacaagtacattgcgttacattaagttcataaaacagaaaggtggtttgatgggtgagaaatatgaccctatcaagctgtgacttaaatccgagacacaagcctcatcaaatcccgagggggaatccnccggaattttccaaagaaaatgtt

SEQ ID NO: 3918 - DNA, 419 bp, Arabidopsis thaliana
  unsure at all n locations
  Clone ID: LIB22-066-Q1-E1-E2
gttttggccggaaggaaaacaggtggatacattgaaggagatgtgagaatatcaggattcccaaaggttcaagaaacatttgctagaatctcaggatattgtgagcagaccgatattcactccccgcaagtaacagtcagagaatctctgattttctctgctttccttcgtcttcctaaagaagtcggcaaagatgaaaaaatgatgtttgtggatcaagtgatggaattggtagagctggacagtcttagggactccattgttggtttaccgggtgtcacggggctttccacggagcagagaaagagactgacaatcgcggtggagcttgtagccaacccttccatcatctttatggatgagccaacttcanggctagacgctagaacaacggctattgtgatgaaggcggtaaagga

SEQ ID NO: 3919 - DNA, 418 bp, Arabidopsis thaliana
  unsure at all n locations
  Clone ID: LIB22-066-Q1-E1-E4
caatccaaaatcccatactaaattaaaaccaacacacaggaagaaagaagaaacctctcatcttcccctctcttctgttgaagaaagcttaaacctttctgggtttcttttaactatggcgacaagggttagtttcttcttanctctggtaatgacggtggtgattcttgctccttctgtcgtctctggagaaaatgggttttccgatcttaaaatccgtactcacttgaaacgactcaacaagccaagctctcaaatcgattaaagagcccagatggagatatgattgactgtgttccaatcactnaccaaccanncntttgctcatcctctgctcattaatcacactgtccagatgtggccaaagtttgaacccaganantgtacntagtggagaagtaaagttcatcatgancca

SEQ ID NO: 3920 - DNA, 413 bp, Arabidopsis thaliana
  unsure at all n locations
  Clone ID: LIB22-066-Q1-E1-E7
aaatccataggaggaggaggatttttctgtaagtctgttctattcgctctttttctcctcgccttgccgttgttcccttctcaagctcctgatttcgtcggtgagactgtgctcactaagttctgggaactgattcatctcctattcgtcggcattgctgttgcttatggtttgtttagccgtaggaatgttgaatccgctgttgatttaaggatgactcgtgtagatgagtcttctttgtcttatgtatctagaatcttccaggtttcttctgtttttgacgaagagtttgatgataattcttgtgagtttgttgatgtgaggagtgatgaagagtgtgagtgctcgagcttctgtggttgggaaatctgagtcntttggttgttgaaaagcgggcaaattgggaagaatcg

SEQ ID NO: 3921 - DNA, 469 bp, Arabidopsis thaliana
  unsure at all n locations
  Clone ID: LIB22-066-Q1-E1-F12
gnaacgttgcaccgccagtagnctcaagaattccanggtcgacccacncgtccgggaaagtctaaaggctttggatttgtcaattttgagaattctgatgatgcagccagagctgttgacgctctaaatggaaagacctttgacgacaaggagtggtttgttgggaaggcccaaaagaagtccgagagggaaactgaactcaaacaaaagtttgagcaaagtttgaaggaggctgcagacaagtctcaggggtcgaacttatatgttaagaacttggatgagagcgtcacagatgataagctcagagaacattttgctccctttggaactattacatcatgcaaggtgatgcgtgaccccagtggagtgagtagaggatctggatttgtcgcattttcaactcctgaggaagcaactagagctattacagagatgaatgggaaaatgatcgttacaaaaccnctatatg

SEQ ID NO: 3922 - DNA, 477 bp, Arabidopsis thaliana
  unsure at all n locations
  Clone ID: LIB22-066-Q1-E1-F4
aacgttattcgccggcacggtccaagaaatcccgggcnaacttgcanagaaacttgaaatattttataacaatgggtgattctactggtgagccggggagctccatgcatggagtcaccggtagagaacaaagctttgctttctcggtgcaatcaccaattgtgcataccgacaagacggccaagttcgaccttccggtggacacagagcataaggcaacggttttcaagctcttctccttcgccaaacctcacatgagaacgttccatctctcgtggatctctttctccacatgttttgtctcgactttcgcagctgcaccacttgtccctatcatccgggagaatctcaacctcaccaaacaagacattggaaacgccggagttgcctctgtctctggggagtatcttctctaggctcgtgatgggagccgtgtgtgatcttttggggtccccgtttacngttgtgcccttcctt

SEQ ID NO: 3923 - DNA, 414 bp, Arabidopsis thaliana
  unsure at all n locations
  Clone ID: LIB22-066-Q1-E1-F5
tttggctccatctcttacagtaactgtctcttggaaccatttcctcttcactagtatcttctaacaatgtctgctactaggtcacagagatcatccacgatctcgccggctcgtcctcgtagatcgccggcgactattccgatgaaacgtccggaaactccttcttcctctcacttttctgcttctccggttacttcttctagtccattactacgttctagtcctagtccgtctacttcctccgccgccgcctctagtacggctgttgcttccacgaaactgaaggagaatattacaagtcacgattcggtttcgtcctctcagtccacgagaggtcaataatggagatgagattgcgtggtatgcagatggagactaanactattaggaatgagtataatccatctctttgtt

SEQ ID NO: 3924 - DNA, 416 bp, Arabidopsis thaliana
  Clone ID: LIB22-066-Q1-E1-F6
acaaagacttatccttctaatttcctttttgaaaaagaacctaaataaaaagattatggtatttttctcgacttgcaagtcggtacaattccatacggaaatcatgaaaataagcgacgtggatgtctctgatattcatggaggcatggatcagaacagaagaactaaaacctttttcgacttcatgaaagcaaagaaaggtatcttgttatgtactgatgttgctgctcgtggtctcgatattccttccgtggactggattatacagtatgatccaccagacaagccaacggaatatatccatagggttggtcgaacagcccgtggagaaggagcaaagggaaaggcattacttgtcttgattcctgaagaacttcagtttattccgctacctgaaggctgccaaagtactgtta

SEQ ID NO: 3925 - DNA, 416 bp, Arabidopsis thaliana
  Clone ID: LIB22-066-Q1-E1-F8
tcttcgtctctctcttgtagcaatgccgcttcttcatccacagtcgttgcggcatccttctttcgagattcagacccaaagaagaagcaattccacaacaagattgcttctttctcacaagtttctccattctcaagcttccattatctcaatctccaggacaagaatcctcaaacgggtctctcagaatctctctgtagctaaagctgcttcagctcaagctagtagtagtgttggtgagagtgttgctcaaacatcagaaaaagatgtgttgaaggctctgtctcagattattgatcctgattttgggacagatattgtttcttgtggttttgtgaaagatttggggattaatgaagctttgggtgaggtttcgttccgtttggagctgacaacacccgcatgtccagtcaaaa

SEQ ID NO: 3926 - DNA, 413 bp, Arabidopsis thaliana
  unsure at all n locations
  Clone ID: LIB22-066-Q1-E1-F9
ttgggtaaagtagacagaacaaaaattgctgaagtgtcagaagaaacagacacaaggattgaagatgaggatcaggagaaagatgatgagatgactgatgttgcggaagatgtgaaaacgcatggagactcctcagtagctgatattgaagagggaagggaaagtcaagaagagatgacagagacacangangacagtgttatggctgatgaagagcctgaaggaagttgaggaagaaaataagagtgctggaggaaagaagaaacgggggagaaatacaaagacagtcaaagggacaggaaagaagaaagangaagatgtttgttttatgtgctttgatgggggtgatcttgtcctttgtgaccgcangggaancacaaaancctntcaacccttccggttttaattcaana

SEQ ID NO: 3927 - DNA, 423 bp, Arabidopsis thaliana
  unsure at all n locations
  Clone ID: LIB22-066-Q1-E1-G2
acgcgtgggatttgttactggtgatcatgaaccacaaaacagtgattttgttgattttgggcggtttatttgatgagcctgagactactgagggacctgtttttggacctccttccaaggctgaagcctcgggagttggttttatggcgttcagcagcgagtctgatcctgaagaaatcgatgattcggatttaccggtgtctgtagagaggtgtttgggtcatttcacaaaacatgagatactgtcagatgacaatgcttggaactgcgagaactgttcaaaagaacctgaaactccaacggttgagagaaaagcgaaaatccaatgaagatgaatcgaagatnaagcaacaccagcaacggatgggtgaaagaaaatgaagatgaaaggttttggagaaaccgaaattttgggctgttaaa

SEQ ID NO: 3928 - DNA, 414 bp, Arabidopsis thaliana
  Clone ID: LIB22-066-Q1-E1-G5
gcttgaaggcttcgcccagattctttctgctgggagggccgcgtacgaaaaaagaatgatgggaccctccaaagataactgtaaatctaatggcactaggaaatgtacggttgcgtaccagagccctcctgttcatcgatggggaggtctcaccacaacacgctcgggatgtatcactcttcttgactgctttttgactgcaaaaactttcaaagggcttcaaaatgtctttgaaagtaaccgtgctcgagagagggaacgtgagttgctttatcctgatgcttgtggtggcggtggtcgggtatggcttagtcaagggattgctggttttggtaaaggtcatggaacaagagaaacatgtaatttgcataccacgaggctctcttgtgatacattagtggatttttggtctgc

SEQ ID NO: 3929 - DNA, 417 bp, Arabidopsis thaliana
  unsure at all n locations
  Clone ID: LIB22-066-Q1-E1-G7
acgcgtccgcccacgcgtccgcggacgcgtgggaaaacggaaggttagtttgttcgatgttatggaagatccttctctttcgtcgaagaacaccaaatccaatggtctcggacttgcggcggcggctggtggtggaagcaatctgatcaacaaatggaacggaaaggcttattctcagaggtatttcgagattctggagaagaggagagatcttcccgtttggctccagaaagatgactttctcaatactttgaactctaatcaaactctcatactcgtcggtgaaactggtagtggtaaaactacacagattccacagtttgtattagatgctgtggtggctgacaactccgataagggaaggaaatggttggttggatgtaccaanctccgtagaagttgctgcaaatgtcctgt

SEQ ID NO: 3930 - DNA, 413 bp, Arabidopsis thaliana
  unsure at all n locations
  Clone ID: LIB22-066-Q1-E1-G9
aggtccagacatagtaaggattgacaagactgagagctcttccttgtcttcgctaaaaccaccccagcaaggggaatcaaggtatctctgcaaataatcaagatccactcaactctttcggtgtaccaaaacagagccaaggaatgccatctttcaccaagtgcttcataaactcgccgccatcatcgatattcacggggtccaagatcgaagctgaggatggttctccgcttgtgatcgagctcgtggacgccaccacaaacactctaagttagtacgggaccgttctcgtcttctcgggtcgagctcgtgccgctgaacgctgatttcacggaagaaagctggaccgttgagggatttaatcggaatattctcaagcaacgtnnaanggaaacttccgtttgcncactggg

SEQ ID NO: 3931 - DNA, 412 bp, Arabidopsis thaliana
  unsure at all n locations
  Clone ID: LIB22-066-Q1-E1-D7
acgcgtgggttcttcttcgccaaagtgttattcctcaactttatatattacacaaatgtctttagccgcggataatgtgttgttggtggaagaaggaaggccagccacagcggaacatccatcggccggaccggtttatcgatgtaaatacgctaaagatggcctcctcgatctccctaccgatattgattctccttggcagttctttagtgaggctgtgaanaaatatccgaatgagcaaatgttgggccaacgcgtaacgactgattctaaggtcggtccatacacgtggatcacatataaggaagcgcacgacgctgcaattcggattggatnagcaatcanaagccgaggcgttgatccgggacactgttgtggtaatttacgggagctaantgtccagaatgggatt

SEQ ID NO: 3932 - DNA, 456 bp, Arabidopsis thaliana
  unsure at all n locations
  Clone ID: LIB22-066-Q1-E1-B10
aacttttacgccgntcggtacgcctcaaagaattccaanggtcgacccacncgtccncccacgcatccgcaatctttcacccacctattcaaagctctctccggaagtttcgaggggttggttgttggttttcccgatgacttnnnnnnnnnnnnnnnnnnnnnnnnnnnnnnnnnnnnnnnnnnnnnnnnnnnnnnnnnnnnnnnnnnnnnnnnnnnnagaaagggagaataatcggaggagagaaagacggagaagagctgtagctgcgaagatatacactgggcttagagctcaaggtgattataatttgcctaaacattgtgataataatgaagtccttaaagctctttgtgttgaagctggttgggttgttgaagaagatggtactacttatcgcaagggatgcaaagcctttacctggtgagataactggggacttcatccccagttacn

SEQ ID NO: 3933 - DNA, 472 bp, Arabidopsis thaliana
  unsure at all n locations
  Clone ID: LIB22-066-Q1-E1-B12
cgccgttcngtaggcctcaaaaattccaagggncgaccnacgcgtccnctcacaancatctcaacaaaagtagcagcttcctcaacaccatccctaattgttctctgcttcgagacctaaacatgagctctgtatatcccaaaaggaaactcctccctgattttctcacagatgaaatctttaagagtcatcgacatgtcttgggaaccacttcaccggtagcttccctctctctatcttcaatctcactgacttagagtatctcaatttcaatgagaatccagagcttgatctatgggactctaccggattctgtctctaagctgacaaagctcacacacatgctcttgatgacgtgtatgctccatggtaatatcccaagattcattgggaacttgacttctcttggttgatctgaacttaacgggaaantcctcccccggngagaattccaaaangaaattaggggaac

SEQ ID NO: 3934 - DNA, 420 bp, Arabidopsis thaliana
  unsure at all n locations
  Clone ID: LIB22-066-Q1-E1-B2
agccctaannnnnnnnnnnnnnnnnnnnnnnnnnnnnnnnnnnnnnnnnnnnnnnnnnnnnnnnnnnnnnnnnnnnnnnnnnnnnnnnnnnnnnnnnnnnnnnnnnnnnnnnnnnngaccacgaagctaaaccctcaatcttccccactcattttcactggtacacttcctctcttgcctcactcacctcttctcctccctccattatccacacatacgacaccgttttccatggcttctccgctagactcacttcacaagacgctagtcaactcttagaccatcctcatgtcatctctgttaacccggaacaagtccgtcacttgcacacaactcgttcccctgaagtttcttggtcttangtccaccgacaaagcgggtctactcgaaagagtctgatttcgggtcgggatctaagtt

SEQ ID NO: 3935 - DNA, 412 bp, Arabidopsis thaliana
  Clone ID: LIB22-066-Q1-E1-B5
agtggttgcttgcacgttgaccaaacttgttcttaggttagaagaggttcagtcttctaaaactgaagtaaataagacagtcacacaggctttgttgatcatggtttctatgttgcaacttgggcaatctcctgtttctccacaccctattgataatgattcgtatgagaggattgtgttgtgcataaaattgctttgccataggaatgatgagatgaaaaagatatggttagaatcctgccgccagagttttgtcaagatgatttctgaaaaacagcttagagagatggaggaactgaaggcgaagacccaaacaacgcatgctcaacctgatgatctaattgacttcttccatctaaagagtcggaagggaatgagtcaacttgagttggaagaccaagtacaaagatga

SEQ ID NO: 3936 - DNA, 413 bp, Arabidopsis thaliana
  Clone ID: LIB22-066-Q1-E1-C1
acctgaaagaactcgccttgtctctcattcttcttctccatttcgaaaagaagatgaaggtgatagataagatccagtcattagccgacgaaggcaaaacagcgttttccttcgaattcttcccaccaaagacagaagatggagtcgacaatctctttgagagaatggatcgaatggttgcttatggtccaacgttttgcgatatcacttggggagctggtggatctaccgcagatctaacgcttgatatagcttcgaggatgcaaaacgttgtttgtgttgagagtatgatgcatcttacgtgtactaacatgcctgttgagaagattgatcatgctcttgagactattagatctaatgggattcagaatgtgcttgctcttaaaggtgatcctcctcatggtcaagataag

SEQ ID NO: 3937 - DNA, 460 bp, Arabidopsis thaliana
  unsure at all n locations
  Clone ID: LIB22-066-Q1-E1-C12
acgcctcnaagaattccaanggnccgaccnaccccgtccnagactttnctctctgtttattttttttagggttttcgtaagaacagagcaaaaaacatgtttggaagaggaccttcaaggaagagcgataacacaaagttctacgagatccttggtgttcctaagaccgcagcaccagaagatctcaagaaagcttataagaaagccgctatcaaaaaccatcctgataagggtggtgatcccgaaaagtttaaagagttagcacaggcttatgaagttttaagtgatcctgagaagcgtgagatctatgatcaatatggggaagatgcactcaaggaaggaatgggtggtggaggtggtggacacgatccatttgatatcttctcttccttctttggtagtggtggacacccattccggaagtcataacccggggaaaggaggcaaaggctttggttaa

SEQ ID NO: 3938 - DNA, 417 bp, Arabidopsis thaliana
  Clone ID: LIB22-066-Q1-E1-C4
agccgaagatcccgagggccctttgcgatgtctcaaagcggcggtgacttcaacctctccgacgagattctcgccgtgattcccaccgacccttatgatcaactcgacctcgccaggaagatcacttccatggctatcgcttcaagggtttcgaatctggaatctcaagtctccggcttgagacagaagcttcttgagaaggatcggcttgttcatgaacttgaagacagagtctcttcctttgaaagactttaccatgaagctgactcgagtttgaagaatgttgtcgatgaaaatatgaaactgactcaagaacgagattcactggcaatcactgcgaagaaactcggtcgtgattatgcaaagttggaagcattcaagagacaattgatgcagtcattgaatgatgataatcca

SEQ ID NO: 3939 - DNA, 415 bp, Arabidopsis thaliana
  unsure at all n locations
  Clone ID: LIB22-066-Q1-E1-C6
agagaaagaagaagaaagaaacaatggagtctcccaaatctaacgtcgacgatggctaccaaaacatcttcgtcatgcgtcacggtgatcgaatcgacaatttcgagccactctgggtttcaaccgccgagagaccttgggatccacctttggttcaagacggtatgattcgagcgtttcgaaccggtcaaaggatccgatctcagatcgggttcccgattcaccgtgtcttcgtctcccctttcctccgatgtcttcagacagcttccgaagtcgtcgcagctctatcagccgtcaatgtcgatcctaacgccatgtcttccaaagacgtcccttccattgataaatctaagctcaaggtttctattgaattangtttgtgtgagatgttgaactcagtggctataaggngtga

SEQ ID NO: 3940 - DNA, 416 bp, Arabidopsis thaliana
  unsure at all n locations
  Clone ID: LIB22-066-Q1-E1-C8
tagtgctggtggtggctgtcttgactcacacggcgtctgccgccgtgagagaatatcattgggaggtggagtacaagtattggtcgccggactgcaaagagggcgccgttatgaccgtcaacggcgagtttcctggtcccaccataaaagccttcgccggagacaccatcgtcgtcaatctcaccaacaaactcaccaccnaaggccttgtcatccattggcatggaatccgtcagttcggaagtccatgggcagatggagcagcaggagttactcaatgcgcaattaaccctggagagacttttacctacaatttcactgttgaaaagccgggaacacatttctaacatggacactatgggcatgcanagatcagctgggctatacggatcgttgattgtggacgtggctaaagg

SEQ ID NO: 3941 - DNA, 482 bp, Arabidopsis thaliana
  unsure at all n locations
  Clone ID: LIB22-066-Q1-E1-D10
cttttacccgtccngtagccctcaaagaattccaagggncgaccnacgcgtccngttaaccatcactactttgtactaaaatccaaaccatgacttccaacgttcaagctttcagaaacaaacagcccaaggaatcagaaaaacccgtccgaagagcagagaaggaggaagtggactacatgcagagagctcagtggctaagagctgccttgcttggagccaacgatggtctggtcacaagtcgctcgcctaatgatgggtgttggttccatccaaagaagacgtccaagcaatgcttctcgttggttttgccggccttgttgcnggtgcttgtagtatggctattggagagtttgtgtctgtgtgcacccaaagggatattgaaactgcacagatgaagagagctattgaacataagacatcactatcagcaatcgacgaacaaaganggaaggaagagaaagaaangaaaagggctgcca

SEQ ID NO: 3942 - DNA, 458 bp, Arabidopsis thaliana
  unsure at all n locations
  Clone ID: LIB22-066-Q1-E1-D12
tacgccgccagtagnctcaagaatcaaggtcgacccacgcgtccngtggagnctctctcttctctctctctgtctgtgtgtgaagtgagaggatctttgtttggttctgcaatcataatttcgtgatatactaaaaaaaatgcaatttcctcttctctcttataagcagagaccctactactctttgatcgaattttccttgctctcttctctttgttctctcatgtttttttctccctaaatttatgggctttgctctctctctaagccacactcacactctaaagcactcgtctttcttcttctttttcttcagaaacagttattttgacttgaaaaaccagagctttaatcctggattcatggcaaaaagagcattacttttcttttcctctctcactttcttgtttcatttggcttaaaaattcaatgataattttggaattggggggaaaaaa

SEQ ID NO: 3943 - DNA, 422 bp, Arabidopsis thaliana
  Clone ID: LIB22-066-Q1-E1-D2
aattcaaattttctccattctctcgttccaattattatttacttttttcacccaataaaaaaaaaaccatgcattcacttccggtgaatctcgtcctcaccgtacttacggtgttcctaacatcaccggcgcaagttatcggataccgtccatatccaccaaaaaccaacggctccgatcaaatcttcgacgcttcaaaaaaattcgaaggctcatcgaatctcgtccgcctccgttaccacatgggtccagtcttaaccaacaacatcaccgttcacccaatctggtacggcacgtggcaaaaatcccagaagaaaatcatccgtgagttcattaactcaatctcagccgttggatttaaacacccttcagtctccggttggtgggaaaaccgtacagctttacactgaccaaaactggga

SEQ ID NO: 3944 - DNA, 414 bp, Arabidopsis thaliana
  Clone ID: LIB22-066-Q1-E1-D5
accgagaagattaagcgtaagattctcaacgaatgttggagaaggaatctgatttgactgcaacggagaaaccaaataacaagcacgcggctgattcgttttccagcgaggatttggtctcacgcggagaaaccaaataacaagcacgcggagatcaattatttttattttcgtagaatctgattgaaatattaagaaaaaagagaaaaaagagaggaaaagagcaaagtaagtaggatagatggctagtgtccagcaaaatgggcaacggtttggcgtttcagaacctatctctatgggaggaccaacggagtttgatgtgatcaagacaagagagctcgagaagcacttgcaagatgttggattgtacgagagcaaggaggaagctgttagaagggaggaggttctggggat

SEQ ID NO: 3945 - DNA, 416 bp, Arabidopsis thaliana
  Clone ID: LIB22-066-Q1-E1-D6
cttttgagagcggttattttttctctatcaactaatacagtaaccttacgggtgtttatttgtatagatctctgtggttttcttggccaaatctagtgagatctttttggtttctcgaattcgatgaaaatgagacgaggcaattcaagtaacgaccatgaacttgggattctacgaggagctaactcggacaccaactcggacacggagagcatcgctagcgaccgtggtgcctttagcggtccgcttggccggcctaaacgtgcgtccaagaaaaacgcaagattcgccgacgatcttcccaagagaagcaatagtgttgctggcggccgtggtgatgacgatgagtacgtggagatcacgctagacatcagggacgactcggtggccgtccataatgtccaacaagcaagctg

SEQ ID NO: 3946 - DNA, 470 bp, Arabidopsis thaliana
  unsure at all n locations
  Clone ID: LIB22-066-Q1-E1-A9
gccccgtaccgngtccaagaattcccggggncgacccacgcgtccngaaggttgcaatggctgatcccagtnnnnnnnnnnnnnnnnnnnnnnnnnnnnnnnnnnnnnnnnnnnnnnnnnnnnnnnnnnnnnnnnnnaggttgcaaaggcttcttcgagtggacagaagaagaaggacgtcaagaaggaaacgggtctcggactcagtgttaagaaagatgagaacttcggggaatggtattctgaggtttgtaaacaagatatgattgagtactacgatatctctggatgttatattctacggccatggtcaatggccatttgggagattatgcaaattttctttgatgcggaaatcaagaaaatgaaggtcaagaattgctatttccctctgtttgtatctcctgggtgtcttaaaaaangagaaaggccacatccaaaggaatccccccctaaggtttccttnggtt

SEQ ID NO: 3947 - DNA, 392 bp, Arabidopsis thaliana
  unsure at all n locations
  Clone ID: LIB22-065-Q1-E1-G10
tttttttcctccaatctgaagtttctcggcaaccatatcagaaaaggctttgtcttcttcttcagttgtcagtttctccgccacataatctctacccgacacacttttatcttcccctcgttgctcctctactccacttccacctccggagataggtaacttcgtcgtcaangtcgagaccccgataacgttggaggaagagtcggctgtttcagactancttagtggtgtatctaattancagtccaaagttactgatcccaccaaagaagaaactggaggagtaccggagattgctgagtcttttggtaatatggaagtgactgatgagtctcctgatcagaagccaggacaatttgaaagagacttgtcgacgagaaagcaaagaattt

SEQ ID NO: 3948 - DNA, 388 bp, Arabidopsis thaliana
  Clone ID: LIB22-065-Q1-E1-G11
agcacgaacgcgtgaagctctaatcgagaaaaaaatggaggttttggataggagagacgatgagatcagggactcgggaaacatggacagcatcaagtcacactatgttaccgactctgtttccgaggaacgccgctctcgtgagctcaaggatggagaccatcctttacggtacaagttttcgatatggtacactcgtcgcacaccaggggttcggaaccagtcttatgaagataacatcaagaagatggtagaattcagcacggttgaaggattttgggcctgctactgtcaccttgctcgttcttctctcttgcctagtccaacagatcttcatttctttaaggatgggattcgtccattgtgggaggatggtgccaactgcaat

SEQ ID NO: 3949 - DNA, 459 bp, Arabidopsis thaliana
  unsure at all n locations
  Clone ID: LIB22-065-Q1-E1-G2
tntttagccgccagcggtcaaaattccgggccgacccacgcgtccncccacgcgtccgcaataaacagagggagtcgccaaattttctcatcattttctcgagaaaatagactaaaagcgattcccgagagaaagaaagaacaaaaaaaaaacatccgagtgaaaatgagagaaattcttcatattcaaggaggtcagtgcggaaaccagatcggagctaagttctgggaagttatttgcggcgagcacggtattgatcaaaccggtcagtcatgtggcgatacagatctacagcttgaaaggatcaatgtctattttaacgaagctagcggaggcaaatacgttcctcgtgctgttcttatggatctggagcctggaactatggattctctcagatctgggccgtttgggtcagattttccggcctgataacttcgtttttggtcagtccnggtgctg

SEQ ID NO: 3950 - DNA, 411 bp, Arabidopsis thaliana
  unsure at all n locations
  Clone ID: LIB22-065-Q1-E1-G3
agtcgttcacgaaacatctcatatatatctagagagagaaacaaaacaatatatagagaatctatatagaatcatataagtggtacatacctctcaaatcgaggaagaaaatgaaaggaggaaagatggataaattgaagccaataatagcaatcatatcactccaatttggatatgcaggcatgtacatcattactatggtctccttcaagcatggcatgaaccattggatccttgctacttaccgacatgtcgtcgccacaattgtcatagctccttttgctctcattctcgagaggaaaataaggcctaagatgacatggccattgttccttaggattcttgcccttggattcctagaaccacttttggaccaagaacttgtactacatangaatgaaagccacgtca

SEQ ID NO: 3951 - DNA, 405 bp, Arabidopsis thaliana
  Clone ID: LIB22-065-Q1-E1-G4
acgcgtccgcccacgcgtccgcggacgcgtgggagaaagcagaatgagaaacttcaggttgttaggcatgaaggagatcctgattttgaagatggtgatgatgctgattttccaatgatggatgagggaaggcagccattgtctaggaagataccaatcaaatcgagcaagataaatccttaccggatgttaattgtgctacgtcttgtgattcttggtctcttctttcactaccgtattcttcaccccgtcaaagatgcatatgctttgtggcttatttctgttatatgtgagatatggtttgctgtttcatgggttctgatcagttccctaaatggtaccctatcgagcgagaaacgtacttggaccgactctcattaagatatgagaaagaagggaaaccgt

SEQ ID NO: 3952 - DNA, 468 bp, Arabidopsis thaliana
  unsure at all n locations
  Clone ID: LIB22-065-Q1-E1-G5
ttttacgccgnccaggtaccgggancanagaattcccgggncgacccacgcgtccnacaggttggagaacgtggtgttcaactctcaggtggacagaagcagagaattgcaattgctagggcgatgttgaaagacccaaagattctgttactagatgaagctacaagcgctcttgatgctagctctgagagcattgttcaggaagctttagacagagtcatggtggggaggaccactgttgttgttgctcatcgtctctgcaccatcagaaatgttgattccattgccgtgatacagcaaggccaagttgttgaaaccggaacacatgaagaactcattgccaaatccggtgcttacgcatccctcatcaggtttcaggaaatggttggtactcgagatttctcaaacccgtcaactcgtcgcactcgttcaacccgtttgagccattcactgtcaacgaaatcactc

SEQ ID NO: 3953 - DNA, 405 bp, Arabidopsis thaliana
  Clone ID: LIB22-065-Q1-E1-G6
tgttctcacttctcacttctcagatttttataaacatgaatgaaacctgaattgttccactaactctcagcaaaaatgcgatcactttacttaatcgtcttcatcgttattagtcttgttaaagcttcgaaaagcgatgatgggttttgttcagcgccttcgattgttgaatcggatgagaagacgaaccccatttattggaaagccacgaatccaacactctctccttcacacctccaagacttgcctggtttcacacgaagtgtatacaaacgagatcatgcgttaataacaccggaaagtcatgtatacagccctttacctgactggacaaacacattaggggcgtatttgatcacaccggcaacgggttcccattttgtcatgtacttggcgaaaatgaaa

SEQ ID NO: 3954 - DNA, 460 bp, Arabidopsis thaliana
  unsure at all n locations
  Clone ID: LIB22-065-Q1-E1-H2
atttttcagncgccaacggtcaagaatcccgggtcgacccacgcgtccncccacgcgtccgtcatcactcaccaaacaactctcatcaatataaagagaagagagtggtagagttatatattacacacataaacttagatatagtagtgttatattcttgattaagtaataaagatgaaaggtggaagcatggagaaaattaagccgatattggcgataatttcactgcaatttgggtatgcaggcatgtacatcatcaccatggtctcgttcaaacatggcatggaccattgggttcttgctacataccgtcatgtcgtagccacggttgtcatggctccctttgctctcatgttcgagaggaaaattangcccaagatgacactaagcaatattctggaggcttcttgctcttggnatattagagcccctcatggaccanaatttgtactacatagga

SEQ ID NO: 3955 - DNA, 406 bp, Arabidopsis thaliana
  unsure at all n locations
  Clone ID: LIB22-065-Q1-E1-H4
aaatcatcatcttctccggcgatgaagacgacggcgacgtcgtttgtaacgggagagagagntgtgtntttcgcntcggggtttcncgtattctcntatctctncctttacatatacccanggggtctccctcttcntcctctctctctccgccttcctcgtcgagatccgcgtcgagacttctccgtttcttctctctcatttcagctccagacgcggtgcgtcttcagggatattactaggagctgtgacacttccttctgttatgatatctaagttagttcagctttcaagagctatttcaatccatgaagctgaacaagatgagcttgcacatgtgacaatgcagtattgggcagcatcgggctaattgttgtgctatacttatatatcgatcagtgactat

SEQ ID NO: 3956 - DNA, 441 bp, Arabidopsis thaliana
  unsure at all n locations
  Clone ID: LIB22-065-Q1-E1-H8
atcaagaattcccgggnccaacccacgcgtcnggggaaaatancgctgttcaaaccttagtttcgactgcattatgtggagtgatacattccattattggtggacaaccattgttgattcttggtgttgcagagcctactgttataatgtacaccttcatgttcaattttgctaaaagtagaacggatttgggctctaatctctttctagcgtggaccggatgggtttgcttgtggacggggctgttgttgttcttgttagctgtattaggcgcttgcaccttcatcaatcgattcactcgacttgctggggaactgtttggtactctaatagccatgcttttcatgcaagaagccattagaggcattgtggatgagtttggtgtccccggaagaacaaatccaagatnaagctgagtttcaacctgcttgggtgtttgca

SEQ ID NO: 3957 - DNA, 441 bp, Arabidopsis thaliana
  unsure at all n locations
  Clone ID: LIB22-065-Q1-E1-H9
ttcttcagccngccaggtaccgntcaaagcattcncgggncgacccacgcgtccgctcaactgctctcccataaccgaaaccgagagaaaatatagaaaaagatgattgagacggttaaacacctgatcggctccggtggtcccagcggattcgggtcaagatccaccgccgatcatgtcacttgtaattctgatctccgttctctaactgccatcatcactggcgcgacgtcggggataggagctgagacggcgcgtgttcttgctaagcgtggcgcaagacttgtgcttccggctagaagcgtcaaaaccgccgaggaaacaaaggctcgtatactgtcggaagtttcctgatgcggagatcatcgttatgcatcttgatctcagctcacttacctctggtccgtccgattcgtggacgatttccaatctcncaatcct

SEQ ID NO: 3958 - DNA, 421 bp, Arabidopsis thaliana
  unsure at all n locations
  Clone ID: LIB22-066-Q1-E1-A4
ntttctctataaatcctttattattgttataaaaactccgatggatcggcaaaattccgatgacatcatgagatttctcgatggaatggctanctccgacnacgttcttttcggttttcttgacgaaggaaaccagtcaccggaagatttctccgtanacctcaacgccggcgaanatgacggtgacgaagacgacaataataacaattctgaagataacaaagctttttggcaggaacacgaacaacttcttcaggggacactgtataggacaagttccattgagacaaagattagacaagctacaaaagaagcgttgaaacaagttaaatctaaggggtctttattgtgtttgccggcgaccagtgggacggcggttgccggagttgcntacgtggcgaanatctctagacacctaaga

SEQ ID NO: 3959 - DNA, 461 bp, Arabidopsis thaliana
  unsure at all n locations
  Clone ID: LIB22-066-Q1-E1-A5
gnccggcccgtaccaaacanaaattcgcnggtcgacccacgcgtccnaacgctctttctccgtaggaaaggggaagcaaataaattatcgaagcccactggtttcggagctgatcggtctctatttctctcttcatacatatctcaagcagataaagttgatcggatactagaatgggaggaggatttagagttttgcatttggtgaggccattcttggcttttctgcctgaggttcagagtgctgataggaaggttccattcagagagaaggttatctacactgtcatctctctcttcatctttcttgtctgcagtcagcttcctctttatggaatccattccaccaccggtgcggatccattctattggatgcgtgtcattcttgcgtccaaccgtggaactgtcatggagctcggtattactcctattgttacatctggacttgtgatgcaattcttg

SEQ ID NO: 3960 - DNA, 411 bp, Arabidopsis thaliana
  unsure at all n locations
  Clone ID: LIB22-066-Q1-E1-A7
acgcgtccgcttcttcacagaaggaacgttcgaattgattcgcttcttaatgtcactctctacaatagcttctggtatcggcgttctcgagcttccttgtttgcgtctgttaccaatctcaagcacccaaatccagtttctcactgttgaagctagaaaacaatctagaagaataagacgcgagcgctccttcagcccttttccagtacttattcaatcgaaccgtcgtcttcgtcatggtttctcagagctcaattcgagttttgatcgttccaacagtggagaaactggttccgataccactcttaaagatggtgaagaagtgaggagtgaaagctcttcaggtgttggtgatagctatgtgggcttgtttgtggggaatgctnggtttggacaacgatcctcntgata

SEQ ID NO: 3961 - DNA, 410 bp, Arabidopsis thaliana
  unsure at all n locations
  Clone ID: LIB22-065-Q1-E1-G1
tttttgtttttatttttctgatgttacaatggcagacaagatcttcactttcttcctaatcttgtcttcgatctctcctctcttatgctcttctttgatctcacctcttaatctctcacttattagacaagcaaatgtccttatctctctaaagcaaagttttgattcctatgatccttctcttgattcatggaacattccaaatttcaactctctatgttcttggactggtgtttcttgtgacaacttgaatcaagtctattactcgtctagacctatctaatctcaacatctccggcactatctctccggaaatatctcgtctttcgccgtcacttgtttttcttgacatttcttctaacagtttctccggtgaagcttcctaaagagatctatgagctctcangcct

SEQ ID NO: 3962 - DNA, 419 bp, Arabidopsis thaliana
  Clone ID: LIB22-066-Q1-E1-A8
aagaccaaaaattagaaaccatggcattgcaaaagttccctctcctggggcttctttttctcataaccattgtcgtctcttcgacaatagccgtcgatgatcctgtgtgcccaacgacgtccaaactaagccgagcaagtttccctaatgggtttgtgtttggcacagctactgctgcgtttcaggttgaaggtgcaattaatgaaacttgtcgtggacctgctctatgggatatcttctgtaagagaaatccagagagatgtagtggccacaacgccgatgtggccgttgatttcttccatcgttataaggaagatattcaactaatgaagaatctaaacacagacgcattcaagactctcaatcgcatggtcaagaatatttcctcatggggaaaaaaggagaaagggattgagtca

SEQ ID NO: 3963 - DNA, 391 bp, Arabidopsis thaliana
  unsure at all n locations
  Clone ID: LIB22-064-Q1-E1-C12
ggtggccacggcggagaaatcaccactagagctacttcaacaaaccaaagcctccgtcgaagcaatcatagcaaagatgctctccatcaagcaacaaggaacccctaaatccgagaatcgagaactcctcactcagatgtttctcaacttcatcaatcttcgtcaagcgaatcgctcgattcttatagaagaagagaaagtgagaacagaaacggaaatagcaaaatctccggtggatttcacgacgttggagcttcacaatctcatgtatgagaagagtcattacctcaaagctaataaagctagtagagatttcanatctangtatccaaacatcgatntcatatccgaacaaagacttcttcagtgatgctcccggaagcaatcaaat

SEQ ID NO: 3964 - DNA, 417 bp, Arabidopsis thaliana
  unsure at all n locations
  Clone ID: LIB22-064-Q1-E1-C2
acgcgtccngaagctctctctcctcaagaaatcaaaaaccctaaaaaccctttttgtagcgatgatggtagaaccgaatcagctcgttcaacatctcgaaacttttgttgacactaatcgttcctcttctcaacaggatgatagtcttaaagcaattgcttcttctttggagaatgattctttatctattacccaattggttagagagatggagatgtatttgacaacaaccgataacctcgttcgagcacgaggtattctcctgcttgcggagattctcgattgtttgaaagcaaagccgttgaacgatacaatagttcatacgctcgttggattcttttccgaaaagctggcagattggagagcgatgtgcggggcgcttgttggttgtttggctccactgaanaaggaaagatg

SEQ ID NO: 3965 - DNA, 410 bp, Arabidopsis thaliana
  unsure at all n locations
  Clone ID: LIB22-064-Q1-E1-C4
aaaggtaaagtaacaagtctctcgagtttcctttttgctttcccttttgtgtggttcatctctcagtcttcttcttctgctataacgctcttctccatcaccgtataatcgagtttcgattgtctccgacgaagagaagctgacacttctggtttcgtcaatttctactgggataaagctctctactacctttttgctcagagaaaatggtttgattttcgaggatgataaaggcttcaggttgttgtagaggtgtttttgccagccttggtgctggtcatggattttatctgactatcgtatgtgcctttgatgaaactaaataatgccccggggagagttagctatgggctctttagaagactgtttgttggcttaaaggctgcctgggtttaacgncttctggtaat

SEQ ID NO: 3966 - DNA, 397 bp, Arabidopsis thaliana
  unsure at all n locations
  Clone ID: LIB22-064-Q1-E1-C5
agatgtggtatcagatcttccatcttttgaagttgcagagaccaataccgttgatagaagtggtggtatgttagagactcaaaatgtaggacctgaagagatctcagatgatgaaattgagcttcctgaaggaaaatcaacagattctcagaatgttgcacctgttcaagatcattcattatctgatgcagagagaatccaacgagagattgcagcaacgtctgtgcaggctgcgtttagaggttacttggctcggcgtgctttttgggcactcaaaggcataataaggctacaagcgcttatccgtggtcaccttgttaggagacaagctgttgcaactcttttctctgtcatgggaattgtcaggttgcaaagcatttgctcnaaggaagagaga

SEQ ID NO: 3967 - DNA, 393 bp, Arabidopsis thaliana
  Clone ID: LIB22-064-Q1-E1-C9
ctgataagctttacactggaagtaaagatgagaccttgcgtgtttgggattgtgcttctggacagtgtacaggagtactcaaacttggtggggaaattggctgtgtgcttagtgaaggcccgtggctattagttggcatgccaaaccttgtcaaggcgtggaatattgaaaccaatgctgaccagagtctaagtggacctgttggccaagtctattctcttgttgtgggtactgatctgctctttgctggaacacaggatggctctattttggcatggagatataatgctgccactaactgttttgaaccatcagcgtcactgacgggccatacacttgcagttgttaccttatatgttggggcgaacagactttattcgggttccatggaca

SEQ ID NO: 3968 - DNA, 412 bp, Arabidopsis thaliana
  unsure at all n locations
  Clone ID: LIB22-064-Q1-E1-D1
ctgtttctcgtcgttgttattgttcgagctctgcgataatgggttcttcttcggtgtttggcgagcaattacagtatcctgcgactcggcgtgatgattccgtcgtcgatgactatcactgcgtcaagatcggagatccgtaccgttggttagaggatcctgatgctgaagaagtgaaggagtttgtgcagagccaagtgaaattgacagattctgtacttgaaaagtgtgaaacaaaggagaagctccgtcagaatataacgaaacttattgatcatcctcgttacgattcaccattcaggcaaggggataagtacttttacttccataacactggtctacaggctcaaagtgtgctttatatgcaggataatccggatgctgaaccaanaaggtttgcctgattccgaac

SEQ ID NO: 3969 - DNA, 415 bp, Arabidopsis thaliana
  unsure at all n locations
  Clone ID: LIB22-064-Q1-E1-D2
gaacgcaatcccaaagcctatcaaggacatttgggacgaatggagcattcgaagtaccttaatcttcagtctcagccttcaaacatttctcattttctttgcacctcaaagaaaacgctcatccagaaaagttttactctctttcatttggtcagcttaccttcttgctgattggtctgccaatttcgccgccggacaaatctcagatagtcaaggagatgatccagaacccggagaaccgaaaaagagcgccgagttgtttgctttctgggttcctttcttgctcttgcatctcggtggtccagatacaatcactgcccttgcccttgaagataacgagctctggctcaagcacttgttgggtcctttctttcaatcaagttgcaaaccgtttacgttgccttttgcaagtncg

SEQ ID NO: 3970 - DNA, 408 bp, Arabidopsis thaliana
  unsure at all n locations
  Clone ID: LIB22-064-Q1-E1-D5
acgcgtccgaaaaaaataaaaacttgtatttttgttttctgtgatctctctaatggnnnnnnnnnnnnnnnnnnnnnnnnnnnnnnnnnnnnnnnnnnnnnnnnnnnnnnnnnnnnnncggctcaatacctacgtcggttcgagccgggttggcaaacggttcaaactcgccgaacgtaattcaactttcacgacggagctccgtgctggtaccgccactttcttaaccatggcttatatcctcgccgtcaacgcttcaatcctttctgattccggtggtacttgctctgtttccgattgtatccctctatgctcaaacccagcgatcgaaccttcgcagtgtaccggaccgggtctccgattaatccaacccgacgtttcctgtaaaatcaaacccggttaatcctg

SEQ ID NO: 3971 - DNA, 401 bp, Arabidopsis thaliana
  Clone ID: LIB22-064-Q1-E1-D8
aatcgctctggttgccaactcgatcatcatcttcttctacccactttctctatctgctctccgtatctaggagctccctcagatctgtgcttaattctccggtaacattaccggcatcactgggattgctgatctggaaccgctgtgaaattttaggttttctctgagaagacaggcaagtttaacgatggcggcgaagacggccaagatcaaaagctacgccgacgaaggaaaatggtgtcagagtcgaggaaggattgagtctgttcaagtctgataagttcgatgctgatgcttatgtgcaatccaaatgttctatcaacgagaaggatataaaagcagttatgctcgtatcctattgggatttgaagaagagcatctgctgaagaaatgcgggcgaa

SEQ ID NO: 3972 - DNA, 392 bp, Arabidopsis thaliana
  Clone ID: LIB22-064-Q1-E1-E10
ctgaggaccacacaatccaaaagcttctgttgctgtacctggagctgattgaaaagactgattctaaggggaaggtgttacctgaaatgattttgatatgccagaatcttcgtaataaccttcagcatcctaatgagtacatccgtggagtgacactgaggtttctctgccggatgaaggagactgaaattgtggagcctttaactccatcagtgttacaaaatctggagcatcgccatccatttgttcgcaggaatgccattctggccatcatgtcgatatataagcttccacaaggcgaccaactctttgtggatgcgcctgaaatgatcgagaaagttctatcaaccgaacaagatccttctgccaaagagaaatgcatttctaatgcc

SEQ ID NO: 3973 - DNA, 391 bp, Arabidopsis thaliana
  unsure at all n locations
  Clone ID: LIB22-064-Q1-E1-E12
acgttttgtattcttctgcactttgtgtcttgctccttgctacagcgacacaatcttgcttgggcacttgaatggaaaccttcacaaggagagattggcatgtgctaggatcacacttcttggaacgaatccttggcctttcagtgatggtgtacttttctttgatagttcaactggagaagaagaagagaaatctccagtttctggtggtgaaggggttcctgatacgttggagcattgtagtgatgatgaaagatttgctattgtcaagtatgataacaacaaaacaaatggagataatgtgcctgctgcagttactgatgatgaacctagtcacgctgcagatgatctgctaatttctggtgtgctgatnaaggagagaactcctgat

SEQ ID NO: 3974 - DNA, 410 bp, Arabidopsis thaliana
  unsure at all n locations
  Clone ID: LIB22-064-Q1-E1-E2
gctagctcactcctctgcttcaaatttgtataaactgaagtacaagactaagcaaagaggatccgtaggccttagtatatatgcttatgggctatctccttatacggactccaaggacgatgaaaccgcaactgaaagagctgaagctttcctctttggctggatgttaaagcctttggtanttggggattatccggatataatgaagagaaccttggggtcgagattaccggttttctcagaagaagagtcaaaacaagtgaaaggatcatctgactttgtaggagttgtacactacaacacattctatgtcacaaaccgacccgcaccttctctcgttaccagcattaacaaactcttctttgcagacattggcgcatatccgatcccgctggggaatgctcataatc

SEQ ID NO: 3975 - DNA, 409 bp, Arabidopsis thaliana
  unsure at all n locations
  Clone ID: LIB22-064-Q1-E1-E6
acgcgtgggcggacgcgtgggcggacgcgtgggcggacgcgtgggcggacgcgtgggcggacgcgtgggcttttgttctttgtcgcttcaattcaacgcttattcctaaattcgattttgcgttgtcaaattccttaaatttcgttacaaaggtttgatatttccgatgagatctccagcaaagacgatgccgtcgatgtcaccttcttcagtttccacggagaaatctccacctccgtcagatacttcaatggctatagtagctttcgataactccactactcacttctcttcttctccatcgccgccacattctcttgatcattccagtgaatcggagaaggaagatgcgaaaagtaaacccgagagtagaagaaacaagaatcctggaaangttgaaggaaactcc

SEQ ID NO: 3976 - DNA, 404 bp, Arabidopsis thaliana
  unsure at all n locations
  Clone ID: LIB22-064-Q1-E1-E9
acgagaaaccgttgattcttgctctctcaaaccctacttctcaagctgagtgtactgctgaacaggcttacacatggaccaagggtcgtgcaatctttggaagtggaagcccatttgatcctgttgtgtacgatggcaaaacctacttgcctggccaggcaaacaattgctacattttccctggtctgggtcttggtttgatcatgtctggggcaattcgtgtccgtgatgacatgctcctcgcagcttctgaagcattggccgcacaagtgacangaagagcattacgccaatggtctgatctaccccgccattctcaaacatcaagagagatctctgcnaacaattgcagcctgtgtcgnccgcccaaaaaccnattgacctccggattggccgtcgaaanc

SEQ ID NO: 3977 - DNA, 393 bp, Arabidopsis thaliana
  unsure at all n locations
  Clone ID: LIB22-064-Q1-E1-C11
cgttgaagaagacgaagaagataccttcctctttatcttctccgatttctcaaccttcccgtctgcntgtcgtaaagaaatggcgccgagtagacgggatttacagcttactccggtcaccggaggttcttcttcccagatcagtgatatggaagaagttggtcttctcgattcgtatcacaacnaancgaacgccgatgatattttgactaaaatcgaagaaggaagagatgtttccggtttaaggaagattcaggtcggagtcaccggtatgacttgtgctgcttgttctaattccgttgaagcagctttgatgaacgttaatggcgtcttcaaagcctctgttgctttgttacagaatcgaaccgatgtcgtcttcgaacctaatttagt

SEQ ID NO: 3978 - DNA, 374 bp, Arabidopsis thaliana
  Clone ID: LIB22-064-Q1-E1-F10
gatgagagcaactggtgatccatacctgcaacattgtgtggagactgcaatgttgttggctgacattggagctaattcgactgttgttgtagctggaattttacatgatactttagacgattcgtttatgagctatgattatattctcagaacttttggatcaggagttgctgatcttgtggaaggggtctctaagctgagccagttaagtaaacttgctcgggagaacaataccgcttgtaaaaccgtagaagcagatcgtttgcacactatgtttcttgcaatggcagacgccagagctgttcttataaagttagctgatcggttacacaacatgatgactctatatgctttgccaccaatgaagcggcaaa

SEQ ID NO: 3979 - DNA, 414 bp, Arabidopsis thaliana
  unsure at all n locations
  Clone ID: LIB22-063-Q1-E1-H7
agaatcaccgacgagatcacggcggcgctaaaacaggtccacctggtaacgtcacagctggtgctttaactctcttcgccatcctcggtatcccccaagccattacgtttagcattccttttgcactagcttccatattttcaaccaattccggtgccggccaaggactttccctaggtgttctgaatctagccattgtcgtccctcagatggtaatatctgtgggaggtggnccattcgacgaactattcggtggtggaaacattccagcatttgtgttaggagcgattgcggcagcggtaagtggtgtattgggcgttgacggtgttgccttcaccgcctccggatgctcctgccttcaaagctactatggggatttcattganttttagcagtgggtggtttggctctctt

SEQ ID NO: 3980 - DNA, 415 bp, Arabidopsis thaliana
  unsure at all n locations
  Clone ID: LIB22-064-Q1-E1-A1
tttgttcccaaatcatcaaaccctaattttctgttaatttcaattagcttagttcgtcgttactccagagaagtcgaaatgatgggctcagagaatgccgatggattcgaagaaactaatctcaatgcgcaaagggatgatatggagaatctcgacctaggagtagatggtggtgaccatcctctgaagataagcgatgtcaacggtgatacatcgaactctggttaccgtagcgccatgtcaacactctccaacgtccgtgacccgctctcgccgccaccgaccgttatgattccagctgattctgattcactccttgcgccatcctcctacgaagatttccgcagcagcttcagctctaagccgatnagcaagcgataactcccnacatccgagcctccgtcggtatngcaaa

SEQ ID NO: 3981 - DNA, 422 bp, Arabidopsis thaliana
  unsure at all n locations
  Clone ID: LIB22-064-Q1-E1-A11
agcaacccgggncgacccacgcgtccgcatcgttgaagaanacgaanaagataccttcctctttancttctccgatttctcaaccttcncgtctgcttgtcgtaaagaaatggngccgagtagacgggatttacagcttactccggtcaccggaggttcttcttcccagatgagtgatatggaagaagttggtcttctcgattcgtancacaangaagcgaacgccgatgatattttgactaaaatcgangaaggaagagatgtttccggtttaaggaagattcaggtcggagtcaccggtatgactgtgcngcttggtcctaattccgttgaaacaagctttgntgaacgttaatggggtcctcaaagcctcngttgcctttgttanagatcganccgatgtcgtcgtcgacccnaaattt

SEQ ID NO: 3982 - DNA, 415 bp, Arabidopsis thaliana
  unsure at all n locations
  Clone ID: LIB22-064-Q1-E1-A2
tactccaactttctctaccaatgggcctttgcaatcgctgcggctggaatcacaagtggctcgatcgctgaacggacacagttcgtggcttacctaatctattcctctttcttaaccgggtttgtttacccggtcgtctctcactggttctggtcagttgatggatgggccagcccgttccgtaccgatggagatttgcttttcagcaccggagcgatagatttcgctgggtccggtgttgttcatatggtcggaggtatcnctggactctggggtgcgctcatcgaaggtccacgacttggccggttcgataacggaggccgtgccatcgctcttcgtggccactcggcgtcacttgttgtccntgggacaatcctcctccgggtttggaatgggtacggnttttaaccccggt

SEQ ID NO: 3983 - DNA, 465 bp, Arabidopsis thaliana
  unsure at all n locations
  Clone ID: LIB22-064-Q1-E1-A3
cgttaccttccacggccggtcaagaataacgggtcganccacgcgtccgccaancaacaagttctcctttcnacccatttcgtcnccttcantttgacgttttctttanatctgttaataatcccatccatggcttggtctantcactagtggtgttacctccctgtgtggaataaaaagcaaggttttttaatcacttggattgttttaagatatggcaactttgaacccntttgatttgttggatgatgatgctgangatccaagccagctcgctgttgccatcgataanattgataagtccaagaaatctggacaggtttcgagcttgccngctaagtcagctcctaagcttccatcgaagccacttcctcctgctcaagccntgagagangcaaggagtgatgctccacgtnggtggtggaagccgttgaagatttacccgtggncgtggttggttacaaa

SEQ ID NO: 3984 - DNA, 308 bp, Arabidopsis thaliana
  unsure at all n locations
  Clone ID: LIB22-064-Q1-E1-A5
ccccgtgaangtcaaagaattcccgggncgacccacgcgtccgggagaagaaaggttttcttgttttgcaaggcactctttgatctgattttgacccgtcgtctatcagcgatttacatttcttaaattttcttagttgttgttctctcctctctctcccagctacgaacatatctctctcttcttgaccatttttaagtttaagtcatatggagtatttatttcttcactattttaatattcggctttgttgtttgtctttgatttttgtatcaatcaaatcttttcatcaaaaaaaaaaaaaaagg

SEQ ID NO: 3985 - DNA, 390 bp, Arabidopsis thaliana
  unsure at all n locations
  Clone ID: LIB22-064-Q1-E1-A6
aaactaaacattgagaatgaactcagtgtgtatctccagctgcatcaacgatgcacacgaccctcgcgtgccggttcgtcctgtacgtgcctcctacgtgaatctctataagtggccggagtccgacgccgagttcgtcaggtccgtacgtcgtggaggcggcctaccggcggcccgtgtagttgatagcatatcttgtcgacagatgtatctccgtagctacactttctctcgggaagacgacgagagcaaatcggagaaggtgtcgtctgggacgcagacgtcgtgtctagggagagttaagggaacagcgtcgtctcgacgtaagagtaaggaggaaaatggcatcatcatcgttgagagtacaaagccgcgtcgtcnttggtgaaa

SEQ ID NO: 3986 - DNA, 461 bp, Arabidopsis thaliana
  unsure at all n locations
  Clone ID: LIB22-064-Q1-E1-A8
acttttgacgcggnccaggtacnngtcanagaattcccgggncgacccacgcgtccgcccacgcgtccgcccacgcgtccgaacgcaaattgggtgttattgttccatggagatctgcacacggctttgttgtgcctccaattttggcggagcatttgctaacctttgaacttgaagcggatgtgaaaaccaacgagtttttcttcgagttcgaagtcaaccgttacgaagtggtgataaaagaatgtggagtactccaactctaagtcctccatttttttggaagactggttgggacgcacttggttgagaacttgagagaagaacaagacagtgatctattgttattgtttcttccacttacctgaatcccacctccagttcctctataacatccatggcacggcacttcttcaatgcgtttttcctaacaaccaccgtttaaaggccganaaagggac

SEQ ID NO: 3987 - DNA, 400 bp, Arabidopsis thaliana
  unsure at all n locations
  Clone ID: LIB22-064-Q1-E1-A9
gttcctttgctcaaagcttatctgagggatgcaaagaaagctacagctttaatcactgatgattccaacaattctggccgatctgcgcatcttgtggcgcgcaaagagcaatcagcacttagagcagtcttaaaatgcatagaagaatacaaactcgaggaagaattcccacccgagaatctcaagaagaggttggatcagctagagaagaccaaaaccgagaagagaaaaccagccgtgattcccgccaacaagagaacccgagcaagctacagcggtccaatgccaccagccaaagcagggcgtatcacaaacgcttacgtctcctctttcccaacgcctccaccaacattcatcaagntccaaagtcactcanctcaatacggtgtnccagcataca

SEQ ID NO: 3988 - DNA, 468 bp, Arabidopsis thaliana
  unsure at all n locations
  Clone ID: LIB22-064-Q1-E1-B1
ctgttaacttgccncggccaggtcaagaataaacgggtcganccacgcgtccggtctctctgagcaccaagaatctagggtttcttcacagtgaatctttttttttttttttgcttcctcctcaataatcgccttctcgtacttgtgtgaaagctcccttctttgtggagaaatggcaactgagaatcctattaggatatctggaagcaatgaaagatggtctaattctaggaaggtttctgttcctaatcgaagtggcagtgcgccaccgaacatggaggggtcttttctagctgtggataatctattgtcacgacagggcggctcagtttacaataacttgatgctaccgcgttacgggtttgaggagcccgtgaccactcatccttcttctaaacatagccttaaccgcataccttctccaacgatttattancctactgagtatcagttcaatagacaaaccgt

SEQ ID NO: 3989 - DNA, 379 bp, Arabidopsis thaliana
  unsure at all n locations
  Clone ID: LIB22-064-Q1-E1-B12
cctgaatcggattagatgatctgaccaaaccttcgnnnnnnnnnnnnnnnnnnnnnnnnnnnnnnnnnnnnnnnnnnnnnnnnnnnnnnnnnnnnnnnnnnnnnnnagaggcctatgcagcccccacgtaagctcaataattattgagaggatattttatatacatgctaatctagtacacatatacaatctagtaacaatannnnnnnnnnnnnnnnnnnnnnnnnnnnnnnnnnnnnnnnnnnnnnnnnnnnnnnnnnnnnnnnnnnnnnnnnnnnnnnnttaaaacanaaggnnnnnnnnnnnnnnnnnnnnnnnnnnnnnnnnnnnnnnnnnnnnnnnnnnnnnnnnnnnnnnnnnnnnnttgataaatttacan

SEQ ID NO: 3990 - DNA, 411 bp, Arabidopsis thaliana
  unsure at all n locations
  Clone ID: LIB22-064-Q1-E1-B4
ttgtttgtgaaaaaaacccacatcaaaagatctctcatttattcgtttcgtttctgctgttttgagtgtcgggttcgttttagctgtaatctttttttccggcgttcgatttgaaaaaatccggggaacaggtgatcggaatcacggctatacacgggatatcacggggtgttagctcacatgtccatattgtccgacagaagggttgtttaatcgaaactaatcctttgccgcacggaggacgtggagctctgccgtctgaaggcggcagcccttccgatctcctctttctcgccggtggcggttccagctttaacttcttttcctttaggttttaggagttanggtttgttagtgttttttccttcttcnttttttggtgctccttaancccctttttcctgggggnaa

SEQ ID NO: 3991 - DNA, 436 bp, Arabidopsis thaliana
  unsure at all n locations
  Clone ID: LIB22-064-Q1-E1-B5
aattcccgggncgacccacgcgtccgctgttccaattccaattccttctgaaatattcatcgcaattcgtatcggtaatttttccttttgatcgcattttttttttatctttgatcttccgtattaaacgtgctcgatctatatactcaatgatcttatatgtgtatgatcatgtaatttggaagttgaaatgtaaatcatctattccttggtaaattattcttcgattttttttctgatataggttaatggtaattcctgtgatttttactgatgtaatctggtgttgattgttgtgaattcttgatctatgagattatgtcttaagatttgccaaatgttaaagtttgtttgatctttgacaaaatattgtaggtttaaagtaaaaaagcaatgggaggtggtaaaagacaagcatcatgatgagcaagagaaa

SEQ ID NO: 3992 - DNA, 389 bp, Arabidopsis thaliana
  unsure at all n locations
  Clone ID: LIB22-064-Q1-E1-B7
actgacttnnnnnnnnnnnnnnnnnnnnnnnnnnnnnnnnnnnnnnnnnnnnnnnnnnnnnnnnnnnnnnnnnnnnnnggagcaaacatttcacacgtgcaaggccagtgggtggaaaaaaatactagtcaaaatggatggatggttctagaagcagggaacggaaaaagcactccaagagacaagttatgcctgccttcccattcggtacaagttctttctaacagtgcatttcaacctctgggatacccttcaactgaccacagcaagttatcgggcgaaagagcatctttcaaatgtgaagttcgtcaaaggaatcctgaggtttccgtatgataagctatgtggaatcaagtgtggcatcaaatgttccaaggcttgaatcatgg

SEQ ID NO: 3993 - DNA, 420 bp, Arabidopsis thaliana
  unsure at all n locations
  Clone ID: LIB22-063-Q1-E1-H3
cagtgaattctcgaagtggtttctgcaactcaaactcaacattctacagcaaacgaacaccaatcccactcccgccaaatccatcactcgacgtcactactttcatttcttcacaagctcatcgtggccgtatcgccttcatcgacgcttccacaggtcaaaacctcaccttcaccgagctatggcgtgccgtggaatccgtcgccgattgtctctccgagatagggattcngcaaaggccacgtcgtcctcctcctctccccaaactcaattttattccccgtcgtttgtctctccgtcatgtcactangcgcaatcatcaccaccacgaatccactcaacacttcaaacgangatcgctaaacagattaangattcaaatccaatcctcgccttcaacacatcggcagcttctcccga

SEQ ID NO: 3994 - DNA, 435 bp, Arabidopsis thaliana
  unsure at all n locations
  Clone ID: LIB22-064-Q1-E1-C10
ctttcactccgncaggcaccggtcaagaaatcccgggncgacccacgcgtccgcattttcccaaagtcttgagattttgaatctctctctttcacaagattctagttcgacccagattcattcatcaaatggactctcttcctgatgcgatccttcaatacattctttcctacctgacttctgcaagggatgtggctgcttgcaactgtgtctccaagcgatggaaagagtctacagactctgttaagagcgttgttttccacaggaattcattcgaaagcatcatggagactgatgattctgactccatcgttcggaagatgatctcttcttctcgtcgtcttgaggagcttgtggtgtataacccattcactagcagcgggctagcatcttgggatgatgcaatgttangttcaactcgaangggtaattgga

SEQ ID NO: 3995 - DNA, 414 bp, Arabidopsis thaliana
  unsure at all n locations
  Clone ID: LIB22-063-Q1-E1-E6
gacctccacaccggcattgatgtttgtgtaaagatcataaagaacaacaaagacttttttgatcaaagccttgatgagatcaaacttctcaagtatgtcaaccangcatgatcctgctgacaaatatcatctccttcgactgtatgactacttctacttccgggagcacctgttaatagtatgtgaacttctcaaggcaaacttgtatgagttccaaaagtttaatagggaatcagggggagaggtttatttcactatgccaagattgcagtcaattactatccagtgcttggaagcattgaactttctgcatggtctcggccttatacactgcgacttaaaacctgaaaacatactaatcaaaagctacagcagatgcganatcaaagttattgatctggggaagtagctgtt

SEQ ID NO: 3996 - DNA, 418 bp, Arabidopsis thaliana
  unsure at all n locations
  Clone ID: LIB22-063-Q1-E1-E7
ttatattagctgtcactcccatctttcatattccttcaccatctctctctctctcgatcttgtgaaccactacacacactaacacaatgagagagatccttcacattcaaggtggtcaatgcggtaaccagattggttccaagttctgggaagtcatctgcgacgagcacggcatcgattccaccggacgttacagtggagacactgcagatctccagcttgaacgtatcaatgtctattacaatgaagcttcaggtggaagatacgttcctcgtgctgttcttatggatcttgagcctgggtactatggataagtancagatccggancgtttggtcagatcttccgtcctgataacttttgtctttggtcagtcggtgctggtaatnatttgggctaaaagggtcattacactgan

SEQ ID NO: 3997 - DNA, 421 bp, Arabidopsis thaliana
  unsure at all n locations
  Clone ID: LIB22-063-Q1-E1-F1
acgcgtccgcacagcagcagcagcaacaatcagagcaacaatggagtctgctaaatcaaaaaatcccgatagctaccaaaatatcttgatgatgcgtcacggtgatcgcattgacaaaatcgatccactctggcttgatacagctgcgagaccttgggatcctcctctcgttcaagacggtatggttcgtgcgtttcaaactggtcaacggattcgatctcagatccaatttccgattcaccgtgtcttcgtctctccttttatccgatgtatacagactgcttccgaaagtcatcgctggctctctccgccgtcgatttcgatcctaacgctacttcgtccaaagacgtcacttcaatcgatanatataaagcttaaggtttccattgaatttggtttgangtgagatgctgaattcaat

SEQ ID NO: 3998 - DNA, 407 bp, Arabidopsis thaliana
  unsure at all n locations
  Clone ID: LIB22-063-Q1-E1-F10
acacagcggcgatggcggtgtcgcctaagattttcggtgtggaggttacgactctgaagaagattgttcctttagggctaatgttcttttgcatccttttcaattacacaatccttagggacacgaaggatgttttggtggtgacggctaaaggaagttctgctgagattataccctttttgaagacatgggtgaatcttccgatggctattgggtttatgttgctatacaccaaactttccaatgttctctccaaaaaggctctcttttacactgttattgttcctttcattgtcnactttggagcctttggtttcgtgatgtaccctctcagcaatttgattcatcctgaagctcttgctgataagcttcttgcaacactcggccccagattcanggggcctctc

SEQ ID NO: 3999 - DNA, 419 bp, Arabidopsis thaliana
  unsure at all n locations
  Clone ID: LIB22-063-Q1-E1-F2
aattttgtcttctcctattgactttttgagtttctcagaaaatccctagtatggggaagcaagaagatgcagagctcgtcatcatacctttccctttctccggacacattctcgcaacaatcgaactcgccaaacgtctcataagtcaagacaatcctcggatccacaccatcaccatcctcnattggggattaccttttantcctcaagctgacacaatcgctttcctccgatccctagtcaaaaatgagcctcgtatccgtctcgttacgttgcccgaagtccaagaccctccaccaatggaactcttgngggaatttgccgaatcntaacattcttgaatacntcaaagaaaatgggttcccatcatnaggagaaggtctctccactctcttgtcttccggcgataaatcgggttn

SEQ ID NO: 4000 - DNA, 416 bp, Arabidopsis thaliana
  unsure at all n locations
  Clone ID: LIB22-063-Q1-E1-F3
tcatagctcgacgaagtctcgatctttctattctctctttctgggtattcgtgggttttacccagatttcgaaattgaatggcggacgaactggaattgtcgccgttggttccaccgtcgccgatggtcgagccttccgagatcgatctcgaagctggaggacctggtgaacaaattcagtgccgaatctgccttgaaactgatggtagggatttcattgccccatgcaaatgcaaaggaacatcaaagtatgtacatcgtgattgcttggatcattggagagctataaaggaaggtttcgcgtttgcgcactgcacaacttgcaaggctccatattatctgagagttcacaagtgctggagatangaaatggcggacattgaaagtttcgcttcnttggtactcgagacaattta

SEQ ID NO: 4001 - DNA, 416 bp, Arabidopsis thaliana
  unsure at all n locations
  Clone ID: LIB22-063-Q1-E1-F4
cnttcgtgtggaacagccatggctatggagtttctgaggagcagtagaagaatattggaatcttctggatgcgcgatcgctttgatttttctgctcttcatccatggagctcactcattctatctcccaggtgttgctcctcaggatttcnagaagggtgatganctgaaggtgaaagtgaataaattaacttccataaagactcagcttccatactcgtattactcccttcctttttgtcgccctangcaagattgtggacagtactgagaatcttggngaantgcttcngggtgagcggattgagaatgccccatacncgtttaaaatgcnggangcacaaatgtgcaaataatctcgggcccgggtcantcntgatngccaanncaactnaangcgtttaaacgaaaaanatt

SEQ ID NO: 4002 - DNA, 419 bp, Arabidopsis thaliana
  unsure at all n locations
  Clone ID: LIB22-063-Q1-E1-F5
gttacagaagtcgacggcgagtagcttcaaccaaaaagaaacaccagtatctgtctcagcaatggaatttttccagaaagcaaaagctattcgaatgcgtaacagtcacaacaagtatctaacagcagacgacgatgaagaaaccgtaactcaaaaccgtaacggatctaccaaaaacgctcgatggaccgtcgaaccggttcgtgattctttccatgttattcgtcttaaaagctgttacggtaagtacttaaccgcttctaacgagcggttcttgctcggggctacggggaagaaagtgattcannttgaaactgagtcgggttgattcgtctgttgaagtgggaaccgcttagagaagggtctaagattaagcttangactagatctgggtanctaanttacgagggtaatgggtg

SEQ ID NO: 4003 - DNA, 413 bp, Arabidopsis thaliana
  Clone ID: LIB22-063-Q1-E1-F7
gttttagggttttcttctctgtgagcgaagatgcgtgagattcttcatattcaaggaggtcaatgcggaaaccaaatcggttccaagttttgggaagtggttaatctcgagcacgggattgatcagacgggacggtatgtaggagattccgagttacagcttgagagggttaatgtatactacaacgaggcgagttgtggaaggtacgttcctcgcgctgttctcatggatttggagcctggaaccatggacagtgtcagatctggtccgtacggtcagatctttcgaccggataacttcgtcttcggtcagtccgggtgctgggaataactgggctaaaggtcactacactgaaggtgctgagcttattgattcggtccttgatgttgttcgcaaacaggctgagaactggt

SEQ ID NO: 4004 - DNA, 416 bp, Arabidopsis thaliana
  unsure at all n locations
  Clone ID: LIB22-063-Q1-E1-G10
acgcgtccgcatcaagcaaagtaacaaattccataaacacaattagctaaaagaaagaaacaatcatgaaggccaccatatccatcactaccatctttctcgtggtcgctttggccgcaccctccctagctcgtcctgacaaccatgtcgaggactctgtaggccgtctacttcgtcctggtcaaacgtancacatcgtacntgcgaatcccgagacaggaggaggtattttctcgaacagtgaagaaatctgtcntcgtganatcttccagtcanacaatccgcntganttgggcgnanccatcangnttangtcngagttatggtttgttaacgaatatgantagtatcnccancgagtttgaggctccgnaactggtttnttgtgtccgggaggaatccancggggtgggtga

SEQ ID NO: 4005 - DNA, 400 bp, Arabidopsis thaliana
  unsure at all n locations
  Clone ID: LIB22-063-Q1-E1-G11
aaagtcgtacaacaactacaacgaagaagaagagtaaagaaaatggtcgtcgaggagtcatcatgcgtttacaagaacggagacgcgccagtggaggcgcgtgtgaaggaccttctctctcgcatgactttgccggagaagatcggtcagatgactcanatcgaacgcagagtcgcttctccctccgcctttacagatttcttcatcggaagtgtactaaacgctggangtantgtaccgttcgaggacgctaagtcatcggattgggctgatatgattgatgggttttcagcgatcagcgttagcgtcgcgtttggggaattccannttatctatggcactgaccctgtccacggnaacaantantgtctacggcgccactgtcttcccgtcaanaaag

SEQ ID NO: 4006 - DNA, 402 bp, Arabidopsis thaliana
  unsure at all n locations
  Clone ID: LIB22-063-Q1-E1-G12
tctagcaaaacanttctctcttttgtcntgaagataagtttcacaaaaaggtctgcttcgcctcttctacgacgttgcanaaactaagaagagatgggtcttctctccaacagaatcgatagatcgagtttgaaacctggagatcatatctactcctggaggactgcttanatctatgcccatcacggcatctatgttggagatgatagagtcatccatttcacgnanacgaggccaagaagttggaaccgggactgttctagatctcatactagtcagctcaggtcnatccngaaaccacacccactgtccaacctgtgttccacctaacgaaggtcacggtgttgtttcctcatgccttaantgtttccnanccggtggggtcctggtancggtttgggt

SEQ ID NO: 4007 - DNA, 418 bp, Arabidopsis thaliana
  unsure at all n locations
  Clone ID: LIB22-063-Q1-E1-G6
aaacaatggcggaatcttcagagcctccggttgttctccttcaccgaccaccgtctctaactttcatggacgagattctgactcgtgaattccgtactctcatcaccgacacttcctcatcggaatcactcccgagcttcttcccccgtcacgcctcctccgccagagccttcgttatcagcggcagacttccggtaaccgatgaactcctttctcatctcccttctctccagattctcgtctgcactagcgtcggcatcgatcacatcgatctcgccgcatgcaagcgtcncggnatcgttatcaccaaacgctggcaacgcgttttccgatgacgttgctgatttgtgccgtcggtttgcttaataagcgttctccgtcgtattcctgccgccgattcgttaacgtccgggtccgg

SEQ ID NO: 4008 - DNA, 409 bp, Arabidopsis thaliana
  unsure at all n locations
  Clone ID: LIB22-063-Q1-E1-G9
ctacangtganccctatgctaangttggtgactctgctcntgcttttgattctgancgaagctgctaagtcntttgctgagcgtcatggttgggattataaggtcaagaancccaacacancattattgaaggtcaagtcttactcngacaacttcaagtggaaaggcaatcctcaaccanaaaactgatgttacaccttcttccaattcttctcgancaaaagaagaaacctcanttgatattaattctcatgtttctttgttantttagcatctgtgagctttttggttgaaaagaaccattatccatgggctatgtttacttattacaataatatgatgatgatgatnaagcanactcctttganatttaagancaanaaataaagggcgggcgctctaanaggat

SEQ ID NO: 4009 - DNA, 408 bp, Arabidopsis thaliana
  unsure at all n locations
  Clone ID: LIB22-063-Q1-E1-H10
acgcgtgggcggacgcgtgggcggacgcgtgggcggacgcgtgggcggacgcgtgggctanaacgctctttctccgtaggaaaggggaagcaaataaattatcgaagcccactggtttcggagctgatcggtctctatttctctcttcatacatatctcaagcagataaagttgatcggatantanaatgggaggaggatttagagttttgcatttggtgaggccattcttggcttttctgcctgaggttcagagtgctgataggaaggttccattcagagagaaggttatctacactgtcatctctctcttcatctttcttgtctgcagtcagcttcctctttatggaatccattccaccaccggtgcggnttcattcgattggatgcctgtcattcntgcgtccaa

SEQ ID NO: 4010 - DNA, 446 bp, Arabidopsis thaliana
  unsure at all n locations
  Clone ID: LIB22-063-Q1-E1-E5
tttncccgccaggtaccgagtccaagaattcccgggatcnancntcntcatcnttgtttcagcttctcctttgaaactagattatctccgttaatggcgcctcagatctaaccttgggagttatatatatanacttgttcaactcttcttcgaacgctgtccaacttcttcctctggttcgatcatcgagatctcgaggttatttggccgcaatgcagaagcgaatagccttgtcgtttccagaagaggtactanagcatgtgttctcgtttattcaagctggataaggataggaactcagtctctctggtgtgcaagtcatggtacgagatcgagcggtggtgcaggaggaaagtcttcancgggaactgctacgccntgagtccagcgacggtgattangagggtcccnganangtgaaattccgttggagcttaanggaaaac

SEQ ID NO: 4011 - DNA, 487 bp, Arabidopsis thaliana
  unsure at all n locations
  Clone ID: LIB22-061-Q1-E2-G2
ttgcncggcccggtccagaattaacgggtcgacccacgcgtccgtctttccacaacattcatacgcaactcccttaaatcttgaaacgaccaatttcttcaaaacaatagtttgtttgcgatggcgacagaacaagaagctgaagttggaacagagacatcctctgtttccggaaggtttttgaggaacagagatttatatctcttcttgccttttctcttaggcttctctgatcaagaatcatcaaacggagatgatgatgatgttgcttcatcgcgtgagagaatcattttagtcaacccttttacacaaggaatgattgtgctcgaaggctcatcaggaatgaatcctctgcttccgtagcttactggagtcacgtgaggaaaggtcgtcctcctgcgtccaaggcttccatccgatgccaatgccgatcgttggagaattgatggctgtgnangganaatggtgtgntctgttttggagggat

SEQ ID NO: 4012 - DNA, 440 bp, Arabidopsis thaliana
  unsure at all n locations
  Clone ID: LIB22-061-Q1-E2-G7
acgcgtccgatcaaatcccagctttcttccaagtgatccttcactctctatactgcgatttaccgttcttctgactcttgttgcgaattcggatcggctgacgcagctccgattgcacaacaatggcttctcgtatcatcaatcattccaaaaagttgaaacatgtttccgctttactgcggcgtgaccatgctgtggcagtccgctgtttctccaacagtacccacccctctctcgttggaagagaagatatcttcaaggcccgcctgaattattcctctgtagagagaatttcaaaatgtggtactggcaatgtaacaatgcttagtggtatttcaacaacgagcacaaaanctaancagcccaatggcaggaccaaaactatttaaaggaatttataagctcccaagatgcgatcagtgagaggattttcatccagt

SEQ ID NO: 4013 - DNA, 421 bp, Arabidopsis thaliana
  unsure at all n locations
  Clone ID: LIB22-061-Q1-E2-G9
aactcgaaaacgaagaaaaatggcgagctccgatgctctcttgccaatctccgccagagaagaagaaccattatgtccttacacgagattaccaatggccgacccgaatcaagaaacccatggcccccggagaagaagaccctttaaaggtctcctcgccgtctcatttggtctcttgttcatcgccttttacgtcgctctcatcgccacacacgacggatctagatccaacgacgaagggatcgatgaaacagagacgataacgtcacgtgcacgtcttgctggtgtgtcngagaaacgtaacgatgggttatggaaactttccggtgatcggaacacgccggcgtttgaatggaacaatantatgttgtcgtgggaacgaacggngtttcantttcagcctgagcaaaattggntgaac

SEQ ID NO: 4014 - DNA, 417 bp, Arabidopsis thaliana
  unsure at all n locations
  Clone ID: LIB22-061-Q1-E2-H8
acatgttccttcttcttcttccttcatcatccccaaacacacacaaactaaaaaaaaggcaaaaccctagatccaagatcagacctaatctaatcgaaactcatagctgaaaaatgaagagagatcatcaccaattccaaggtcgattgtccaaccacgggacttcttcttcatcatcatcaatctctaaagataagatgatgatggtgaaaaaagaagaagacggtggaggtaacatggacgacgagcttctcgctgttttaggttacaaagttaggtcatcggagatggcggaggttgctttgaaactcgaacaattagagacgatgatgagtaatgttcaagaagatggtttatcgcatctcgcgacgggatactgttcattataatccngtcgggagctttaagtcttggcnt

SEQ ID NO: 4015 - DNA, 395 bp, Arabidopsis thaliana
  Clone ID: LIB22-062-Q1-E1-A11
actacagagacagagaagatggacatggcaatgaagtcagtttctaacttcgcaatctttttaatcctctttttggtcacctctggtaaattttaactccgtacttctcacatacttattaaaatttgtgattcatacgatccatagaggatttaattatttctgttggtgattgctgcaagtttctttatatgtgaattttatttgccaaaactaatttatttgtatatacatgatatgtgagcagaaatatctgagatagaagcgaaagataaggaatgtctaaaaggatacattgatgcgcctttaagctattgtatggctaggatttatccgtcgttgtgttatcgaaattgtcgtttttacaagggcgcgaaaggtgggaaaatgcgacg

SEQ ID NO: 4016 - DNA, 423 bp, Arabidopsis thaliana
  unsure at all n locations
  Clone ID: LIB22-062-Q1-E1-A4
aacttgattattttttctgatctgagaaaaaaaatggcgaatggagctaatagagtggatctcgacgggaaaccgatacaaccgttgacaatatgcatgatcggcgccggaggtttcatcggttcacatctctgtgaaaagctcttgaccgagacgccacataaggtgcttgcgctcgatgtttacaacgataagatcaaacacttgcttgagcctgataccgttgaatggagtggtcggatccagtttcatcgtatcaatattaagcatgattcgagacttgaaggtcttgttaagatggcggntctgattataaatcttgctgcgatctgtactccaagctgattacaatacacgtcctcttgatactatctacagcaatttcattgatgcgcttccagttgtgaaatactgttctgagaa

SEQ ID NO: 4017 - DNA, 437 bp, Arabidopsis thaliana
  Clone ID: LIB22-062-Q1-E1-A5
acgcgtccggaagcatattactttagagaacaatgagaacaaacctgttaccaacagcagagacacacaagaggttaagttggagcaaggtttgaagattgtgaaaattttcaaggagcatagcagcaagacttgcattttggatgatttctcattctacgaggttcgacagaagactatcttggagaagaaagccaagcaaacccagaaacaggtaagcgaggagaaggtaaccgatgaaaagaaggaatctgcaactgcagagtcagcgagcaaggaatctcctgcagctgttcaaacgtccagtgatgttaaggttgctgagaatgggtctgttgctaaaccagtcacaggcgatgtggtggcaaatggttgctaactaagaggatggtgtcgctcacggcatgggcataaaactgactagagatgaagatatg

SEQ ID NO: 4018 - DNA, 432 bp, Arabidopsis thaliana
  unsure at all n locations
  Clone ID: LIB22-062-Q1-E1-A6
acgcgtccgcattgaacaaaagtattcttccgattagtttaccaaatatattatttggttcgtttgaaatctcttatatcacggtttaataacgccgtggtattcactgttacgactagctcgccggagaagaagaagaatgaaggaggagaagaaagacgacggagtaatggctgaggagaagccttacatgttctggatttggactttggcttctacgattttccgattattcctgatcttttccccggcaaatatcaacctatcttcccgtccggaggtctccacccctcacaccagccttcgccgccttgctgaaggttactggttgaagcagtcatcactgtcgccatacgcaggatcaatgtatcatggctctccattgctactctccattcctcggtcntctcacagttcagaggatcgangggc

SEQ ID NO: 4019 - DNA, 316 bp, Arabidopsis thaliana
  unsure at all n locations
  Clone ID: LIB22-062-Q1-E1-A8
ccgaacaatcgttttacatggttggaggtatcgatgaggtggttgcaaaggcagagaagatcgctaaagagtcagcagcttaagagattgattcagatctttcatgcttaatacttctcttttttttcctgacaataacgaaaaaaaaaaaccaatgcgtgcgactctccgaccaaacggaatctgagttccgtaattatagtttcttttggttcaaattccatgagagctggcaagatgatactgaacagatccattcactgttaatcaaatttttggttgtttnnnnnnnnnnnnnnnnnnnnnnnnnnnnngg

SEQ ID NO: 4020 - DNA, 395 bp, Arabidopsis thaliana
  unsure at all n locations
  Clone ID: LIB22-062-Q1-E1-A9
tctactgctcatgttgacctgatcgtaagatcatccaatgaggatttgaagatctggccgcataagtttgagtatagactgagagtagcattgggacatgatggagatttgacgttaacatctcgtgttaagaatactgatacaaaaccatttaacttcacatttgctcttcacccctacttcgctgtttccaatatcagtgaaatccatgtcgaaggattacacaacttggattaccttgaccaacanaagaacagaacacgtttcactgatcatgagaaggttataactttcaatgctcaacttgacaggttgtacctaagcactccagatcaactaagaatcgtggaccataagaaaaagaagactattgttgtacacaaggagggacaant

SEQ ID NO: 4021 - DNA, 410 bp, Arabidopsis thaliana
  unsure at all n locations
  Clone ID: LIB22-062-Q1-E1-B3
atatctacaatctctagaaaatggcgatcacttacttgcttcctctgtttctttctcttatcatcacctcctctgtttcagctaatttccaaagagacgttgagatcacttggggtgatggtcgtggacagatcaagaacaatggagagcttctcactttatctctagataaatcctctggttctggattccaatccaaaaacgagtacttgtttggtaaagtctccatgcaaatgaagcttgtccctggaaactccgcaggaacagtcacaacactttacttgaaatcacctggaanaggaagggacgatatagatttcgagtttttanggaattcaagtggagaaccttacacacttcacacaaatgtctacacacaaggcanaggagacaaaggaacaacaantcaa

SEQ ID NO: 4022 - DNA, 434 bp, Arabidopsis thaliana
  unsure at all n locations
  Clone ID: LIB22-062-Q1-E1-B5
acgcgtccgcaacggcgaaggtattggaaataagacagaagctgttagctctgtttctccatggtgtcaagatcttgtgctaattttctagacttatcatcttgggaccttttagattttcctcaaactccacgaactcttccacgcgtcatgactgttccgggaatcatcaccgacgtagacggtgatacaaccttcgaagtaacttctacctccggtggttcacgtgagaggaagatcattgtagctaacatgttaccactccaatctaaaagagatgcagaaactggtaaatggtgttttaactgggacgaagactctctccagttacaacttagagatgggttctcttcagaaacagagtttctctacgttggatcacttaacgtagacatcgaaactaacgaacaagaagaagtttcacangaagcttt

SEQ ID NO: 4023 - DNA, 432 bp, Arabidopsis thaliana
  Clone ID: LIB22-062-Q1-E1-B6
acgcgtccggcaagctcatcactgaaaagagcttaaaccagagagatctgataagagaaattttagagtctctctgcttcaacaagatctacatcgaccaggagattagaaagaatcatgggttctaagcataacccaccagggaataacagatcgagaagtacactatctctactcgttgtggttggtttatgttgtttcttctatcttcttggagcatggcaaaagagtgggtttggtaaaggagatagcatagctatggagattacaaagcaagcgcagtgtactgacattgtcactgatcttgattttgaacctcatcacaacacagtgaagatcccacataaagctgattccaaacctgtttctttcaaaccggtgtgatgtgaagctcaaggattacacgccttgtcaagagcaagaccgagctat

SEQ ID NO: 4024 - DNA, 477 bp, Arabidopsis thaliana
  Clone ID: LIB22-062-Q1-E1-B7
tgttacgcctgcaggtaccggtccagaattcccgggtcgacccacgcgtccggtttatctctccgacgtaaccatggatagcgatactctctcaggattattggaaaacgtcgccaaaaaattccccgatcgccgagctctctccgtttctggaaaattcaatctcactcacgcgcgtcttcacgatctaatcgaacgcgccgcttcacgccttgtctccgacgctggaatcaaacccggcgatgtcgttgctctcaccttccctaacaccgtcgagtttgttataatgtttttagcggtgataagagctagagccacggcggcgccgttgaacgcagcgtacacggcggaggaatttgagttttacctctccgattcagattcaaagctattgttaacctctaaagaaggaaacgcaccggctcaagaagcagcttcaaagctgaaaatctctcacgtcaccgctacgctgcttga

SEQ ID NO: 4025 - DNA, 434 bp, Arabidopsis thaliana
  Clone ID: LIB22-061-Q1-E2-G11
acgcgtccggagaagccggtttcagatttgatcaattcgaagaattgtggctttcgttcgttgggtgaatccttgcttcgtcctttttgatagattgctactgtgttttcgaggaagttgtgtggagatagttagagagatttatgagatttcaagaggggttattataacgcacgcatggtgttcgacggaaagccgcagagaagttttgttgctatccgatttgactgagactcaaagtttgaaaattgttacttgggtattgagaaagctaaccttgggcaagttccgtatatgagttgggagtaaaacgacggtgatacatttgactgtttttcaactaaactaactttgaaatggtgagccttgtctgtttcgaataagagatacacttaacatacaccaaagtggggaagttaagtcaacctagagaa

SEQ ID NO: 4026 - DNA, 368 bp, Arabidopsis thaliana
  unsure at all n locations
  Clone ID: LIB22-062-Q1-E1-B9
aaccagaacctgaaaagtcacctgcttgggttgagtggagagagacctctgagtccaccgcaccaccttcttccaacccagaggagactaccatattgtccannnnnnnnnnnnnnnnnnnnnnnnnnnnnnnnnnnnnnnnnnnnnnnnnnnnnnncaaaagtgcagtgaaaacaccaggtgtacctggcgatgaaaccacagagaagttaccagatgagagtggtgttgaacccactgagaactcaccaaangctagtggcattgaacccacagagagctcaccaaaagcgagtgggagctgaagtaactggaaacttgagagattccgatcctgctgaatctcatgcggatgctaaaagctcnga

SEQ ID NO: 4027 - DNA, 410 bp, Arabidopsis thaliana
  unsure at all n locations
  Clone ID: LIB22-061-Q1-E2-E11
aagccatgacgcgtactttacggatgatatgcctcaagtatgtgaattcgtcacccatctttggaaaatttagagtgttttatttatctcttatttccgggttgattttggtgccagataaagcctttgaatcactctcatgatttaccagcgccggatcaaaacggagagacttatatatgtagctgcatgatttacttgcgacccacgaatggtgcaaagcttctaatgaagaaatggagtgaggaacttcagtcccaagcttggtctgagtcaatccgttttaaagccaaatgatcagcccngctttnaaccttggaacttaanaaancagccancaangtnanttttggggnctncaacgttcaattnctccaaatcnanngcatnaaatcctcctaagnaacctt

SEQ ID NO: 4028 - DNA, 434 bp, Arabidopsis thaliana
  unsure at all n locations
  Clone ID: LIB22-061-Q1-E2-E2
tcgtcggaaaaaccttggccgtgatgggtttcgggaaagttgggacggaggtggcgagaagagccaaaggtctaggcatgaccgttatctcccacgacccttacgcgccagctgacanagccagagctctcggtgtcgatcttgtttcattcgatcaagctatctccaccgccgatttcgtctccctgcacatgcctttaactccggccaccaaaaaggtcttcaacgacgaaactttctctaagatgaagaaaggtgtgcgtctcattaatgtcgctagaggtggcgtcatcgacnaggatgcactcgttagagctctcgatgccggaatcgttgctcaggcagcattaagatgtgttctgtgaggaaccaccatcganaagatagcaagactaantcagcatgaanaatgttactgtgaacacctcatcntg

SEQ ID NO: 4029 - DNA, 421 bp, Arabidopsis thaliana
  unsure at all n locations
  Clone ID: LIB22-061-Q1-E2-E5
agctaaggtcttcttcttatgaccttgatgtgaagaaaccacaagatgttgttcttcctgggagtttgagtttgttgggtgaagcttatgatcgatgcggtgaagtttgcgctgaatatgctaagacgttttatcttggaactttgcttatgacacccgaaaggcgaaaggcgatttgggcaatctacgtttggtgtagaagaactgatgaacttgtggatgggccaaatgcttcacatataactcccatggntttagatagatgggaagcaangttagaanatcttttccgtggtcgtcctttcgatatgcttgatgctgctctcgctgatacanttgctagatacccggtcgatattcagccanttcgagacatgatcnanngaatcagaanggacttgangaaaacgagataccagga

SEQ ID NO: 4030 - DNA, 439 bp, Arabidopsis thaliana
  Clone ID: LIB22-061-Q1-E2-E6
acgcgtccggttttggaagctattacgacaaagaagtgcgaagatcagttccacttggaatcactagaaactcttggtgactcttttctgaaatatgctgtttgtcagcaactattccaacactgtcatactcaccatgagggtcttcttagcacgaagaaagatggaatgatttcaaatgtcatgctctgccaatttggatgtcagcagaaacttcagggatttatccgcgatgagtgttttgaacccaaaggttggatggttccaggtcaatcatctgcagcttattcacttgtaaacgatactctacccgagtctagaaacatatacgttgctaagtacgaggaatctgaaacgcaagagtgtggccgatgttgtagaatcattaattggagcatatctcaacgagggacgtgaacttgcagctttgatgttcatg

SEQ ID NO: 4031 - DNA, 434 bp, Arabidopsis thaliana
  Clone ID: LIB22-061-Q1-E2-E7
acgcgtccggaaccacgttcatgacctcagttgtggcagctatggtcatccacctcatcctccgagcctccggtttctcagctagtcaagtagacaccattccaggcatcctcctcctgatcttcatatgcgtcttgatatgcccatttaacacattctaccgtccaacaaggttctgcttcatccgcatcttgcggaagattgtttgctcaccgttctacaaggttttgatggttgatttcttcatgggcgatcaacttactagccagattccattgctgagacaccttgagacaaccgggtgttacttcttggctcaaagcttcaaaactcacgaatacaatacctgcaaaaacggaagatactatagagaatttgcttacttgatttctttcttaccctacttctggcgtgccatgcaatgtgtaaggaga

SEQ ID NO: 4032 - DNA, 439 bp, Arabidopsis thaliana
  Clone ID: LIB22-061-Q1-E2-E8
acgcgtccgctaaatccatggagtgatgatgatgatagatagattgaatccaaacacaaaccggatccgagattaaaaacaatccggattgtttatatttactttagatcggagaaagatgccgccggcgaccggagatatcgatcgtcagatcgagcagcttatggagtgtaaagcgttatctgaaacggaggtgaagatgttgtgtgagcacgcaaagacgattcttgtggaagagtataatgttcaaccggttaaatgtccggttaccgtctgcggtgatatccacggccaattttacgatctaatcgagctttttcgtatcggtggttcttctcctgatactaattatcttttcatgggtgattatgttgatcgagggtattattctgtggagacagtctcacttttggtagcactgaaaagttcgttacagaga

SEQ ID NO: 4033 - DNA, 484 bp, Arabidopsis thaliana
  unsure at all n locations
  Clone ID: LIB22-061-Q1-E2-E9
tgttacgcctgccggtaccgcgtccganaattcccgggtcgacccacgcgtccgcaaagcccaaacaatcttagtaataatcccaaaaaccagaaaaaaaggagctttgcttttgtaggaattaatggattcagtgaactccttcaaaggatatggaaaagtagacgaagctcaagatttagcattgaagaaaaagacaagaaaacgtctacttctactatccatctccgtcgtagttctcatcgccgtaataatcgccgccgtagtcgccaccgtcgttcacaagaacaaaaacgaagtcaacaccgaagtccacctcccgagttaacaacatccacttcactcaaagccatttgcagtgtaactcgtttccctgaatcctgcatttcaagtancccaaagcttccatcttccaacacaacaagatncagagactcnattcangctctcaattgaaaagtaanccatcngatgaacttgattc

SEQ ID NO: 4034 - DNA, 401 bp, Arabidopsis thaliana
  unsure at all n locations
  Clone ID: LIB22-061-Q1-E2-F1
gttgctacgaatggatattccacatgaagcanaagctggagcttgggggattctccctggttttggtcgtcaccatcatccctccagtgatgctactttgttctccagttctttacctgttttcccccgtggaaaactgcaattgagtgataacagagatggtttctcactgatagacgatacggntgtttctcgcacaaacaagtttaacgaaagtgctgatgactttgaatctcattccattggaaacctgctccctgatgaagangatcttttgacaggnatgatggatcatcttgacctgggggaagttaccaaatgctgangattatgatccgttttgggtagtggaggagngaatggaacttgaccctnantttcgaaaccaactntcagtatga

SEQ ID NO: 4035 - DNA, 422 bp, Arabidopsis thaliana
  unsure at all n locations
  Clone ID: LIB22-061-Q1-E2-F10
tgaacttcttaaccttgtcgagatgaaccatcaactagcctgtgatcccgaaaccggtgggtgtgggaaactcaaccatatccaccatattctcactactccaccacatgtatttactacagttttagggtggcaaaacacatgtgagactgtanaagacatagcagctactcttgcagccttgaataccgagatagacatcagcatcatgtaccgtggtctgggaccctaagagcacatatagcttagtttctgtggtttgttattatggacagcattatcattgttttgcacatagtcgtgagcacgatcagtggatcatgtacgatgacaaaaccgtcaaggtgatcggtagctggatngatgttctttcaatgtgtgaaanganggacacttgcagccacaggttcttctccacgaaa

SEQ ID NO: 4036 - DNA, 425 bp, Arabidopsis thaliana
  unsure at all n locations
  Clone ID: LIB22-061-Q1-E2-F11
caatacaaaacacaactttcatatataacaaaaaaagttatagaaatggccaaagacgtggaaggacctgagggatttcagacaagagactacgaagatccgccaccaantccgtttttcgatgcggacgagcttaccaagtggtctttatacagagccgtcattgccgagttcgtagccactctcctcttcttgtacatcaccgttttaactgtcatcggttacaagattcagtccgacacaaaagccggtggagttgactgcggcngcgtcggaatccttggcantcgcgttggggcttttgggtgggcatgatcttcaaccttgtctactgcancgcccggtatcccaanggnggtcacaatnaacccctggcggtnaacgtttggggtttggtccntanccccgggaaaggtaatccccng

SEQ ID NO: 4037 - DNA, 427 bp, Arabidopsis thaliana
  unsure at all n locations
  Clone ID: LIB22-061-Q1-E2-F12
acgcgtccgcgacgggaatctaatcatcaaaaaccggacgattctaaccggtgtaccagataatgtcatcacgacgtcagcatcggaagctggaccggtagaaggagtcttcgtcggagctgtatttaacaaggaagagagtaaacacatcgtaccgatcggtacgcttcgcaattcccggtttatgtcttgtttccggtttaagctctggtggatggcccaagagaatgggagaaatgggccgagatattccctacgagacgcagttcttattgggcgaagagcaacgatgggtcccaccttgagtctgacggagctaacgggcgtcnagtgtnaccagaaagtttacaccgtttttcttgccggtaatcngaanggatctttccgttcggtgtctccaagggnaacgttaacgattgangttgag

SEQ ID NO: 4038 - DNA, 432 bp, Arabidopsis thaliana
  unsure at all n locations
  Clone ID: LIB22-061-Q1-E2-F4
tcnctgctcccaaattcagaaaaaaaggaacgatttttatttccggtgaatgagaattttctctcgaatttgatcgatcacatatttcatctgtgtgttttcattttgaggatgccagcaacggaatatcaaagatcattcgggaggtcttttctgaatttacggcgagacacggcggtgaactcggttgagtcaacgacggttacccccgagttgactcagatggaagcagagcttgtttcgtttcaagagaaaagttgctgagaggtttatcgatctcaatgcgtctagttgtgaagatctactgtctctcgaaatgggttgggaagcttcttgattccgtttctancttgtcaagaagagttccgttccanagtcatcaatcatcgttcgatgaatacnaaacaccgatggattgaagtggtttcaaaa

SEQ ID NO: 4039 - DNA, 417 bp, Arabidopsis thaliana
  unsure at all n locations
  Clone ID: LIB22-061-Q1-E2-G1
ggattgtgnnnnnnnnnnnnnnnnnnnnnnnnnnnnnnnnnnnnnnnnnnnnnnnnnnnnnnnnnnnnnnnnnnnnngctaacggcaggagagagagagacccagaaatccgntccctcctctccttggattatcggagtcagcgattcatcgtcgctgataaagcttctacctttctcttcgatttttgttgtgagattcgattcgatcttaaggcggattacatcgaggtatgcagcanggcgatcaaacggttctgagcttgagacctgggtggcggtcgaggaaacagactatttggttcctcntcttcttcntcgtcnctcncttttggntctctttcantcttcgggatnnanntctccttcgtcctcatgggtggtgctcccngcgtcctctttnccccgtcaaggggtg

SEQ ID NO: 4040 - DNA, 487 bp, Arabidopsis thaliana
  unsure at all n locations
  Clone ID: LIB22-061-Q1-E2-G10
acacctgncggtacggctccaaaattcccaaggtcgacccacgcgtccgnnnnnnnnnnnnnnnnnnnnnnnnnnnnnnnnnnnnnnnnnnnnnnnnnnnnnnnnnnnnnnnnaagaccgaagagagtacaggaagtgacgattgaattggnaaaagttacnaatttgacagggatgaccaagagtaaagggatanggattcccggagagaggacangaatgcgaatgccggtgactgcgacgcatttggcnaatgtattcattgagcttgatgataatttcttgaaagcttctnaaagtgctcatgatgtttctaanatgcttgaagctactaggctccattancattctaattttgcagataaccgaggacatattgatcactcctgctaagagtgatncgtgtaattacatgggaataggattactttagagggaaataccaaatgcctggattgatggggaaaaagatgatgtttgatttttg

SEQ ID NO: 4041 - DNA, 427 bp, Arabidopsis thaliana
  unsure at all n locations
  Clone ID: LIB22-061-Q1-E2-E10
tatggtgtatgtgcgatgccgtcctcacctcaaagagtttatggagagagtgtcccgactttttgagatcattatatttacagctagccaaagtatttatgctgagcaacttctgaacgtgcttgaccctaagagaaagctctttcgccatagagtgtaccgtgactcgtgtgttttctttgatggtaactacctcaaggatttgtcagtcctcgggcgtgatttatctcgtgttatcattgttgataactccccacangcatttggtttccaagtggaaaatggagtgccaatagagagctgggttaatgacccatcangataaagaactcccttcacttgcctgncaatttcctngaaaagcctaantggngtttaagaangtaaggccaatgattgccaaagnaantcaatctaaggggagaaa

SEQ ID NO: 4042 - DNA, 439 bp, Arabidopsis thaliana
  unsure at all n locations
  Clone ID: LIB22-061-Q1-E2-B1
agaaaaatgttctgttcctcgcagctctcacagccaatgaatggcctcaaagacatagttgagacgagaaattttaaggcttggctcttagatcagtatggagttcttcatgatggcaaaaaaccttaccccggtgctatctcaacattgaaaaatcttgcaacagcgggtgccaaaattgtgatcattagtaattcttctagacgtgcttcaactacaatggaaaagttgaaaggccttggctttgatccttctttcttcaccggagctataactagtgggtgaactaactcatcaatctttgcagaggaganatgatccttgggtttgctgcactgggaaagaggtgcaantcacattacttggnaatgagccgangnagcaatccccntnggngggtccaaaatnctaanatgtttgttggagaaangttggaaaa

SEQ ID NO: 4043 - DNA, 453 bp, Arabidopsis thaliana
  unsure at all n locations
  Clone ID: LIB22-061-Q1-E2-B6
acgcgtccgggaaaaagccctgactagtgaagaatccgatgtcagcgactgctctctcgagattaaacccagtttctcaatttgggtttcaaagaatcgttgctgggaaaagtaagagcttcttctccaattcgggtcaaaggagattgttttctgatagttctcggtttcgtcaagccatggctgcttctggttctttgccagtgtttggagacgcttgtttggatgatttggttactacttgttcanatggcttagacntcacgaananncnttcnaggtgggtgggnaggcggcacgagttaggttgtccngtaggcgagggatggngcttgggaaagagagggagngaatggatgaaggagaccggttgggtttgtcactattctgttgttgatccgctagaaaaagagtcgtgcactcctttgggacattgtctaaagagtgttcata

SEQ ID NO: 4044 - DNA, 396 bp, Arabidopsis thaliana
  unsure at all n locations
  Clone ID: LIB22-061-Q1-E2-B9
ctctgttgctctacctgttcttttctctctgttcattctcttttctttagcttaattcagcaaaaaatttatctttgtttctctcttttgtttctttcctctgcaaagtaaagttatgagagcttaataatgtttgtctcatcttcaagcttcagatctgattccttgtttctacaagtaattgtcnctttctttttcgattaaccaccatttctgtgaagaaaactttttgccttgcttcaagattcgaagtgaggaaaaattttagctgaaaatgctggaaattggaaagtcccaatgntctgtttttcccgtacgaanacnanctggnaaaancctccccgtgagcttcnagaaaatatgggttgaaaattggggagantgagactgagaaag

SEQ ID NO: 4045 - DNA, 408 bp, Arabidopsis thaliana
  unsure at all n locations
  Clone ID: LIB22-061-Q1-E2-C10
gacgcgtgggcggacgcgtgggcacacaaccaaaaaaaccaaccttttttttccacctaaatctttgaatatcacaatatttactatttacaatggcgccacaagaacaagcagtttctcaggtgatggagaaacagagcaacaacaacaacagtgacgtcattttccgatcaaagttaccggatatttacatcccgaaccacctatctctccacgactacatcttccaaaacatctccgaattcgccactaagccttgcctaatcaacggaccaaccggccacgtgtacacttactccggacgtccacgtcatcctcccgccaaatcgccgccaattttcacaaactcgggcgttnaacaaaaacgacgtcgtcaatgctcctcctcccaaactgtccccgaaatcg

SEQ ID NO: 4046 - DNA, 443 bp, Arabidopsis thaliana
  unsure at all n locations
  Clone ID: LIB22-061-Q1-E2-C7
acgcgtccggatttcgaaaccctagtcgatttcgagatccaactaactctgctccttatctcagcttgttgaatttgcgaagtatgggagacgctagagacaacgaagcctacgaggaggagctcttggactatgaagaagaagacgagaaggtcccagattctggaaacaaagttaacggcgaagctgtgaaaaaagggtacgtgggaatacacagttctggattcagagacttccttttgaaaccggagcttctcagagctattgttgactcaggatttgaacatccatctgaagtgcaacacgaatgtatccctcaagctatcttgggtatggatgttatctggcaaagcaaagtctggtntgggggaaagactgctgtgtttgtcncggtctactcntacnacaagattggnaccatctcctgggccagggntttctgc

SEQ ID NO: 4047 - DNA, 406 bp, Arabidopsis thaliana
  unsure at all n locations
  Clone ID: LIB22-061-Q1-E2-D1
tgatcttgttgttcatcagttgaagtgctacattggaacaccgctgagtgcaacatatttgctttgtcggggccgcgttgtggcaaactgccaaccgattatcggacttttcccgccctgtgtgtgcagctgtgcctcattaaaccttaggcgcactgtctgtggtcactgtcaagcgttcgcgtggtgtcctgggtcgaccaaattttcgattttctctcggcgttgtgctgtttgatctgagagcgagcgtcgcgagccatgcaggcggcgccgccttctgacagataccacctggtttatatttgcttcctcttacttggtctcggcttcctcctcccatggaacgcggcatnaagggncgtccgattaccttcaangccacgttcccaaggcgagccgntcg

SEQ ID NO: 4048 - DNA, 422 bp, Arabidopsis thaliana
  unsure at all n locations
  Clone ID: LIB22-061-Q1-E2-D10
agtgaaaggttagattttttattccgatcttggtcagtctcctccaatcgtgatttctcttctggatccaagctgatgagctctacgtcttcctcccagatggttcagctcgtagctgacaagcatgtacgttacattctgatggcagaaaagaagaaagagagttttgagtctgtggtgatggatcatctaagaatgaatggtgcatactggggactcaccactctcgacttacttgacaagctcggctgtgtttctgaagaggaaagtcatttcatggctcatgacttgccagcatgaatctggtggctttgccggtaacactgggacacgatncacatatcctatatacactcaagtgctgtacaaatcttgggcctanttgacaaaatcaacattcttgacatttgggaaagtgtcaa

SEQ ID NO: 4049 - DNA, 419 bp, Arabidopsis thaliana
  unsure at all n locations
  Clone ID: LIB22-061-Q1-E2-D12
acgcgtccgcccacgcgtccgcccacgcgtccgcgcaaactaattttttcactttcttcttcgttgatctctctgaaagcttctcttcttcttctcaccatgtctggttatcctccatcaagccaaggttacggttacggcggtaatccaccacctcctcagncaccgtacggatcaaccggcaataaccctcctccgtacggatcatccggcagcaatcctcctcctccgtacggatcatcaggctcctcaccgtacgcagttccctacggagctcaagcgcgctccttacgggtgnaccaacgtcaagcaaccgtaaggcgtctctttcaanggaagancanaannaaagnccgnaacanagnggaaaacctcaacgggnggctcctaagggggtntccaatctncccgggtgggct

SEQ ID NO: 4050 - DNA, 440 bp, Arabidopsis thaliana
  Clone ID: LIB22-061-Q1-E2-D2
acgcgtccgcccacgcgtccgcccacgcgtccgaagaaaatggttcccatcatcagagaagctctctccactctcttgtcttcccgcgatgaatcgggttcagttcgtgtggctggattggttcttgacttcttctgcgtccctatgatcgatgtaggaaacgagtttaatctcccttcttacattttcttgacgtgtagcgcagggttcttgggtatgatgaagtatcttccagagagacaccgcgaaatcaaatcggaattcaaccggagcttcaacgaggagttgaatctcattcctgggttatgtcaactctgttcctactaaggttttgccgtcaggtctattcatgaaagagacctacgagccttgggtcgaactagcagagaggtttcctgaagctaaggggtattttggttaattcatacacagctcctcga

SEQ ID NO: 4051 - DNA, 423 bp, Arabidopsis thaliana
  unsure at all n locations
  Clone ID: LIB22-061-Q1-E2-D5
tgctggagctgatctgattgttactcagcttttctatgatactgatatattcctcaagtttgtgaatgattgtcggcaaattgggattagttgtcccattgttcctggaattatgcctattaataactacagaggctttttgcgtatgactggtttctgcaagactaagataccagttgaggtgatggctgccttggagcctatcaaggataacgaagaagctgtgaaagcctatggtattcaccttggnacagagatgtgtaaaaagatgttggctcatggagtcaagtctcttcatctctacacattgaacatggagaaatctgctcttgcaatattgatgaatccttggtatgattgatgagtccanaatttctcgntccttanccctggangacnccctgcanatgttttccgttacta

SEQ ID NO: 4052 - DNA, 402 bp, Arabidopsis thaliana
  unsure at all n locations
  Clone ID: LIB22-061-Q1-E2-D6
acgcgtccgcccacgcgtccgccataaccgaaaccgagagaaaatatagaaaaagatgattgagacggttaaacacctgatcggctccggtggtcccangcggattcgggtcaagatccaccgccgatcatgtcacttgtaattctgatctccgttctctaactgccatcatcactggcgcgacgtcggggataggagctgagacggcgcgtgttcttgctaagcgtggcgcaagacttgtgcttccggctagaagcgtcaaaaccgccgaggaaacaaaggctcgtatactgtcggagtttcctgatgcggagatcatcgttatgcatcttgatctcagctcacttacctctgttcgtcgattccgtgggacgatttcgaaatctcctcaatctcncactc

SEQ ID NO: 4053 - DNA, 421 bp, Arabidopsis thaliana
  unsure at all n locations
  Clone ID: LIB22-061-Q1-E2-D8
tctctgctcccaaattcagaaaaaaaggaacgatttttatttccggtgaatgagaattttctctcgaatttgatcgatcacatatttcatctgtgtgttttcattttgaggatgccagcaacggaatatcaaagatcattcgggaggtcttttctgaatttacggcgagacacggcggtgaactcggttgagtcaacgacggttacccccgagttgactcagatggaagcagagcttgtttcgtttcagagaaaagttgctgagaggtttatcgatctcaatgcgtctanttgtgaagatctactgtctctcgaatgggttgggaagcttcttgattccgtttcnatcttgtcaagnagagtttcgttccatantcatnangcatcgttccnatgatnacnaaaccaaccganggatcgat

SEQ ID NO: 4054 - DNA, 484 bp, Arabidopsis thaliana
  unsure at all n locations
  Clone ID: LIB22-061-Q1-E2-D9
tgttacgcctgccggtacggcgtccnnaattccanggtcgacccacgcgtccgcattctcanccttttctctttcgttatcgtagtctcatcctcaagctttactccaccgcgtcacccatttgatcccttaaccgagaccgaactcaaactcgtccgaaccatcatcaacaagtcgtaccccgttggtccgaatcataagttcactttccaatacgttggtctcaacgaacccaacaagtctctaagtcttgtcttggtactcatcaccgaatcataccatcaaaccaccaccacgccaaagcgttcggtcattgctcgagacaacgggaaaagaccagagagatagtccttgaacttttcctcncgtgncatcgtctcggacaaaattcacgtagggaaatggttaccctatggtctcaaacgacgaagcaagaangcatccancgagcttgttgtcaaagttcaaggccgtttaatgactc

SEQ ID NO: 4055 - DNA, 444 bp, Arabidopsis thaliana
  unsure at all n locations
  Clone ID: LIB22-061-Q1-E2-E1
acgcgtccgatttgcatgctctcaaacccgaattaaatcgacacttttcagtttttgttttaacaagtagagtttcccaaaatattggatatatttctttttcaaatttcggaaaagaaatgagttgcaatggatgtagagttcttcgaaaaggttgcagtgaaacatgcatccttcgtccttgccttcaatggatcgaatccgccgagtcacaaggccacgccaccgtcttcgtcgctaaattctttggtcgtgctggtctcatgtcnttcatcncctcccgtacctgaactccaacgtccctgctttgtttcagtccgttgttgtttgaagcgtgtgggagaacggtgaatcccggttaacngagcngttggtatgttntgggnncangaactgggcacgtatgccaagcgggngttganaactggttcgtcgccgggggaa

SEQ ID NO: 4056 - DNA, 407 bp, Arabidopsis thaliana
  unsure at all n locations
  Clone ID: LIB22-061-Q1-E2-A6
gttcatcggatctaaagcgccactcaaaagggtttatgaaaaggttagggttttaacaacaactcaaanaacagagatggatttcgagaagagaaaagctgcgacacttgcttcaattcgttcatcagtgactgataaatctcccaaaggttttctcgacgaacccatcatccctctcctcgaaaccatcaatcatcacccatcttacttcactaccagttcctgctcaggtcgaatctcaatcctttctcaacccaaaccaaaatcgaatgattcaactaagaagaaagctcgtggcggttcatggctctanatcacacacgacccagctgattcggatttggtaatttcncnccntttcccttccaangtcanntcagattgacccanttggaccaacctaagga

SEQ ID NO: 4057 - DNA, 453 bp, Arabidopsis thaliana
  unsure at all n locations
  Clone ID: LIB22-059-Q1-E1-F12
acgcgtccgctcaggcaggaaggtgaaatttttcgatttcgtagatcaaaatggcggcaccattcgcgttgaggaaaatcggtgttcctccgaactcggcgancctgacggaagctcgccgccgtgttttcgatttctttagagctgcctgtagatcnatccccaccatcatggacatttacaatcttcaaggatgtcgtcgctccttctcagctccgctatgctatctctgctcagattcggaataacgctcacatcancggatccnaaggtaattgatcntcgtatattnaaacgaatgganagagcttgctgacattgtggntcacgcaaancagcgtcaccacatcatcgggtcaatatgtngtnggtgaancggctccgtgcaggatactgggaaaacanngatcangggaaaagactggantttcncaagaaatttctaaaacgagn

SEQ ID NO: 4058 - DNA, 484 bp, Arabidopsis thaliana
  unsure at all n locations
  Clone ID: LIB22-059-Q1-E1-F2
acgcgtccgcccacgcgtccggcaatgaccaaagatggacagaccattcttttggatggcaatactgggaaaatacttgcctcttgcctgagacctctaaagaacccaactgcgatttgtatgcacattatagagaactgctatgaaaactatgaaacgcccagtgaaaaaccagctgaaaatccatctgggaaggataaacatgagaacaaatctcatataatcaaagctagtgagagtcattcaccagacggtgaacagaatgctgtcacagaaacaaaacttattgatcagatatttgcgaattcattanttctcatgtgttctgaggatgcactgcgcttgtatactgtaaagtctcnatctcagggaagtcntgagagcattanggaggtaaatcttccaaggccgtgttgctggatgggaatccctaaaagaagatggaaggggaatntgcantactcctgttttaccgaacagggca

SEQ ID NO: 4059 - DNA, 455 bp, Arabidopsis thaliana
  Clone ID: LIB22-059-Q1-E1-F5
tgtttagaccatcgatccgacaatttcatagcgaaaaacctactgtgagctacaagaatctgcctatgaacacacatggtgatactaatcccatctttagagctcagagtcagcttcacatcactcgaattcgggtcattgaactgattcccggggctccgaatcaccagaagatccgaaatccgttgcatcgcaagcgcttgcttatcctgagctgaaataacaagatgattcacattcgtcgtcctcgcagccgtagccgccgcagaagaagacgatgaagacgacgacggagatggaagcacaccgttatggatctgaactggaactttccctatggtatcagcttcactagccatcatttcgaacagcgtcggacttgatcgtgtcttgtcgtgcatcgccggaggcggaggaggagacattggatttagaagacctgccgttaaagcgga

SEQ ID NO: 4060 - DNA, 471 bp, Arabidopsis thaliana
  unsure at all n locations
  Clone ID: LIB22-059-Q1-E1-F6
acgcgtccgtttantcgcctctatcagaagcttgacgaaannnnnnnnnnnnnnnnnnnnnnnnnnnnnnnnnnnnnnnnnnnnnnnnnnnnnnnnnnnnnnnnnnnnnnnnnnnagtgtttcattttgatccttcttccttcctctggagatttctcaaatctcttcaactattttgatttgccgccatgtatcgacgcgccacttccggcgtgcgttctgcctccgcaaggctttcttcttccctctccaggatcgcctctagcgagacagcttcggtttcggctccatctgcgtcgtcgcttcgcaatcagacgaaccgatctaagagtttctcctcggctctccgctcctttcgagtttgctctgcttccacgcggtggagccatggtgggagctggggatcgcctgctagccttcgcgctcaagctaggaantcanctccggttagggagaaanttgaacggaaat

SEQ ID NO: 4061 - DNA, 483 bp, Arabidopsis thaliana
  unsure at all n locations
  Clone ID: LIB22-059-Q1-E1-F9
ttncggtccgcaaatcccgggtcaacccacgcgtccggtttagtttctggatttgctctgcaaaatcttccaatcacatcttttgaagaaagttacactcaactttttggtgacaagaacttatttgttcatcaagatggcaaatctgtccggttaacgctcgatgaaagaaccggttccggttttgtttcaaatgattattacttgcatggattcttcagtgcttcaattaaattaccttctgattatacagctggagttgttgttgccttttatatgtctaatggagatatgtatgagaagaatcatgatgagatagattttgagtttcttggtaacattagagaaaaagaatggagagttcaagacaaacatttacggtaatggaagtactcattcaggaagagaagagagatataatctctggtttgatcctactgaagattttcatcaatacagtatcctctggtccgattctcacat

SEQ ID NO: 4062 - DNA, 504 bp, Arabidopsis thaliana
  unsure at all n locations
  Clone ID: LIB22-059-Q1-E1-G1
gtccggaaancccgggtcgacccacgcgtccgcccacgcgtccgcccacgcgtccgcccacgcgtccgaagcaatctaccgaaccgactcagagcttttgagtcttctaaatctctatcgaatttttctagggttagggctcctgatcgatttcgcgagctctgcgattattttaagtattaggatccgaaattagaaatgggtggagagggagattcaagtcagccgcagagtggtgaaggagaagctgtggctgtgaacatcaggtgctctaatggcacgaaatttagtgtgaagacgagtctcgattcaacggtggagtctttcaaagagttggtggctcagagcagcgatgttccagctaatcagcagcgcttgatttacaagggtcgtatcctcaaggacgatcaaactctcctcagctaaggtttgcaggctgatcacaccattcatatgggttaagaggctctgcancttcttcagcaccacctcctgctccggccg

SEQ ID NO: 4063 - DNA, 459 bp, Arabidopsis thaliana
  Clone ID: LIB22-059-Q1-E1-G10
acgcgtccgccgaaagttattttcgaatccactaacgaatcttccacagcaaacacttttgtgttcctctgtaatttctcagtatatatagataccaaaacaagcagtgaaaaatggctatggcgagtttatatcggcgatctcttccttctcctccggccattgacttttcttccgccgaaggcaagctaatcttcaatgaagcgcttcagaaaggaactatggaaggatttttcaggttgatttcgtattttcagacacaatccgaacctgcgtattgtggtttggctaatctctcagtggtgttgaatgctctttccatcgatcctggacgtaaatggaaaagggccttggaggtggtttgatgaatcaatgttgggattgctgcgaacctctggaagtaatgaaggaaaaaggcatttcatttgggaaaaagttgtctgtttggctcaattgttc

SEQ ID NO: 4064 - DNA, 460 bp, Arabidopsis thaliana
  Clone ID: LIB22-059-Q1-E1-G11
acgcgtccgcaaagctaggatcaacgcgggagctaatttctacattgttggtcgcgatcctgccggtatgggccatccgacagagaagagagatctttatgatgccgatcacgggaagaaagtgcttagcatggcaccaggacttgaacgcctcaacattctacccttcaaggtcgctgcatatgacaaaactcaggggaaaatggccttctttgatccttccaggtctcaagacttcctcttcatatcaggaaccaagatgcgtgggttggcgaagaagaaagagaacccaccagatggtttcatgtgtccctctggttgggaaggtgttggttgactactacgacagtctcaagtgcagagactggtaatggaagggtttcagaagctgttgcttctgcttgaatgcaaaaggtttccttgtcccacaaagattcacatttcctgtttgttagtaact

SEQ ID NO: 4065 - DNA, 451 bp, Arabidopsis thaliana
  unsure at all n locations
  Clone ID: LIB22-059-Q1-E1-G12
acctgtttacgcctgcccagttcccgggtcaacccacgcgtccncntaatgacctacatacctcaagatttccggggaacgctcatcagncagcagaaggagaggtcggngaggaacaaacaggcggaggttnatgcgttggtcagctctggngggagcatacgcgacacatatgctcttctttggaatcagcaaatggngaggaggaggcanttggctcagctaggctctgccactggtgtctacaaaaccctggtcaagtacttggtacgggttccacaggtgttgttggnntttattcgacaagataaacgatnatgatgggccaaatggnataacagcaagaacgttatgnacccccctctagacaantctcacaagaaatggtgatcgcaaattcgggttttcctaacacttctgnncggaaagatatgataccttcanactgagt

SEQ ID NO: 4066 - DNA, 481 bp, Arabidopsis thaliana
  unsure at all n locations
  Clone ID: LIB22-059-Q1-E1-G3
ncgccgtccgctttgantagnctcaccaaagtccatttttaaaaaatcaactataccatttttagctattctttggtcttcgtttcgtgtaagcattcaatgttttttttcttttatctctttgggaaacgggagtgtggtcttcgtgtgtgtgtccctgtttcattaaccaataattatgcttgggagtggaaagcaagaaaaattctaaactttatataaaattcccagaatcaattgatccaaaaagagtattgtcaaaaaagataatcaagaagaagaaactctgtttttttgttctgttcttggaaaaaaatgaggagtatgatgatggagagagagggaaggaatgagatagaaagagaagtaatagatgacttggaagagacgcaaaacgaaggagatgatttcaaagtcaatacctccatggaaggaacaaatcactttcagaggaattgttgcaagtttaatcattggtata

SEQ ID NO: 4067 - DNA, 477 bp, Arabidopsis thaliana
  Clone ID: LIB22-059-Q1-E1-G8
acgcgtccgatctgtctccgtcaggttacggcgaaggaagtgtattcaatgatagccaaatacaaggtaactcatttctgtgcagctcctgtggtcctcaacgctattgtcaatgctcctaaagaagacactatccttcctcttccccatacagtccatgtcatgacagcaggagctgctcctccaccttctgttctcttctccatgaaccagaagggcttccgagtcgctcacacctatgggctttccgagacttatggtccttccaccgtatgcgcttggaaacccgagtgggattccctccctcctgagacgcaggcccctcaatgctcgccaaggtgtccgctatactggcatggagcagcttgatgtcattgacactcagaccggaaaacctgttcctgcagatggaaaaaccgcaggagaaattgttttccgagggaatatggtgatgaaaggtatctaaagaatccggaa

SEQ ID NO: 4068 - DNA, 515 bp, Arabidopsis thaliana
  unsure at all n locations
  Clone ID: LIB22-059-Q1-E1-H1
gcacncncggtccggaaaaccgggtcgacccacgcgtccgctctagngtcggggcctcgatctcttgatttgagcttttcttangtctgtctctctctgtacactctctccgccgtcgtatctcgccgtcgatttcaatttttccgacgatatgaagctcaccgttaaaactctcaagggcagtcattttgaaattagggttttaccctccgatacgataatggcggtgaagaagaatatagaagattcacaaggaaaagacaattatccatgtgggcagcaattgttgattcacaatggaaaagttttgaaagatgaaactagcctggtggagaacaaagttacggaggaaggatttctcgtcgttatgcttagcaagagcanatctggaggttcaagctggtcaggcttcgggttcanacttcttctgtttcacagccctgtttccgctaccacatcntcgactaagcctgcangctccatctaaancccagtcttcaccngttccctgcttc

SEQ ID NO: 4069 - DNA, 474 bp, Arabidopsis thaliana
  unsure at all n locations
  Clone ID: LIB22-059-Q1-E1-H10
actcacgggtcaacccacgcgtccgcaagttttacttaagccgttacggtcttggtcgtaaccccaaggtttggtctgatccacttagcttcaaaccagaaaggcatctcaatgagtgttcggaagtgactttgacggagaatgatctccgttttatctcgtttagtaccggaaagagaggatgtgctgctccggcgttaggtacggcgataacgaccatgatgctagcgaggcttttgcaagggtttaagtggaaactagcaggaagtgagacacgtgtcgagcttatggaatcgagtcatgatatgtttctttcgaagcctttggtgttggtcggagaattgagattgtcggaggacctttacccaatgggtgaagtgaggcgacggtgacgtacggcgaagataattccgtatatactatggataacccaaagtttangtgaatcacaaaccaaactttgttcggttttgg

SEQ ID NO: 4070 - DNA, 494 bp, Arabidopsis thaliana
  unsure at all n locations
  Clone ID: LIB22-059-Q1-E1-F11
ccctgccgtttnggtcgccaattcccgggtcaanccacgcgtccgcaaacgggtccagtntggcactcattagacagcccgtctgggcaggtttgccttaacattaatgcaatcaaactacccgtgaatgctcctagggctgtaactggatatgctggagccggtagaanaagggtcacattggatcagcaaggnccaacaattgtacatcaaaagccagggcctctgcagacgatatttgatctcctcccggatgaggttgtcgaccacagttattcatgtgccctggagaggtcattcctgtatcatggccgaatgtatgtttccgcgtggcacatatgtttccactccaatgttttctctaaagcaaatgaaggttgttgtccctctcggngatatagatgagattcgtagaagtcaacacgcgttgataaacccaagctataacaatcatactacggatgggtgctggtggacatggtgttccccctctt

SEQ ID NO: 4071 - DNA, 520 bp, Arabidopsis thaliana
  unsure at all n locations
  Clone ID: LIB22-059-Q1-E1-D3
gttttctgcnggccacggtccgggaanaccggggtcgacccacgcgtccggcggtnaaaacangagttccaaaaaggtggctccnttttgtttctgganatgcgttattgtgacccttctttgaagatttacggttcattttctcagatttcgagttcgttgtgtttgaatctcnattgggtttactttcttattcgatttgggggaaatggctgattggtatcagcttgcacagtctataatctttggtttgatcttcgcttaccttctcgctaagctaatctctatcctcctcgcttttaaagacgagaatctctcactcactcgtaaccacacgactcaatcggngtatgagaacttgcgaaaggtcgaaactttaactgggattagcggcgagactgattctcttatanctgagcaaggtagctnnnnnnnnnnnnnnnnnnnnnnnnnnnnnnnnnnnnnnnnnnnnnnnnnnnnnnnnnnnnnnnnnnnaggcatttagtgctgctacggcttt

SEQ ID NO: 4072 - DNA, 481 bp, Arabidopsis thaliana
  unsure at all n locations
  Clone ID: LIB22-059-Q1-E1-D6
acgcgtccggaattaagagagcaaaatgagcataaataggaatctgttgaatatcataataatcctttgtatatgtctcaatttgggttgtaacgatggagctcaagaaagagagactgattctcatactatccaagtcagctctctcctcccttcatcatcatcatcttgtgttctttctcccagagcgtctactacaaagtcttcactgcacgtgacgcatagacacggcacgtgttcgcgtctaaacaatggcaaggccacgagtccagaccatgtcgagatcctaagactcgaccaggctcgcgtaaactcaatccactcaaaactatcgaagaaactcgcaacagatcacgtcagtgaaagcaagtcaacggatctaccggctaaagacggaagcacactcggttcaggtaactacatcgtgacggtcgggcctcgggacaccaaggnacgatctatcactaatcttcgacactgg

SEQ ID NO: 4073 - DNA, 511 bp, Arabidopsis thaliana
  unsure at all n locations
  Clone ID: LIB22-059-Q1-E1-D8
ctgttttgcctgcgccnacagtgtccgngaantcgcgggtcgacccacgcntccncaggcttccgcttanatcatcggtgttgccggatgggccactggtctcaaactcggtggcgactcaccagggattcagtacagcacccaccgtgccatcgggatcgctctcttctctctagcgacagttcaggtgtttgcgatgtttctgaggccaaaaccagagcacaagcataggctctactggaacatttaccaccacacgatcggctacacgataatcatcctaggggtggtgaacgttttcaaagggctaggcatattgagtcccaagaagcagtggaaaaatgcctacatcggtatcattgttgttctcgccattgtggccaccctactcgaagccttcacctggtatgtagtcattaaaagaaggaaactggaggctaaaacggctcagcatggagcatctaacggcactcggtctcagtatgcttaagattagcancagacttgcttc

SEQ ID NO: 4074 - DNA, 460 bp, Arabidopsis thaliana
  unsure at all n locations
  Clone ID: LIB22-059-Q1-E1-D9
acgcgtccgctataatacagcttttattctcaaattttgtttgtcttaccatcattaccaaaccatgcaagccgcaacgtcgtgtgatctcaagttccgatcaacagatccgacgtctaggaacaaatgtttctcccacgcgattccaaagcgcgtggctgttacgtgcggttataggtcggagtcgtttagcttccctaacggtgtctccgtgagtcgatctgattggcaaagctcatgtgccattttatctagtaaagttgcttctgttgaaaataccggtggtttagcgggacaaaatcgccgccgttaatgggtcacacgaacggctctgtgaatcttggtctcgtcgccgttgagtcaactaacggaaagttagctcctgctcaaccgtttgactattactgatctatctccgggnaccgttgcatggttctagtccaacgtgtagcttaacaag

SEQ ID NO: 4075 - DNA, 500 bp, Arabidopsis thaliana
  unsure at all n locations
  Clone ID: LIB22-059-Q1-E1-E10
gtaccctggccgttncgggtccgnaaattcccgggtcaacccacgcgtccgtcattctttacggaagccatgaaaatggcatcaagaaaaacaacatccttgcttaatcatcttcttcttcttggagctttgactcttttgagcagtttggtgatagtgaaaggagaaagcccttacaagttttacacttggactgtgacttatggcattatctctcctcttggtgttcctcaacaggttattctcatcaatggtcagtttcctggtccaaaacttgaagttgtgaccaacgacaacatcatcctcaacctcatcaacaaacttgaccaagcctttcctcttgacctggaatgggattaagcagaggaagaactcatggcaagatggtgttttggggaacaaactgtccgattcaaccaaactcaaacttcacttacaaattccaaaccaaagatnaagatnggaactttcaactacttcccttccactggcttttcaaa

SEQ ID NO: 4076 - DNA, 505 bp, Arabidopsis thaliana
  unsure at all n locations
  Clone ID: LIB22-059-Q1-E1-E11
actggttacgcctgnccgtttcggtcngccaattcccgggtcaacccacgcgtccgacaaaatggagataaaaccctctaggatattctccaccatcaccatcttctttctctgccttctactagcacacgtcacctccaaggcatcatcatcatctctgtgcaatggatctgtggcggagtgcagcagcatggtggagacagaggaaatgagtgtgataatggagtcttggtcaagccagaggttgacggaggagcaggcacataagctttcgtatggagctttgaggaggaatcaagcctgcttgcgatggtggtaaacgaggcgagtcttactcaactcaatgtcttcctccaccgtctaacccttatagtanaggctgctctaagcattaccgatgcggccgtgactcttgaccattcaccatcatgaatctttatgttgttaaacacctaagttcttaattttgttgggtgaantttgaattgttttggtttcaagtaaa

SEQ ID NO: 4077 - DNA, 461 bp, Arabidopsis thaliana
  unsure at all n locations
  Clone ID: LIB22-059-Q1-E1-E4
acgcgtccggaaaacattgcaaggctaaagcaggccaaagaattcaatcgagtccagttggattacacagtccctagtccgaaagtaccggacaattgcggtgacagccaaataggaacggtcggatgtgtagctgtggacagtgctggaaatctagcttcggctacatcaacgggcggttatgtcaacaaaatggttggcagaattggggatacgccagtcattggcgcaggaacttacgctaaccacctttgtgccatctcagccacaggtaaaggagaggatatcatccgtggaaccgtggctagagacgtggctgcactcatggaatataaaggcttgtctttgactgaggcagcggcttatgttgttgaccaatctgttcccagaggaagctgtggactcgttgctgtctctgccaatggtgaagtcacaatgccgtttaacactancggaatgtc

SEQ ID NO: 4078 - DNA, 526 bp, Arabidopsis thaliana
  unsure at all n locations
  Clone ID: LIB22-059-Q1-E1-E6
cgttttccctgcncctaccggtccgnaaattcccgggtcgacccacgcgtccgaaattattccgtgacagcaaacctgaagatgataaagttcctaaagaagtggatgatgaggacaaagatgggttccttaagaaacttttcagggaaaaaaatgatgacaaaagacatggtagtgaaaagaatgaagccaatggaacagtgtatgccgataagaaatctggtgaagaggatgagagggaggggtttttcaaaaaattctttaaggaaaaatctgatgacaagaaagacattgtcaaggttgatgacgggaatgaaagtgagggtgatgaatctccagaattttctcttttcaaaagattattccgtatacatcccgaagatgcaaaacctacttcagaaaatgaaaatagcagcaatggcttagttgaaagcagtcctgggacagaaaactttttccgcaagttgttcagagatcgtgaccaatctgttgaagattctgaactgtttggatcaaagaaacacaa

SEQ ID NO: 4079 - DNA, 475 bp, Arabidopsis thaliana
  Clone ID: LIB22-059-Q1-E1-E7
acgcgtccgcccacgcgtccgcccacgcgtccgcactctttcctttttttctctctctttgatctcctcgaacccatcatcttaaatcgcccgatcaattctatctccggcggtctagcatttttcatcgccggcgaaacattttttaccaattctccagcttggctaatcaactccgatcacgttccgtattcccaaattcgatctcgaagggggacatagagaagtctttcgcgaaggagaatcacgagactttgattacttttggcactcttatgttttcttactgaataaagggacttcatttacagcaactggagctgtttttattgtttacctccaagcgcataattaaacgagaggcatgaagaactgctgaattcaatcaatgcaagtttgtttcgttagcttgaatggatgtagcaacagatactacaaggcggcgtcttcttcatccgacaagaacaatgcagtt

SEQ ID NO: 4080 - DNA, 479 bp, Arabidopsis thaliana
  unsure at all n locations
  Clone ID: LIB22-059-Q1-E1-E8
acgcgtccgctcttttccattttgaactccaattttgattctttaaagaaaatgagttgctttgggtgttgtggggaggatgatgatatgcataaaactgctgattatggaggtcgtcataaccaagccaaacactttcctccaggaaatgatgcaaggcaccaccaagcctctgaaactgcacagaagggtcctccagttgtgaagttgcagcctattgaagtacctattatcccttttagtgaactcaaagaagcaactgatgattttggatcgaattctctcatcggtgaaggctcttatggaagagtatactacggggtattaaacaatgatctgccttcagcgattaaaaagttggattctaacaaacagcctgacaatgaattccttgctcaggtttccatggtttctaggcttaaacatgataactttgttcaacttcntgggctactgtgttgatgggaattcacggatac

SEQ ID NO: 4081 - DNA, 486 bp, Arabidopsis thaliana
  unsure at all n locations
  Clone ID: LIB22-059-Q1-E1-F1
acgcgtccggttcttcttataagggtttttgtttataatttggtaatcgaaaaagagagatttgataaaatcctttgtgttgaaggaaaaaaaaatcatataggtaacgtttgatacaagtaaaaaaaaaaaatttccatcactttcttgggtaaaaaaaacatgggttagaggaaaaactggggaaaagattttagattaagtgcgtaaagaattctgattccttcgtctccgatctctcatttttctggagaaattgtcaaaaatttcagatatctatattgtcttggaactgaagattcatcgaaagattggtgagttttattcgctgcttatcgcttgtgggcaatcacatcatctgtgttatgcatccaagtaatggtgtcacataaagtcttagaanttgggagatgaagggttacaaattacctgctcaagctcgaagctccgaggatnactccggaaagaagcgcattnacgaaaagg

SEQ ID NO: 4082 - DNA, 515 bp, Arabidopsis thaliana
  unsure at all n locations
  Clone ID: LIB22-059-Q1-E1-F10
aactgttccctggccgtttcggtcggccaattcccgggtcaacccacgcgtccggtgaatggagctgtagagacttgttttgggtcgtttcatcggtacgctcaatacatgaatttctcacatcctttgatcaaagagaagtttaatcccaaagcatgtgcgtgggcgtatggaatgaacttctttgatcttgatgcttggagaagagagaagtgcacagaagaatatcactactggcaaaatctgaacgagaacagggctctatggaaactggggacgttaccaccggggactgatcaccttttactcaaccacaaagccgctggacaaatcatggcatgtgcttgggctggggttacaatcccgagcattagcatggatgaaatncgcaacgctgcaagtggtacacttcaacggtaacatgaaagcccatggcttgacatanctatgaaaccaagtttcgaccacctttggaccaaaacacgtccaactaatgaacctccnaagtttgttca

SEQ ID NO: 4083 - DNA, 483 bp, Arabidopsis thaliana
  unsure at all n locations
  Clone ID: LIB22-059-Q1-E1-D2
acgcgtccgnnnnnnnnnnnnnnnnnnnnnnnnnnnnnctcttgttatcccggcgttcttaaaacaacgacggcgacggtgacggctaagcggaagagcttttgttgccaatgacggactcttacggcgccgtctccgtcgacgttggaacaatctatcttggtggcaaggagcatcgtgttaaaactgctagtggtgttgtgtctgtcattgtctatggagacagagaaaagccagcattgattacttatcctgatttagccctaaaccgtaaggctaaagaatctctataggcactaatgtaatggctaaatttattaatgtttttgttgtttcttcttcagatatgtcatgcttccaagggttattcttctgtcctgaagcagcttcattgctgctcataacttctgcanttaccatatcagtccacctggggcatgaanttaggagctggctccaaattggcccaaatgantcaattcc

SEQ ID NO: 4084 - DNA, 510 bp, Arabidopsis thaliana
  unsure at all n locations
  Clone ID: LIB22-059-Q1-E1-B4
cggtccggaaatccggggtcgacccacgcgtccgcagacttcacactttcactttcattcgctttttcttctctattactgcaatcacttgttcacgataatggcggacctctcctctgtcgatgagttcctgaatcagtgcaaacaatccggcgacgcagcttatggcgccttgcgatcggtcttggagcggctcgaggatccgaatactcgatctaaggctcggatcttcttgtctgacatctacaaacgcgtcggatcttctgagacgtctctccaaacctaccattttcatatccaggacatctatctcgatcaatacgaaggctttcagtccaggaaaaagttaaccatgatggtcattcctagtatttttattccaagaagactggtcatttacattttatgaagggacttaacaagacatccctgacaccaacctttaaggntaagactgtttcctgaacttggctgtgggaaagggttggataatcaataanccattgctgg

SEQ ID NO: 4085 - DNA, 510 bp, Arabidopsis thaliana
  unsure at all n locations
  Clone ID: LIB22-059-Q1-E1-B9
aactgttcgcctgcccgtttcggtcggcaaattcccgggtcaacccacgcgtccgcccacgcgtccgcccacgcgtccgcgttgcttcattttccttgagatcgattggtacaagtgttcatccaatggttggaggaggagttatccggcagcttcttagaaggaaacttcattcccaatcagcaactccggtattgtcatggttgtcttcgaagaaagcgaatgaagatgctgggtctgctggtttaagagcatttgctctcatgggtgctggtattaccggattattgagtttttctactgttgcatctgctgatgaggctgaacatggtctggagtgtcctaactacccttggncacatgagggcattctcaagctcatatgaccaatgcttcgattcgtcgtggtcaccaagtttatcagcaagtttgtgcgtctttgccattcgatgtctctgatctcataccgaagacttggtgggttgttgccctaaacaagagggaaaaagc

SEQ ID NO: 4086 - DNA, 507 bp, Arabidopsis thaliana
  unsure at all n locations
  Clone ID: LIB22-059-Q1-E1-C12
ctgttcgcctgnccgtttcgntngcccaattcccggggtcaaacccacgcgtccncatnatcgctggtaangttgctgttatctgtggctatggtgatgttggaaagggttgtgctgctgccacgaacactgctggtgctagagtcattgtgactgagattgatcccatctgtgcccttcaagctttgntggaangacttcaggttcttacccttgangatgttgtctcanaagctgatatctttgtcaccaccaccggtnacanngacatcatcatggtcgaccacatgangaagatgannaacaacgctattgtgtgcaacattggtcactttgacaatgagattgacatgcttggacttgagacttaccctgctgtgaancgtatcacatcaagccanagactgncaggtggggtgttcccangagaccanggctggnatcattgtccttggctgaagggtcgtccggaatgancttggggttggtggccnctgggtcacccca

SEQ ID NO: 4087 - DNA, 483 bp, Arabidopsis thaliana
  unsure at all n locations
  Clone ID: LIB22-059-Q1-E1-C2
acgcgtccgaaaaaaaaaaaatcgactctaaaatcaaactctctcaaagctccccaaaaaaaccctagttctgaatggaatcggcggattccggacgatccgatccggtaaaaggagacgacccgggtccatctttcgtctcttcaccaccagctacacctagcaggtatgagtcacagaagcgacgcgactggaacacgttcttgcagtacctcaagaaccacaagccgcctctcgcgttgtcacggtgtagcggagcgcatgtgatcgagtttctcaagtacctcgaccagttcggtaagaccaaagtccacgtggcggcttgtccttacttcggccatcagcaacctccgtctccttgctcatgccctctcaagcaagcttggggatctctcgatgctttgatcggacggttgagagctgcctacganggagaacggtggacgggcggattctaacccgttcgccgcacgtgcggttcgg

SEQ ID NO: 4088 - DNA, 506 bp, Arabidopsis thaliana
  unsure at all n locations
  Clone ID: LIB22-059-Q1-E1-C4
gcgcnccacggtccgggaaaaccgggtcnaaccaagccgtcngtctctgctgaactcgctttcctaacttctctctctgtcactctaactctttgtcggtaccaaattcttcttcactcgaagaactgtttaggtcaagtatgacttaattctgccaaatttctggtgtttattcaaagttcaaagtcaattgaacaaaactttttatcagataaactgaagcaatgtataccgagggagcctctgattttgtcattgaccagagcatgtattatcccgcttattactcttcaggttatgattcatctgtgggtcttcagggtgggcaaaatgaaaatgctccctatatctgctatacaccaagttatggatatgcacagtctccctacaatccctacaatccttacataccaggagcttcaatangcgttgattctctttgttggattccaacaatattactcagacctccgtatgaaagtgctgcgtcttcgccnactaagttc

SEQ ID NO: 4089 - DNA, 520 bp, Arabidopsis thaliana
  unsure at all n locations
  Clone ID: LIB22-059-Q1-E1-C5
cgtttgcctgncctaccggtccgnaaattcccgggtcgacccacgcgtccggagcacacaagctctgagatcccatcaataaatggcggtaacagagtcctctgtttatttactctaacaagtcctttaaggttttaataacccagtttcatgggggttacttccttgtatctagccctgttatagcaaggagctcgtgatcatgagtggtacagagttagatgagcctggaaagttaaaacgtgctgtcattgatgcttctgctggtggtgttgctggtgcgatttcacgtatggttacctctccccttgatgttatcaagattagatttcaggttcagttggagcctacagctacatgggctctgaaagattctcagctgaaaccgaagtacaatggtttgtttcgaacaacgaaggatatctttagagaggaangtttatcgggtttctggcgtggaaatgttccagctttacttatgggttgtgccttatacatccatacaatttgcagtcttaca

SEQ ID NO: 4090 - DNA, 475 bp, Arabidopsis thaliana
  unsure at all n locations
  Clone ID: LIB22-059-Q1-E1-C6
acgcgtccggtttcttgcacaatgtgtnnnnnnnnnnnnnnnnnnnnnnnnnnnnnnnnnnnnnnnnnnnnnnnnnnnnnnnnnnnnnnnnnnnnnnnnnnnnnnnnnnnnnnnnnnnnnnnnnnnnnnnnnnnnnnnnnaagctccggtggtgttaaatacccgcctccgtacggcggcgacggctacggtggctattatccgcctccttactacggcaattacgggacaccaccaccaccgaatccgatcgttccttattttccgttttactatcatactcctcctcagggatattcaggctcggctcgtttacagaattctctcctctttgctctgttcgccgtcttgctctgttttgtgtgacggcgattcatctgtatttggccgggaaaagtgtacggtgtaaaactgaaatatcttgtttacttanttaactttttttacattttgttgacaatttgtattattaaan

SEQ ID NO: 4091 - DNA, 520 bp, Arabidopsis thaliana
  unsure at all n locations
  Clone ID: LIB22-059-Q1-E1-C7
tttttnccngcccctaccggtccgaaattcccgggtcgacccacgcgtccgagaacaatcaataaaaacaaaatctcttacctcaaaagaaaaagctctcttatggctgcttcttcttctgtgagacccaccccaacgggacctcaagtgttcatcaacttccgaggaaaagatctgcgtaacggcttcctaagctttcttgagcctgccatgagagaagcgaacataaacgttttcatagacaaggacgaagtggtgggcacagatctggttaacctttttgtgaggatccaagagtcaagggttgcggtggtgatcttttctaaggactacacaagttcggaatggtgcttagatgagctggccgagatcaaggactgcattaatcaaggcggtctcaatgcgattcccatcttctacaaacttgcaccttcctccgtgttagaactcaaaggaggttttggcgatactttcagggttctaaaggagaaatataaaaatgatcctganagaactcaaa

SEQ ID NO: 4092 - DNA, 483 bp, Arabidopsis thaliana
  unsure at all n locations
  Clone ID: LIB22-059-Q1-E1-C8
ctgcgcntaccggtccggaaatcccgggtcgacccacgcgtccgcggacgcgtgggtccgagttaaaaaaaacgggttttcgacaccatggatatgagttcaatggctggttcaatcggagtttcggtagccgtactccgattcctcctctgtttcgttgccacgatccctgtttcattcgcttgtcgaatcgtcccgagtagactcggtaaacacttgtatgccgctgcttcaggtgctttcctctcttacctctcctttggcttctcctccaaccttcacttccttgttccgatgacgatcggatatgcttcaatggcgatttatagacccaagtgtggaatcatcactttcttcctcggtttcgcttatcttattggctgtcatgtgttttaaatgaatggtgatgcgtggnaagaacgaggaatcgantctactggancgttaaaggtgttgacgccgaaagtcatctcatgttcantg

SEQ ID NO: 4093 - DNA, 519 bp, Arabidopsis thaliana
  unsure at all n locations
  Clone ID: LIB22-059-Q1-E1-D1
gtntctgcgcgcacggtccggaancccgggtcgacccacgcgtccgtgattatacagctggagttgttgttgccttttatatgtctaatggagatatgtatgagaagaatcatgatgagatagattttgagtttcttggtaacattagagaaaaagaatggagagttcagacaaacatttacggtaatggaagtactcattcaggaagagaagagagatataatctctggtttgatcctactgaagattttcatcaatacagtatcctctggtctgattctcacatcatattctttgtagacaatgttcctattagagaggtcaaacgtactgcggaaatgggtggtcactttccatcaaagccgatgtctctctacacaacaatatgggacggttctaaatgggcaactaacggtggaaagtacggtgtaaactacaaatatgcgccttacattgcgcggttctcggatctaatcctgcacggctgccccgttggaccctatcgagcagtttccgang

SEQ ID NO: 4094 - DNA, 480 bp, Arabidopsis thaliana
  unsure at all n locations
  Clone ID: LIB22-059-Q1-E1-D10
acgcgtccgcgtttttgtatcgagtttattaattcacaatgggaaaagaaaagccacatattaaccttgtcgtcatcggtcacgtcgatgctggaaagtccaccactactggacacttgatctacaagtgtggaggtattgataagagaaccatcgaaaagttcgagaaagaagccaaggaaatgggcaagtcctcattcaaatatgcttgggtcttggacaaactcaaggctgaaaagagaaagaaggtattaccatccatattgcccctggtgggaagttcgaaaccctctaaatactaacttcaaccaatcnattgatggcccctgggccacangagaatttcatcaaagaaacaatgaattactggggaacctcctccaancctgaacggtngcaancctccgtaatngcttcccctngccnggaaanttcnaacctgggaaccncaaanacgggggaaaacccnttgaaaatgcc

SEQ ID NO: 4095 - DNA, 475 bp, Arabidopsis thaliana
  unsure at all n locations
  Clone ID: LIB22-059-Q1-E1-D12
acgcgtccgattcgtttcttcgcgatcaaaccacagatttttcaattttagtgaagtttcattttttaaggcatggntactctcaacggaaaagcttctccgtattctgaagaaaacatcaaattcaagtnnnnnnnnnnnnnnnnnnnnnnnnnnnnnnnnnnnnnnnnnnnnnnnnnnnnnnnnnnnnnnnnnnnnnnnngacctaaatggtctgttcaatcaatccccacaaagaaagatgtggagtatccgattatccgactcangagattaccttgacgaccggtatgantcatcccggngagctctctacaacgacgaangccnccgattcaaggaaaatgggaaancnngaagtttacttgaaaananggttttacntggggttgantgcgaanngttactgggacggaatnaagaanccntttaggatnaagaaagaaacccgtcnttcngagggtttccgtttcct

SEQ ID NO: 4096 - DNA, 501 bp, Arabidopsis thaliana
  unsure at all n locations
  Clone ID: LIB22-059-Q1-E1-B11
ttacgcctggccgttncggtccgcaaattcccgggtcnacccacgcgtccgcccacgcgtccgcggacgcgtgggtttctccagaacctgacggaaaaaaacttgaatctgcaaatcgacttcccccggagaatgcgatcggagatcggaaactgaggaattgctgctctctactcgcggtgtttagtttacgattggaatatggggaagatatttagctggttagtggtgttattgtcattgatctcattagtccctgttccatcggaatcggctgttttgagtgtagatctaggttcagaatgggttaaagttgccgtagttaatctgaaacgaggacagagtccaatctctgtagccattaatgaagatgtccaagaggaaatccccagctttagtagcatttcaatctggagaccggttactangcgangaagctgcggggaataacggctcgttatccgaataaagtttattcacaactganggaatatggtggga

SEQ ID NO: 4097 - DNA, 499 bp, Arabidopsis thaliana
  unsure at all n locations
  Clone ID: LIB22-056-Q1-E1-F11
ctgttacgcctgcctgtaccgggtccgaaaattcccggacntgtgagcaactcttgtncttcctgacattangaggaagcaaacctggtgatgaaatgaaatttgaagatatctatgatgtggataaactcattaaaaccttggaaagtgtcgtcaaagttgtaagaaaattgccgagccacgtatctctaagagatattgccattgtcaaagttcctacccgagttgcagaagattacatcaaggaacatattgatcccatcttcaaatcaaaagggaacataagggttacaacctatttcccttctgtgaatttgaggaaatcttcgcanggtgctgaaacccgaccctgtctcttgtttgggcaatgtttggttccttggaattgcaaccctgcagtgaatgaattgggtgaagtccgatgaatcagcngttgaaagacaccatanccacgaaatcngggtgggcccgttttcatagccaataaacntgaggggtg

SEQ ID NO: 4098 - DNA, 430 bp, Arabidopsis thaliana
  unsure at all n locations
  Clone ID: LIB22-056-Q1-E1-F12
caatctgatataactacccttggagcatcggtgaggaaaagagaaagagagagagaaggcagttttgttttccaaatgtcagcaattcttgcagctgccattggtggtgctgtaggagctcttgcattgattgctttgtttgtttttctcctttggttttgtgtctttcgtcgtaagaatctgtctagaacttctgagactggctcttctgatccatctactcaagaacgaagaaatgttgcaattgagttgtcaatgacagaagctanaagatttgaaatggatgaacttgctcaagccancaacgagttttaccaataaaagtcctatnggtatttggcaaaattcggcgaggtttacaaaangtttgcctcaagatggtgttcttgnngcnatcacngaanaagacctgggtttgccnactccaaga

SEQ ID NO: 4099 - DNA, 424 bp, Arabidopsis thaliana
  Clone ID: LIB22-056-Q1-E1-F2
acaaggcttgaacgtccggtgaaagaaagaattcagctttccgcactaaccacttctgaatcctaaccaacaagcttctccatttcgtttttcgcgtctcgattccaaattccacttaagacggcggattttctcaccgggaaattggttttagatggataggactgaggaaatcgaagaatcccccgccggaccttcttccggatccgcgaaattgaagctcggaaacagagcagatcctttccttgttgtttgtagatgcttcagcctcgttacctctctcatcgccattctctgtgttgtcgttaacgttctcgctgccgttcgctccttccgtgacagccacgatctcttcgatggaatattccggtgttatgctgtggtgattgcttggttttgttgttcctcgttgagactgaatggg

SEQ ID NO: 4100 - DNA, 418 bp, Arabidopsis thaliana
  unsure at all n locations
  Clone ID: LIB22-056-Q1-E1-F3
acncgtgggctttcctctagccactcttcgccactctctttctctctcccttgttttccaacagtaacaatggcgtcagcttccaagcaaaacccttcttcttccaaacctcctaggcatccatctccgatcattgcttcaaccccctcgaaatccggtgtattggaggaatcccaatttcgaaaccctaataacccgtcgacgtcatcgaattcaccgatttcgatggcggtggaggatcagatcctgggaaattccaatcacctcactcngcccggagcttctccgacgcagatcgcacaacctgaagcagctctctagatgctacagagaccattantgggctctaatgggangatctcaaggnatancatagntattannggctggnaactatgggggttaggtcccntcaaag

SEQ ID NO: 4101 - DNA, 418 bp, Arabidopsis thaliana
  unsure at all n locations
  Clone ID: LIB22-056-Q1-E1-F4
ctaaggttgatatctcagatgaagcccagaaggagcgtgttagccagatgattgaagacgcagagccatttgaaggtgaggctctcttggacgccaagtgcttcaagtgagaagagagaatggtttggtacttccatttacaggttttgcagctggggctttacatatctttctatctgtctgtctcacataggggttttgctctgtgacgtgtcgcatagactgtttttttcttttcnaatcgagtgtcaangacaantctttttagttctttgttaatgtttcgcctccgtccagaattgtttactataccagttttcgaaatcctgaccggccagtctaccctggcaataggcaatacatggtcctggtttatttgttttacggtaattttgccttgattgaaaaaaagaanaaa

SEQ ID NO: 4102 - DNA, 398 bp, Arabidopsis thaliana
  unsure at all n locations
  Clone ID: LIB22-056-Q1-E1-F6
tgtcaatgtcaatggggaactttgttagtagcttgttggtaacaatggtggtgaagatctcaacagaggatcacatgcctggttggattccaaggaatctcaacaaaggtcacttagacagattctatttcctcctggctgcgttgacgagcattgacctggtggtatacattgcatgtgcaaaatggtacaaacctatacaactagaaggaaaagatgagatgcaagacatgagtgatgatgactatgacaccgagagtgaagaggaacgaagagaaggattctaaagtctaacaaatgtgtgtttggttttcagttttccggtgatgtaacagcaaactgattcataaataaaangctaaatcggatcagtctttttcgtcgaaaaagacttcttc

SEQ ID NO: 4103 - DNA, 422 bp, Arabidopsis thaliana
  unsure at all n locations
  Clone ID: LIB22-056-Q1-E1-F9
tgacgtcaccatccgacgtgtcagctttaaaagctttcaaagccaccgtgaaacccaactcaatcccaccgtggtcttgtctcgctagctgggactttactgtctccgacccatgtgcttcaccacgtcgaacacatttcacttgcggcatcacttgctcgtctgactccacacgtgtgacccaactcactctcgacccagccgggtacacgggtcgtctcacgcctctcatctccggcctcacagagcttctcacgctcgatctcgccgagaacaacttctacggcctaatcccatcctccatctcctccctcaccaagcctcaagaccttgatcctccgatncaactcngttttccgggtcattacccgactcantaactcgactcaactcactcgaatccaattgacatatctcanaac

SEQ ID NO: 4104 - DNA, 481 bp, Arabidopsis thaliana
  unsure at all n locations
  Clone ID: LIB22-056-Q1-E1-G1
gttactttgccgggcccggtccanaattaacgggtcgacccacgcgtccgatgagactccccgtcaccgtcaaagccactaagccgtcgtttctcgtcatttggatccgatactcctccgccgcgtcgtcgccgacagtctccttgaatccaagtggacgattacagcaaactctcgcaggatctgtggaagtgaaaggaaaatctctgcactccggtaagttctcgacggtgaagctaaatccggagatcgccggagctggtaggttcttcgagtttcgatccagattcatccctgcgtcgattgaatttgctcaggaatcgcctctttgcacgacgctgttgaaaagatgagctcaaaatccgaaccggttgagcatttgttatcagctcttgaggcgaanggagttgataattgcaggattcaaatcgagagcgaaagttccgatgatcgangaagtcgagggccccaatttttgatg

SEQ ID NO: 4105 - DNA, 446 bp, Arabidopsis thaliana
  unsure at all n locations
  Clone ID: LIB22-056-Q1-E1-G10
ccacgcgtccggntactttatacccatcaatcaagtcttgtcctttttctccttctctctctcatacgagcttctttcctgctgatgaggcttgagctttaaattttcaatcttgattgagattctgcatgtttctcgatctttaaactcagatgaagaatcttggggggttgttcaaaattcttctgcttttcttctgtctctttctatcgacccacataatttccgtttcttgtttaaactcagatgggctaactctactctctcttctgaagcatttggatagagtaccaccacaagttacttcgacatggaaaataaacgcatcctgaagcaaactccatgtaactggttcggtatcacttgtgacgattctaangaatgttgcgtctctcaacttcactccgttctaagggtttcaaggtcaatttgggtccgggaaaatt

SEQ ID NO: 4106 - DNA, 469 bp, Arabidopsis thaliana
  unsure at all n locations
  Clone ID: LIB22-056-Q1-E1-G2
tgcccgcccggtccagaataaacgggtcgacgcacgcgtccgaaataagctcctatcttctttctttcttttagagatcttgtantctcctcttagttaatcttctattgtaaaactaagatcaaaagtctaaatggagattaacggggcacacaagagcaacggacgaggagtggacgctatgttatgcggcggagacatcaanacaaagaacatggtgatcaacgcggaggatcctctcaactggggagctgcagcggagcaaanganaggtacccatttggatgaactgaaganaatggttgcngagtttaggaanccagttntgaatcntggtggtgagactctgaccantggacaantggctgcgatctcanctattggtaacagtgtgaaggtgggagctatcggagacagctagnagccggtgtgaatgctagtantgattgggttatgggagagtatgaan

SEQ ID NO: 4107 - DNA, 439 bp, Arabidopsis thaliana
  unsure at all n locations
  Clone ID: LIB22-056-Q1-E1-G3
acgcgtccgttctcctcaaatttcttctttagaagattaaaaatcttctctctaatctctccactctttcataaatattttcctaattcttctaccttggtgtctgattctagcaccaaaccattttctcctaccaaaatctgggtttcgatcaattttaggtcttttgattcctacttgtctaatcgtcttgcaatttcaaagatgacagttgttggagatgttgctccaattccaaggaggaacagttctacttgctctaatgatatcgctgctccgttattaccangagtgtcatggagatgaagttgctcatgatgaattcaatggagcttcttttagtggcgcggtttttaacctcgccacgactataattggtgctgggtatcatggctttgcctgctacaatgaangattccntgggacttggacttgggaa

SEQ ID NO: 4108 - DNA, 416 bp, Arabidopsis thaliana
  unsure at all n locations
  Clone ID: LIB22-056-Q1-E1-G5
gggtggcaatttaccattctcaacctccggatacatcttcagtggtcaagcctgagaacaatcctccacagtaggatttctgcaataaagagtttgtacagctaatccaactgtccaacatgggtttttcttctgctctaatgactctggtttcttctctcctctctcacccacttgaaaggtaaaaaagtgaaaaaggctttgtagatggaatcaatgtaggatttgcagtagagggaaaaaaaatgtcaaaaagctcaattgatcaagtattattgtaatcattgtacctttattttaggtggactttgatgaaagcaactttttgttttcaagactttagtgggaaggttgaggaaggagcttgaanggtgttatttaattaagtagtagtagtaatgggaanttgtgggaac

SEQ ID NO: 4109 - DNA, 418 bp, Arabidopsis thaliana
  Clone ID: LIB22-056-Q1-E1-G6
ccttacagtttttatggctgtgatgtcttctacaatggtctctgctcagtcaagctgcacaaacgctttgattagcatgtcgccgtgtctcaactacataactggaaactctacctctcctaatcagcaatgctgtaatcagttgagtagagtagtccagtcttctcctgactgtttgtgtcaagtccttaacggtggaggctctcagcttgggatcaatgttaaccaaacacaagctcttggtctgcctagggcttgtaatgttcagactcctcctgtcagtcgctgtaataccggtggtggtggtggtggttctacttctgactctcctgcagaatcaccaaactcttcaggaccaggtaatggatcgaaaaccgtaccagtaggagaaggagacggacccccatcgtctgatgga

SEQ ID NO: 4110 - DNA, 424 bp, Arabidopsis thaliana
  unsure at all n locations
  Clone ID: LIB22-056-Q1-E1-E7
acgcgtgggcaaaaatggcattgcaaaagtttcctctcatggggctgcttttgctcctaaccatcctcgtctctgtgacaacagcggttgatgatcctgtttgcccggcgacttccaagctaagccgagcaagtttccctaatgggtttttgtttggcacggctactgctgcgtttcaggtcgaaggtgcaattaatgaaacttgtcgtggaccggctctatgggatatctactgtagaagaaatccagagagatgtagtggcgaccacgccgatgtggccgttgatttcttccatcgttataaggaagatattcagctaatgaanaatctaaacacagatgcattcangactctcaatcgcatgggtcaaagaatatttcctcaatgggagaanngagaaggganttaagtcaagctgtgttg

SEQ ID NO: 4111 - DNA, 419 bp, Arabidopsis thaliana
  Clone ID: LIB22-056-Q1-E1-B6
cgaacactcacctctcctgacctcatggaacctttcaacaactttctgttcatggaccggtgtcacgtgcgacgtctctctccgtcacgtgacctctctcgacctctcaggtcttaacctctccggaactctctcctccgacgtagctcatttacctctgctacagaatctatcactcgctgctaatcagatctcaggtcctattccgccgcaaatctccaatctctatgagcttcgtcacctcaatctctccaataatgtcttcaacggttcatttcccgatgaactctcctctggattggtgaatctccgtgttcttgacttatacaacaacaatttaaccgggagatttaccggtttcactcactaatctcactcagctccgtcatcttcacctcggtgggaattacttctccggc

SEQ ID NO: 4112 - DNA, 441 bp, Arabidopsis thaliana
  unsure at all n locations
  Clone ID: LIB22-056-Q1-E1-C12
acgcgtccganttgagttcgagagaagaaaggtcactaaagaggatataagagagctaatttctagggagatacttgagtaccaccctcagctgcttaaagatcatatgaacggggctgataaagccagttttctctacccaagtgctgttgatcaatttagaagacaatttgcgcatcttgaagaaaacagtggtaaaaccggccctgtggcacctctagaaaggaaacatgcctctcttcccagatcaacggtcatacactcaaccgcagtagcacgaggaggacaaccaaaacttatgaataacacaaacacattgaaccctgaaactactcaaaacattccttttaatcatgcaacaatacaagcacaacaaagaaacctctcaagcaagccaaaccaagcacattcatgggcccggttgcacctttcgacaatggc

SEQ ID NO: 4113 - DNA, 426 bp, Arabidopsis thaliana
  unsure at all n locations
  Clone ID: LIB22-056-Q1-E1-C3
taaantttaattgtttggatatttgcttttatcttctaccaanttcctctgattttgtcgaagaaattagtagctgnaaatccaanaatcggacttacttcatcagctttttggccccactttacaaagtatgagcaagtttttcttgttttctacagcaaagcaatgctcacaccattttcgtggagcttaaagtcttcaaacccaaactaaaagctttgaaatttctctgcaagaaacagagagagagatctagggattggctattaagagagagagagtagaagtactacactattggttcctgtgctgttgtgttttgtgcatctgttcttgtgtttctcagataaaatattagnttcagtcnttcaaagacattgantctcacacacttactaacacacactcacacacgcgttaatttct

SEQ ID NO: 4114 - DNA, 419 bp, Arabidopsis thaliana
  unsure at all n locations
  Clone ID: LIB22-056-Q1-E1-C6
acgcgtccgccgaaaccgagagaaaatatanaanaagatgattgagacggttaaacacctgatcggctccggtggtcccagcggattcgggtcaagatccaccgccgatcatgtcacttgtaattctgatctccgttctctaactgccatcatcactggcgcgacgtcggggataggagctgagacggcgcgtgttcttgctaagcgtggcgcaagacttgtgcttccggctanaagcgtcaaaaccgccgaggaaacataggctcgtatactgtcggagtttcctgatgcggagatcatcgttatgcatcttgatctcanctcacttacctctgttcgtcgattcgtggacgatttcgaatctctcantctcccactcaanatcctcataagncaatgctgggaaatatgcgcataan

SEQ ID NO: 4115 - DNA, 481 bp, Arabidopsis thaliana
  unsure at all n locations
  Clone ID: LIB22-056-Q1-E1-C7
tgttgacncctgccaggtaccggtccaanaattcccgggtcgacccacgcgtccggttttgcancaatgatgtccctatatttggtgatggcagtctcagcggtggtgatgagttatggtcatcttctaaagatgtatccaatagcccaaaatcattatcatcaatgttggactctcaagatctaggattggatattanaactgagtttgagcaacaagagaaccagcaatttccattgactggaaaagccaatggtctgtcatcccaaagtgtcccaagtgtacgtgtaactcttaaggctgaccaatatcgtgagcataagggtcaaccctcagttgaggaccaagccatatcaacaaaataaaatgatgaagttttcgaaaatgcctgggacttctgaggcaangccctttcaagagctgtacggtcacaggattccatttagtaattcagctggaaaatgtgtaaatcagttggcac

SEQ ID NO: 4116 - DNA, 433 bp, Arabidopsis thaliana
  unsure at all n locations
  Clone ID: LIB22-056-Q1-E1-C8
acgcgtccggaaaaacaaaaggataggaaagacgaagaaataaaaagagagagaatgttagagagacaaactctgagagacaaaacaagagaaaatcgctcgtcgtcggtattcaagcgtctgtgactccgataaagcctnnnnnnnnnnnnnnnnnnnnnnnnnnnnnnnnnnnnctttggagttgtcgtatctctaaatcggaggcaatttgagtgagataaagacaaaggaaggaatcaagtggactaccgaagcgagttttgagctttttcagagacggatttggagatttcttgttgatatcgtctgcttagaggcttatttggtaccagatgaaacagatctgagcttcggaaggtatggcgagttcggaggtttcaatgaaaggtaatcgtggaggagataacttctcctcctctggttttaagtg

SEQ ID NO: 4117 - DNA, 485 bp, Arabidopsis thaliana
  unsure at all n locations
  Clone ID: LIB22-056-Q1-E1-C9
tgtttacgcagcccttagcgggccaaaattcgcggnncnacccacgcgtccggagagattaagcaggggaagtatggggatataggcaaagttatggaagggccaaaccagtggccagagaatcctcaggagtttaaagagttgatggaggagtatattaagctatgtacagatctttctagaaagattttgagaggaatctccttagctcttgctggatcaccttatgagttcgagggaaagatggctggtgatcctttttgggtgatgcgtcttattggttatccaggtgctgagttcacaaatggccaacctgaaaatgatattggatgtggagctcacactgactatggcttgttaactcttgtgaatcaagatgatgacaaaactgctcttcaagtgagaaacttggggccggtgagtgggatatcagccattccaatccctnggatcgtttgtttgcaacatccgtgacatgtttaaga

SEQ ID NO: 4118 - DNA, 411 bp, Arabidopsis thaliana
  unsure at all n locations
  Clone ID: LIB22-056-Q1-E1-D10
agaagaacccaagatcgactcttacttcgaatctctctcaactttcttcctcagcttacgggaacttccacacatatacatccacaagaacccatatcgaagattcatcctacatatatttacatggatcagtactcatcctctttggtcgatacttcattagatctcactattggcgttactcgtatgcgagttgaagaagatccaccgacaagtgctttggtggaagaattaaaccgagttagtgctgagaacaagaagctctcggagatgctaactttgatgtgtgacaactacaacgtcttgaggaaagcaacttatggaatatgttaacaagagcaacataaccgagaggggattaaaatcagcctcccaagaaacgnaaatccccgggcgagagaggangcattc

SEQ ID NO: 4119 - DNA, 485 bp, Arabidopsis thaliana
  unsure at all n locations
  Clone ID: LIB22-056-Q1-E1-D3
ctgtttacgtntgccggtgnccggtccnanaattnccgggtcgacccacgcgtccgccgaatcaaatccaaaagagcaaatttacaatcttgcgaactcctaaaatggctcgtaccaagcaaacagctcgtaaatccaccggaggaaaggcaccaaggaagcaactcgcgaccaaagctgcgaggaaatcagctccagccaccggaggagtgaagaagccacacagattccgtccaggaacggtggcgttgagagaaatcaggaagtatcagaagagtactgagcttttgatccgtaagcttccgttccagagattggttcgtgagattgctcaagatttcaagacggatctgaggttccagagcagtgccgtcgcagctcttcaggaagcagctgangcttatcttgttgggctctttgaangatactaatctctgtgcgattcatgctaagaagggttacgattatgccctaagggatatccn

SEQ ID NO: 4120 - DNA, 411 bp, Arabidopsis thaliana
  unsure at all n locations
  Clone ID: LIB22-056-Q1-E1-D5
actctcgatctcgacgcgaaatagctttctctcttccaaaggcaattatcgaaaacctgcaaaaagtttctccgccaagtctctccaaaacccnnnnnnnnnnnnnnnnnnnnnnnnnnnnnnnnnnnnnnnnnnnnnnnnnnnnnnnnnnnnnnnnnnnnnnnnnnnaacgtaatctcgaagtcggttgtttcaatcctgccatggccgaagggaagttcgatctgcctgacgatctcatcttttccaaatcttctgatcagctcaaagaattgggctcagataacagcattcccttgtctccgnagtggctttacacgaaatcaagcgagtacaaggatggatgttcgatcnccctactcctgttcccatgggaaatccaagtgancnaaatccgaaggatgcatgggn

SEQ ID NO: 4121 - DNA, 489 bp, Arabidopsis thaliana
  unsure at all n locations
  Clone ID: LIB22-056-Q1-E1-D9
gttacgcctgccttaccggtccnaaattcccggntcgacccacgcgtccgaaaagaaacaaagccgtacaacgagggctcttcctgggcaacaaaaccaccattttcgttttatctcaatcttcgtctctttcgaaagatctaaccacaacaactccttaagatggataagtatcaacgaagtggtgaagccgaaagcggatacgccgattgatgcgaatgagattcgtatcactagtcaaggcagggcacgaaactacatcacctatgcgatgactcttcttcaggataaagggtcaactgaagttgtattcaaggcaatgggaagagctatcaacaagactgtgaccattgtagaagctgattaaagagaaggattcctgatcttcatcagaacacatctattgggattcacagacatcacagacacatgggaaccaacacagggaanggcntctaactttggagactacaagggcatgttgtcaat

SEQ ID NO: 4122 - DNA, 432 bp, Arabidopsis thaliana
  unsure at all n locations
  Clone ID: LIB22-056-Q1-E1-E1
tancctcctcaaggttacccaccacaacaagggtatcctccagctggaggctacccacctgccggatatcctcctggtgcttaccctgctgcgcccggtggttatcctcctgcacctggaggttaccctcctgctggctatcctgcacctggagctcaccattcaggacattctggtggtggactcggangcatgatagcaggtgcagctggtgcagccgcagcagcttatggagctcaccatgttggtcacgcctctcacaacccttacgggcatgctgtangacatgganggtatggccatgcccctgctcatggctttggccatggtggtcatggtaaattcaagcacggnaaagcatggaggcaaattcaagcacgggaaagcattgaanagcncngggaaaacatgggcatgtttggngggagggag

SEQ ID NO: 4123 - DNA, 426 bp, Arabidopsis thaliana
  unsure at all n locations
  Clone ID: LIB22-056-Q1-E1-E12
acgcgtccgtctttatctccttcactttctctctctcgataccgtttcgccgcagcttctcttcttctcccttcatctcaaaccattttcatccgatctcaatcctccaatcgtcggtctaactctaaccatctcggagtaatctacgagattgatatcgctgcggatcctcttgtcaataagttggaagatgctgtccaccggattatggtacgccgatccgcacctgattggctcncttttgtccccggtgcttcnttttgggttccacctcctagatcccagtctcatgggatcgctaagctcgttgagaagctggncaatccgatctctgatgaanaatctanttcantctcatcggttcgaggatgggcttgctctgattactcatcaanngnggtaaaagcctcaatcaagttgagacgg

SEQ ID NO: 4124 - DNA, 408 bp, Arabidopsis thaliana
  unsure at all n locations
  Clone ID: LIB22-056-Q1-E1-E5
tttttactgttgatttatctgaatatgccacgctctttcttccanatgtttantctctcttcctttcttcaacacaagcgtctggactaaggaaagccaacaacaaaatctggtttcaagacggttggcaggagtttgtcaaccgtttctccattcggantggtttcaganacaaagttacagtctacattttcaatttatcctccacactctgagatcaaccagcattctagtagtgaagctcttatgcanatggattccgcacagtatcagttcancaaacgtgctcgattgtttgaagatcctgaactcaaagatgctaangtcatttatccatcgaacccnnaatctactgaaccantgaataaangttacggctgttctacaagccatccaaagctttttcan

SEQ ID NO: 4125 - DNA, 428 bp, Arabidopsis thaliana
  unsure at all n locations
  Clone ID: LIB22-056-Q1-E1-B4
acgcgtccgattctgaattcaagatgtatgttacaaggcatctctccgaataccagagaaactcgtcggacttgacacgatcgttgccggaaggtccaaactccggcgtacttgtgattcaagacgaagagtcaaaaccgacttgttgctttggaaattgctacgatggtgaactcaaaggcttaccgttcccacaagaacgcaaagctgactgtgacttacagaaccggaactggtaatgacangcgcagttaccatgaccaggttctgttcantccggttcttgatcagccttattantcgangccgttattatgtcngtanacgacgtgggaagcaatcaaggaggagcttcnggcgagtgcaanaggaagaaganagagncccctgcngnntttgcnncagnnatgttcctgaagttaagccac

SEQ ID NO: 4126 - DNA, 473 bp, Arabidopsis thaliana
  unsure at all n locations
  Clone ID: LIB22-055-Q1-E1-H1
gtagcccgtccanaaattcaagggtcnacccacgcgtccgnataatcaaaattatgctgttgacccgttggtcttgaaaatttcactgattgttggaagaacccctgaagacttgattatccattgcattaaccgggcaagcataaccagagccaagatattattctaccttgtggagtccagtcccttgcatctgttagtctttggacactttttctttagtatgctaagtaagaaacaggatgactctgctcttacagatgatcaagtttatcatgcttctgcctgctgtgctatcgtatctgacatcagttattgcaaaactcgagaagccttgtaataaatgtttggatataacttcagtttattcaaatataccaataaatggttttccttcagtggccgangtttttggcnaggtgcatccttgaagaagaagcatgaagagaatcctccggttaacgactgaggat

SEQ ID NO: 4127 - DNA, 483 bp, Arabidopsis thaliana
  unsure at all n locations
  Clone ID: LIB22-055-Q1-E1-H4
aacttnccgcagccgtccanaattcaagggtcgacccacgcgtccgtcatctctgaaaattgctttatttggttgaattcattggattgttgatcgagattggtttactgattgatcgaaagtatggaggaagatcgtggggaagcgatcgttttagatatttcgccggagattaataatactccggcggtaatgatgagagttccacggaggattcgtgagaggcttttgtctgactgtagtaataagaagacagtatcttctgttcaagatattgaagacaagcttcttcatgcccatctacgaagacagcaattttatcataacgtttcgagaaaggctcgtgctaaacctanaagtccttcacgatcatctgatgaagaacttggccaacgaatcgaagcaagacttctggctgctgaacaaaaaaaggttggagattcntgccaaaggcacagatgccgttttggcgaagttangatg

SEQ ID NO: 4128 - DNA, 440 bp, Arabidopsis thaliana
  unsure at all n locations
  Clone ID: LIB22-055-Q1-E1-H6
acncgtccggttgtgataaagggtttgttgaagttctggcctatcacgaatagtcagaaggaagtgatgtttctcggggaggtcgaagaaattgtagaagcaatgagtgtgatggagtttcaaaagatcatggtccctttgttcttgcggattgcttgttgtgtcaccagttcccactttcaggtttctgaaagagctttattcttgtggaacaacgatcaaattgtaaacttgattggacataaccggcaagccatcctaccaatcatgttcactgctttagaaaagaatgctcagaaccactggaaccaatccgtgctaaacttaaccttaaacgtacgaaaaatgtctctgcgaaatggacnaggctcctgttcatgtcntgccacncccgctttaangaggacgaaananagcaatgttctgctgcgggaaaagan

SEQ ID NO: 4129 - DNA, 421 bp, Arabidopsis thaliana
  Clone ID: LIB22-055-Q1-E1-H8
actaacttattcacttttccggcactgattctgctcgggaaaaacaactccggcacaaaatgcagctttttccagtcatgttagccacactctgcattgtcctgcagcttctcattggctcgtcagctttggctacgacaaatcgccacgtgtcaaactctcattggcttcccgcagtagctacatggtacggaagccccaacggtgacggcagcgacggaggagcgtgtggttacggtacgttggtggatgtgaagccgttacatgcgagggttggagcggtgaatccaattctcttcaaaaatggtgaaggttgcggagcttgttacaaggttcgatgcttggacaagagcatttgttcccggagagccgttaccgtcaataattaccgatgaattgtcccggctgctccaaaaaccaa

SEQ ID NO: 4130 - DNA, 452 bp, Arabidopsis thaliana
  unsure at all n locations
  Clone ID: LIB22-056-Q1-E1-A1
acgcgtccgttacttacttctcaggtaataaatcgtaagatttatcaaacgcaagcaaaagagatggcccaaaagctagttgcacagggtggtgagacgggagatgtatgggatgatggtgtttacgacaatgttacaaaggtatatgtanggcaaggccagtatggtatagccttcgtcaagtttgagtatgccaatggttctgaagtggttgttgganatgaacatggagagaagactgagctaggagttgaagagtttgagattgattcggatgactacatcgtctacgtggaaggttacccgtgagaaagttagcgatatgacctcaggaaatgatcacgtttctttcattcaaagacntctaaaggcaaaacctctcagcctaaccgttaaaaaaacctgggggtttaagtttgtgcnacatgggtggaaaaaanccgttggggttt

SEQ ID NO: 4131 - DNA, 421 bp, Arabidopsis thaliana
  Clone ID: LIB22-056-Q1-E1-A2
gggcggacgcgtggggtttggagataagactgagattggagaacgcggaatcaacctcagcggagggcagaagcaacgtatacagctcgcacgtgctgtctatcaggaatgcgatgtatacttgctcgacgatgtttttagcgcagtggatgctcataccggttcagatatattcaagaaatgtgtaagaggagctctgaaaggcaagaccgtattactcgttacccatcaagtggatttcttgcacaacgtggattgcatcttggtgatgcgggatggaaagattgttgaatcaggaaaatatgacgaattagtcagctccggattgggattttggggaacttgtggctgcacatgaagacgtcaatggagctggttgaacccggtgcagactctgcaagcaagtcgccacatcccccaa

SEQ ID NO: 4132 - DNA, 466 bp, Arabidopsis thaliana
  unsure at all n locations
  Clone ID: LIB22-056-Q1-E1-A3
cggtaccngtccagaattcccgggtcgacgtccggattcntcatctctctcacagaaaaaagtaaaaaaaaacctagatcgctcttcacatctcttcgaacgattctctctttcaagatgcaaattttcgtgaaaacactcactggtaagaccatcactctcgaggttgagagctctgacaccatcgacaatgttaaggcaaagatccaggacaaggaaggcattcctcctgaccagcaaagattgatcttcgctggtaagcagctagaagatggccgcaccttggctgattacaacatccagaaagaatcaacactccacttggttctcaggttaagaggtggtatgcagatctttgtcaagactctgactggcaaaaccattaccttggaggttgaaagctctgacactattgacaacgtcaaggcaaaagattcaggacaaggaaggaatccctccggaccag

SEQ ID NO: 4133 - DNA, 436 bp, Arabidopsis thaliana
  unsure at all n locations
  Clone ID: LIB22-056-Q1-E1-A5
acgcgtccgccgcttataaactttctctcttctgaaaacagatctctctactttgcttcttcactcgacttgtatctatcatccatggcttccgagaatcctttccgaagcatattgaaggcgttagagaagcctgatggtggtgaattcggtaactactacagcttacctgctttgaacgatcccaggatcgataaactaccttattccattaggatacttcttgaatcggccatacgtaactgtgatgagttccaagttaagagcaaagatgttgagaagattcttgattgggagaatacttctcccaagcaggttgagattccgttcaagcctgctcggggttcttcttcaggactttactgggtgttcctgctgttgttgatcttgcttgcatgagagatgccatgaataatctcggtggtgattccnaata

SEQ ID NO: 4134 - DNA, 433 bp, Arabidopsis thaliana
  Clone ID: LIB22-056-Q1-E1-A6
acgcgtccgcccacgcgtccggttatttcaattcacgttggtcaagccggtatccaagtcggtaacgcatgctgggaactcttctgcctcgagcacggtatccaacctgacggtcaaatgccatcagacaagaccatcggtggtggtgatgatgccttcaacaccttcttctccgagactggtgcaggtaaacacgtcccaagatgtgtcttcctcgatctcgagccaaccgttattgacgaagtcagaaccggtacctacagacaactcttccatccagagcaactcatctcaggtaaagaagatgctgccaacaacttcgccagaggacattacaccattggtaaagaaatcgttgatctctgcctcgatagaatcagaaagctcgctgatcaatgcactgggtctccaaggtttcctcgtcttcaactca

SEQ ID NO: 4135 - DNA, 423 bp, Arabidopsis thaliana
  Clone ID: LIB22-056-Q1-E1-A7
acgcgtccggtcggtgattcacattccgatttggtgtcttttttactcttaacaagtcctcaaaaaccctacttttactcgagattttgtctccgccgccgagtaccaagtgcctcccgatctacgccccaatccctaaatggctacggaggctacaaccgtacccaaattccaggaacctgatctccggcaggtttctcagacaccggatttcaaaccggaaatcgctcacgatggtcttaagttctggcaatttatgattgctggttcgattgctggctccgtcgaacacatggcgatgtttcccgtcgataccatcaagacccatatgcaagcgcttcgaccatgtcccttaaaacccgtcggaatccgggaagctttccgttcgattatccaaaaggaaggaccttcaactctgtatcg

SEQ ID NO: 4136 - DNA, 410 bp, Arabidopsis thaliana
  unsure at all n locations
  Clone ID: LIB22-056-Q1-E1-A8
anttcctctgtcttccttcgcttccctcttctctcaccacantccgagagagagacantactgtaatccaagtgagagagagagagaaatganaatgcagacgaagaagctctttatcaccattgtctcctttcttctctatgctccattgttcttatcttcaccagttcctgancctgaatctgtcgttgaagaagttcacaagagnattaatgcgtcggttgcaggaagaaggaagttangttacctctcatgtacgaccggtaaccnaatcgacgactgttggcgttgtgaccctcactgggagcannaccgtcaacgtctcgctgantgcgccattggattcggcnaaaacgccatcggtggccgtgacggtcgggatntacgtggtcaccgactcaaggaagncg

SEQ ID NO: 4137 - DNA, 468 bp, Arabidopsis thaliana
  unsure at all n locations
  Clone ID: LIB22-056-Q1-E1-A9
accctgccgtaccggtccaaaaattcccgggtcnacccacgcgtccgcncacgcgtccggtccatcgnnnnnnnnnnnnnnnnnnnnnnnnnnnnnnnnnnnnnnnnnnnnnnnnnnnnnnnagagaaagagatcttcacaaatatgactgtgatgaatcaccgacacaagcaatgtcattttctcctcctccttctgatcactgtcttctctgccgcgttggatggtgtttcttccgagacagacgtcggagggtttgactacggtgaagcattgtctaaaagcttactctactttgaagctcagagatcaggaagacttccgtacaaccagcgcgtgacttggcgtgatcactctggtctcaccgatggtcttgaacaaggggttgatttaatgggaggatatcacgacgccggagaccatgttaaattttgganttccgatgggcttttaagggngacaatgttt

SEQ ID NO: 4138 - DNA, 489 bp, Arabidopsis thaliana
  unsure at all n locations
  Clone ID: LIB22-056-Q1-E1-B10
tgttaccctgcccgtaccggtccgaaaattcccgggncgacccacgcgtccgcncacgcgtccggcgcattgaattacacatcgccgcaaattcgaagtgtctcgagacgtaattacacttgcgatccgagtaaatcgtactcggtcgctgatttgaactacccgtcgttcgccgttaacgttgatggagtcngtgcgtataagtacacgcgcacggtgacgaacgtgggaagagctgggacttactcngttaaagtaacttccggagacgacagggagtcaagatttcggttgaaccggcggttttgaatttcaaggaagctaacgagaaaaaatcgtatacggtgacntttactgtagactcgtcgaanccgtccggatntaacanctttggggagtattgaatggtcngatgggaaacacntngtgggaantcccgtggcgaataactgggacataatccgtaaattatgagaaatgnaaaggggg

SEQ ID NO: 4139 - DNA, 486 bp, Arabidopsis thaliana
  unsure at all n locations
  Clone ID: LIB22-056-Q1-E1-B12
tgtttacgcctggcctgtaccgggtccgaaaattcccgggtcgacccacgcgtccgcncacgcgtccgcccgaagttgctcttcttgttcactctctgatctagtcttaactcctccaactacaattccatggcggtgtctcttcttctctggactctcttcctcttctcatttatcttctccctccaatcacacagcaaagaagaagaagaagacacaccaatcacacgattccagcaatacttaagattcaacaccgctcatccaaaccctaactacaccgcaccaatctcttttcttcttgatcaagcaagatcaattggtcttacttctcgaaccatcgagtttgttcctggtaagccagttcttctcctcacatggctaggctcaaaccttaacctttcttcaattctcttcaactctcatctcgattctgttcccgcggnatccgagaangtggatacatccaacantctcaagctcaac

SEQ ID NO: 4140 - DNA, 425 bp, Arabidopsis thaliana
  unsure at all n locations
  Clone ID: LIB22-055-Q1-E1-G8
acgcgtccgcatctttgatccaggttcagagattaaacaatttgaaaaatcggagactctgggattgtatggttcgttgttactgatagattacttaagctatggtttggtttagaatcggttcttctgtggcaaagcttgccataagaaggacactgtctcagtctcgttgtggttcatatgccactagaacaagggttttgccttgtcaaaccagatgttttcactctacaatactcaaatcaaaggcagagtctgctgcacctgttccacgtcctggtcccactttctaagctaactgatagcttcttagatggnacangcantgtgtatctagaggagttacaaagagcttgggaggctgatcccancagtgttgatgagtcgtgggatanctttttagggaaattttgtgggtcaggctt

SEQ ID NO: 4141 - DNA, 399 bp, Arabidopsis thaliana
  unsure at all n locations
  Clone ID: LIB22-052-Q1-E1-G6
aatttagaggatcttgttgtgcctaactatcaagagacatcagattcgtacccttctcctgatatgtggggtactggatggagcatgnnnnnnnnnnnnnnnnnnnnnnnnnnnnnnnnnnnnnnnnnnnnnnnnnnnnnnnnnnnnnnnnnnnnnnnnnnnnnnnnnnnnnnnnnnnnnnnnnnnnnnnnnnnnnnnnnnnnnnnnnnnnnnnnnnnnnnnnnnnnnnnnnnnnnnnnnnnnnnnnnnnnnnnnnnnnnnnnnnnnnnnnncatggatgacatgttcttaagttccattttggaggatgttccagggaatgagaattttctttctttcaaggagtcggataataacaacagctccaattcctcctaacccgaaacaacttgaagggaa

SEQ ID NO: 4142 - DNA, 418 bp, Arabidopsis thaliana
  unsure at all n locations
  Clone ID: LIB22-052-Q1-E1-G7
ctctctataacaaacattaatacacacaccaaaaaaaaacctgtttatgtctcaaagatctctgattcctcattcttcttctatagcttttggtctccattctcatctcttaatctccagtgagatcagctccaattctaactggtctctctaaataaaaaacagaaataaaaatccaacctttttcaattttcgttcaattttcccggaaaaaaaagcgatccttttgatttttcgatttctccaagtaacaattcaaaatgggtctaaagggttttgctgaaggaggaatagcttcgattgttgcgggttgttcgacccacccgcttgatctaatcaaggtccgaatgcaacttcaaggngaatcanctccgaatcaaaacaaatctccggacnagctctggcttttaaaacttcg

SEQ ID NO: 4143 - DNA, 487 bp, Arabidopsis thaliana
  unsure at all n locations
  Clone ID: LIB22-052-Q1-E1-H1
gaactgttacgcctgccgttaccggggccaaaattcccgggacgacccacgcgtccgcatcatcgcagaggagacgatcttacgcgacgaatccttgagagattgagagggacaagcgagttttgtaggtgtctcagaccggacccaaggattgttgacggtctatattgaacaagtaaacaaggatgcgtaagtggatctgttgtacatgtcaaatagaagactcaaatgaagagcaacaactgaaaagttcacagcagcaatctgatgcaaatcataagaattcaaaaccagcacctgttgcaaaacatgaggttaagaaggaagctcttcccatcgaggtccctcccttgtctttggatgaggtcaaggaaaagactgaaaattttggattcaaggcactgattggtgaaaggtcctatgggagaatatattatgcgacactaaatgaaggngttgggggttgccccaaaaaaaatttgatttc

SEQ ID NO: 4144 - DNA, 423 bp, Arabidopsis thaliana
  unsure at all n locations
  Clone ID: LIB22-052-Q1-E1-H10
gtacggncttnanagttgttccggcggaggaatggttgaatcaagggatatnttcgagtcacgacggtgaacatgacctaggcctaatggttacagattttctggaaacnggaggtggtagcggtggtgctggttcctggtgcagcagcgacagngattctggattcccanatccttcttacctttccnataagattcagtatctcaagtactctatggctcaacacgaaacngangttctcncggtggttcgtacattgatgcttactattaaggagaaagatctacactcctgtgaaatccggtacatgtaacgctanttgcatcaggttttatctcgctaagcttttganacnttcnggatatgatgcatctgtatgttcaaccagatggcanggtggtgggaaaagttccctgggtggg

SEQ ID NO: 4145 - DNA, 448 bp, Arabidopsis thaliana
  unsure at all n locations
  Clone ID: LIB22-052-Q1-E1-H11
acgcgtccgagaagaggaacggtatttaatacacttacaaatttgatattggaagaaccaaagatgccctggacagcattcttcatgtttttcaacagaacttgcactcgtctggttgtctttttcctcgttattctgtaattttgttcctttcaggtgttgtttccggaattcggaatagttctttgttgttgtgcttattatactggttagtttgtgagaatgtgcattgttggaaacaagaagggaaaccgatcattgaaggaaataggaacttttatgatgactacatgtttcattgctaattaccaatccgttcaagtttgccaggctgaatatttcagacagttgcttaagcctgtaacgtagtctagcgtctggagttttcnggaaattggggttttgaaccggctaactacttttgatttcgaaaaaaatttactgtgag

SEQ ID NO: 4146 - DNA, 469 bp, Arabidopsis thaliana
  unsure at all n locations
  Clone ID: LIB22-052-Q1-E1-H12
aaactcccggttcgtcccacgcctccnaaangagtcnnaataaanaaaagcaaattaaaaattaaatccctaaaaacaaacgagcgtattgttatgaaggaggacgaagaagaagaagcagtgatatcgaacggcatgaacgacgacgacgatactaacaatattaacaacagttccactgaatttgataacaatcgtatcggagacggagacgataacagtaatctgaatcagatcaaacaagtatggggaacgtgggaggagttggtgttaacatgcgccgttaaacgtcatgctttttccgattgggactccgtcgctaaggaggttcaggctcgttcccggagttctctcatcgtttccgccgtcaattgcaggcttaagtatcaagatttcaaacgtaggttccaaagattccgtcgacgtcggagacgaaaataccgaagcggcggcgaacgaaggaggatga

SEQ ID NO: 4147 - DNA, 470 bp, Arabidopsis thaliana
  unsure at all n locations
  Clone ID: LIB22-052-Q1-E1-H2
aactgttacgcctggccgtttacgccggccaagtatggtngaacgttccagggncnagcaaacgtctaatagttaaagagagcttttgttttttctttcccatgtctatcagtatcaccaccgagaaaatatcatcaacaccaccaaccanacattaacccacccgagagtacccaatgcnnnnnnnnnnnnnnnnnnnnnnnnnnnnnnnnnnnnnnnnnnnnncaccaccatctgtacaaagcaaagttatcatcaaaggaaaccaaaccattctgagtttcaaagctattttccggcttggtttcttcagcaccaccaatggttcctccaattggtacttgggtatctcttacgcttctatgccaactcccacccacgtttgggtcgccaatcgaatccgacccgtttcggatcctgactcttccactctcgagctcaactccaccggataactaancgtcagttac

SEQ ID NO: 4148 - DNA, 482 bp, Arabidopsis thaliana
  unsure at all n locations
  Clone ID: LIB22-052-Q1-E1-H4
ctgtttacgcctgcctgtaccggnccnanaattcccggagtcgacccacgcgtccgctttgaccgttcctcnnnnnnnnnnnnnnnnnnnnnnnnnnnnnnnnnnnnnnnnnnnnnnnnnnnnnnnnnnnnnnnnnnnnnnnnnnnnnnnnnnnncaatcaatctctagggttcttcttcagcaatacttcagaagctggttttggccatggaacccaatgggtacaggaaagaaagaagaaaggaacaacatttggggagaatgaatggtggtggtggtgatgttgagactgatcttgatccatggactgcatgggcttacaagcctcgcactatctctcttctccttattggcgcttgttttctcatttgggctagtggagctcttgatcctgacagcactacatctgatgatcttgtcacttctgtcaaaaggggaatgtgggctaagatngctgtccttcctgctantccttggccca

SEQ ID NO: 4149 - DNA, 377 bp, Arabidopsis thaliana
  unsure at all n locations
  Clone ID: LIB22-053-Q1-E1-A7
atcagatggaggagaaaaggatgattcttaagtcattggaagatctggattcgttacgtaaaaggtttgatgctgcagaacaagttgaggacgcattgacaggcttgaaggtgctcgagtttgacggaaactttattaggctccaactgcgaacatatattcaaaaactagacggttttcttggacagcacaaatttgaccacattactgagccatctgaattgatccatgaattgctaatataccttaaggataaaactacagagataacaaaatttgagatgttccaaaatgatatatacataaggagacatcatccagggcagctgantctttcaggcacggtaagggttacacttgcagtgcctaagacacaa

SEQ ID NO: 4150 - DNA, 382 bp, Arabidopsis thaliana
  unsure at all n locations
  Clone ID: LIB22-053-Q1-E1-A9
tctgattgatatagaaatcgaaactcaaattggagaacattcgagaagctttggatttttgaatcacgaagacatggaaaaaacagaatctgtatcaggaaaggggaagagagtgattgttatcggcggcggaatcgccggctctctcgcttcgaaatttcttcaattcgattccgatctcaccctcattgatccgaaggagtattttgagattatttgggcaagtttaaggtcaatggtagagccagcttttgctgaaagatcggtgataaaccacaanaagtatttacaaaatggtcgtagttgtgacttctccaccggttaatatcacagacaccggatgttttgaccgccggatgggtcttggtctttggggtatgnt

SEQ ID NO: 4151 - DNA, 399 bp, Arabidopsis thaliana
  unsure at all n locations
  Clone ID: LIB22-053-Q1-E1-B12
gggcgcgaaacagagtaaggctcactttgttttagctttctcctctacttcgataatgccgtttgctccttccttgttgtcatcgtcttcctcagtctctcaatttcttcccagattccccaacgcgactagattcaatgtaactccacggagcagagccgccaccgtcgtcgcggcatccgtcaccgacctagccggggtcgacagtacaacaatcgccgtactcngtggaggatccgtagcagcactcgcggcgatggtttccttaacggatccngagaggaggcggaaattgcaggcggaggaagttggcggaggccataangaggttgtgagggaagtatttcaataacacggggttcgagaggtggnggaagatctacggtgagactgangaag

SEQ ID NO: 4152 - DNA, 400 bp, Arabidopsis thaliana
  unsure at all n locations
  Clone ID: LIB22-053-Q1-E1-B4
cagatgatccaaatatgcatagtatacttaaccgtataataatgcctgagtccattgaaaagcatggagtcaactggaaaggcgttgactttcttgttttcaacacttacatttggtggatgaacacattcgctatgaaagtcctacgaggatcgttcgataaaggagacaccgagtatgaggagatcgaacggccagtagcgtataggagagtgatgacgacttggggagattgggtggaacgaaatattgatcctctacgtaccactgtcttctttgcnaagcatgtctcctcttcacatcaagagcttggattgggaagaatccagatgggatcaagtgtgcanttagnagacgacaccaatccgtaagacatgtcaatgccattcagcggtangaa

SEQ ID NO: 4153 - DNA, 396 bp, Arabidopsis thaliana
  unsure at all n locations
  Clone ID: LIB22-053-Q1-E1-B7
catcaaattcactcacgaaaatgtcaaggccatgatattggatattgttgtgccgggaactgacacggcggctgcagtggtggtatgggccatgacttaccttattaagtaccctgaagcaatgaagaaagctcaagacgaagtgaggagtgtgataggtgacaaaggatatgtctctgaagaagacatacctaatctcccttacctaaaggcagtcatcanaggagtctctttcgggctcgaaccagtcatccccattcttctacacagnggaanctatcgcaagacgcagagataggtggctatgatatttccgggccaaggacnatcattcaagtnnaacncatggggcgggttctccgtgacanangccgcnttgggggagacaaccctnaa

SEQ ID NO: 4154 - DNA, 345 bp, Arabidopsis thaliana
  unsure at all n locations
  Clone ID: LIB22-053-Q1-E1-C11
ccaatctccatcgctccgatccagattccgatggacgccaccgagcagtctctccgtcaatctctttccgagaaatcctcatccgtcgaagctcagggtaacgccgtccgagctctcaaggcttcccgtgcagctaaaccatgaaatcgatgctgccantgagcaactcaacaaattgaagctcgagaaatctaccgtcgagaaggagcttcagtctattancagtagctccggtaatggttcgcttanccgtgaggcntttcgaaaagctgttgtcantacncncgagcggggtttgttctanancncttcgtntaagatcnacagtggngtcggctggacttt

SEQ ID NO: 4155 - DNA, 357 bp, Arabidopsis thaliana
  unsure at all n locations
  Clone ID: LIB22-053-Q1-E1-C12
tcaaagatcgatttggggatcaatcgaggaagaagatgacggaggcgatgataaggaagaagccaggaatggcgagtgtgaaggatatgccgttgcttcaggatggtccaccacctggtggattcgcgccggtccgatatgctcgccggatctccaacacgggacctagcgccatggctattttccttaccgtttccggtgcttttgcttggggcatgtaccaagttggtcagggcaacaaaatccgcagggcgttgaaggaagagaagtacgctgcacgtagagcaattctaccgattcttcaagctgaagaagatgaaaggtttgtgtctgagtggaacaagtatcnagaatacc

SEQ ID NO: 4156 - DNA, 407 bp, Arabidopsis thaliana
  unsure at all n locations
  Clone ID: LIB22-052-Q1-E1-G5
ttttttaactccgtttaaattttccgtctgaattttacaaaggaacactaatgtcagcttttgacggcgttgaaaatcaaatgaacggtccagattcatctcctcgtctctctcaagatcctcgtgagcctcgctcattattatcatcttcttgtttcccaatcaccctcaagttcgttgatgtgtgttaccgagtcaagatccatggcatgagtaacgattcttgtaatatcaagaaactattaggattaaaacaaaaaccgtccgatgagacaagatcgacggaggagaggacgatactaagcggagtcaccggaatgatatcacccggcgagtttatggccgttcttggaccatcgggaagtggcaaatcnacgctactaaacgcaatcccaagggaaaacncc

SEQ ID NO: 4157 - DNA, 466 bp, Arabidopsis thaliana
  unsure at all n locations
  Clone ID: LIB22-052-Q1-E1-E2
tgttacgcctgccttaccgggccaaaattcccgggacgacccacgcgtccgcccacgcgtccgcgaaaagctaatccaaaactctttaattatttgcaacaactgatcaatggctgtaacaagctcttcttctacttgtgatggtttcttcatcatcagccttattgttatcgtttcttcattgtttgggacatcatctgcgcagttaaacgcaacgttttactcaggcacatgccctaacgcctctgccatcgttcgcagcactattcagcaagctcttcaatccgatgcaagaatcggaggcagcctaatccgccttcattttcacgactgttttgttaatggttgcgatgggtcgctcttgcttgacgacacttcaagcatccagagcgagaagaacgctcctgccaatgcaaactcaactagaggattcaatgttgtcgagagtatcaaagncaagccccca

SEQ ID NO: 4158 - DNA, 469 bp, Arabidopsis thaliana
  unsure at all n locations
  Clone ID: LIB22-052-Q1-E1-E3
gaactgtttacgcctgcccgtaccggnccaaaaattcccgggaacgacccacgcgtccgactacgattgttctgcccatatgatttgggtcggtgagcgaaccagacagctagatggtgcccatgtcgagttcttaagaggtgttgctaatcctcttggaatcaaggtgagtgataaaatggatccaaaggagctagtgaagttgattgagatcttgaatgctgacaataagcctggaaggattacaataatcacaagaatgggagctgagaatatgagagtgaagcttcctcatttgatcagagaagtgcgacgtgctggacagattgtgacttgggtcagtgatccaatgcacggaaacaccattaaggctccttgtggtctcaagactcgtccctttgacgccatcttggctgaagtgagagctttcttcgacgtgcacgagcaagaaggtaaccancccggagga

SEQ ID NO: 4159 - DNA, 426 bp, Arabidopsis thaliana
  unsure at all n locations
  Clone ID: LIB22-052-Q1-E1-E4
acgcgtccgaggatactttgtatggtcattgttggataacttcgagtggcaagatggttacaaaaacaggaaatattancttcagaggcatcttttgagtatgcaagaagctgtttgcatcnacaaagtgaatgttacaggatactttgtatggtcattgttggataacttcgagtggnaagatggttacaaaaacagatttggactctactacgttgatttcaaaaataacctcacacgttacganaaagaatccggcaagtattacaaggatttcctcagtcaaggtgttcgtccatccgcgctcannaaggatgaagctttaagctanttctgtttcaatgtgtttttcctaagttttactttgtgaagtgaccaagattcatganggccctgggtctaananaaaggagtttaattttcctc

SEQ ID NO: 4160 - DNA, 478 bp, Arabidopsis thaliana
  unsure at all n locations
  Clone ID: LIB22-052-Q1-E1-E5
agccgtttacgccgccagtaccggtccagaattcccgggtcgacccacgcgtccgcggacgcgtgggaaaaaagcaaaagactcagctaaaaagcgacctactagagaggaacgggagagaaacaaaagcaatgggaagaagagttcttatgctgatcaacctgtatcatttgtgtcaagtggcataatcgattctgagatagctgttgcaaaaacctcagttgaaaaagttgcaaaagaggtagctgaaactactccgggaacctctaatggagcagacattggagcatttgaggtacataccaagaggttttggatccaaaatgatggctaaaatgggattcatagatggaggtggtctaggaaaggatggtaaggggatagcacagccaatagaagctgttcagcgtccgaaatcacttgggttangtctggatttctccattgacactgaagacccgaatccgtcaagttataa

SEQ ID NO: 4161 - DNA, 419 bp, Arabidopsis thaliana
  unsure at all n locations
  Clone ID: LIB22-052-Q1-E1-E6
ttaacgaaaaagacttgtcgttctcaattcttatcgatttaagaacaaatcatctaacgaagattacttccgaagatcagaaacaaacacaaactgtgaatcgttgtttgttaattctctttaaaatcgccagaagaaagagatctccgttttctacagaagaaaagcaagagagtaagaatgggatcggaacaaaacgatagcacaagcttcacgcaatcgcaagcttcagagccaaagctatgtgttaaaggatgtggtttctttggatcaccatcaaacatggatctctgttctaaatgttacagaggcatttgtgctgaggaagctcaaacagcagttgctaaagctgctgttgaaaaatctttcaagccttctcctcctcgtagtctcttcatagcaagaacctcctgntgttg

SEQ ID NO: 4162 - DNA, 409 bp, Arabidopsis thaliana
  unsure at all n locations
  Clone ID: LIB22-052-Q1-E1-E7
taataattctccagaacattttgcacattccgtttcactccgtgttgttggatcccccaaaggtaaaacctttttccccagattatttctatttcgttcctctcttctcgatttcgactgattttccgtttttatgctcttctcttttccattttgaactccaattttgattctttaaagaaaatgagttgctttgggtgttgtggggaggatgatgatatgcataaaactgctgattatggaggtcgtcataaccaagccaaacactttcctccaggaaatgatgcaaggcaccaccaagcctctgaaactgcacagaagggtcctccagttgtgaagttgcagcctattgaagtacctattatcccttttaagtgaactcaaagaagcaactggatgaatttggntc

SEQ ID NO: 4163 - DNA, 499 bp, Arabidopsis thaliana
  unsure at all n locations
  Clone ID: LIB22-052-Q1-E1-E9
gacctgttacgcctggccagtaccggtccgaaaattcccgggtcgacccacgcgtccgcagctccgtacgatcacaaggattcactgatttctaagcttttcatagaaagaagaagaaaaaggcggaattcgatggtggatgcgattcaagtagctgagctgagaagattcgtcgagcagttgaaattgaatccttcgattctccacgatcctagtctggttttcttcaaagaatatctccgaagtttaggagctcaagttccgaagattgagaaaactgaaagagattatgaagataaggctgagacaaaacccagtttctctcctaaacnnnnnnnnnnnnnnnnnnnnnnnnnnnnnnnnnnnnnnnnnnnnnnnnnnnnnnnnnnnnnnnnaccaagacaatgagcctcctcaagccgatgggagaccctactgctgaagtgaccgatgaaaatagggatgatgctcagtcagagaagagcaaagctatggaggc

SEQ ID NO: 4164 - DNA, 474 bp, Arabidopsis thaliana
  unsure at all n locations
  Clone ID: LIB22-052-Q1-E1-F1
ctgttacgcctgcngttaccggnccgagaattcccggancgacccacgcgtccgtaaaaatcacccgactttaatgattaaataccctgaggctgtagacttctatgactattacaaggggcagatggagccctgggatggacctgctttggtattgttcagtgatggaaagactgttggagcttgccttgaccgcaatggacttcgaccagctagatattggcggacaagtgataatgttgtctatgtagcctctgaggtcggagttcttccaatggatgaatcgaaagtcaccatgaagggtcgtctaggacctgggtatgatgatatctgttgacttagagaatggacaggtatatgagaacacagaagtgaagaagcgggttgcatcatataacccatatggaaagtgggttagtgaaaacctgcgaaacctgaagccttccaattanctctcgtcagcgattctggana

SEQ ID NO: 4165 - DNA, 56 bp, Arabidopsis thaliana
  unsure at all n locations
  Clone ID: LIB22-052-Q1-E1-F11
acgcgtccgnnnnnnnnnnnnnnnnnnnnnnnnnnnnnnnnnnnnnnnnnnnnngg

SEQ ID NO: 4166 - DNA, 464 bp, Arabidopsis thaliana
  unsure at all n locations
  Clone ID: LIB22-052-Q1-E1-F2
ccgggnccagaattcccggancgacccacgcgtccgcgtaaagccattatcactaccaatccaaaagagcttttattaatacaccttactcgtgaccggattcgcagagttcacgagcttccgagtcaaaaacactctaaaacaaaaccatgactttgttccatagactcgatctcatcgatccgtacacgtgtacaccactcatcgtccgtgaaacctccattgttgaaccttcatcattgttcctagggtttccttccttcatcgacgaagacattgaagatctcttcgagttttcatcacctaatcctctcgatctattcgaaaccgtgacggatctggttaagattaagaaatctccgtcgtcttgcaagtacaaggtgattcgtcggagattagagccggagtatccattgaaggtatccttggtgaacgtgtttctgaattggggatccaangtttgg

SEQ ID NO: 4167 - DNA, 480 bp, Arabidopsis thaliana
  unsure at all n locations
  Clone ID: LIB22-052-Q1-E1-F4
ctgttacgcctgccggtaccgggtccnanaattcccgggtcgacccacgcgtccgctgtacgacagttcttgggaagtatgttattccaaggatgatttacgacgacgtcgttcacgtcctgcatttgtttcattattacgtacattatgttttaaattacgtgatgatactggattatcgggaatcttttttgatgaacatccagagaataaaaatcgtcctcctgattttcttcttttcacagcacttacaacacttatcaatagtgacacggatgaaggacgacatgcattagaaggtttactttgtatcatacaattaccacatcctaaaattgccaattttattgtagatcaaacaacattttgtatgcgattggtaaaaggattagaagaacgatataaacgtgtaccattgacatttgataccaatgtgactgaattaccaatatcacatccacataatggccccaaggctgg

SEQ ID NO: 4168 - DNA, 458 bp, Arabidopsis thaliana
  unsure at all n locations
  Clone ID: LIB22-052-Q1-E1-G1
ntgttacgcctgccggtaccggnccnnaattcccgggncgacccacgcgtccgatctgtgtgagtatgttggaaagctatcaatgaatgcttgcagatctctggaaatcttttggatgaagggaaaattagatccatagttgatgagataaagcaagttatgaccgcaagctctagtaggaagcgagagaggggagagagggcccatgctgaagactttgacgctgaagagggagagcttattaaagaggaaaatgagcaagaggaagaaatttttgatcaagtcggtgaaatattgggaacattggttaagacattcaaggcctcatttctacctttcttcgatgaactgtcctcttacttaactcctatgtggggaagagataaaacagcggaagagagaaggattgctatatgcatttttgatgatgtancaaaacaatgccgtgaanctgccct

SEQ ID NO: 4169 - DNA, 448 bp, Arabidopsis thaliana
  unsure at all n locations
  Clone ID: LIB22-052-Q1-E1-G10
acgcgtccgcagaaatagagaaaaagtttcaatctttcttcatcttcttcctccaaaatccttgatttctaaaaaggagaagaagagaagagaacgcgattaccttgattcaccctcctccttcaggtttgggaggctcgaatactcaggaaatgaaaggggcaagtggtgctgttaagaagaaaccccaggtgttgaacgaagctggtgaggcggagacggcggtggaaacagtcggagaaagccggaaaattannnnnnnnnnnnnnnnnnnnnnnnnnnnnnnnnnnnnnnnnnnnnnnnnnnnnnnnnnnnnntcgattcttcgcgagattggtgatgataggcctacgnnnnnnnnnnnnnnnnnnnnnnnnnnnnnnnnnnnnnnnnnnnnnnnnnnnnnnnnnnnnnnnnnnnnnnnnnnnnnnnnnnnnnggcgtgacct

SEQ ID NO: 4170 - DNA, 411 bp, Arabidopsis thaliana
  unsure at all n locations
  Clone ID: LIB22-052-Q1-E1-G12
ggatctgcttcagatctaaangcaatcaaagagaagaagaagaaagctaagcgttcccgcaaaaagcagcttgttcaagaagaggaacgagtaaagggaaaagtcagcatganggtgtacttgtcatacatgggtgctgcatataaaggggctctgattcctcttattatactcgcacaagctgctttccaatttcttcagattgctaagtaattggtggatggcttgggcaaatcctcaaactgaaggtgacgaatctaaagtggatcctactctgcttctcatcgtttatacggctttagctttcnggagctctgtggttcatatttgttccagctgctctggttgcaacttttggtcntgcaactgcacagaaactgttcctaaatatgcccaaaaatttngttccaa

SEQ ID NO: 4171 - DNA, 430 bp, Arabidopsis thaliana
  unsure at all n locations
  Clone ID: LIB22-052-Q1-E1-E12
ttgttggctttgacgatgttgaaaccgccgggtgagtttggggcggatattgttgttgggtcgggtcagaggtttggtgttccgatgggttatggtggtcctcatgctgctttcttggctacttcacaagagtataagagaatgatgcctgggaggattattggtgttagtgttgattcttccgggaagcaagctttgcgtatggctatgcagactagggaacagcatatccgcagggataaagctaccagcaacatctgtaccgctcaagccttgcttgcaaatatgactgctatgtatgctgtttaccatggaccanaaggcttaaaatctattgcacaacgggttcatggtctcgctggtgtatttgccttaggattgaagaaactgggaactgcacaagtccaagatcttcccttctttgacactg

SEQ ID NO: 4172 - DNA, 384 bp, Arabidopsis thaliana
  unsure at all n locations
  Clone ID: LIB22-052-Q1-E1-G2
acgcgtccgcacacaattgggaatggacattgtccacagatcacaaaccgtctctacaacttcaccggaaaaggagatagtgacccgaacttagacacggnatacgcagtcaaactcagaggaaaatgcaagccanctgataccacaacggctctagaaatggatccaggaagctttaaaacgttcgatgaaagttacttcaagcttgtgtctcaaagaagaggattgtttcaatctgatgcanctcttttagacaatcaanaaantaantcttatgttctcaagagtttgaatagngangggtctactttctttaaagactttggtgtctccatggtaaaaatgggtcagattgganttttaacgggtcangttggggaaatt

SEQ ID NO: 4173 - DNA, 477 bp, Arabidopsis thaliana
  unsure at all n locations
  Clone ID: LIB22-052-Q1-E1-C1
ttacgnctgcctctaccgcggntcnnnttcccggaacgacccacgggcccgcaatttctctccacttaaaaccaaccccaattctcaccaaaaatcgcaaaaaaagatttcaactttcgataaacccagatcgaaaaatcagatttttccaagatcaatcagagagttagagatggagtataataacaacaatcagcaatctttttggcagttcagcgaccagctgagagttcagacaccgaatctagcgaatctgtctctcaacgactcgatctggagcacaaactctgtcttcaaagagcgtcgaaacttagacatagccgccaccaccgacaagaacaacaaccagatcgactattatcaagaagaagacaacttccgacaacatcaattccaactggaactggaagtcttctggttcaaacaacgacatgggtttaggattccgggcctgtggggttaaaatccacccgggng

SEQ ID NO: 4174 - DNA, 449 bp, Arabidopsis thaliana
  Clone ID: LIB22-052-Q1-E1-C10
acgcgtccggagaaacgatcttgctcaggaagagatccagtagttctcaatgataataactcaaagacagttctcgggaagctgtccgtttcccaaaatgtagatcctttattgaaggaaacaaagtctctaggaagattatctgtttctcagaactctgatccttcgacaaaagaaacaaagtccattggaaggtcatcaacatcacaaaattcagagtcctcgatgaaggaatcaaagcctctcgggaggttgtcagtttctcaaaattcagacgtttctaaagagtcaaggacgttttcatccacaggaagtttaccaaggcactcctcatagggtcagttcgaccaatgtatcaaaagccacttcgggtgtttcaacagccgtctctaatgctgcaacgtcaaggaggaattttacaaaagctaacccaaaggcgaatcctgtca

SEQ ID NO: 4175 - DNA, 447 bp, Arabidopsis thaliana
  Clone ID: LIB22-052-Q1-E1-C11
acgcgtccgcccacgcgtccggaaaaaagtggaaattttcctttaaatttagtttaaaactcatacaaatccttctactcgaccactggtactctccgtaagctacttgctgaattcgattattgattttgggcgtagaagaagatgaaggcatcgatgaagtttcgtgaagagcaaaagcctctttttagggctaaagttcctttaagcatcttaggtttaccctttcaatctgggaatcgtcgccggagaatccaaggagctcagtctcaatctctccactttcttcgaatctggcccttctctcaaaagtcgcttaccgtccaaacgattcgtggaatcctttctctctaatcgtcaaaaccggatcgggatcgttcggttctccgatttcaagctctatgctcatgagcgctgaattcaatctcctaagtcaaggaaacccta

SEQ ID NO: 4176 - DNA, 407 bp, Arabidopsis thaliana
  unsure at all n locations
  Clone ID: LIB22-052-Q1-E1-C6
aaatcgaacttttgattccaaaagcgatgagaccgattcaatcgcctccaggagtttccgttccggtgaaaagccgtccccgtcgccgtcctgatcttaccttaccgcttcctcaacgcgatgtttctctcgctgtacctcttcctctcccacctacttccggtggttccggtggctctagtggatctgcgccgtcttctggtggttcggcgtcttcaacgaacactaacagctccatagaagcgaagaactattcggatttaagtgagaggtaacccgtatcggaagcggagcaagtgggaacggtatacaaagtgattcaccgtccgagttctcgtctatatgcacttaangtgatatacggtaaccacgaagagactggtgagaacgtcagatcngtagagaga

SEQ ID NO: 4177 - DNA, 406 bp, Arabidopsis thaliana
  unsure at all n locations
  Clone ID: LIB22-052-Q1-E1-C8
aaatgctgggtttttgaacgaacgaggatgacgatgctcagagtccgaagcagagatggattggagagagtgagtgtagatggacctcatatcacagtctcccaactcaaaaccctaatccaagatcagcttcagatccctatccacaaccaaaccttatccaccaatagaaaccttctcctcgctaagagcccttctgatttcctagcgttcaccgacatggccgatcctaacctccgaatctcgtctctcaatctagctcacggctctatggtctaccttgcttacgaaggtgagcgtacgattcgtggtggtcctgctgtaacgcctgctggttccttcgggaggaagatgaccgtcgaagatctaatcgctcgacagatgcgcgtcggtcgccaagaagaan

SEQ ID NO: 4178 - DNA, 466 bp, Arabidopsis thaliana
  unsure at all n locations
  Clone ID: LIB22-052-Q1-E1-C9
acgcgtccggaaacagtcattatcctcaacatccccgctggtatgaattatgtgatttgttcggcatgtacatgatcgatgaagccaatatagagacacatggttttgatctctctgggcatctgaagcaccctgcaaaagagccaagctgggcaagctgctatgctgggatcgagtagttgggatggttgaaagagacaaaaaccatacatgcataatttcttgggtcacttggaaaatgaggctgggctatggggcccaatcattctgccatgggcaggttggattaggggaaaaggaccctcacggttggtgcactatgaaaggtggtggttccagaaacaagttctacagatataagcctgccctaagttacatgcgggtttgggacatcaaccangaattgcacttgattaaaattgaatccacgggccgtttgatattangcgagntatcaacaatgcta

SEQ ID NO: 4179 - DNA, 460 bp, Arabidopsis thaliana
  unsure at all n locations
  Clone ID: LIB22-052-Q1-E1-D12
acgcgtccgctcttttanatttcgaatcgagaccagatctgcgtgaagatganagagaagtgtatangagcgcatcggtttcggagattacagagattcatgcgtcaagggaaagtgacgattctttgtctcgttctcaccgtcatcgtcttacgtggcacaatcggagccggtaagtttggtacgccggagaaagatatcgaggagatccgtgagcatttcttctacacgcgtaaacgcggcgagcctcaccgtgtcctcgtcgaggtctcttccaaaacgacgtcgtccgaagacggaggaaatggtggtaacagctacgaagaccttcgatatcaacaaagctaatcgttgatgaaggagacgaaagaggaaatctcnaagaccgggactaataaaaccttaatccccttgggtcccaaagatctctgattgggaatgaancagagaccttaatttg

SEQ ID NO: 4180 - DNA, 487 bp, Arabidopsis thaliana
  unsure at all n locations
  Clone ID: LIB22-052-Q1-E1-D2
aactgttacgcctgccgttaccggnccgaanaattcccgggacgacccacgcgtccgcgaaaccaatgaagaactgggtagtgaggggtttcgtgagttcatatctcttgttgatcttaagaaaaatggtttccttattggagattgttgtatgtttggtgtcaagttccatgggattgaacctgctaaacccggaacagcggaaagttttagcttaatagagaagcctcttaatcacagagtcacttggatgatgaccatgttctcgtccttcaaccctggaaacgttcatcagtctaatgaatttgtcgttggaacccggaaatggagaattaaagttcatccaagagggtctatgggtgaaaaagacaaatcattttctgtgtatctatcggcactagggtttgtcaataatgcaccaaagactaaaacttacgccgaggttcaaactgcgtgtaatggntttaattttgccagggancccatt

SEQ ID NO: 4181 - DNA, 414 bp, Arabidopsis thaliana
  unsure at all n locations
  Clone ID: LIB22-052-Q1-E1-D5
acgcgtccgatatttttttaaaaagaaaaaccaaaaaatcctttgaaacttttttagcctgtcgcttctctttccatcgtcttcctcgtgaacgaaacttctcgatcttcttttcttttttttcacctgtttttcggtatcacgagaatactacacttcccactccactttatcggatatatttccttgattttctccgattgtggtcaatctggaaaattattgagaatctctccctcacttaaccaaaagcgtttttaatcagatagagagagaggaaaaagcatcaaccaaaccatggctgcgagaaatttggagaagatggcttctattgatgctcagctcaggcttcttgctcctggcaaggnttctgaagacgacaaanttaaccgagtacaaggcnccgttacgggt

SEQ ID NO: 4182 - DNA, 416 bp, Arabidopsis thaliana
  unsure at all n locations
  Clone ID: LIB22-052-Q1-E1-D6
gcaaagatgatgaatcatttgcttttggctcttttccttgttggaaccatcgccttaccagatagaggaactcaacaattgaccaacgatggcctcaccggcgcgaggcgagagatactctctttcttagaccaaagacttgcagtggtgtacccagtgatccagagattcaagtcactcatcactctcgacccttataacgtgaccaagacatggattggttcagacatctgcagttatagaggcttccactgtgacaatcctcctcacaacaaaaccgcagttactgttgcttccatcgatttcaatggctttcagctctctgctccatccatcgaaggatttatcgatcaattcgctgacctagctctgtttcatgttaactcaaacaattttggaggtacggtgncctccaa

SEQ ID NO: 4183 - DNA, 418 bp, Arabidopsis thaliana
  unsure at all n locations
  Clone ID: LIB22-052-Q1-E1-D7
ctctgccatggctcccgcactatctacttcttgctcctccgtcatggctttctcaacatcaaacgcgcttcgttaccatcatcctcaaatttctctcaggaactctcttcgcgctcccaaatcgccttcttttgtcaggcttcccctcggaaaggtgttacagagcaggattgtgatacgtgctgcttcgtctgcggctggtaatccacagtctgatgctgactttaatccgtatgaggttcttggtgttaaccctatagagggatttgacaagatcaagcaaacttatggaaggaaacttaaagatgctcagaggagcggtgatgaagccactgctgctctacttgagaaggcatatgataagctcatgtatgcccaagttgatgaatangaaaaagggtgtgacttttggttcctt

SEQ ID NO: 4184 - DNA, 415 bp, Arabidopsis thaliana
  Clone ID: LIB22-052-Q1-E1-D8
aaaaggaaaaaaagtaatcatcgattcgctttcacaacctggaaagctcgaaaagaggaaaaaaattctaaagagcttatcaagctcacttcatacacctagatcgatttagggttcgtttgatttttttttttctgtgattgcgacagctagagatctatctctggtggattttgggtttatgttccatggcggatcgcggatctttcggatttgctcctcgattagatatcaagcaattgctgtcagaagcacaacacaggtggctgagacctgctgagatttgtgaaattcttcggaatcatcagaagtttcatattgcgtcagagcctcccaaccgaccacccagtggttcactctttctcttcgataggaaggtgctcagatatttccgaaaagacgggcacaattgggg

SEQ ID NO: 4185 - DNA, 479 bp, Arabidopsis thaliana
  unsure at all n locations
  Clone ID: LIB22-052-Q1-E1-E1
ttacgcctgcntttaccgggccanaattcccggancgacccacgcgtccgaaaaaccaaacaaacaaacaacaaaccagaagttttatttttgttaaagagtaaccaaaaaaaaaaaaacagagtaccttcttcttcacacacataaaaagagacggtaccaaaaaataaaaacagagcaaaccacaaaaatggggaagcatttattccgatcatctcctccaccggagaaaccaacagctcatctctctctcgcggaatcagctgttcaagaatgtatgagcaacatcaacaccgtcatatcaaaatggacttctccggctgcttcttcctccgacgacttcctcttctccaccaacagtcgtcgtgaagcagaggagtttgttacagccgttagacatctacaaagcacgatgcatcgtttggtttccgttaaaccttcctcgggggaaactaatctaagcccagaatccaaaggna

SEQ ID NO: 4186 - DNA, 447 bp, Arabidopsis thaliana
  Clone ID: LIB22-052-Q1-E1-E11
acgcgtccgcaaacattaagtagcactctttttcctctctatatctctcactcacactttttctctatatcttctcctcaacttggatatgggtgaagccgtagaggtcatgttcggaaatgggttcccggagattcacaaagccacatcacccactcaaaccctccactctaaccagcaagactgccattggtatgaagaaaccatcgatgatgatctcaagtggtcttttgccctcaacagtgttctccatcaaggaactagtgagtaccaagatattgctctgttggacaccaaacgttttggaaaggtgcttgtgattgatgggaaaatgcaaagtgctgagagagatgagtttatctaccatgaatgtttgatccatcccgctctccttttccatcccaaccccaagactgtgtttataatgggaggaggtgaaggctctgc

SEQ ID NO: 4187 - DNA, 450 bp, Arabidopsis thaliana
  Clone ID: LIB22-052-Q1-E1-B9
acgcgtccggcattatttgaaaaaccagcgtttaaaaatctgatttgcaatggtcttgtacttgctgaggatgggaaaaagatggctaagaaattacggaattatccaccacctttggaagtcatagatgagtatggggctgatgctgtgcgattgtacctgataaattctccggttgtacgtgctgagccactacgcttcaaaaaagaaggagtactcggtgttgtcaaagatgtattccttccatggtacaatgcatatcggttcctcgttcagaatgcaaagagacttgagactgaaggtgggtgtgccctttgttcctactgatctggcaactatacaagtcagcaaacattcttgatcagtggattcactcagctacgcagagtcttgttcgttttgtccgcgaggagatggatgcctatcggctttacactgtggttcctcgtc

SEQ ID NO: 4188 - DNA, 439 bp, Arabidopsis thaliana
  unsure at all n locations
  Clone ID: LIB22-050-Q1-E1-C9
cacgcgtccgcccacgcgtccgggaacatctgggccaacgactttgctgcgtccctaagcaccttgcatgcacttgaaggcattgttggtaaagacaagcttgtggtcncaacctcctgctctcttctccacaccgctgttgatcttatcaatganactaagcttgannatgaaatcaagtcatggttggcgtttgctgcccanaaggtcgttgaantgaacgctttggccaaggctttggctggtcataangacnangctcttttctctgccaatgctgcggctttggcttcaaggagatcttccccaagagtcaccaacgangggtgtccagaacgctgctgctgctttganagggatctgaccaccgtcggtgcacccaantgttantgctaggctaaangctcagcanaagaagctcaatctcccanatcctacc

SEQ ID NO: 4189 - DNA, 412 bp, Arabidopsis thaliana
  unsure at all n locations
  Clone ID: LIB22-050-Q1-E1-D10
acgcntccggcgaaccagacagctagatggtgcccatgtcgagttcttaagaggtgttgctaatcctcttggaatcaaggtgagtgataaaatggatccaaaggagctagtgaagttgattganatcttgaatgctgacaataatcctgnaaggattacaataatcacaagaatgggagctgagaatatgagagtgaancttcctcatttgatcagagaagtgcgacgtgctggacagattgtgacttgggtcagtgatccaatgcacggnaacaccattaaggctccttgtggtctcaagactcgtccctttgacgccatcttggctgaagtgagagctttcttcgacatgcacnagcaacaaggtacccaccccngacngaantcngcgnggnaagtgggggggtcaggg

SEQ ID NO: 4190 - DNA, 412 bp, Arabidopsis thaliana
  unsure at all n locations
  Clone ID: LIB22-050-Q1-E1-D11
ttccctcgtaaacatcgctgtctctaaagatggcctctctctcaggcctatactcttcttctccatctctcaaacctgccaaaaaccattcctttaaagcattgccggcgcaatctcgagattccttctctttcccacatacctccaaacccaccaatctaccgttgactctctcctcggctcgttctgtggcacgcgacatttctcatgcggattcgaagaaagagcttcttaaggatccggatgcgttgtggaagcgatacctcgattggttttatcagnaggaaagagcttgggttgtatctggatattagtcgggtcggatttaccgatgagtttgtggctgaaatggagccaaggtttcaagctgcgtttaaggctatggaggatcttgaaaaagggtctatnagcg

SEQ ID NO: 4191 - DNA, 411 bp, Arabidopsis thaliana
  unsure at all n locations
  Clone ID: LIB22-050-Q1-E1-D2
aaaaccgcctttttaggcaatttgctctgtgggaagccgttagatgcttgccctgtcaatggcactggaaacggtactgtgacgcctggaggaaaagggaaaagcgacaagttatctgccggagctattgtcggaatagtgatcggctgtttcgtcttgcttctcgtgcttttcttgatcgtgttctgtctctgtacaaagaagaagaaagagcaagtcgtccaatcgagaagcatcgaagcagctcctgttccgacctcatcagcagccgtggctaaggaatcgaatggtcctcctgcggtggtggctaatggtgcatctgaaaatggtgtatcaaagaaccctgctgcagtgagtaaagatctgacatttttcgtgaaatcnttcggcgagtttgatcttgatggattg

SEQ ID NO: 4192 - DNA, 448 bp, Arabidopsis thaliana
  unsure at all n locations
  Clone ID: LIB22-050-Q1-E1-D5
acgcgtccgtgactctgaagaactctacggtggtggtcgccgccgtcgatacccattccctgttcctcggtttccaatgggagcttcgaagttcgacgtttggacctctgaacctgcttctgtctctgagaggcgttccaagcttttaaacgaaatgggtcttagccgtgacccggttctctcccggttaaaacccgtttcagattcttccagctccaaagataccggagccgccggcttcgagatttctcgatcgatctcgtgtaatcaattggctcggcgagatcatggagagtgttctgaaagtgtcggcggttgtgcttcntgtatcgtgagatcgaaatcnggacattaccactangccaatgtggtgatcgtgaccgtcgatatacgtctcctgggtaatccgtgttcttgttccgtctcctaaactctctgttcatcantc

SEQ ID NO: 4193 - DNA, 495 bp, Arabidopsis thaliana
  unsure at all n locations
  Clone ID: LIB22-050-Q1-E1-D6
ctgttccgccngccaggtacaggtccaaaaattcccgggtcgacccacgcgtccgcagatacactggatttcagtaaatgggatttgcatatgggtcaaacctctactagcagcgtcctcaccaattccgcttccacgagcgctcccgcaccggcgatgcaggaacgggagattgacctctccaaactcgatatgaagcacgtcctcgctcacggtacttacggcactgtctaccgcggtgtctacgccggncaagaagtcgcagtgaaagtgttagattggggagaagatggttacgccacaccangctgaaactacagctcnccgtgcttccttcgagcaagaggtcgccgtctggcagaagctcgatnatcccaacgttaccaagtttatatgagcatcangggaacctctgatctgcggntccctcctgctgntgatanctggcnggcngtggtaacnggtgcanatccctgcgangggcctgttgtgttg

SEQ ID NO: 4194 - DNA, 386 bp, Arabidopsis thaliana
  unsure at all n locations
  Clone ID: LIB22-050-Q1-E1-D7
acgcgtccgaatttgtgggatttccaagctccagtttttcgaatatggcggaagtaagtcttggtatgcttatagacattgtggacgaagagtggatgagggacactttgcctgatgatgatcttccattgcctccagtgcttgctgttaaaactgatgatactgaagaaaccagtatggctctttgtttttttctttgctttgctttacagtttacatagctttatgattcttaaggtctaaattctttggaatatagtcttttcttaaaactgctagctgtgaatccacactggtgatgcatttctgatccaagatgttaaacacccatattgagaccttgaaaatgtcataaggaaagtaatggagacacatacgtcantttt

SEQ ID NO: 4195 - DNA, 499 bp, Arabidopsis thaliana
  unsure at all n locations
  Clone ID: LIB22-050-Q1-E1-E3
acgcttgcccgtnccggtccaaaattncgggcncntctcaagtctctncttcttctccgtccttcccaattcttccgttcaaacaaatttctccaaacccaaaccctaatttcctccgtctgtgaaatcaagggttttctctgatctgggttttgatcagaaatcagatctaggtttaattttcgaaatcaaattatgaggaagagagaaagagagaacccttgttcgatttgtgggcattaccataagtacgaggaaggagaagtatgtggagtctgtggtcactgtatgcctgtttcttccgatacgggtggcgccgcaacaagtccacgtcagtgcttttccgtcggagattctccctgagtttctttacctcggtaagttacgacaacgcttctcgctctgagcttcttaaagactcaanggaatctcctccgtgttcctaataacggttcctangngccangaatcctctaacagggaattcaattcaacntta

SEQ ID NO: 4196 - DNA, 451 bp, Arabidopsis thaliana
  unsure at all n locations
  Clone ID: LIB22-050-Q1-E1-E4
acgcgtccgctctgtgagagattctcttcaagctcaggcctttaggctttaggtttcttttgggagtcttcttgagctctgtaatcactctctagaagcttattttgcctcctaatgttattagggtgttgtactggaattattaggatgaaccaaggaagatgagtctctcggtctttcaaaaaccaagtcttgtaatgaggagctgtccactgttgtaaagtaagtcattaanatggaatcctttgcaggttcttgtgaaattgttgaggagaaggatgcggtaaggttagccaaacattctagcagatattgtatgtcacctttgggatcaagtaaagatatggagcagcgtcctgcattgaagtcagggtaccaaggttctatggagtatgacattgatcaagcttttccaagtctataactataaaaccatcaacctaagaagagt

SEQ ID NO: 4197 - DNA, 430 bp, Arabidopsis thaliana
  unsure at all n locations
  Clone ID: LIB22-050-Q1-E1-E5
gggctgagctttacgctatgaatttcttcaaatccgtcttcacggaagacctagatcctccagaaaccgaatccgaatccgattcaccgaaacacagcgaagagcatgaacatccagagcaagaacatccagagcaatctgaatctaacgacgacggtggatggagcttcggtggtctgatgaaaactctagccaccagatccgaatccgtgattgaaacctaccgacgagatctcnaagaatttggcacangtttgaagaaagagatcgangtggctcagggatcgcttggtacggtgggacatgcgattgatgagcttgggaacacngtgctaaaaggtacggctganattantgctcaaggtaaggaagcgattttagccggctggtaangnatctgaatcctctgatagcagtagtagtcnagagt

SEQ ID NO: 4198 - DNA, 416 bp, Arabidopsis thaliana
  unsure at all n locations
  Clone ID: LIB22-050-Q1-E1-E7
taagctgcaaatttgggatactgctggacaggagcgtttcaggaccatcactagcagctattacagaggagctcatggaatcattattgtttatgactgtactgagatggaaagcttcaacaatgtgaagcagtggttgagtgagatcgatagatatgccaatgagagtgtttgcaagcttttaatcggtaacaagaatgatatggttgaaagcaaagttgtttccaccgaaactggaagggccttagcagatgagcttggaattccctttcttgagaccagtgccaaggattctattaacgttgaacaggcattcttaactattgctggcgagatanaaaagaaaatgggaagccaaacgaatgcaaacaaggacatctgggtcctggaactgtcccaaatgaaaggtcaaccan

SEQ ID NO: 4199 - DNA, 426 bp, Arabidopsis thaliana
  unsure at all n locations
  Clone ID: LIB22-050-Q1-E1-E9
acactctctcaacaaccatggcttcgcttccggtgaagcctctaccttccggccacttacagcttcatagccggaatcttattattccgccatcaatggtaaccgttggtttcaaaaggcatcacttcttaggagtctcttcttatggtttatgtattgatgaatctgtaaggcatatgagaagcctaaggtcgtcgagcaatcgtcggcgagtaagtaaaagcgccggcgtgtctatgccggtggcttcctctgatgattttccagcggtttcttgggagtcttggaangccggaaaagaccacngtggctcngtcgntgagtgacgtcatctggcctgcaagcaggagcctttgcggcgatgggcgataatggggaagaatagatnaaatgctaaaccctaanagggatctcaatgtcngttgc

SEQ ID NO: 4200 - DNA, 496 bp, Arabidopsis thaliana
  unsure at all n locations
  Clone ID: LIB22-050-Q1-E1-F1
acctgccggtgccggtccaanattaacgggtcgacccacgcgtccggtggaactcccattttctctcttttacttgttcgttcccaaactcttctccctcgatcgtctccgtcgccgatctcgtttcttcattttccgcgtgttgattggtacaaaggtttaatcaaatggttggaggaggagttatccagcaaattcttaggaggaagcttcactcccaatcacttgcaactccggttttgtcttggntttcttcgaagaaagctcatnaggatgctggttcttctggngtaagagcacttgccttgttgggtgctggtgttacaggactgttgagtttttctacantagcatctgctgatgaagctgaacatgggtttggagantccagaagtacccttggcctcaagaatggcattncttagctcatnatgaccaaggcttcgatccgtccgtggggcatcaagtttatcaagcaaagtcctgtngaatcagg

SEQ ID NO: 4201 - DNA, 438 bp, Arabidopsis thaliana
  unsure at all n locations
  Clone ID: LIB22-050-Q1-E1-F10
acgcgtccgcccacgcgtccggccacggcggcggccaactacatctgtggccagttaggcgacgtcaacaacaaatttatcgacaccgctttcgctatanacaacacttaccttctcttctccgcctaccttgtcttctctatgcagcttggcttcgctatgctctgtgccggttccgtgagagccaagaatactatgaacatcatgcttaccaacgtccttgacgctgcagccggtggtctcttctattatctgtttggctacgcctttgcctttggatctccgtccaatggtttcatcggtaaacactactttgggtctcaaagacatccccacggcctctgctgactactccaactttctctaccaatgggcctttgcaatcgctncggctggaatcacaagtggctcgatcgctgaacggacacaagttcgngg

SEQ ID NO: 4202 - DNA, 447 bp, Arabidopsis thaliana
  unsure at all n locations
  Clone ID: LIB22-050-Q1-E1-C8
acgcgtccgagattgtagagcatggaactccaattcccgtgtctaaaactgaagtccggaagaatgatcttaaccctatttggaagccagtctttcttagtgttcaacaagtgggaagtaaggacagtccagtgataatagaatgctcagactttaactccaatggcaaacacagtctgattgggaaagttcagaaatcgctttcagacttagaaaaacttcatttggcgggccaaggaatcaatttttctttgcctactggtgctggacanaacaaggtgttaaagagccaactttttgtgngacaagtttaccgagactgtccaccacacattcctagaagtacttggcatctggatttgagttaaactttatggtagcaatcgatttcacagcttcaaatggaaatccccgcctcccctgaantcnttgcactacattgatcct

SEQ ID NO: 4203 - DNA, 469 bp, Arabidopsis thaliana
  unsure at all n locations
  Clone ID: LIB22-049-Q1-E1-H10
ggtcnaaaattcccgggccgacccacgcgtccgnaaacatagtaggtantncaatatgtattgncntgacgagtacaanccaaaatgtgtttagtattataaaaacggcttgttcgtattctcttctctcgctcaacacatgaagctcaagtgatccaccgtggttagcaaaaggacggttcacatcatgactatattcgcgagagatctcatctataggatcgaaacgaaggttttgttgccgctcttccttgtccatttgttaccttatgtaacatgccagcaagagtcagaatccgtanaccgcaatagaaaaaccaatttcccaacggaaacggtaatcgcaatcattgtgcttgcaatatttatctcattaagcatggtcgcttgtttcttgcacaaaacattctatagagcagaggttgaggcggcaagccaagaagtgtttcacaagtagaacgangggttg

SEQ ID NO: 4204 - DNA, 488 bp, Arabidopsis thaliana
  unsure at all n locations
  Clone ID: LIB22-049-Q1-E1-H11
tgttacgccgcccggtaccgggtccaanaattcccgggtcgacccacgcgtccgcttctccggccctaataatggcttgcagagcanaagaacttgtgtcgttaatcttgtanaagatctgtaatcccaaaaggtctgattccaaaattgaggaacatgtggaagaagtagaggatttgaaagcagaggcataactctttaggtctggttccaaaattgagaagcatgttgaagaantacaggatttgnaagcagaggcagaactctttangttgaaagcaatctcaggaacagaggaactgaaagcagtggcagatgtcaagaggttgagaacaatcttaagaanacaatagtgggaacctcagaggagtgtaagggtgagatgttgaaagaagatctttttcttccctcggatcttgtacgtctcatantgtctcgtctttctttcaaagacaacaaacgctcntctactgtttgcaaggcanggg

SEQ ID NO: 4205 - DNA, 482 bp, Arabidopsis thaliana
  unsure at all n locations
  Clone ID: LIB22-049-Q1-E1-H2
tacttgccngccggtacaagtcnagcngctcgggcacncgtccgcncacgcgtccgggcggtctggatacgaagcttatcaagtcagtcacaacttactcttgtcgcatgcttacgctgttgacgcattcagaaactgcaaacagtgtgctggaggtaaaattggaattgcacacagtccancttggttcgaaccacaagaccttgagcatgttggaggttccattgaacgtgtgcttgatttcatcctaggatggcatttggctccaacaacttatggagattatccacaatcgatgaaggatcgtgtcggtcatagattgccaaaattcacagaagctgagaagaagttgccaaanggttctacagattacgtnggaatgaattactagacttcagtgtttgcaaaagaaattagccctgatcctaagagtccgagttggacgactgattcnccctgttgattgggatancaagatgtgg

SEQ ID NO: 4206 - DNA, 438 bp, Arabidopsis thaliana
  unsure at all n locations
  Clone ID: LIB22-049-Q1-E1-H6
acgtccncnanctcaaccctttaantgcatctacgacagtcgtaccttttgctaggttancgtcgtcatgatgcagcagccacctccagcttccaacggtgctgcaacagggccagggnanattccttccgaccaacaagcttacctccagcagcancagtcgtggatgatgcagcaccagcagcaacaacaaggtcagccgcctgcaggatgggatcagcagtctgcacngtcttctggtcaaccacagcagcagcattatggtggtggtggatctcagaatccaggatcagntgggtgagatccggtccctgtggntcggtgacttgcaagccatggatggatgaganctatctcatgaacgtctttgggtcgtactggcgacgctacancagntanagttattcccantagacaagngcggatattcagaagggt

SEQ ID NO: 4207 - DNA, 414 bp, Arabidopsis thaliana
  unsure at all n locations
  Clone ID: LIB22-049-Q1-E1-H9
cttcaatcatttgtagcagtaagaacgaattcgngacctataaattcancnaaccgtcncgtttctgtattcggacgcaagtcttcntctccttcaanttgggtacncncanagttgtntcancgatggcttacnanaaagagcttgatgctgctaagaaagctgcttcactcgctgctcgtctctgtcagaaagttcaaaangctttgttgcaatcagatgtgcaatcaaaatctgataaanagtccagtgaccgttgctgattatggttcacaagcagttgttagtttagtcttangaaaaagagctcaagttctgaanccttttcattggtggctgaagaggactcacgcnatctacncaaggatggttctcangagactctggagcgcatcacaaaactcgtggaacgan

SEQ ID NO: 4208 - DNA, 447 bp, Arabidopsis thaliana
  unsure at all n locations
  Clone ID: LIB22-050-Q1-E1-A6
acgcgtccgggagcacggtaacacacaatctggtgctgctaaggtatccattgtaatgattgggcaacaagcgatcatggatgcttatttgtgcctcttacatctaacagccggtatattagtcgaatctctatttaatgcatttgcaaccgctgcgttcttcaagttcgtagtcttttcgatttttgagatgagatatcttctggctatatggaaagcaacccgtccttccaatagcggagagggttgggaaacaatgaggagagaactgtcctttctgtacagtcgtttctatgggatccttcttggaggcattttganantgtaccaagttccacaactacatgcangccgattctccntctcatgtactcattttggataccacanatagtcgccaaatgtngtccggggattcaggaaagnctctgcacccatattacatct

SEQ ID NO: 4209 - DNA, 439 bp, Arabidopsis thaliana
  unsure at all n locations
  Clone ID: LIB22-050-Q1-E1-A8
acgcgtccgatttgattaacaggcttcttgtccatgagccggaaaagcgactgggggcgaacggtgctgcagaggtaaagtcgcatcccttttttcaaggagttgactgggagaatcttgctttgcaaaaggctgcttttgttccgcaacctgagagtataaatgacacaagctatttcgtatcacgctttagtgaaagcagttgcangcgatactgaaactggtaacaacagtgggtcaaatccagattcaggagacgagttggatgaatgcaccaacctgggagaagtttgattctccgccttattatctctcgctcattaacttttctttcaagaatttgtcacaattgggcttcantcaancatgatgtgctagttgcaaaaaggnttcagntanagggaggangagactcaccctttaaaggccatgggnacgt

SEQ ID NO: 4210 - DNA, 435 bp, Arabidopsis thaliana
  unsure at all n locations
  Clone ID: LIB22-050-Q1-E1-B10
acgcntccggcagtctcccactgattcagcagctctttgaactactcttcgacaatggccgaacgtggtgganaacgtggtgttgagcgtggtggagaacgtggtgatttcggacnaggattcggaggccgtggaggtcgtggagatcgtggagggcgtggacgtggaggccgtggtggtcgtcgtggagggcgtgccagtgaanaagagaaatgggttccagtgaccaancttggtcgtctcgtggcggctggtcatatcaagcagatagagcagatctatcttcattcactcccggttaaggagtaccagatcattgatatgctcatcggtccaacattgaaggatgaggtaatgaaaatcatgccggttcagaaacaaaccanggctggtcaaaggactagattcaangcctttgttgtcgttgganatggg

SEQ ID NO: 4211 - DNA, 419 bp, Arabidopsis thaliana
  unsure at all n locations
  Clone ID: LIB22-050-Q1-E1-B2
gaaagcaggtggttaccgtctcttctttgtgctaatgccaataagatcgctataaacgcggctttaggttttgacagctacatggnaatgcgccatggtgctggccccacctctctgtctgatgatatgcagaatcttgacataaacaagacanatacacagagacttggttgttacttctgcaacgacgtggttgcacctcangattcaatgactgatcgaactctagaccaacaatgcactgttacacgcccgggtctagctcctattgcangagctctcgccgttgaactcttagtcggagtcctacaacacccacttggtatcaatgcaaaaggcgacanttcgagcntgagtaatacacggaaanaatgatgaattcgcctcncngggatantacctcatcagatacgnggctc

SEQ ID NO: 4212 - DNA, 423 bp, Arabidopsis thaliana
  unsure at all n locations
  Clone ID: LIB22-050-Q1-E1-B4
tttagcaactctttatttctcggctcacacactccgattaagcccgacgctctctctcctctttgtcgtcgtcatcatcgtctccggagtaggttgcagaaattcagatctgaactctcagacgaagctccgatcttactgagacatttttgctcgatttgactttcgcctttaaagcttctcagagattattgtactgaattaatggcgaattctcgtcaatattatccatctcaagatgaatcaatgtccccgacttctgtgangatcaagggaatgggaaggtccttccagatggactgaggtacttgggacctgaaatggctgcatcagtgtcttctactaggagctctaagcaaattgatggacatgttggtggttccacaaagggcttgaacatacaatggggtagttcaaatgatt

SEQ ID NO: 4213 - DNA, 445 bp, Arabidopsis thaliana
  Clone ID: LIB22-050-Q1-E1-B8
acgcgtccgcttttacctttttcttctgttcaggtttcatttcctctcagagtttgatgatggcaaaagaagttgcagaaggcgattagccggtcacaatgaacgaagaaggaaacctgcattctatttcctaccgggtaagcgccataagcttcttcgcacctctcaagatgtagtaggcaacaagtttctggagaattcatcattggtattgccagagtcatttcctggtagtctcttatacagagtaatagatgaagacgaccaccgtacaagtagactcgtgagtttcaaagatgaacctacttgttccatgtttcctactaatgagcaaaacagcagcaagaacttatgaatctaaaccagcaatttattccacggaagtatcctccatttgggacttacatgagacggcggcatcacgctctactcgtggctctctctc

SEQ ID NO: 4214 - DNA, 512 bp, Arabidopsis thaliana
  unsure at all n locations
  Clone ID: LIB22-050-Q1-E1-C4
ntgtttacgctgccggtaccgggtccaaaattcacggggtcgacccacgcgtccgggacaaatccagctactaagttncccttggataatcaatcaaagactccgccgtcaagtcctaagtccaacctcaaaactaagtanggagggaattcaagattcaagcttctgaccaatcaccttcaagttccagtggagatgcacagagccgtactgatcggattgtgttcaaactctttgggaaagagccgaatgattttccagttgccttacgaggacagattcttaactggttagcgcatactccaactgatatggagagctacattagacctggttgtatcgttttgaccatttatcttcgtcaagatgaagcttcttgggaagaactttgttgtgatctgaagtttcagcttgaggaggcttctagatctttcagatgatnctttatggactgatggggtggctttatcttaagggtgcaaaaaccaactcgcatttgcgttaatggtcag

SEQ ID NO: 4215 - DNA, 440 bp, Arabidopsis thaliana
  unsure at all n locations
  Clone ID: LIB22-050-Q1-E1-C6
cttcntctgcttcaatggccgaatttccagaaccgggcactgtaaaccctgactcggatctatcgaatggtcgagctgagaagcctgagatagacacttcggctccgttcgagtcagtgagagaagcagccactcgtttcggcggttttggtttctggagaccttctctcaataaactcccagatgcttctcaggaaaatatccaagaacctgatatcatgggactcaaagcacaagctttcgagctacaaagagaactaattgttaaagaacgcgaaacgctaagaggtgttgaaggagcttgaggcgactaaagccacagtcttaaagctgcagcagaggaatgaagcttatgaggaggacacgttgagagaagaagttgacagtcatatcaagccagcgggtgtggttctaaaggatttaagccaggcgaagatgaa

SEQ ID NO: 4216 - DNA, 452 bp, Arabidopsis thaliana
  unsure at all n locations
  Clone ID: LIB22-050-Q1-E1-C7
acgcgtccgaacggaagaaggttggcgcaacagatgttgctatctgtagagttgaacagctttgtcctttcccatatgatctcattcagcgtgagctcaagagatatccaaatgcggagatcgtttggtgccaagaagaggcgatgaacatgggagcattcagctacatatctccacggctatggacagcaatgagaagcgtaaacagaggagatatggaagacattaagtatgttggtcgtggtccttctgctgcaactgccacgggtttctatactttccatgtcaaagagcaagccgggcttgtccagaaagccatcggaaaggaacccatcaattaagaactcttcctttttaaatganttctcanactgataanganaaanngganaaaactttgaaatnagaaactttggggtgatgcaanaagtgcgaaacaacactgtcaanaa

SEQ ID NO: 4217 - DNA, 431 bp, Arabidopsis thaliana
  unsure at all n locations
  Clone ID: LIB22-049-Q1-E1-H1
aactgtcnganaaanaagagtccaagtgagattgtctccgtcaacgatggccttaaacgtgatcaagatctctcgagtcagccttgtgnctaactcagtcgaancactcgttctcccactcactttctttgatttactanggctaaaactcaatcccatagagcgagttaccntctacaaactcaccgagtcatctcgtgactccttcttctcntccatcntccccaaactcgancaatccctcnccctcgtcctctcccacttcctcccactctccggtcacctcaaatggaacccccaagatcctaaancacagatagtcatcttcnccaaatanactgtntctctcanagtggtcgagtccgaagctgacttcncgtatatccgctagcaaanaacttcgtctggagaatgaattacgtcntcttgtc

SEQ ID NO: 4218 - DNA, 499 bp, Arabidopsis thaliana
  unsure at all n locations
  Clone ID: LIB22-049-Q1-E1-E3
cgtttacgccgcccggtaccgggtccaaaattcccgggtcgacccacgcgtccggtttgtatttgctaatcagctgatgcagagttgtggattgtctttattctacgtcattggaaattttgttcattggcgtaacttggccttaatcggtctcattccatgtgcgttgcaagttgtgactttgttctttattccagagtcccctagactactgggaaaatggggacatgaaaaagaatgtagagcttcattgcaaagtcttcgcggagatgatgcagatatctctgaagaagccaacactatcaaagaaaccatgatcttgtttgatgaaggaccaaaatcgcgggttatggatttgtttcagagaagatatgctccatctgttgttaatgggtgtgggaacaatgcctcctacaaacaactcccctgggaagcctcaaggacttaangttactaatgttccggtaaccntattttgataaaagggaggggtttccaa

SEQ ID NO: 4219 - DNA, 398 bp, Arabidopsis thaliana
  unsure at all n locations
  Clone ID: LIB22-049-Q1-E1-E5
ctctcaaggcccaccaaaaccaaagaccgatcttgccaancttcctcctggcccaccaggatggcccatcctcggcaatctacccgaactattcatgactcgtcctaggtccaaatatttccgccttgccatgaaagagctaaaaacagatatagcatgtttcaactttgccggcatccgtgccatcacnataaactccgacgagatcgctagagaagcgtttagagagcgagacgcagatttggcaagaccggcctcaacttttcatcatggagacaatcggagacaattacaaatcaatgggaatttcaccgtacggtgaacaattcatgaagatgaaaagagtgatcacaacggaaattatgtccgttaagacgttgaaaatgttggaggctgca

SEQ ID NO: 4220 - DNA, 418 bp, Arabidopsis thaliana
  unsure at all n locations
  Clone ID: LIB22-049-Q1-E1-E6
ccaccttcctcgtcttctctctattctccgtcgtttcttccgacgatctccaagtcttactcaagctcaaatcatcattcgccgattccaatctcgccgtgttcgattcctggaaactgaactccggtatcggtccttgtagcttcatcggagtaacctgtaattctagaggcaacgttacagagattgatctctctcgtcgaggtttatctgggaattttccattcgattcggtttgtgagattcaagagtctcgaagaaaactctctctcggattcaattcactatctggaataatccccagcgatttgaaaaactgcacgagtttgaagtatttggatctcggcaacaatttattctccggtgctttccctgagttctcatctttaaatcagttacagtttcngtactcaacaac

SEQ ID NO: 4221 - DNA, 426 bp, Arabidopsis thaliana
  unsure at all n locations
  Clone ID: LIB22-049-Q1-E1-E7
gcctgaacaactcgccgtcttctcgagaaacatctttcttacttcgcttcattacaagatctgatganaccagatcggatcttgctctagatccagatgctccttaacttatttactcgaattcatcatcatcgttatcatcaccatgtcactgtttctaaaagacgattcgattcaaatccgtgaagtatggaacgacaatctcgaatcagagatggctctgattcgagaagtcgtagacgatttcccattcgtagcgatggacacagagttcccaggaatcgtgtgtagaccagtggggaacattcaaaaccaacacaagagtancactacgaaactctcaanacaaacgtcaacatactcaagatgattcagcttggactcactttctctgatgagaaaggtaacctcccaacttgtgggaca

SEQ ID NO: 4222 - DNA, 436 bp, Arabidopsis thaliana
  Clone ID: LIB22-049-Q1-E1-E9
acgcgtccgtcttgatcttcttcttaacttatacctcaaataatggataattatcagaccaagaatatatctaatctattaacttctttgtgttttaccactctcttaatattagctccggtggttatatgcactagacaacaccggttcgatagcccgaaaagaagcttgttggccaacgagcaagatttagtgacaggtttgcctggacagcctgatgtgagtttcagacattatgccggatatgtccctgtcgatgaatccaacggaagagctatgttttactggttctttgaggccatggatctcccgaaagagaaacctctagtcctctggcttaatggaggtccaggttgttcttctgtgggatatggggcaacacaagaaattggtccttttctcgtggacaccaacggaaacggacttaactttaatc

SEQ ID NO: 4223 - DNA, 432 bp, Arabidopsis thaliana
  unsure at all n locations
  Clone ID: LIB22-049-Q1-E1-F1
tctctctctctctctattgttgaagaagactcataatcggagattgtttgtttttggnttgctctgtaaattggagaagttttgttagagatcaaatggctgggatttgttgcggtgttgttggagagactgaaccggcggcaccggttgattcaacttctcgagcttctcttagacggaggttagatctacttccgtcgatcaaaattgttgctgactccgccgttgctcctccgcttgaaaactgccgtaaacggcagaagcgtgagacagtagtgctctcgacgttaccgggaaatctanatctggattcgaatgtgaggagttgagaataagaaggctanatcagcggttacnaattcaaattctgttacgggaagcagagaatttcctttcccgatgtanctaaanatcgggaacgaacgtcggttt

SEQ ID NO: 4224 - DNA, 479 bp, Arabidopsis thaliana
  unsure at all n locations
  Clone ID: LIB22-049-Q1-E1-F2
cnggcccgggtccaagaatncccgggtcgacccacgcgtccggttattttcaaaagatgatgcnnnnnnnnnnnnnnnnnnnnnnnnnnnnnnnnnnnnnnnnnnnnnnnnnnnnnnnnnnnnnnnnnnnnnnnnnnnnnnngtcgtattggtgttacagttgtacacgattcatcagcgtttgggaagatcaagacgcaaacgctggagtcttatgtccttattgcaacggtggattcatcgaagagattgaagattcttctaattccaccgtcgcggcgattccggcttcgactccggaagttagatcggttgaggaaacacatagatctataattagacgtcgtagatctaatcgccggacgtcctttaatccggtaatcgtcttacacggcggaggaggaaggaggagcggtgagagagttgagaacgaagaaggtgacggagctactagagaacgacgagcttatgaagtttta

SEQ ID NO: 4225 - DNA, 428 bp, Arabidopsis thaliana
  unsure at all n locations
  Clone ID: LIB22-049-Q1-E1-F3
agcttaatctatttaacccgcaaatgcagaataccgttggtgtaccaccagncggatgggttgtcctcagatttancgctaataatcctggtgtanggctgttccattgncacatggntgcacatttaccatacgggattatgagtgctttcatagttcaaaacgggccaactccggnaacgagcttgccatctccaccgtcgaatcttccgcaatgcactcgggatcctacgatctatgactctcggacgactaacattganttgtcatactaaangtaanttaggttcgttttccatttttaaatattgnccgtacatttacanntttcacattttttgggaaatcaatggttccataatgtgttgcacacagattgccctcaataantgggcgntttcaaccntccaaggcgaaacgggaanaag

SEQ ID NO: 4226 - DNA, 437 bp, Arabidopsis thaliana
  unsure at all n locations
  Clone ID: LIB22-049-Q1-E1-F5
acgcgtccgctcaaagtcaacacagctaccggaagaagattcgagtctctcggaaatggnnnnnnnnnnnnnnnnnnnnnnnnnnnnnnnnnnnnnnnnnnnnnncgagaaatcagacggcggagaagggaaggcgtcgtgggtggggaaggacgggaaggtgtaccatagccacgatggactcgcacctcactcacacgaacccatctactctcctggctacttcagtcgccgagctcctccgcttcacgaccgtaacttctctgagagagcttttaccgtcggtattggcggtcccgttggcactgggaaaacggcattgatgcttgctctttgtagattcttgagggacaaatatagtcttgctgctgtgacaaatgatatattcacgaaagaggatggtgagtttctggtgaagaatggggctcttcctgaag

SEQ ID NO: 4227 - DNA, 400 bp, Arabidopsis thaliana
  unsure at all n locations
  Clone ID: LIB22-049-Q1-E1-F7
anaaaaagatttagccagaactcaagagtctgagctgtctgaggtatcaaaacatacttcctctcccaaaataatagacagtggcttgaatcagaagacggtaaaggcatcttctccaactaatcgggctttattctctgaaactgatggagcacgagaatcaaaagcacctgcagattcgcatcttccatcttcatcttcaccttcaccgggctcatcgaatttgtcaccctctttgaactctgggagcgaggccatttctactccaaacgtggtanctaatagctttgatgcagcgttggctantgagaacgaagtaattgtaaatgaaattgtccatgacaatancantagttttgctgatagcctcgacnctaacactggggatacaagcaacttc

SEQ ID NO: 4228 - DNA, 448 bp, Arabidopsis thaliana
  unsure at all n locations
  Clone ID: LIB22-049-Q1-E1-G1
acgcgtccgggaggcgcttctttatgtcatcactctcttctctctctcagccctaaccgttacattaggagaaagtataagcatcgactgtggatcaaccggatcttacgtggactccaacaatgtaacatgggtcggagataaaggcttcgtcaccaacggcgagcccatgaagattccggacgttgtcaaaaagccaatcaacactctccggtacttcccaactggtcaaaccaactgctacaccaacattccggtgacaaaaggccaagaaaaccctcgtgaggacgaagttttactatgagaactacgacncgaagttctcgccgccatcttttgatgtgatttatgacgggaaacaccgtgattccaatggnaattaacgagtcctttgccaaatgaatgaagaaacgttccaattccccgganggtgatatatgttccggga

SEQ ID NO: 4229 - DNA, 445 bp, Arabidopsis thaliana
  unsure at all n locations
  Clone ID: LIB22-049-Q1-E1-G10
acgcgnnnnnnnnnnnnnnnnnnnnnnnnnnnnnnnnnnnaaaagctgaacacaaagatctattctttcactaacacattancaagtttctgcatttgtagatatgatccttttctaaaacttttaaccacttctttctccattcccagttcttagaaagagtcaagagcaatgaggaagcttttcttgttanggtttatagttgcaggactggttcttgggaatgaggcaaatgggtatttagagttcaatgtcactgaattagatcgcattgaggatttaaagtttggtttctccaantttagttccaatttcaatccattaatggttggtctcacacttatcagaggagctggttctaaaggagctgtttgtttggatggtacattgcctggatatcacttacatcgtggacatggatctggagccaatanctggttaattc

SEQ ID NO: 4230 - DNA, 445 bp, Arabidopsis thaliana
  unsure at all n locations
  Clone ID: LIB22-049-Q1-E1-G4
taacaaatttatcaanaatanatacatcatactggtttatgagcaagaaacattgctcagaattattaccaaataagatgtttagaaaccaagactcgaaatacttgatcccggtgcagaaagaagcgccaccggtgacaactttaccgatgaaagcttcaacggtgaaatctccacacaactgtgaggccattctcagagacgcagatcctccgatctctctctcctctgttaatctctctgaacagctacggtctggtgttttcttgaaacccaagaaacagatcaaatattgggtggacgaagagaaacagcaactgcttcatgctctttgcaaaagaaacctctcctataacttggtcctgatgacgtcaactattggacttgggttaccgaaaaagagtcaccaaacgaagaaatgtggaaacctgtggggaattgaaaa

SEQ ID NO: 4231 - DNA, 457 bp, Arabidopsis thaliana
  unsure at all n locations
  Clone ID: LIB22-049-Q1-E1-G7
acgcgtccggaacaacgtcctcctttgatttcacctttttttgnnnnnnnnnnnnnnnnnnnnnnnnnnnnnnnnnnnnnnnnnnnnnnnnnnnnnnnnnnnnnnnnnnnnnnnnnncatctgcttacgctcgattcgtctccctaaacccatcttcaacgagtctaatctccgatggaatcgacggtggttcaaatctcgccggttccggatcggttatcaagtcggttgtttcggctccggctgaggaaaaggaggaagcttgtgagcagacatacggggttaaggcgttgtacnaagaacgctccttgggaaacgtgtttcctgatttttggnttaatggatttctcaatggtttaacgggctggcgacgtaacctcctcctgccnggaaagtgagcttcnttccttgaagatccttgggacctgggaattgtcggnggtttgtttcttccgaa

SEQ ID NO: 4232 - DNA, 451 bp, Arabidopsis thaliana
  unsure at all n locations
  Clone ID: LIB22-049-Q1-E1-E2
atacttaaactgggatccagagaacagattcaaagtcaggantgtctcagctagagcttaccattcattgtttatgcacaacatgtgtatccgacnaactcangaggagcttgagagctttggtactccggnttttactatatacaatgcngggcagtttccatgtaatcgttacactcnttanatgacttcgtccactagcgtataccttaatctggctaggagggaaatggttatacttggtactcagtatgctggggaaatgaagaanggtcttttcantgtgatgcattaccttatgcctaagcgtcntantctctcccttcagtccgggatncaatatgggaaaaaggatgggaaaatgtttgccccccatcctttggacttttcaaggtacccgggnaanacaaacgcctgtcctaacgggtncacaaccatggtatccttattg

SEQ ID NO: 4233 - DNA, 353 bp, Arabidopsis thaliana
  Clone ID: LIB22-047-Q1-E1-H5
agctgggcctaatgctgcttcagcttctcagtttgtgagagcagaaatgctttctagtgggtatttaataaggccttgtgatggtggtggttctattattcacattgtcgatcaccttaatcttgaggcttggagtgttccggatgtgcttcgacccctttatgagtcatccaaagtcgttgcacaaaaaatgaccatttccgcgttgcggtatatcaggcaattagcccaagagtctaatggtgaagtagtgtatggattaggaaggcagcctgctgttcttagaacctttagccaaagattaagcaggggcttcaatgatgcggttaatgggtttggtgacgacgggtggt

SEQ ID NO: 4234 - DNA, 374 bp, Arabidopsis thaliana
  unsure at all n locations
  Clone ID: LIB22-047-Q1-E1-H7
tcaacaactgtgttatctctatgaacagttcctttgatgaagaacacanagtganagttgctgtctttataaccaggatttggtaattcccattgtttcatgggcaattcttgccgtggatctttcaaggacaatctcgactaaggcgatancaataagcctgaagattantctaaaacctctaccaccaacttgtcttctaattccgaccattcaccgaacgctgcagacatcattgctcangaattctccanagacaacaacagcaacaacancagcaangatccagctcttgttantcctttaagagaaccaatcatgaggcgtaacccagacaggtcaagcttactatgttccttggtcataagacacca

SEQ ID NO: 4235 - DNA, 362 bp, Arabidopsis thaliana
  Clone ID: LIB22-047-Q1-E1-H8
attcaaaaactcatctctctctatctctatttctctggttccatagctcaccgtcgcatcgcagatctactccttccgcaataaattttaccggcggaggtatcagatctcgccgatctgttgtagcagctactgtattttgggcttctcatttgatattggggaaacgaggagtagaggacgatggaaaatctgatctctctggttaacaagatacagagagcttgcacggctttaggagaccatggagactccagcgctttacctactctttgggattccttgcctgcgatcgccgtcgttggtggtcagaagctcagggaagtcttcagtcctggagagcaatcgtggggaaaggactt

SEQ ID NO: 4236 - DNA, 406 bp, Arabidopsis thaliana
  unsure at all n locations
  Clone ID: LIB22-048-Q1-E1-A12
tcgataaacccagatcgaaaaatcagatttttccagatcaatcagagagttagagatggagtataataacaacaatcagcaatctttttggcagttcagcgaccagctgagagttcagacaccgaatctagcgaatctgtctctcaacgactcgatctggagcacaaactctgtcttcaaagagcgtcgaaacttagacatagccgccaccaccgacaagaacaacaancagatcgactattatcagaagaagacaacttccgacaacatcaattccaactggaactggaagtcttctggttcanacaacgacatgggtttaggattcggacctgtgggttcaaaatccaccgtcgatttaaacccaatcgacanattcaactcaccgttcaacgacacgttggna

SEQ ID NO: 4237 - DNA, 423 bp, Arabidopsis thaliana
  unsure at all n locations
  Clone ID: LIB22-048-Q1-E1-A4
agaccaaatcttcttcttcttccttctctgttctcgacgaccttctcaaattcgatctcaactcaaaacatttgtctgatccattaatcggattcagatacaatgacaagggttacacgcgattttcgggattcattacagagagatggtgttcctgcagtatcagcagatgtgaaatttgcttcaagtagatttcctaattatagaattggagctaatgatcaaatatttgntgttaaagacgatcctaaagtgatgtccatgaaagaggttgttgcgcgtgagacaagcgcagcttatggaccagcagaaacgtttgtctgttcgtgacctcgctcataaatttgagaanggtttggctgcagctgctaaagctatccngangaggcaaaactcaaangaagcaacttcgntgggagaaac

SEQ ID NO: 4238 - DNA, 422 bp, Arabidopsis thaliana
  unsure at all n locations
  Clone ID: LIB22-048-Q1-E1-A5
acgcgtccgggtgatttcatctccttcgatcactcccaagattcgcattacctttcttataatcgccgagattgttcgagcctgaataatcaaaatggttgtgcttgctgctgccattgtggtcaagtctgggaaagtgattgtttccagacactatgtggatatgtcccgtatcaaaatcgaaggtctacttgcagcttttcctaaactggttggaatgggaaaacaagcatacctatatcgagacggagaatgtgcgatatgtttatcaagcctattgnagctctgttcctgnttcttgttacanctaaagcagagttancattcnagaaggacntgggccanncttactttgntcncnaaanttggtacctgagtatccagggtcntgnaggagtanaaaggatttccaagggnatctt

SEQ ID NO: 4239 - DNA, 363 bp, Arabidopsis thaliana
  unsure at all n locations
  Clone ID: LIB22-048-Q1-E1-A7
atacaactatgattgatggtttgggagttgctggatggggtgttgggggtattgaagctgaggcaacaatgcttggccagcccatgagtatggtattgcctggtgttgttggattcaaacttgccggaaaaatgcgtaatggtgtaacanctactgatttggttctaacagtgactcaaatgctgaggaagcatngcgttgttggaaagtttgttgagttttatggtaacggcatgagtgggctgtctctagctgacagggcgacaattgccaatatgtctcccgagtatggtgnaaccatggggcttcttccctgtggatnaatgttactcccacaantatctcaaattgactgggaanaag

SEQ ID NO: 4240 - DNA, 416 bp, Arabidopsis thaliana
  unsure at all n locations
  Clone ID: LIB22-048-Q1-E1-A8
ttctcttccgtaatcgttaaattatgacataacgtctttgttttggtcgtatcgttcacgcaaaacttcacgattcaagatctgtgtgtggcagaatttgaatcgaagcataggatcaatccggtaagcagccgtaacttgcaatcgatcgccgatctggatccgttaaaggatccctcgcagtccttgaagatatcggcgtcctccgccaccgggaacaggatccgttaccgttcaccttccgcttctgagctattggagtctggactagccaccggattatccggtaaccattctcctacttccgactctcatcagggacttgtgtctatcgacggaggaaaaatgacggcgaagcgagcgatcggacggnacgaatcccttgctgacaaggnccaccgacaancgtgggcctc

SEQ ID NO: 4241 - DNA, 461 bp, Arabidopsis thaliana
  unsure at all n locations
  Clone ID: LIB22-048-Q1-E1-A9
ttccgccgccngtaaggtccaaaattcccgggctttctctaaaccaatctttaaaacaacttattcgtcttcaagatttctccaacaagtcctaccatgtccggcgaaggagacacgaccctcaaagctatctgttacaagcctggctctctccagttactcgatcagaggaagcttcctttagagactatttacttagagattcgtgatgcttcagatggatggagtgctattcaggaaatggttgtacgtggtgctcctgctatagctattgctgctgctctttctttggctgttgaagttttcaactttcatggttttgatggatcagcttcagatgctgttgcttttcttgagaacaagttggattatttagtgtcaagccgtccaacagcagttaatcttgcagatgctgctttgaaacttaaacatgttatagcaaaggccttggctactgccac

SEQ ID NO: 4242 - DNA, 409 bp, Arabidopsis thaliana
  unsure at all n locations
  Clone ID: LIB22-048-Q1-E1-B10
gtagttgaccggatcattctcacttcgccggccgacgttcttccttccgccgtcggtatctatatttacgatccacgatctctcttgctgtttctgtcttcatcgtgacgaaaatggctgctcgtatcgggatcttctccgtcttcgtagctgtattgttatctatttctgcattttcctcagctcaggatctccagatcgtaaatgccgagcgaaggattgatttaagctcacatatcgtgaaggccttcttgactctcaaggttgaaaatattgggaaagatcctgctgcagaaatgcttcttgctttcccaactaacccagntcanganttggggcaangggaaaangccctggnaactacgggnaagaangaagaagaaacctaattggcaataagatgtaaaac

SEQ ID NO: 4243 - DNA, 393 bp, Arabidopsis thaliana
  Clone ID: LIB22-048-Q1-E1-B11
ctttcaactatcactccctacaaattccatgagaaaattcacttttccaatcaaaacgtaaagaagaagaggaagaatggctacatgtcctcctttcgatttctcgaccaaatattacgatggtgacggcggatgccagaggcagagcagcttcttcggaggcacgacggtgctcgatcaaggcgttggctacgccgtgattcttggttttggtgctttctttgccgtcttcacatcttttttggtatggttagaaaaacgatatgtgggagctcgtcatacatcggaatggttcaatacaagcgggaagaaacgttaagacaggacttattgcaagtgtcattgtatcacagtggacatgggctgcgaccatactgcaaagttcaaacgtag

SEQ ID NO: 4244 - DNA, 389 bp, Arabidopsis thaliana
  unsure at all n locations
  Clone ID: LIB22-048-Q1-E1-B12
atctcttcctctgagaagcttcgtcctgacgaagaagaagcagaggaagaatcaagatccggagtcgatatctgggcacagattcaacaagacaagaacgataagaagaaagaggaagagatcgagccgggtcaatccgatgtatggagctcgattttgtctgagaagaagaagactgaatcgagcaaggacactgttcctccaccgtatgttcatccattgatgaaacgtgcgagttccttgagtgagaaaagcctcgagatttgtactgagagtctcggatccgagactggttgcgatggtttctcttcgcatgcatcgtcggagactggagatgctgagatngagattcatgatgaagaccaatctccgttgttaacgtgacggga

SEQ ID NO: 4245 - DNA, 411 bp, Arabidopsis thaliana
  Clone ID: LIB22-048-Q1-E1-B6
gggaaaaatggaagccaaatttggatctcaaatttctcttcattttcgtaccaattcatttcctttaaggaaactctatggctttccccttaccacattttccggtacgtctttaaatcatcttcgtttaaaggccactaatactttaaagggtgatgatcaagagagtattcgcaagttcaagaagttaccaacttccgaatggactcactacttccactcgtttgtcgtcgatgtctcggaaatggatgcgcttaggaatgagatcgatgcactaaagccgaaagtgaaaaacacaatcatgtcttcccaaggcattgactcgacaaagaagaagaatccttatgatatatatgttggtgagccttggccttgcacatcattttgaggaagagatctatgagacccaaa

SEQ ID NO: 4246 - DNA, 403 bp, Arabidopsis thaliana
  unsure at all n locations
  Clone ID: LIB22-048-Q1-E1-B7
ttgtcccttgaactatcagatagagaacttagatcctcttgtgcaacgtgcaatagcttctgcctcaagagttccggatctacggcgtaagtcaggcatcctgtttatcacttcataagcattagcgacgtgattttacctaaagatatgttcatttttggaccacttttaagggattttcatgtcttactatctcttgttttctgatttccctagatctgtatgaaaagataccaagccatattgagccaaagcttcttccttttcagcgagaaggcatagagtatgtcagccatatgtagtacctgtggtttttctttattaccaaatgagtagtaacttgctctggctgcctgatgacttttgcctcattattgggtctccacctttctcgcaatggntt

SEQ ID NO: 4247 - DNA, 436 bp, Arabidopsis thaliana
  unsure at all n locations
  Clone ID: LIB22-048-Q1-E1-B8
tctcttctcatcttccctttttatgantttcttttcccattttcctctgcgtttgattatcngagagagagagagaagaaacttgttgaaacaaaatcancancaacttatagaagacnaaananagattcataggatcttttgcttgacaatgaaagaaggaaaggatgggtttgttcgagcagatcagattgatctaaaaagcttagacgagcaactagagagacacttaagcagagctttgactttagagaagaacaagaagaaagatgaagaagacacaaccgccgtcgccatcggtggctctgcttcttcttcccctgtcactctaaacggcggcggatttgttggcaagaggaaacagagacttgagtggggagatcgatccttctaaacntatcancangactgttcntgctcggtgggacttttgggg

SEQ ID NO: 4248 - DNA, 373 bp, Arabidopsis thaliana
  unsure at all n locations
  Clone ID: LIB22-047-Q1-E1-H4
gagtaacnatatataccaaaataaaagatctgcatctgtcttcttcttcntcttcanttcctctaaatttanntacccattttttccgataaatttttgttgaggaagaatttttgttgtaaagagagtttaattaaattatgccttcaanagaagatgagctgtttccgtcaacgccgggtaaattcanaattgaccggtcaaaccgtcatgctccaccgttgtttcgcttctacnagcaccatgtttctttgggcnctcttcctcatcggtctcancgcttcttacntgagtttccaaagcttcgtcgattccggtagccgttatcnaaccgcttcctggggggggcatccaatggggaaaaacagggtcc

SEQ ID NO: 4249 - DNA, 361 bp, Arabidopsis thaliana
  Clone ID: LIB22-047-Q1-E1-D4
acgcgtccgaaaacgagttactatatggtgaatcattccctatttcagaagaagcccttgattcaagtttctgtcttcccataggcaaagccaagattgaacgagaaggaaaggacgtaacgatagtaactttctcgaagatggtcggtttcgccctcaaggcagctgagaagctcgcagaagagggaataagtgctgaggtaataaatcttcgatcaatccgtccgcttgaccgagccaccatcaatgcttcagtgaggaaaacgagtagattggtaacagttgaagaaggtttcccacaacatggagtctgtgcagaaatttgtgcgtcggttgtagaagagagcttttcgtacttgga

SEQ ID NO: 4250 - DNA, 357 bp, Arabidopsis thaliana
  unsure at all n locations
  Clone ID: LIB22-047-Q1-E1-D6
ttgtctgactccataatcacaccatcaccaagaagaagaagatctaggttttgcatctctcgtcattacaatggagcgagcacgaaccgaaagccctagctacttccgtcaatggagcggcgattcaggtaccaccaatgccgccgccgtagctccttcttctccggcgcgtcatcaccacgctcgatcttcttccgtcactaatatgtctaacgtcaaacgagctcaaaacgttgctgctaaagccgctgctcagagacttgctaaagtcatggcttctcagaccaacannnnnnnnnnnnnnnnnnnnnnnnnnnnnnnnnnnnnnnnnnnnnnnnnnnnnnnnnnnnnnnnnnc

SEQ ID NO: 4251 - DNA, 414 bp, Arabidopsis thaliana
  unsure at all n locations
  Clone ID: LIB22-047-Q1-E1-E10
gcaatggacgatttgaaggcaaagggaatgcgaaatgcgaaacaggcacttctatctggttgctctgcaggtggtctagcagttattttacgctgtgacgaattcagaaacttgttttctggatggaccagagttaaatgcttaagtgatgcaggcttgttcttggncacgcctgatgtatccggtggacacactataaggaatttatataacggcgttgtgcanttgcagggagtgaagaacaatttgccacatttatgcactaaccatctcaatccaacctcttgtttcttccctcaaaacttgatcagtcagatgaaaactcctcttttcattgtcaatgcagcatatnatatttggcangattcaaagcagtatcnctccncccgagtgcagattctantgggtaatggg

SEQ ID NO: 4252 - DNA, 390 bp, Arabidopsis thaliana
  unsure at all n locations
  Clone ID: LIB22-047-Q1-E1-E11
tcccttattctatcagaccggtttaagctgcagatttctaggcttagcgttcgatttcgtcgctgaaagtgaaaagttcatctagctttagttttctcttttcatggtttccgcgggaaaagttcgtcttttttgaagcccttttgacacaaaagaccagaacaagttgaagaaatatgaatacaacctcgacacattttgttccaccgagaaggtttgaagtttacgagcctctcaaccaaatcggtatgtgggaagaaagtttcaagaacaatggagacatgtatacgcctggctctatcataatcccgactaacgaaaaaccagacagcttgtcagaggatacttctcatggggacagaangaactcctcacaaggtttgaccaaag

SEQ ID NO: 4253 - DNA, 358 bp, Arabidopsis thaliana
  Clone ID: LIB22-047-Q1-E1-F1
acgcgtgggcggacgcgtgggcagattcagggaaagatgcagggcgtctctcagctgcttgggagctatacaaagctcaagaagagcttgtgaaggttgctaagaaatatggagtgaagctaactatgttccatggccgtggtggcacagtcggaagaggaggtggtcctactcatcttgctatattgtctcagccaccagatacagttaatggctctcttcgagtcacggttcagggtgaagtcattgagcaatcatttggggaggcacacttatgctttagaacacttcaacgtttcacagcagctactctagagcacggaatgaaccctccgatttcaccaaaacccgagtggcg

SEQ ID NO: 4254 - DNA, 460 bp, Arabidopsis thaliana
  unsure at all n locations
  Clone ID: LIB22-047-Q1-E1-F11
gcttccggtgccgtccaaaattcangggtcgacncacgcgtccgatttttattcacatacattaaaagagaanataacccttaataatgcatttgccaatttacactagcaaagtcgtgtaactcgtgttgtatccaatagattactttaatattgatggtggatttgatagatgaaagttacatgtctaaggagcatctanacacggttatagattggataccatcaatgangaatcttaggctaaaagacatccctagcttcagacgtaccactaatcctgacgacataatgctcaatttcatcantcaagaggtggagcantcnaaacgcgccagtgatcattctcaatacgttcgatgatcgtgatcatgatcttanacaancnatgcaatctattttattacctccggtttatangattgggancggctcccancgccnagccagaccagggaaa

SEQ ID NO: 4255 - DNA, 421 bp, Arabidopsis thaliana
  unsure at all n locations
  Clone ID: LIB22-047-Q1-E1-F12
ccggtnccggtccaaaattcaacgggtcgacncacgcgtccggcacgccatgcacctcctccatgatctctacctttactccatgtctcaacttcatcancggaagcagcggcggttccgtcactcccaccgccggctgctgcgactccttgaagacgttgaccaacactggcatgggctgtgcttgcctcatcctcactgctaacgtcccgctgcctactggcttcatcaatcggnntctggcgcttgcnctacctcgagcctncaaaatgggcggtgtanctattcaatgtnaanctgcggggacncctctannagctccaggtcaggttccatttttgattgctccaccacctcaggtgtctgcttttancccgggagcgtcnaaggcggcggggacaacaccaacacaggnacctgc

SEQ ID NO: 4256 - DNA, 357 bp, Arabidopsis thaliana
  Clone ID: LIB22-047-Q1-E1-F6
ttgtgtctatgtatgtggaatgtctctcatccacaacaccacccattgatgtgtttgattatctctctttctttgtctttaacaagaaagacaacaagtacctctcaatccaagatgttgaagttaagcgtttcagttcttctaaaacggtttggggattgccaaaagctatgtcgcttgaaacattcactgaccctgcaaagggatttatcgtggaaggagaaccatgtgagtttggtgctcatgtgaagattgcttcatcacccgtccctgttgatgagaatctcccttttcacaaattctcttggagcattcgtgatttctctgttctgaaacagaaatgattgcatatctaaa

SEQ ID NO: 4257 - DNA, 410 bp, Arabidopsis thaliana
  Clone ID: LIB22-047-Q1-E1-F9
ttcttctcttccccgtttcgatctcctctttaatgcatctgcgtatctgattttgaaagatttaacggttctttaaaatgatgggtattggtcaaagaagctcttttcaatctgggaaggttactgggtaaatgttggtacattggctcaggttttataaagtttggtgatcattctcagtttcaagtttgatcaaaatgtggggctttgcgtcgaatgtcattggaagtatggggttaaagaagtcccctaaagattcagctcaagcatcctctcaatgctcagatgatgaggtttcaaatattagcagggatgaagagggattagaatgtcccatatgttgggaatctttcaacattgttgagaatgttccttatgtgttaaggtgtggtcatactccttgccaaaat

SEQ ID NO: 4258 - DNA, 397 bp, Arabidopsis thaliana
  unsure at all n locations
  Clone ID: LIB22-047-Q1-E1-G12
tctaactgtannnnnnnnnnnnnnnnnnnnnnnnnnnnnnnnnnnnnnnnnnnnnnnnnnnnnnnnnnnnnnnnnnctgtaaaaatcaaagctttttggaatctttcttcggngatgatatttcttcaccggcgcaagcttctcttgagcgtgattcancactgggtttgcattttttcctggtgggtattcttcaaattgttcaaagctccgaccttttcttccttagaatctgattactggnancttgaanctgggagagactccagtttatatggtttcaancatcgttgagtcaancattggagttgtgtagaagaaaggnttgggttttccgtcgccgtntaagtggttttggggtttggtaggatttggtgtaatcagggaagataanaga

SEQ ID NO: 4259 - DNA, 364 bp, Arabidopsis thaliana
  Clone ID: LIB22-047-Q1-E1-G2
gagattcctccccaacaacaacaatgaagcgtagcttgggttcaaattcttcaaacaatagtggcagtggaagtaacaagaagtctaagaagaataataatccgagcaatcagaaaaccctaggcgcggcatggggcgctgcttcttctcgttcttctttccggtcttctcctttctccgatttcggaagttacatggaagtgaaaaataggaaacttcagaaccaatttgagactgaggcttctgctgcttctcgtggtgtttcgggttctgagaaacttattttccaaggggtttcaatctttgtggatgggttcactattccttctcatcaggagttgaaagggatacatgatgaagtatg

SEQ ID NO: 4260 - DNA, 359 bp, Arabidopsis thaliana
  unsure at all n locations
  Clone ID: LIB22-047-Q1-E1-G6
gtctcctctgacgatanaggaanngaagaagatgaggctgatgatgaagatgaggatgttgactcgatctttaatcgaagacgagtcaacggaggtttccgcgttannnnnnnnnnnnnnnnnnnnnnnnnnnnnnnnnnnnnnnnnnnnnnnnnnnnnnnnnnnnnnnnnnnnnnnnatagtggtagttttggagatttgttctcatggcctgatcttggtgggattggttcgagtggagtcgtgaagctttgggatcatttagatatcgatggcgatgatcatgagaatgttgtggcaacgtttctcaagaactataactcaacctcgtcaccgttttttttgggcggcgngagaaa

SEQ ID NO: 4261 - DNA, 355 bp, Arabidopsis thaliana
  unsure at all n locations
  Clone ID: LIB22-047-Q1-E1-G7
tgcttgagtttggtgctgatgtcaatgctcaggataggtggaagaacacgccactggctgatgcanaaggagctaggaagcagaaaatgattgaactgctgaaatctcatggtggtttgtcttatggtcaaaacggaagtcactttgaaccaaagcctgtgccaccaccaattccaaagaaatgtgactgggaaattgaacctgctgagctggatttttcaaatgctgcaatgattggaaagggttcatttggtgagattgtgaaagcctattggagaggaacaccggtagctgtgaaacgtattcttccttctctttcagatgatanactggttatttcaggacttcaggcatg

SEQ ID NO: 4262 - DNA, 413 bp, Arabidopsis thaliana
  Clone ID: LIB22-047-Q1-E1-G9
agattcatggcggaagcttgcggagtgagaaggatgaagctgggaagccaaggccttgaggtatctgcgcaaggccttggttgcatgggcctctccgctttctacggtgctcccaagccggaaaatgaagccatcgctctcatccaccacgctattcactccggcgttactctccttgacacctccgatatctacggccctgagaccaatgaagttctcctcggaaaggctctcaaggatggggtgagagaaaaagtggaacttgcgaccaaatttggaatcagttatgcagaggggaaaagagaggtcagaggagatcctgaatatgtaagggctgcttgtgaggcaagtttaaagaggctagatattgcctgcatcgatctctattatcagcatccgtgtcgatactcgtg

SEQ ID NO: 4263 - DNA, 406 bp, Arabidopsis thaliana
  unsure at all n locations
  Clone ID: LIB22-047-Q1-E1-H10
agaatcaaaaacatctgtcgcgnnnnnnnnnnnnnnnnnnnnnnnnnnnnnntgtcgatggctttgcttttgacatcgccggctatgaagcagaagccggcggtgataacttctcctcgccgtggttcttctccttctcgtcgtcttcgagtttcttgtgttaccacaaaccctgctaggaagaaaaacgaaacatgcaatcattttcgacctatcaaagaagtaaataaccaattaacacacacaataccacaggagaagcttgaggatcttcaaatcaatggaaaattgggcagaacaaaaactactaccttatctcaaaccggtagaagattcatggcaaccacaagacttcttacctggcgccagangaacgacgacgaattctacgacngggtaaaagaga

SEQ ID NO: 4264 - DNA, 416 bp, Arabidopsis thaliana
  unsure at all n locations
  Clone ID: LIB22-047-Q1-E1-H11
ttttcctgaacgattcttagggttttgattctctctctctctcgcttctttttcgatcgcagcagctctcgccgatcctgtgtaatcgggaatcggtaatcgtcagggtctgtttggggtacggngacgcgattttctgattattagggtttaagatctcgangttgaggagagcttgaaaagttgtttgtcaacatggagcgcaagacnantgacttggagcaaggatgggannatatgcagactgggaattacnaagctganaacggattctggaagcgattgaatgagccagnanttgactctggagcaatatatgatgctttatacgactatctacaacatgtgcacccangaaacctcctcatgattactcacagcaagctttatgacaagtatcgggaangaattgaggg

SEQ ID NO: 4265 - DNA, 416 bp, Arabidopsis thaliana
  unsure at all n locations
  Clone ID: LIB22-047-Q1-E1-D1
ntgttacgcttgccggtgccggtccaaaattaacgggtcgacncacgcgtccgcccacgcgtccgcctaaacgcaagtttcaaatcgctaaaaccaacgtttgaacacgcaacgattactctctcagccgcgtgactttttttccaagtagcgtctgcgtttggcaaagtcctccacttacaaagctttcctccttcaatctccgccgcaacaatctctccgccgttctccgccgcaccatgtacataaaccatatctcccaccgcgttcaacactatcgacgttaacggccaatcagaattaatccctcttagtttctccaaatacgtctcaggcatagatccgatcgactcgaatttcaaatgcgattcgtcaagaatctataacttcccacagttcgattcccgtcggattat

SEQ ID NO: 4266 - DNA, 446 bp, Arabidopsis thaliana
  unsure at all n locations
  Clone ID: LIB22-046-Q1-E1-H3
acgcgtccgcgaattcctctttctcaccttttctcgctcctgggaatctgaagcagttcttctccgacgcctggatcgtgatttgattcgaactttcacataagatggctatggtagatgaaccgttgtatcccattgctgtgcttatagatgagcttaagaatgatgatattcagcttcgtttgaactcgatccgtcgcttatctactatagctcgtgctcttggagaggagcgtacaaggaaggagttaatcccttttttgagtgagaataagtgacgatgacgatgaggtgcttcttgcaatggctgaggagttaggagtttttantccgtttgttggaggaattgagtttgcgcatgttcttcttcctcctttggaatctctatgtactgttgaagaagacntgtgtgagagaaaaaactgtggaatcccttgtaagaatgg

SEQ ID NO: 4267 - DNA, 506 bp, Arabidopsis thaliana
  unsure at all n locations
  Clone ID: LIB22-046-Q1-E1-H5
aaactgnccgcctgcctgtaaaggtccnaanttcccgggtcnacccacgcgtccgcacgacctttgccgacttccttctgttaatcatggcggntccggangatgaatcttccgctcagtctcaatcatcacctgccacggcggntcctacgcctcctccttcctcttccccttcctctgctggggatcactacctanctanagtgcatcctccgccccancgtcgttctccagnttgcttatggcnaattccgctccccttcctcncgcaanatagttttcggnaaggagacctgcatanaattgggtggttattggtgaanacgggattgttgantccgtgtgtgaacaagtatgtatttgggaacaattaacggatttgggctgtcatacctcatagtagcaagctttantcgaanaatttgcaagatgggaaaanagancttctgggctggttcttttctgaatcctggaaaaagctctcaatttctctcaattaancaaat

SEQ ID NO: 4268 - DNA, 330 bp, Arabidopsis thaliana
  unsure at all n locations
  Clone ID: LIB22-046-Q1-E1-H6
acacaatcatagcccaggctatcattagtcggattggcattgatccatcaaggatagaagagagagtacggaaaatcatctatggatatatatattttgaagcatgaaatcccaaatgataagtctacgctaacgctagtgtgttttttcacacatgtgttagttctttaaatatgagatgagtaattgcttttgagttcgattatgataaatatgttgaccgtcaacataagaaaccttaaaacgttgtcgtttcgtttttattcatcccggtttaattcagtttgggcttggcgtnnaaaaaagganntcccggntgananaataagg

SEQ ID NO: 4269 - DNA, 372 bp, Arabidopsis thaliana
  unsure at all n locations
  Clone ID: LIB22-046-Q1-E1-H9
ccnnnnnnnnnnnnnnnnnnnnnnnnnnnnnnnnnnnnnnnnnnnnnnnnnnnnnnnnnnnnnnnnnnnnncttcttcttcgtanggtgttcatcgttattaacgttatcgcccctacgtcagctccatctccagaaacatgggtgcaggtggaagaatgccggttcctacttcttccaagaaatcggaaaccgacaccacanagcgtgtgccgtgcgataaaccgcctttctcggtgggagatctgaagaaagcaatcccgncgcattgtttcaaacgcncaatccctcnctctttctccnaccttangcagtgacatcattangnccncatgcttctaacaangtcgtcaccatttacttctctctnctc

SEQ ID NO: 4270 - DNA, 357 bp, Arabidopsis thaliana
  unsure at all n locations
  Clone ID: LIB22-047-Q1-E1-A1
aannnnnnnnnnnnnnnnnnnnnnnnnnnnnnnnnnnnnnnnnnnnnnnnnnnnnnnnnnnnnnnnnnngtcgataggctcagtatcggatttttcgtcaacactataaaacccatttttcnatctctctgtcnaaaagtctttactttaaaacaaacagtgacatgaaaaatcaaagcttcgatacaatctcaggatggatttgagtatcgcttaatgaagttttgatctttgggtttaagttctacaacagagtatttcgaggattgtatatattgaagggnttttgttggttaagggataatgataccggaactggggagaanaccgatgcatagaggggaacgaagattcntc

SEQ ID NO: 4271 - DNA, 356 bp, Arabidopsis thaliana
  Clone ID: LIB22-047-Q1-E1-A6
agtaaaagaaacatcaaagccaaagattttgcttgtggaagataataagatcaacatcatggttgcaaagtcgatgatgaagcagttaggccataccatggatattgctaataatggagttgaagccataaccgcgattaatagctctagctacgatctggtactcatggatgtgtgcatgccggtgctcgatggtttaaaagctacaagactgatccgttcgtatgaagaaactgggaactggaatgctgcaatagaagccggagtagatatatcgacatcggagaatgaacaagtttgtatgcgtcccacaaaccggctgcctataatcgcgatgaacggcaaatactttagca

SEQ ID NO: 4272 - DNA, 418 bp, Arabidopsis thaliana
  unsure at all n locations
  Clone ID: LIB22-047-Q1-E1-B3
ctgtttacgctttnccgggnccggtccaaaaattaacgggtcnacncacgcgtccgaaaagactcatcaataatctgtaaaaaacttatgttttaaatcccataaacacatcaattcaaattcctgaagaagaaaaagcctgaggttaaacactgcacctgggaatcaatttccttaaatctttactcaaaagatgaggcnnnnnnnnnnnnnnnnnnnnnnnnnnnnnnnnnnnnnnnnnnnnnnnnnnnnnnnngatccattagatcctagtggtaacattacaatcaaatgggatattatgtcctggacggcagatggctatgtggctacggtaactatgaacaacttccaaatctaccggcacatacaaaaccctgggttggacattaggttggacatgggcaaagaaagaggt

SEQ ID NO: 4273 - DNA, 361 bp, Arabidopsis thaliana
  Clone ID: LIB22-047-Q1-E1-B4
agacaaaggatcaagaacactacttgttctttgtctgagacttcaaacacaagaaaccaaaaatagaaaaagatatgagagagctttttatgtatctatttcttcttttcttagttctatgtgtcaaatctgtttattctactccgacaagagaacaattccaaaattgcttgtccacaaaacaattcaattctaccctcaaaaaccctataaatctcaccactcatacactagattcccgagttcacaccgacttttccgagtcttcatctccaaattctaagtttcctcaacttgaatttcacaagcttgaagccgattctcatcgttaagccaaaatccgaatccgaaataaaacaat

SEQ ID NO: 4274 - DNA, 359 bp, Arabidopsis thaliana
  unsure at all n locations
  Clone ID: LIB22-047-Q1-E1-B8
aaggctaacaaatgtaaganccttaacgacaatagcaccatcctcgagatggatcccggtagtagcagaagcttcgatctcagttattataggcttgtcttgaanangagaggcttgtttcantcngattctgcattaacaacgaactcagcgactttgaaaagtgatcaacgacttggtcaacggttctgaaaagaagtttttcaaagcttttgctaagtcaatggacnaanatggggagagttaaagtgaagactggctcagctggtgtgatcaggacacggtgttctgtcgctggaagttaagtaagcttcagggtcggaatgtggtgtgttatggtcaattgttgttttgtgtga

SEQ ID NO: 4275 - DNA, 416 bp, Arabidopsis thaliana
  unsure at all n locations
  Clone ID: LIB22-047-Q1-E1-C1
ctgttacgcttgccggtgccggtccaaaattaacgggtcgacncacgcgtccggtagtgatgttccacaatctttccttcgttactctctccgtatgcgaaaccctagccgcgtgtttgtagattcaaaggattccgattcgatcttattgtccgatctcggtgtttctcgtttctctactgtgattatccatgtcctgcttttgggtggtatgcaagcggctccgccgaagcctcgtcttgatttcctcaattctaagcctccgtcaaattatgtagcgggtttgggtcgtggtgctactgggtttactactcgatctgatattggtcntgctcgtgctgctccgggatcttcctgatcggtctgctttggctacagcggntgctccaaggagtaggtcgttggagcanggaagc

SEQ ID NO: 4276 - DNA, 413 bp, Arabidopsis thaliana
  unsure at all n locations
  Clone ID: LIB22-047-Q1-E1-C10
gtggcggccatgattatggatttgtgtaggaaatacaaccgaatcactcaaatggaagaatcgatttctcaaggcaaaaccctaaacaaggagcaagaagaagtcctccgctctaaacctgccgtcgtcatcctaatcgacgagcttgaaaagatccgtgctcctctctccgccgctgtgacagaggaaatcagcctcgctactcagcttaaccgtgcttcatccgatcaaaccaccgcatctgagcaaaaggaagtcactgatatcccgcaggaagttagcggcggcgatgatggcgctaagttggaggatctggtgaatttcctctactttggttcactcttcgacgtcaagtcacagaacgagttcacttcgataatgttgaccaaggactcatgangagaattgctgct

SEQ ID NO: 4277 - DNA, 415 bp, Arabidopsis thaliana
  Clone ID: LIB22-047-Q1-E1-C11
cacatggcgccaatggctatggatcatctctgtttcgtactaccgacagaatccggcgagttaaagccaccggtgatggtcgaggagaccacagaagaagaagaggagaagaagagtcgtgattgtggacgtcaagttgtgagtttaatcggagatttattccggcgattacacggctctaagttggtgaagagcttgaatctctgtagtatcaacgagagtaaagattcgatttcaatggagatcaataaatcattcactgacatggaaggtgttcagctttccagcaaagtcggttgcgaagaatccaagaatctttggatactctgagctttatatcggaactaatggtttcagcgacgaactgatcctcggaagcggcggtttcggccgcgtttacaaggcgtttgttacc

SEQ ID NO: 4278 - DNA, 353 bp, Arabidopsis thaliana
  Clone ID: LIB22-047-Q1-E1-C5
aaataaataaaattatcctctagttttcgatctcgatcatctggatccaagaaattactacgattgctataatgtcgatgtctcggctcggattgttgttgttcgtcgctatattgctcgtcttgcttcagtcttccacttgtctgattagttctccaagttctatcatcaatccttctaaagtcaaacaggtttcgtcgaagcccagggcatttgtgtatgaaggttttttgacggacttggaatgtgatcatctaatctctcttgcgaaagagaatctgcagagatctgcggttgctgataacgataatggcgagagtcaagtcagtgatgttcgtaccagctccggcact

SEQ ID NO: 4279 - DNA, 489 bp, Arabidopsis thaliana
  unsure at all n locations
  Clone ID: LIB22-046-Q1-E1-H2
aactgttaaactgctcgtangcctcnaaaattccanggtcnacccacgcgtccgcntgacatactcgctgagagaatgcatcgattaccacaagaatatctcnaggagttaannaatggtcttaaggntatccttgaangaantggtgcncagcctatanatgagtttatgtttctgcagnagtttgtccatacgagatctgatttaacttcaaanacacttgtcatggctcaccgagtgcagcttgaagttcttgtggttataaacactggnatccaagcattcttgcacccaaacatcaatctctctcagtcatcactcatcgagatctttgtgtcaaggagatgcataaacataacttgccaaaacgaactcccggctgatggttgtccctgtgagatattcgctaattaggaaaggcttctgcaacctgtgcatntttgtganatgttancnaagttttganttttgcactccaacanatggccc

SEQ ID NO: 4280 - DNA, 354 bp, Arabidopsis thaliana
  Clone ID: LIB22-047-Q1-E1-C6
ctgtcaaggaaagtttcaattccttcatcacggatcaatccttacagaatggttattatgctgcggcttgttatcctttgtctcttcttgcattaccgtataacaaacccagtgccaaatgcctttgctctatggctggtctctgtgatatgtgagatctggtttgccttatcctggattttggatcagtttcccaagtggtttcctgtgaaccgtgaaacctacctcgacaggcttgctttaagatatgatcgtgaaggtgagccatcacagttagctgctgttgacattttcgtgagtactgttgaccccttgaaggagccaccccttgtgacagccaacacagtgctctct

SEQ ID NO: 4281 - DNA, 355 bp, Arabidopsis thaliana
  Clone ID: LIB22-047-Q1-E1-C7
agtaaaagaaacatcaaagccaaagattttgcttgtggaagataataagatcaacatcatggttgcaaagtcgatgatgaagcagttaggccataccatggatattgctaataatggagttgaagccataaccgcgattaatagctctagctacgatctggtactcatggatgtgtgcatgccggtgctcgatggtttaaaagctacaagactgatccgttcgtatgaagaaactgggaactggaatgctgcaatagaagccggagtagatatatcgacatcggagaatgaacaagtttgtatgcgtcccacaaaccggctgcctataatcgcgatgacggcaaatactttagca

SEQ ID NO: 4282 - DNA, 359 bp, Arabidopsis thaliana
  Clone ID: LIB22-047-Q1-E1-C8
tgattttcttgattcgattctcaagagcccagacgaggatccagagaagcacaagtatgttttgcaaagtggttttgatgttgtagcaccagatcagattgcgcaagtgtgtcaacagggctcagcagttgacatgagcaatgatgtttcagtgacgggtatccagattaagagtcgccaggcacaaccctcaggttataccaatgactatatagcgcagggaaatggtccaagaaggctgcgtctgcaaagtaactttaatggcattaacacgaagaatcctgagcttcaagctataaagagagaggctgaggacacggttggagaaagtataaagaaaaaggtgtggaaagctaatg

SEQ ID NO: 4283 - DNA, 418 bp, Arabidopsis thaliana
  unsure at all n locations
  Clone ID: LIB22-045-Q1-E1-F10
tctctttcattttatatacccttttcctctctttctccaaatctctgaaaattttcaccaagaatctctgttctttttttcaccagaatctctctgtttaaaataataggtgatgatgatggatgagtttatggatcttagaccagtgaagtacacagagcacaagactgttatcagaaagtacactaaaaagtcgtctatggagaggaagaccagtgttcgtgactcggccaggttggttcgggtctcaatgacggatcgtgacgccactgattcatcaagcgacgaggaagagtttctgttccctcgaagacgtgtcaagagattgattaacgaagatcaagagtcgagcctagcaagctcttccaccggcgacgtctctgcttctccgacgaaggaccggnaaagaatcaacgtt

SEQ ID NO: 4284 - DNA, 450 bp, Arabidopsis thaliana
  Clone ID: LIB22-045-Q1-E1-F2
acgcgtccggtagagagatcctaaagagtcaaaagaggtcaggtgattgattaacccgttgaataatctccttctcccgttgaatcgggtcgaaatagttgaactttaagccaaaccctagcttgaggaggaagaggaatggtcggcgtgatgaacagattgaggaatctggacgcttaccctaaaatcaatgaagatttctacaggcgtactctttctggtggtgttatcaccctcgcctcttctattgtcatgctaattctcttcttctccgagcttcagctgtacattcacccggttactgaagactcagcttcgtgttgatacatcaagaggagagaagctacgggattaattttgatgttacattccctgcgcttcaatgttcgattattaagtcctgattccatgggatatcagtggggagaagcaccttgatgtgcgacatga

SEQ ID NO: 4285 - DNA, 490 bp, Arabidopsis thaliana
  unsure at all n locations
  Clone ID: LIB22-045-Q1-E1-F4
acgttagccgccgttaccgggcaaaattccggatcgacccacgcgtccgcttcaatcggcacaccaccaaacccgaatatgttctttactccaccaggttctgatagaggagggcctcctaactttcctgggtccaatatttctggacaaatgggacgtggaatgccatctgataagacttcagggggatgggttcctcctcgaggtggtggacctcctggtaaagctccttctaggggagagcaaaatgactattcccagaactttgtggatactggaatgcggccccagaatttcattcgggagctggagcttaccaatgtggaagactaccccaagcttagaagagctcatacagaagaaggatgagattgtatctaattctgcttctgcaccaatgtatctgaaaggcgacttgcatgaagttgagttatctcccgagttattttggaacaaaagtttgatgttattcttgttgacccancatggg

SEQ ID NO: 4286 - DNA, 480 bp, Arabidopsis thaliana
  unsure at all n locations
  Clone ID: LIB22-045-Q1-E1-F5
ccgttacgccngccaagtaccggtccagaattcccgggtcgacccacgcgtccgggacagcatcaggaggtgatccttgtggccaaaactggaaaggcataacttgctctggctctcgagttacacaaataaagttaccaagtcttggactttctggatcacttggattcatgcttgataaattgacttctgttactgagtttgatatgagcaacaataaccttggaggcgatttgccttatcagcttcctccaaacttggagcgattgaatcttgctaataaccagttcactggatctgctcaatattccatttctatgatggctcctcttaagtacctcaaccttgctcacaaccagttgaagcagctagctattgacttcacaaaactcacctctctctctatattggacctctcttccaatgcttttataggggtctctcccaaacacttgtagctctcttacgagtgcaaaatca

SEQ ID NO: 4287 - DNA, 442 bp, Arabidopsis thaliana
  Clone ID: LIB22-045-Q1-E1-F6
acgcgtccggcccatcaataaagaaaatacaaaccatggcaattccaaaagctcactactctttagcagttcttgtccttctctttgtcgtcgtttcgagtagccaaaaagtctgcaatccagaatgcaaggccaaagaacccttccactgcgataatactcatgcattcaaccgtagtggatttcccaaaaatttcacttttggtgcagctacttcggcttatcaaattgaaggtgcagcacatagagcacttaatggatgggactatttcacgcatagatatccagaaaaagtaccggatcgtagttcagcagatcttgcttgtgattcgtatgatctttataagggatgatgtcaaactgctaaaaagaatgaatgttcaagcataccgtctcctcgatagcatggtcaagggtcttaccaaagggaagactgactggg

SEQ ID NO: 4288 - DNA, 413 bp, Arabidopsis thaliana
  unsure at all n locations
  Clone ID: LIB22-045-Q1-E1-F9
tgattctcttggtaaatgtgagtctttgacccggatccgaatgggtgagaatttcctgaacgggtcaatcccaaaaggactattcggattacccaaattaactcaagtggagctccaagataattatctctccggagagttaccagtcgccggaggtgtctctgttaatcttggtcagatcagtttatcaaacaaccagctctcaggtccattacctccggcgatcgggaacttcaccggcgttcagaaacttcttcttgatggaaacaagttccaaggtcctattccttcaagaggtagggaagcttcagcagctctcgaagattgatttcagccacaacttgttctccggtcgaatcgcgccggagattagtcgttgcaagctcttaacgtttgttgatctgagcanaaac

SEQ ID NO: 4289 - DNA, 419 bp, Arabidopsis thaliana
  unsure at all n locations
  Clone ID: LIB22-045-Q1-E1-G10
tatcctagccgggtcgggtcaaggtctttgagtaagagagacaattcgttttgattcggtgtagaagacatcatgaatactggtggtcggctcattgctggctctcacaacagaaacgaattcgttctcattaacgccgatgagagtgccagaatacgatcagtacaagaactgagtgggcaaacatgtcaaatctgtggagatgaaatcgaattaacggttagcagtgagctctttgttgcttgcaacgaatgcgcattcccggtttgtagaccatgctatgagtatgaacgtagagaaggaaatcaagcttgtcctcagtgcaaaactcgatacaaaaggattaaaggtagtccacggggttgatggagatgatgaangaaagaaagaagacattgatgatcttgagtatgaagttt

SEQ ID NO: 4290 - DNA, 410 bp, Arabidopsis thaliana
  unsure at all n locations
  Clone ID: LIB22-045-Q1-E1-G11
tattcttcacaaagttaacatttttagactcaaaactcattcttttgcccttcctctgtttctcctctcttggggtttatcttagattctccaaaaaagtctctctctttccatggnnnnnnnnnnnnnnnnnnnnnnnnnnnnnnnnnnnnnnnnnnnnnnnnnnnnnnnnnnnnnnnnnnnnnnnnnngatgaaggttcatatattggagtaaacatagggactgatctttctgatatgccacatccaacacaagttgttgctctactaaaagctcaagaaatccgacatattcgattatacaacgctgatcccgggttgttgattgctctagcaaacactggtatcaaagttataatctccattcctaatgaccagcttcttggtatangtcaatccaattcaaccc

SEQ ID NO: 4291 - DNA, 480 bp, Arabidopsis thaliana
  unsure at all n locations
  Clone ID: LIB22-045-Q1-E1-G2
aangttacccgccggtacggtgcaaaattcccgggacgacccacgcgtccgaccgtgcgatancctaaatttcaacgttgattccactttgtcaagtttgtatctttcccactttgattccgatttgttaaagatttgcagattaaaagttttctttttgaagaaatccatgagtgcccaaatggaagaaccagagactctcggnaaaagaaaagaatctgaaagttcaaaacttcgttctgatgaaactccgacgccagaaccaagaacgaagcgtagaagtcttaaacgtgcttgtgtacatgaagttgctgttcctaatgattacacaccaacganagaagagacgattcatgggacgcttgataatcctgtcttcaatggagacatggccaagacttatccttttaagcttgacccttttcaaaggtgtatctgtagcttgtttagagagaaaagaatccattttgggatctgcnc

SEQ ID NO: 4292 - DNA, 485 bp, Arabidopsis thaliana
  unsure at all n locations
  Clone ID: LIB22-045-Q1-E1-G3
ttacgccngccgttaccgggccaaaattcccggaancgacccacgcgtccgcccacgcgtcngttcttctccaagaacctctctctctttctgcttctctatattttaacactttcttccgaatttgcccctcaagttttattttaattgctaaaatggctggaaccctagttaactccgccgggagattctcaccgggaaattgtattcttcctcaacagagaacagccagattctacagcggaaccgcgagatttcccaccggagctccgtcgtttaaggcttcagctcagacgcttaacgccgagccagctgtaacggaatccgttcgtcggagagtttctagcctctacgaattactgaaagtgaatgaaacggcgtccttgacggagatcaagacggcgtacggagcttagctaaagtatatcatccagatgcgtcggaatcggacggtcgagattttatggagattcacaaagcttacg

SEQ ID NO: 4293 - DNA, 493 bp, Arabidopsis thaliana
  unsure at all n locations
  Clone ID: LIB22-045-Q1-E1-G4
ggaacgttacccgccgttacgcggccagnttcncgggacgacccacgcgtccgcccacgcgtccgtgaggcctctgctctgcattgctgtctgcgagcttgtgggaggcgacgaggctactgccatgtcagctgcttgcgcggtcgagatgatccacacaagctctctcattcatgacgatcttccgtgcatggacaatgccgacctccgtagaggcaagcccaccaatcacaaggtatttggagaagacatggcggttttggccggtgatgcgcttcttgctttggcgtttgagcacatgacggttgtgtcgagtgggttggtcgcttccgagaggatgatccgggcagtggttgagctggcaagggccatagggacaaaagggttagtggcaaggcaagtggttgacctaagcagcgaaagattgaatccacacgacgttggattggagcgtctanagttcatccacctccacaaaacggcggcgttgttg

SEQ ID NO: 4294 - DNA, 480 bp, Arabidopsis thaliana
  unsure at all n locations
  Clone ID: LIB22-045-Q1-E1-G6
gccngccaggtaccggtcaagaattcccgggtcgacccacgcgtccgctgttcttctcattggccgccatggtgaagtactctcaagagcccgataatatcaccaaatcttgcaaggcgagaggagccgatctcagggtccacttcaagaacactagagaaacagcgcacgccataaggaagctaccattgaacaaggccaaaaggtacttggaagatgtcatagctcacaagcaagctatccccttcacccgtttctgtcgtggtgttggtcgtaccgctcaggcaaagaacaggcattcgaacggacaaggtcgctggcctgctaaatctgctcaattcgttcttgatcttctcaagaatgctgagagcaatgctgaggtcaaaggtttggatgtcgatgcccttttcatttctcacatccaagtgaaccaagcaagcaaaacagaggagaaggacatatcgtgctcatggaagaatc

SEQ ID NO: 4295 - DNA, 412 bp, Arabidopsis thaliana
  unsure at all n locations
  Clone ID: LIB22-045-Q1-E1-G9
aattccacttctgtccacaaaacacaaagcgattctcgatctttgatcgtcccaccagatggccgggaacgattgggtaaacagttacttagaggcgattctcgacgtcggtcagggtcttgacgatgctcgctcttctccatcacttcttcttagggagagaggtcgattcactcccagccgttactttgttgaggaagttatcactggttacgatgagactgatcttcatagatcctgggttaaggctgttgctacgaggagtccacaagagaggaacacgaggttagagaatatgtgttgggaggatctggaatcttgctcgtcaaaagaagcagcatgaggaaaaagaagcacagaggctggctaagcgcangcttgaacgtgagaaaggtcgcagagaaggcaacag

SEQ ID NO: 4296 - DNA, 480 bp, Arabidopsis thaliana
  unsure at all n locations
  Clone ID: LIB22-045-Q1-E1-H1
ggaactgttacgcctgccgntaccggtccanaattcccgggtcgacccacgcgtccgaaagcttttgctcatgagcttgtacctaccattacttgcacttcatctaatgttgtacagacgattctgcaggcgtttgctcaaatgccagagttaactgtttggtatggtcctgattcttacatgggagcgaatattgtaaagttattccagcagatgacattgatgactaatgaagaaatcgccaatattcaccctaaacacagcttagattccattaaatcattgcttccccgtcttcactatttccaggaaggaacctgcattgtacatcatctattcggtcacgaggtagtggagagaataaagtacatgtactgtgacgcctttcttacagcacatcttgaggttccaaggtgaaatgtttcactagcaatggaagcaaaagaaaagagagattgggtgttgttgggttaacacaan

SEQ ID NO: 4297 - DNA, 490 bp, Arabidopsis thaliana
  unsure at all n locations
  Clone ID: LIB22-045-Q1-E1-F1
cgtttacgccgcccnttaccgggccaaaaattcccgggancgacccacgcgtccgaaaaactcgatcgatcaattcgttgttcgtctacatcgattccttcagaacctagtgatcctctgttttggttgattcgattaagctaaccatgtcttacaaaccaagcgcgaagactgaggttcgccggaacaggtataaagtatctgtggacgccgatgaaggtcgccggagacgggaggataacatggtggagatccggaagaacaagagagaggagaacttgcagaagaagcggcgtgaaggttttaatccttccatggcgtcacagccagggcaggatttctcctcgtctctccctacggaaacgagattggagaatatacaacaagatgattgctggagtaatgtcagaggatagaagacttacaattggaggcgacggctagcttcangagattgctttcaattgagcgaaatcctccatcaatgaag

SEQ ID NO: 4298 - DNA, 445 bp, Arabidopsis thaliana
  unsure at all n locations
  Clone ID: LIB22-045-Q1-E1-C5
acgcgtccnaaaaaataaaagaatggcgtctctgtgcctttctctccaccaaaccctaactaatcccctgtcggctcccagatgcagaccactcagcctctccttccccggatcctcaaccttctcgatccgcccctctagcagacgcgcaaccgccttgacgacccgcgcctcctacaccccgacgccggcgactgagcgcgtgatttcgatagcgtcgtacgcgctgccgttcttcaattctctgcagtacgggcggttcctgttcgcgcagtacccaaggctgggattgctgttcgagccaatcttcccaatcctgaacctgtacagatcggtgcgtacgccaagcttcgtgggattcttcggggctgttacctggggaattggtganggaacacgaagttttcagtaggtaacgttganggttcaacggcgaangcaaggc

SEQ ID NO: 4299 - DNA, 414 bp, Arabidopsis thaliana
  Clone ID: LIB22-045-Q1-E1-C9
ttgttcaatctcgtatcaaagctctcaagaagatggatgaattattggaagtggtggaagaagctgaatttagaatgcaattccctgaacctgataagattgatggagcaatcatcacttgtgataaagtgaaattcggttatgataaagataatattctattacaagatgttacacttaatattgatatggattcacgtgttggtgtgttgggggccaatggggttggtaaatctacattacttcatcttttgattggtaagattcaaccattagaaggtacagtgatacgaaattctagtgcacggattgcaacttttgcacaacatcatatggaacaattaaatttacaacaatctgcccttgatctcttcattgaactctttcctaaaaatcaacctcaacttctggcgt

SEQ ID NO: 4300 - DNA, 414 bp, Arabidopsis thaliana
  Clone ID: LIB22-045-Q1-E1-D10
aggcacttgtagcacgtcgtctctcctttggtttctctccttatattcgacgagtgactccgattggatcgctatttcgtcatttctcactttccaaaaagaaaaaaacgaatctctctccaccatcatcacctttctccttcacttgcctcagatctggctgcgatttcaaatcttccttagtttctctcgcatcgctcggccgttgacggtcccgtcctttccgtggatctgattctggccccggattctctcgccgcgatctgaggtcaaacatggcggctgctaacgcgcccatcattatgaaggaggtcctaacgcttccgagcgttgggatcggtcaacagttcatcacctttacaaatgttactatggagtccgataagtacataatgtgtacgagagacggcaccg

SEQ ID NO: 4301 - DNA, 417 bp, Arabidopsis thaliana
  Clone ID: LIB22-045-Q1-E1-D11
ttatttgtcatcattaattttaacgacgagacgtattactctttgcctgactctctttctctctctcccggcgacgacggtttagagtcgccatagatggatcataactcgccgaaatctcgtcggagccggaaaccggagcccaaacctgacatatactccactttcgtagtccactccgactctgattctgatcaaggtcgagatcgagacaaacgtaaagccaaacctgaggaaagacgaaaatgtcgatttatacgctacaatggtctacaaaggcgatagtgacggagaaggagaggaagatgatgatgacgattctatgcttcctcctcttctcaagcgtcttcccaaggatttcggaggcgggcgcgtcgctcgattacgacgacgacgaacggtgatgaatcctggaga

SEQ ID NO: 4302 - DNA, 410 bp, Arabidopsis thaliana
  unsure at all n locations
  Clone ID: LIB22-045-Q1-E1-D12
cactaaccctaaaaaaagtaactctctcactcactcttcttcatcataccgaaaaaaatccaatggcttctttggaaaatccagcaatcgattcttcaagcgaatttgagagttcttctgaagagatctcttcttctaaagaaagcaaacccaaagaagctcccgtcactgttccgtcaacaaaaaccctaaactctccttccgccgccgtggcagtttctgatgactcagagtcagagaagcagtcattcgtcttaaccaggcggaagaagaaagaaggtgctgctgaatcaccggcagtgaagtcagggaagaaagaaggtgctgctgaatcaccggcagtgaagtcagggaataacgaaggtgctactgaatcaccggcggtgaagtcaggggaaagaagccaanct

SEQ ID NO: 4303 - DNA, 491 bp, Arabidopsis thaliana
  unsure at all n locations
  Clone ID: LIB22-045-Q1-E1-D4
ttaccctgccgntaccggtccanaattcccggntcgacccacgcgtccgtgtctctcttccctcgtaaacatcgctgtctctaaagatggcctctctctcaggcctatactcttcttctccatctctcaaacctgccaaaaaccattcctttaaagcattgccggcgcaatctcgagattccttctctttcccacatacctccaaacccaccaatctaccgttgactctctcctcggctcgttctgtggcacgcgacatttctcatgcggattcgaagaaagagcttcttaaggatccggatgcgttgtggaagcgatacctcgattggttttatcaagcaagaaagagcttgggttgtatctgggatattaatcgggtcggatttaccgatgagtttgtggctgaaatggagccaaggtttcaaagctgcgtttaaggctatggaggatnttgaaaaagggtctatagcgaatcctgatgaaaggaagaa

SEQ ID NO: 4304 - DNA, 440 bp, Arabidopsis thaliana
  unsure at all n locations
  Clone ID: LIB22-045-Q1-E1-D6
acgcgtccnnnnnnnnnnnnnnnnnnnnnnnnnnnnnnnnnnnnnnnnnnnnnnnnnnnnnnnnnnnnnnnnnnnnnnnnnnnnnnnnnnnnnnnnnnnnnnnnnnnnnnnnnnnnnnnnnnnnnnnnnnnnnnnngataatgggagcctatgaaacagaaaaaccaactaaagatgcggcggctctagagacacagtcgccggaagatttcgatcaaccatctccgcttcgtaaaatcatctccgtcgcttccatcgccgccggtgtacagttcgggtgggccttacagctctctcttcttactccgtacgttcaactcctcggaatccctcacaaatggtcatctctcatttggctctgtggtccagtctccggcatgattgttcaaccaatccgtcggtttcacagtgaccgatgtaggtccaaatttgggtcgccg

SEQ ID NO: 4305 - DNA, 420 bp, Arabidopsis thaliana
  unsure at all n locations
  Clone ID: LIB22-045-Q1-E1-D8
ttgttgttacttcctttggtttcttcaatggaaaaagaagagctcaacaaattgaatcatctctctctcgtctccaatgtctgcaacgaattggaaacgcatctaggatctgcagaaaaagttttggctgagttcattatcgatctaggtcgtcactctgagacagtcgatgaattcgataagaatcttaaggaagcaggtgcagagatgccggattacttcgtccggtcgttgttaactacaatccacggtatttatcctccgaagcctaagtcggagaagaagaaagaggaaggtgatgatcagaaattcaaaggcttagcgattaaggatactaagggataaagttaaggagctcgagaaagagattgagaagagaaactgaggagcgacgggagagaagaggatcgaaatanagat

SEQ ID NO: 4306 - DNA, 420 bp, Arabidopsis thaliana
  Clone ID: LIB22-045-Q1-E1-E1
tgggatgagcctgcatcgatttcaagacccaataaggtttcaccatgggaaattgaaccgtttgtaaattcagaaaacgttcccaaatcagttatgctgaagaacaaaaggccccgtcaagttagtgaagtatctgcacttgatgtaggcataacagcttcaaacctttggagctctgttttgacgcaaccccatgagtttgcacaatcgtgcatcacctcacagtggagttctcctcagcaatgtcatcgtgatgcaaatgaggatgctaagaaatctgactggctaaataactcctactcctgtgtcaaatgtagcaaaagactcaacactgaacgaccaaatggtttccccagtccgaagcagaagaagcctgagacaacccgctaattatagattatttgggaattgatctgatga

SEQ ID NO: 4307 - DNA, 493 bp, Arabidopsis thaliana
  unsure at all n locations
  Clone ID: LIB22-045-Q1-E1-E4
aactgttacgccgcccttaccggnccaaaattcccggatcgacccacgcgtccgngaatcttcaagaacaaagagagagagagagagaaaatttaatggcgttagcgaataacttaacggcgatactcaacttactagcgttactctgttccataccaataacggcgtcaggtatatggctagcttcaaagccagacaacgagtgtgtcaatctcctccgttggcccgttgtcgtcctcggcgttctcatcctcgtcgtctccgccacaggcttcatcggcgcctacaagtacaaggaaactctactggcggtttacttgtgctgtatggcgatattgatcggacttttgctggtggttcttatatttgcattcgtcgtgacccgggcccgatggatcgtatcgggttccgggtanaggttataaagagtataggcttgaanggttctcgaattggcttaaggagaacgttgtggattccaaagaactgggga

SEQ ID NO: 4308 - DNA, 479 bp, Arabidopsis thaliana
  unsure at all n locations
  Clone ID: LIB22-045-Q1-E1-E5
ctttacgccnccaagtaccggtcnagcattcccgggtcgacncacgcgtccgggcaagaggaaataatttgctctttagttactgacgcatgtattcaagtctgcccaaagaatccaacgaatttcaatgtggataatgttcgtgtttccaagcttttgggaggaggcttgcacaattcttgcatagtccgtggtatggtcttgaaaagtgatgctgttggtagcattaagcgaatggagaaagcgaaggttgctgtatttgctggtggcgttgataccactgcaacagagaccaaaggaactgtcctcattcatagtgctgagcagctagagaactatgcaaagacagaggaagctaaagttgaggagttgattaaagcagttgcggaatcaggagccaaagtcattgttaatggaggatcaattggagaaatgggcattgcatttctgtgagcgctacaaagataatggtattgaaa

SEQ ID NO: 4309 - DNA, 437 bp, Arabidopsis thaliana
  unsure at all n locations
  Clone ID: LIB22-045-Q1-E1-E7
acgcgtccgaaaaatattttgctcttctttctatatatttatnnnnnnnnnnnnnnnnnnnnnnnnnnnnnnnnnnnnnnnnnactcattttctccgcagagaaaatacaatccatggcttctacttttaggctctctattagcttcctcactctcatcctcttctctctgtgggtagtggaggcacacacgtctagaaagttgatatcaatcaaggaaaaagaaggtcaagatattagtcatttgctcaaagatggtgaatttgatgacccttcgttgtacatgtatttcacactcaatgatctcaaactaggaaccaaattgctgatttacttctacaaaaacgatcttcaaaagcttcctccacttctcacaagacaacaaggccgatctcattcctttcactaagtcaaagcttgacttccttctcgaccact

SEQ ID NO: 4310 - DNA, 439 bp, Arabidopsis thaliana
  Clone ID: LIB22-045-Q1-E1-E8
acgcgtccgcagactcagagtggctcttcttttgtcctttggaccggaaatatccgagtggaagtcgaatgaatagagctactgtggctggatactggaaggcgacgggaaaagaccgtaagatcaaatcaggaaagactaagattataggtgttaagaggactctagtgttttatacaggtcgtgctcctaaagggacacgaacttgttggattatgcatgagtatcgtgctactgagaaggatcttgatggaacaaagtctggccagaatccgtttgttgtttgtaagttgtttaagaagcaagatattgtgaacggagctgctgaaccagaagagtcaaagtcatgtgaagttgaaccagcggtatcgtctccaactgttgtggacgaggttgaaatgtctgaggtatctcctgttttccctaaaacagaagagac

SEQ ID NO: 4311 - DNA, 405 bp, Arabidopsis thaliana
  Clone ID: LIB22-045-Q1-E1-E9
cgagtctgcctcaagtgtttttgggggaaattgatttcgttgagaaaaaccctaaattccgaacttgaagcaatttttcaatttcgtttgcagaaaaatggcaaaggataatgaagcaatcgccattaacgatgcggttcacaagcttcagctctatatgctcgaaaataccactgatcagaaccagctcttcgcggcgaggaagttaatgtctcgatcagattacgaagatgtcgtcactgaacgagcaatcgctaagctctgtggttatactctttgccagagatttctcccttccgatgtttctaagaagagggaagtatcggatttcgttgaaggaccataaggtttacgatttacaggagacgagcaagttttgctccgctggttgtttaattgataagc

SEQ ID NO: 4312 - DNA, 507 bp, Arabidopsis thaliana
  unsure at all n locations
  Clone ID: LIB22-045-Q1-E1-C4
gaacgttagccgccttaccgggccaaaattcccggntcgacccacgcgtccggtgagctaagaaccgaccttttgcttagtttctttcaagtctccaatcaaacaaccatgagagaaattgtgacgattcaagttggagaattcgcaaactttgttggctctcacttttggaatttccaggatgaattgctcggattggctagtgaccctgaaagcgatccaatctttagaaaccataatctcgacatggatgttctctaccgctccggtgagacccagcagggggttgctacatacactcctcgtttggtttcagtcaacttaaaaggggcactanggaccatgaagctcacgcggtacactttacaacgaaaggttcttcatcaagatnaagattccttcagcaancctggtttgggcgatgttgatactcaagggattctggaanctccganaagaggaaccttggttcctgcaanagtttggtacgaagggaagaacaatgtt

SEQ ID NO: 4313 - DNA, 503 bp, Arabidopsis thaliana
  unsure at all n locations
  Clone ID: LIB22-044-Q1-E1-H3
ctgttacgnttgccgtaccggtccaaaattnacgggtcgacccacgcgtccgcgcacttcttcaatggcgaccaaagtttacatagtgtactactcaatgtatggtcatgtggagaaattagctcaagagattaggaaaggtgctgcttctgttgatggtgttgaagccatactctggcaggtacccgaaacgctccaagaagatgtgctctctaaaatgagtgcaccaccaaagagtgatgctcctattatcaccccaaacgagctcgctgaggctgatggatttatcttcggcttcccaacgaggtttggtatgatggctgctcagttcaaggcatttttagatgccaccggcggcctttggaggactcagcaactcgccggtaaaaccagccggaatcttctacagcacanggtcccaaggtggtggtcaagaaaccaccgcattaactgccantactcaactggttcatcacnggatgatctttgtcccnattgggcta

SEQ ID NO: 4314 - DNA, 454 bp, Arabidopsis thaliana
  unsure at all n locations
  Clone ID: LIB22-044-Q1-E1-H7
acgcgtccggttcttagctgtcttcaatctctttgtctgtatcattctttacggaagccatgaaaatggcatcaagaaaaacaacatccttgcttaatcatcttcttcttcttggagctttgactcttttgagcagtttggtgatagtgaaaggagaaagcccttacaagttttacacttggactgtgacttatggcattatctctcctcttggtgttcctcaacaggttattctcatcaatggtcagtttcctggtccaaaacttgaagttgtgaccaacgacaacatcatcctcaacctcatcaacaaacttgaccagcctttcctcttgacctggaatgggattaagcagaggaagaactcatggcaagagggtgttttgggaacaaactgtccgattgaaccanactcaaacttcacttacaaattccaaaccaaaagatcagatnggga

SEQ ID NO: 4315 - DNA, 419 bp, Arabidopsis thaliana
  unsure at all n locations
  Clone ID: LIB22-044-Q1-E1-H9
ggtcactgaatcctcattgtcacctcttcccctatctcaaacagctgatcttgcaacatcatctgctggtcctttgttaaggaaagatcagaagccccggaaacgttcagcttcagatttgctaagattgatcccatccctccaggtagtggaaggtgttgctagtcccaataagagaagaaaaacctctgaactggtacagagtgaattagtgaagagttggagccctgcatcacagaccttatccactgccgtgtcaacatcaacaaaaactataggatgcagctatgggaatctcatagctgaagcaaacaaggggaatgcaccttcaagcgtttttgtttatgctcctctccatgtggtcaagcattcttcgttggtccataaagcatgccaaactaactagtcagatggaggna

SEQ ID NO: 4316 - DNA, 414 bp, Arabidopsis thaliana
  Clone ID: LIB22-045-Q1-E1-A10
gatggctggcccagaaactttaagttctccttcgagaagtgcacatattactttgagattgctgttgcactggcggttgctgcaattccagaaggtctgccagcagttattaccacatgtttggctcttggcactaggaagatggctcagaagaatgctctggttaggaagctacccagtgtggagactcttggatgcaccaccgtgatatgctctgacaaaactggaactcttacaaccaatcagatggctgtttcaaagctcgttgctatgggttcgaggatcggaactcttcgatctttcaatgttgaggggacctcgtttgatcctcgagatggaaagattgaagattggccaacgggtcggatgggatgcaaatcttcagatgattgcaaaaattgctgccatttgcaa

SEQ ID NO: 4317 - DNA, 489 bp, Arabidopsis thaliana
  unsure at all n locations
  Clone ID: LIB22-045-Q1-E1-A3
ttacgcctgcctgtaacgcgtgcaggtatcggncgnnnantcacggcgtcgagccaanncgtcnnattacggcatcantcacctataaatttcgccgctgggtttaattctctattcattcagaaccaaaaaagaagaaacctttttgattctctttgcgatttctttgttcaatctcttctcagattgtgtgaatcgggtttaaatcggggttttagggtctctgttttcaaaagggtaccaaaaagtttggagctttactgtagaaagatttgatttttcgttgacccactccgagattttcggatacaaatcacggttttagggtttttgttggaatggaagaggattatcaacagccgaggtttacgantgggtaggcaatcatcaatggcgccggagaagattccggagccgtcggttcactcangaagaagangtgtttgaaggatggagaagaaatcgatggtggngtgagactaaaggtat

SEQ ID NO: 4318 - DNA, 370 bp, Arabidopsis thaliana
  unsure at all n locations
  Clone ID: LIB22-045-Q1-E1-A5
tcattttcttgctcaacttgagttgcttccaacatcttgcaagattgtctttgagttcattcaggtcttgaagaagagcactcttttaagctgtgtgaaacttgcgccgttcctgtgaagaactacttttggcattgcagatttcagagagctgtgatttgtgctatcttaaaaacggacaagttctatgttgtggcggatgagatgagggatgctatctgggttgatgaattttctgaatgcctgtctctggccacggtcagatcagcaggctcgttctgcctcaagattctggtggccgccaagagggtttgctctgggttcaaagaacccgggccagcacgtctttggtgacntctccatgggcgtc

SEQ ID NO: 4319 - DNA, 441 bp, Arabidopsis thaliana
  unsure at all n locations
  Clone ID: LIB22-045-Q1-E1-A8
acgcgtccgaaaaaaaaaaaacttctttttatgttttgtttgtttctattccgatcttatcctacgccgtcactctcctcccggtgcgcacattagcaacactactcccgacgaatggagacgacgacgccgcagtcaaaatcaagtgtgtcccaccgaccgccgttgggaagagaagactggtggagtgaggaagcgacggcgacgctggtagaagcctggggcaatcgttacgtcaagctgaaccacggaaatctccggcagaatgactggaaagacgtcgccgacgccgttaactctagacacggtgataacagccgtaagaagaccgacttacagtgtaagaaccgggtcgatactttgaagaagaagtacanaacangagaaagctaaactctcgccgtcgacttggcgtttctataaccgcctcgatgttctaat

SEQ ID NO: 4320 - DNA, 426 bp, Arabidopsis thaliana
  unsure at all n locations
  Clone ID: LIB22-045-Q1-E1-B2
tttcataatctctcactttgtgcgagtgtttttttttccgagatccaaaatcttctaacggatccaaagctttgttactccgtggatctcctaccttgagcacctgaaaagatggacaaatctagtaccatgcttgttcactatgacaaagggactccagcagttgctaatgagattaaagaagctctcgaaggaaatgatgttgaagctaaagttgatgccatgaagaaggcaattatgcttttgctgaatggtgaaaccattcctcagcttttcattaccattataanatatgtgctgccttctgaagaccacaccatccaaaagcttctgttgctggtacctggagctgattgaaaagacagattccaagggggaaaggtgttgcctgaaaagattttgataatgccaagaatcctccgnaat

SEQ ID NO: 4321 - DNA, 441 bp, Arabidopsis thaliana
  unsure at all n locations
  Clone ID: LIB22-045-Q1-E1-B7
acgcgtccgcgcgtttctccatcaagaagaagacacagagaacacagttctccatcaacccttttgatccgagacctatgagagccgttaactcaagcggcgttgtagcggccatcagcgaggatttggttaaaacgctgcgtattancactgtcggtagaaaacaagagaaggaggaagaagaggagaagtcggtgaagtttaaggtgagagcagttgcgacggtgaggaacaanaacaaagaggattttaaagaaactttggttaagcatttggntgcttttactgataaaattggtanaaacgttgtcttggngcttatgagtacccaaagttgatccaaatacgaatgatccaaanaaagagtaaagctgcaattttgaaaagattgggcaaagaaatcaaattcaaaagggcggaaagagtccaattacacnggcc

SEQ ID NO: 4322 - DNA, 439 bp, Arabidopsis thaliana
  unsure at all n locations
  Clone ID: LIB22-045-Q1-E1-B8
acgcgtccgcaaaaattcgagacctcctctccacttcgaaatttcatttttttttttctcaacagagtaaatttggctcttatgcacctgtcgtgtgaatcctgatctcgctttagatnnnnnnnnnnnnnnnnnnnnnnnnnnnnnnnnnnnnnnnnnnnnnnnnnnnnnnnnnnnnnnnnnnnnnnnnnnnnnnnnnnnnnnnnnnnnnnnnnnnnnnnnnnnnnnnnnnnnnnnnnnnnnnnnnnnnnnnnnnnnnnnnnnnnnnnnnnnnnnnnnnnnnnnnnnnnncaagnttctctctagcttttgctttcgtttccgctgagagaagaggaaaatctctgaggttaagtacagacgaaacgcgggaaaatgaatcaaggtttcttccttaaagctatcaattttcnagggggaatctgatcaantaggttat

SEQ ID NO: 4323 - DNA, 483 bp, Arabidopsis thaliana
  unsure at all n locations
  Clone ID: LIB22-045-Q1-E1-C1
ttacgccgnccgttacgcggcnaaaattcccgggancgacccacgcgtccgaggaccttgacacttctctctctctttctctttgctattcatcttctacagtttcttaaaaattatacnnnnnnnnnnnnnnnnnnnnnnnnnnnnnnnnnnnnnnnnnnnnnnnnnnnnnnnnnnnnnnnnnnnnnnnnnnnnnnncaggatttgttttttccgtttgaggtaaagcagctttgcagttaaagaaaccttgagtatccaatgtccccggaagaggagctacagagcaatgtatcggtggctagttcttcacctactagcaattgcatctccaggaacactctaggaggacttaaagaagcataactacttgggtctctctgattgttcctccgttgggaaagctctaatctctctccccttgctgaagatgacaaagctactatcagcctcaagggtacggagctgacacttggtcntcct

SEQ ID NO: 4324 - DNA, 409 bp, Arabidopsis thaliana
  Clone ID: LIB22-045-Q1-E1-C10
ccgcccacgcgtccggagactcataggatcataaccaggacgtgcaatttcagcagcgataatacttggagcaacgatgagtgcaatgaggccgtagcagaagttctcaagcagtatcacgagatagatatctatagcatctatacctcagtttgcataggagattctgcgcgatcgtcttactttgattcagcgcaattcaaaacaaattctcgcattagctccaagaggatgccaccgaggctcatgggtggatatgatccatgcttagatgattacgcgagagtattttacaacagagcagatgttcagaagtctcttcatgcgagtgatggagttaatctcaagaactggagcatttgcaacatggagatctttaataattgggactgggtcaaaacccgtcggt

SEQ ID NO: 4325 - DNA, 411 bp, Arabidopsis thaliana
  unsure at all n locations
  Clone ID: LIB22-045-Q1-E1-C12
aaaccttgcgatctacttgaaagagagattcagaaatttccaagtaataataatgtttgcgcctgcgactcaaccgcaacagcaacatgagcagaagaagcaatcagagactgtttcatctgctgaagaagatgctttgaagtggaacaccgattgcgtttactttctcgcttctcctttaacctgcaagaagggacctgaatgcgagtatcgccacagtgagtatgcgcgtatgaacccgagggattgctattattggttgaatggaaactgtttgaatcccaaatgtggatttcggcatcctcctttggagggattgttgggaaatcaaggaggtgctcctgctgtttctgtacagccaatacatgcaaccgcgcagcatcctagtgttgcaaaaacaacccggttnca

SEQ ID NO: 4326 - DNA, 457 bp, Arabidopsis thaliana
  unsure at all n locations
  Clone ID: LIB22-045-Q1-E1-C2
acgcgtccggcgcatcggattttggaaaccattgatgcagacctcaatccatctctaacaccactgatctatctacttaggtcttctctaacaatacttgtaattttctttctttttgcttcttccgtcactacatctatggccgctgagtcttctaaccctcgcaccgtcgaagagatcttcaaggattttagcggtcgtcgctccggttttcttcgagctctctccgtagatgttgacaagttctactctttatgcgatccggaaatggagaatctgtgtttgtacggacacccgaatgggacatggggaagtgaatcctccaactgaggaagtgcctccggagctacctgagccaactccttgggnatcaaattttngctagaagatgggatgcaacgtaaaagaatgggtccccttantttggctgtccacaagtgatttgtttgggtactcc

SEQ ID NO: 4327 - DNA, 490 bp, Arabidopsis thaliana
  unsure at all n locations
  Clone ID: LIB22-044-Q1-E1-H2
actgttgcccgtgccggtccgaatattaacgggtcgacccacgcgtccgagatgatggacgtatcaaaggatcggatgatgagttcgatggaggaacttcgcggaggaaactataatcttgagtcatactcaaacgttcatacttggctgagcagtgtgcttacaaactacatgacatgtttagaaagtattagtgatgtctccgtcaactctaagcaaatagtcaagccacaactcgaggacttggtttctagggcaagagtggctctaaccatctttgtctccgtcttgcctgccagagacgatctcaaaatgatcatttccaatccgcttcccgtcgtggctaactgctcttgacagaaagcttttagaatcctctcccaagacacttaaaggtgaccgcgaacgttgtggtggcaaaaagacggnaaccgggaaagttcaaaacagttgaatgaaggaantggcgggcaacaccggngaacagcaa

SEQ ID NO: 4328 - DNA, 491 bp, Arabidopsis thaliana
  Clone ID: LIB22-043-Q1-E1-H5
ctgttacgcctgccaggtaccgagtccagaattcccgggtcgacccacgcgtccgggacagagctgtgagcacaagtatctacttcttgcttccatctgggagcgtttctcgtcttcatcgcataccaatggctgaaacctggcacttttatttgggtgaaccccttactgtagtggaactctacgatgatgggaagttgaaattcacatgtcttggtcctgacttgtttgaaggtgatcagaagcctcagtacacggtccctccaaacgtctggtttggttcgtttcctacaaaggatgttcatttttctcaagacggggctctgcttaaagctgaggctagagactctgagaaccatttctctcttgttggctgcacctgcgctcctgctttccagttcgaggactttgagctcgcgaaacgctctgatctcttatcaaggtttccgcaacacgaatcactcatcacaatgctatccttaaccgggggt

SEQ ID NO: 4329 - DNA, 416 bp, Arabidopsis thaliana
  unsure at all n locations
  Clone ID: LIB22-043-Q1-E1-H6
ttctttatctgagatggatgatcttgatttgactcgagctttggataaaccaagattgaagatcgaaaggaagagatcgtttgatgaaagatcgatgagtgagctatcgactggttacagtagacatgacggtatacacgattcgccgcgaggtagatcggtgcttgatacgcctctttcttctgctagaaactcctttgagcctcatcctatgatggctgaagcttgggaggctttaagaaggtcaatggtcttcttccgtggtcaacctgttggtactcttgccgcggttgataatactaccgatgaagtcttgaactatgatcaggtgtttgtgagggattttgtaccgagtgcgttggcgtttctgatgaatggagaaccggatataagtgaaacattttttgcctaanaaa

SEQ ID NO: 4330 - DNA, 423 bp, Arabidopsis thaliana
  unsure at all n locations
  Clone ID: LIB22-043-Q1-E1-H8
tgttctcaaacaccaaaagcaaaacatcacaaaagaaaagagactaatcaagaagagatatcatcaattgaagctgttttcttgagtagagatggcgaaccatagaatgagcgaagctacaaaccataaccacaatcatcatcttccttattcacttattcatggtctcaacaacaatcatccatcttctggtttcattaaccaagatggatcgtccagtttcgattttggagagctagaagaagcaattgttctgcaaggtgtcaagtataggaacgaggaagccaagccacctttattaggaggaggaggaggagctacgactctggagatgttcccttcgtgggccaatcagaactcaccaaactcttcctactgagaagttccaaagtcaggaggagagagcaacgattcnagggtttg

SEQ ID NO: 4331 - DNA, 502 bp, Arabidopsis thaliana
  unsure at all n locations
  Clone ID: LIB22-044-Q1-E1-A1
acgcctgcccgtaccggtccgagaattcccgggtcgacccacgcgtccgcgactagcacatcaagctggattggatcaagattctaccatggatgttctaccataaggttctaggcgtctcaacattcttccttttcgttgaagggaaagctgctactccgagtatttctaaagtgctcgagtctattcctggtgttaaagtaatatacaggacgaaagagcttgaggagaagcaagcgaagagccggatttggaatgagacctggctttcgtctttcttttataagccctgcaattatgagttatttgtcaaacaatctctcaacatggaaatggctattgtcatggctagggatgcgggcatggattgggatacttcatcttgacactgatgagctgatataccaacaaggtgctccgtgagtactcactaagacnggttgcctgcttgatgttcccccaaatgtggataanggtaaaatttccaaattacgaaagcaac

SEQ ID NO: 4332 - DNA, 455 bp, Arabidopsis thaliana
  unsure at all n locations
  Clone ID: LIB22-044-Q1-E1-A10
agccanacttcaggaattctnatttcaagtttccgattctctaaatccaattgatttcactcttcctcaaatgaaaaagccctaattttgatcgtctaaatttcatacatgggtgcgaacgagtttcgtttcttcctctcctgcgatatcaattcgccggtcacttttcgtatcgagaagcttgatggaaacctccccgtcaagaaatcgtctgattcgggagttgtctccatcgcagangagaaaaaaccagagctttacattgagtgtgcattgtacattgatggagctcccttttggccttcccatgaagaacaagattgaaaactacagggaccaacaatactggctgggnaacgaactcatcaactctcaagttgcnaaataaccggggacnttgactggcccaantcaacaaacttggcgaattacagttanggggatgtttccttgtg

SEQ ID NO: 4333 - DNA, 504 bp, Arabidopsis thaliana
  unsure at all n locations
  Clone ID: LIB22-044-Q1-E1-A3
ctgtttaccttgcccgtgccggtncnagnctancgggtcgacncacgcgtccgctctcttcttcacctatagtttatctcttttttttttttgttttggcttctcttaaattcactttctctaaaacataaacgacattgatgtttcttcatcagatcctttaattcttctccaattctcattctccttacatcaatgataaactttgtagttggagatttgttgtggatgaagattattgattgcagcttataggaagctgctctttttgttttgaacaatgttgctaacttttcagattcttataattaatcagtcttatgatgagaagttggttcttgattacatactacaatcaagaagtaaacaagttaagcaatcctgtgacgggtcctgtgttcaaaagagtagatacttgttctcaaagggtggaaggttaacagaaggacaaattgaccggggttttaaacngttggttggtatggcccgaataaacggaatcaa

SEQ ID NO: 4334 - DNA, 498 bp, Arabidopsis thaliana
  unsure at all n locations
  Clone ID: LIB22-044-Q1-E1-A5
gcccgngccggtacaagtccanaattcccgggtcnacccacgcgtccgcaaagcctctcgttgctagaggaatcaaacaatggtgtttgtgaagtccaccaagtcgaatgcttacttcaagaggtaccaagtgaagttcaggagaagaagagatggaaagactgactacagggcaaggatccgtcttatcaaccaagacaagaacaagtacaatactcctaagtatcgttttgttgtccggtttaccaacaaagacatagtggcacagattgtatctgcaagcattgctggtgacattgttaaagcttctgcttacgcacatgaactgcctcagtatggtctcactgttggtcttacaaactatgctgcagcttactgtactgggccttcttttggctccgcctgttttaaaagatgttgggaatggatgacnaagtatgaagggaaacgttgaaggcaactgggagaagactttcccgtttgagccaactgantcaa

SEQ ID NO: 4335 - DNA, 489 bp, Arabidopsis thaliana
  unsure at all n locations
  Clone ID: LIB22-044-Q1-E1-A6
ctgccggtaccggtccanaattcccgggtcgacccacgcgtccgcttgataacttgaggcatcaagcgactcagattgtatcgatgaggctgacccgagcagaaccacctctaaggaaagaagtagttgagtatatgcttgatgtgggttctcacatgtggagtatgcggagaagcaaagcaaactttttcaggattatgggagttttgagtgggttaatcgcagtaggaaaatggtttgaacaaatctgcaactggaagaatccaatcacaacagtcttgatccatctcttgttcatcatccttgtgctctatcccgaactaatcttgcccaccatcttcctctacctcttcctcatcggtatctggtactaccgttggagaccgaggcatcctcctcacatggacacacgtctctctcacgctgactcagcccaccccgacgagctagatgaagagttcgacacttttcctacttcccgaccatcct

SEQ ID NO: 4336 - DNA, 418 bp, Arabidopsis thaliana
  unsure at all n locations
  Clone ID: LIB22-044-Q1-E1-A9
ggaaggagagagattttcacgccaatgtatttctcactcagtagcttccgccttacagctgttggacgattcataaccaaaaacatggtcaagatccttgaatacataagacttgcacctcaaggaagccaaagggtctcaaatttcctggagcaggctgcggaaggattagtcgacggtggaaggagagagattttcacgccaatgtatttcttcttggcccggaagccagagtaagcggatgagagatggcgatggtcatcgtaggtcgaatgaagtgacaaaatttctcaatttgcagtcttattttctatgtttatcggatttgttgcanagtttcctaatcaccaactaatattttgggatgttcgtaacatgtcaccgtgttgttcatgtgcactcctgcctgaaatcctga

SEQ ID NO: 4337 - DNA, 506 bp, Arabidopsis thaliana
  unsure at all n locations
  Clone ID: LIB22-044-Q1-E1-B1
ctgtttacgcttgcccgtgccggtccaaaattcacgggtcnacccacgcgtccgaaacaatccttgttctcgccgaaatagagaattttgtgaatctgggtttttagttcaggtgttaatataagattttgatcaaaagaagacgagattcgatccgatccgatctgattgaagaagaaatggcgaatctgtatgtgaaagcggttccaccaccggatatgaataggaatacggaatggttcatgtatccaggagtttggacgacttacatgcttattctcttcttcggttggctcgttgttctctctgtctctggttgttcccctggaatggcttggactgttgttaatctcgctcacttcgttgtaacgtatcacagcttccactgggatgaaaggaactccttttgcagatgaccaangaatcctacnatgggttaaacttggtgggaacaaaatgggcaaatgggtcaacagcntacccgnaaccgccaaatttcttaccct

SEQ ID NO: 4338 - DNA, 447 bp, Arabidopsis thaliana
  unsure at all n locations
  Clone ID: LIB22-044-Q1-E1-B10
acgcgtccgcaaaagtgttccttacttaatnnnnnnnnnnnnnnnnnnnnnnnnnnnnnnnnnnnnnnnnnnnnnnnnnnnnnnnnnnnnnnnnnnnnnnnnnnnnnnnncttgaatatgccttcaaaaaatctacaacaggcagtcctcacaaacgaattcacaaccaacttcattacgacctgtaaggactggctcgacgtaaatggtcttgctaaaggaaacttggagaagaagagagatgataatgaagaagaagagcgtctgaaaaccgagtctaaacttccgggccatgacatccacggtttcgataacgagatnaagtcattgcaacacttcttgttggattaagaaggttaggagggagttcaagagtcttgtgaatgtcgggagaatatggtgtttggggaagacagcattatgccagaagatcttcaatgatgaaan

SEQ ID NO: 4339 - DNA, 451 bp, Arabidopsis thaliana
  unsure at all n locations
  Clone ID: LIB22-044-Q1-E1-B11
acgcgtccgagcaaactcaagatttcaagtaaggcaaaacctaaagaatcaaagggtgaatctgagagacgttcacattcattgatgcctacatttagcagagagagaggggagagcgaatcacacaagccttccgtctctggacaacccttgtctagtacagagagaaatcaggcagcctcaagcaggcacactatttctatcccgcggccatcattaagtatggacacagatcaagctgaatcgcgtaggcctcatcttgtgatacgaccaccgacagaaagagaacagcctcagaagaaacttgttataaaacgttcgaaagagatgaatgatcatgacatgagtagtcttgaagagagtccacggtttgagtcccggaaaacaaaaagaatggcagaactggcgggttttcagangcagcagagctttagattgtcagagaaatctc

SEQ ID NO: 4340 - DNA, 491 bp, Arabidopsis thaliana
  unsure at all n locations
  Clone ID: LIB22-044-Q1-E1-B12
ctgttacgcctgcccgtaccggtccaaaattcccgggtcgacccacgcgtccgcccacgcgtccgggataataaaacctacgaactcgtcaccaaagaaatctttggaccatttcagattgtaacggaatacaaaaaggatcaacttcctctagtgttggaagcattggagaggatgcacgctcatctaactgcagctgttgtttcaaacgatcccatctttcttcaggaagtaatagggaactcagtgaatgggactacatatgctggactaagaggaagaacaactggagctcctcagaatcactggtttggacctgcgggggacccgagaggggccgggatagggacaccaagaggctataaagctggtttggtcatgccacaagagaagtcatctacgattatggtccggttccacaaggttgggaacttcctccatctacttagaagtggtgtgtccactaataattaataaactaagatnctaat

SEQ ID NO: 4341 - DNA, 437 bp, Arabidopsis thaliana
  unsure at all n locations
  Clone ID: LIB22-043-Q1-E1-H3
ttttttttttttttttttgaacaacacgtgacatgttacgaacatccaaaatatagttggtgaataagaaactctgcaacaaatccgataaacatagaaaataagactgcaaattgagaaattttgtcacttcattcgacctacgatgaccatcgccatctctcatccgcttactctggcttccgggccaagaagaaatacattggcgtgaaaatctctctccttccaccgtcgactaatccttccgcagcctgctccagggaaatttgagaccctttggcttccttgaggtgcangtcttatgtattcaaggatcttgaccatgtttttggttatgaatcgtccaacagctgtaaggcggaagctactgngtgnganatganttttgtcaanaggtaaggtacatgggancgggngagtccnttggcaagatcctt

SEQ ID NO: 4342 - DNA, 449 bp, Arabidopsis thaliana
  unsure at all n locations
  Clone ID: LIB22-043-Q1-E1-F5
acgcgtccgcccacgcgtccgatcgtctctctctctcgggtcaaaattagggtttcgtttcactatccagagtgtatacaaaggttgttgtggagcttttatcagatcacaggaataagatggaggtatttggaaaatctcccatggttgttacatctgccaatgttatttacttgtctgcaattctgggtcgcgattgcgatggacacaaatgtgattggaaatgtgagaatgaaaatgtttgtgggaatatgtatcgctgcaaactaactggactaactcatgtctgcgacaagaactgtaaccagcggattctctatgataaccatagctctttgtgccgagccagtgggaggattttccctctctcgtccgtcgaggaagcaggcggttaaaggtgttcggaaggaagcttgacgcccgctgagantcaacccttctgaaaacct

SEQ ID NO: 4343 - DNA, 438 bp, Arabidopsis thaliana
  unsure at all n locations
  Clone ID: LIB22-043-Q1-E1-F6
acgcgtccggtcttcttcttctgattctgattaattccagatgtcttcctgagtcttacggagattaggtcattttcgcctcgactcgaactctgtctcgcagcttccgtgagagagtcatggacacgccaccgacttctcgtatcgcatcttttggtcagacggagattaactgggacaaacttgacaaaaggaggttctacattaatggagctggcctcttcactggtgttacagtagctctgtatcctgtatccgttgtgaaaacaaggcttcaagttgcttctaaagagattgctgagagaagtgccttttctgtagttaaaggaattttaaagaatgatggtgttcctggtctgtaccgaggttttggtactgtcattacaggtgctgtacctgcaagaatcataattccaactgctccttgaagaacaacna

SEQ ID NO: 4344 - DNA, 423 bp, Arabidopsis thaliana
  unsure at all n locations
  Clone ID: LIB22-043-Q1-E1-F7
gaccccaaatccagaaattcaagcgaggaatagaatctcccactagagaaaagcaatcccagaaaccctaagttcttcacgtttcgttcttttgcttgttgatcaagcaggatatctccgagatttgtgagtctcttgctacttcttcctggagaacgattcagggtttgatgtgataagaatagtcatcgaggaagatagatttggggattttttttttatttgtagattcatgaaacaaattcgtcgatggcagaggattttgatcctcgctctgctatcgatatctgtattcgctccgcttattttcgtatcgaatcggcttaagagcatcactcccgttggtcgtagagaatttattgaagagttatccanaattagattcacgacaantgaccttagacttagcgctattgaacatga

SEQ ID NO: 4345 - DNA, 419 bp, Arabidopsis thaliana
  unsure at all n locations
  Clone ID: LIB22-043-Q1-E1-F9
acgcgtccgattagatagatagatagattatttnnnnnnnnnnnnnnnnnnnnnnnnnnnnnnnnnnnnnnnnnnnnnnnnnnnnnnnnnnnnnnnnnnnnnnnnnnnnnnnnnnnnnnnnnnnagaaacagagagtttttgattctctctgttttcaaatctgttccactaagctctcttgctttcgggaagattctgtttcactgctgcattttggatttttccgatggatcgtaagagttggccatggaagaagaaatcctctgagaaaacagctactgtcacagaagttgttgatcaggaaaatgggaagaagccgagttatatccaagatctcatttgatcaatacacgaaatctaaatggtttaaaagatgaagtcaaagagctacgaaagaaaaagttacaaagccttgagg

SEQ ID NO: 4346 - DNA, 447 bp, Arabidopsis thaliana
  Clone ID: LIB22-043-Q1-E1-G1
acgcgtccgattacccaaagctatgaggctcacaccaccaatagctccgccgtcatgaatccttctcttccaggtcaacacaagtcagagctccaaaaatggagtcatgcgattgttttgagacgcatgtgaatcaagatgatctgttagtgaagtaccaatacatctcagatgcgttgattgctcttgcatacttctcaatcccactcgagcttatctatttcgtgcaaaagtctgctttcttcccttacaaatgggtgcttatgcagtttggagcctttatcattctctgtggagctacgcatttcatcaacctatggatgttcttcatgcattccaaagccgttgccattgtcatgactattgctaaagtctcttgcgcggttgtgtcgtgtgctaccgcgttgatgttgggtcataataatcccgatctcccaagtggttaag

SEQ ID NO: 4347 - DNA, 417 bp, Arabidopsis thaliana
  unsure at all n locations
  Clone ID: LIB22-043-Q1-E1-G10
ttttcttcggcattgactttaccaatcacaactttctccgggatcgccgatttatcttcgtttcaaccatgactcgtggaagtcagagagagcgtgaccgtgaaagagctgccgctcgtgctggtggaaagggtaagaatggtgacgatggtttgacgccggagcaacgccgtgaaagagatgggaaagcattgcaagagaaagcggctaagaaagctgctcaagctgcaggtgcgagttctggtggtgcagctggaggaaaaggagctgctgctaagaagtgatgatgatcatttggtttgtcttttgagcatattgtanactttaatgtttgaaattgggttgtttagacctgaagctttgactcttgtctgaaatcccattataatgtcnttgtgttgaatttgcaatttgatg

SEQ ID NO: 4348 - DNA, 445 bp, Arabidopsis thaliana
  unsure at all n locations
  Clone ID: LIB22-043-Q1-E1-G2
acgcgtccgcccacgcgtccgcggacgcgtgggcgacgaccttctcaaattcgatctcaactcaaaacatttgtctgatccattaatcggattcagatacaatgacaagggttacacgcgattttcgggattcattacagagagatggtgttcctgcagtatcagcagatgtgaaatttgcttcaagtagatttcctaattatagaattggagctaatgatcaaatatttgatgttaaagacgatcctaaagtgatgtccatgaaagaggttgttgcgcgtgagacagcgcagcttatggaccagcagaaacgtttgtctgttcgtgacctcgctcataaatttgagaagggtttggctgcagctgctaagctatctgaggaggcaaaactcaaagnagcaacttcgttggggaaacatggtccttttaaagnaaacttcgagat

SEQ ID NO: 4349 - DNA, 421 bp, Arabidopsis thaliana
  unsure at all n locations
  Clone ID: LIB22-043-Q1-E1-G3
ctctgtttttgttttcttcgacgactgagataaaagattcatacaagaaaaaagcaaatttcgccactgatggatcctatggagtcgtctagtgaacaggacattgttgaagagagtcaaaagctggttgactcattggacaagcttcgtgttagtgctgcgagttcatcttctaatttcaagaagaagcctatcattattatcgttgttggaatggcaggtagtggaaaaactagctttcttcatcgcttggtctgtcatacttttgattcaaagagccatggttatgtggtgaaccttgaccctgctgttatgtctctaccatttggtgccaacatcgatataagagacactgtcaagtacanggaagttatggaagcagtanaatccggggtcctaaatggtgggaattccaanttca

SEQ ID NO: 4350 - DNA, 420 bp, Arabidopsis thaliana
  unsure at all n locations
  Clone ID: LIB22-043-Q1-E1-G4
tattacaaagtgaagtgattccaaaggcatatcttccgttctgtctaatcttattctttgttttaaacccctccatgcactcctcttgtttatatatttattgcttcttctctaagtttgttgagtcctaatcatctctctatctagcaacgtataaatataaagagagagagcagagaaatgggtttcggctccttcatatctaccatcacttactgtttgttctttcgctatccacataagaagccaaagttcaaaagtgtgagccacctcaaccattaccacaccatgccaatggctcgtccactttctttacagacgatagacctgaaagtaaggatgtgttgcagtggatgtgagagggttgtcaagcatgccatttacaagctgagaaggggtggacncgttggaggggaacct

SEQ ID NO: 4351 - DNA, 407 bp, Arabidopsis thaliana
  Clone ID: LIB22-043-Q1-E1-G5
atggaggtcgaaggcaaaggaggagaagctggaaccaccaccacaaccgcacctcggaggttcgcacttccggtggacgcggagaacaaagcaacaactttccgactattctcagtcgctaaacctcacatgagagctttccatctctcatggtttcaattcttttgctgcttcgtctccactttcgcagctccgcctctcctccctgttatccgtgaaaatcttaacctcaccgccaccgacatcggaaacgccggaatagcctctgtctccggcgctgttttcgctcgtatcgtcatgggcacggcatgtgatcttttcggtccacgtctagcctccgccgctttgacgctctccaacgctcccgccgtctattcaacgccggataaaagtctcccgatcgggtt

SEQ ID NO: 4352 - DNA, 442 bp, Arabidopsis thaliana
  unsure at all n locations
  Clone ID: LIB22-043-Q1-E1-G6
acgcgtccggcttacagacaactaagaaaaaaaataaaaatgaagatgtttatctctcctcaaaccctagtactattggcattagctcttgtcctagcttttgcagttccactgaaagcccaagaccggcgacaagactaccttgatgtacacaaccatgctcgagacgacgttagtgtgcctcatataaaatggcatgcgggagcagcccgatacgcctggaactatgctcaaagaagaaagcgggactgtcgtctcattcactcaaactcacgcggacgttacggtgaaaacttggcatggagcagtggtgatatgtccggagctgccgcagtgagattgtgggtcagggagaagtctgactacttccacaaatcgaacacatgccgtgctggaaaacaatgtggtcaataaactcaagttgtgttggaaaaacncagag

SEQ ID NO: 4353 - DNA, 444 bp, Arabidopsis thaliana
  Clone ID: LIB22-043-Q1-E1-G7
acgcgtccgcaatcttccagacagtagttgcttcaatcacagctggcagttttggtatattattcacatttgtctttgccggtttcgtcattccaccaccttctatgccagcatggctcaagtggggtttctgggcaaatcctttgagttacggtgagattgggttatcagtaaacgagtttcttgctccaaggtggaatcagatgcaacccaataattttaccttaggacgaaccatactccaaacccgtggaatggactacaacggttacatgtactgggtatcattatgtgccttgttgggtttcactgtgctcttcaacatcattttcactctggctctaacgttcttgaaatcacccacatcatctcgagccatgatttcgcaagacaaactctctgaactgcaaggaacagaaaagtcaacagaaagattcctccgtc

SEQ ID NO: 4354 - DNA, 465 bp, Arabidopsis thaliana
  unsure at all n locations
  Clone ID: LIB22-043-Q1-E1-G9
ctgttatccgccgcnaccggtccanaatcccgggcnaattttggggttttacattttccttatcaagagaacacctgaatctgaaaatgatcactacagtgctacgacgatctctccttgatgcgtcgaagaggaatctctccgcttcgttgacctcaatcaatactgttctgtttcacaacctggccccagccgccactagagtctccgacctagccttaattggatcttccgatgtcaaagctgggtttccgtttggtgttgaagcgaaaggaattcattttcaatctgggccgttggattttagagcttcgatggtttctcaagctggatttgcgatctctgagagtagcgagagaagggttggtgattcggagagtgttggtggtgatgggcttgcgatatctgagcttgggatatctccggagattgttaaagctttgagtantaagggtattgagaaaa

SEQ ID NO: 4355 - DNA, 414 bp, Arabidopsis thaliana
  unsure at all n locations
  Clone ID: LIB22-043-Q1-E1-H11
gactcgtgcccctgaaaattacttctacaggcttctcaagcttaattcaccggaatggccttactcaatcatgggagcagtaggctcaattctttctggtttcattggtcctacatttgctattgtgatgagcaacatgatcgaagtcttctactacacagactatgattcaatggaaaggaaaacaaaagagtatgtcttcatctacattggtgctggtctctatgctgtgggtgcttatttgatccaacattacttctttagcatcatgggagaaaacctcacaacaagagtaagaagaatgatgctctcagctatcttgagaaacgaagttggttggttcgatgaggatgaacacaactcaagcctgatcgctgcacgtttagctactgatgcagcagatgttaaatnccg

SEQ ID NO: 4356 - DNA, 451 bp, Arabidopsis thaliana
  unsure at all n locations
  Clone ID: LIB22-043-Q1-E1-F3
acgcgtccggaaaaatagtgggaaagactcctctgagctactctcattcgattttcctcaggcgattttggtgtatggtcgtccctttcactgtatttcttagtcaatagcatcttctccgatcatcgacgtccggagatttcttcggccctctcatacttgagttgttgtaggatttgttgctctggctctggtggtaggtctatgaaatcaacccatatcgtgaatggactgcaacatggtatcttcgtcccagtgggattgggagcatttgatcatgtccaatccgtcaaggactgaagatgacagcaaacagctacctactgagtgggaaattgaaaaaggtgaangaattgaatctatagttccacatttctcaggccttgagagagtcaatagtggctctgccaacagcttctgggnaaaactggctgttatcgaaaaactcaca

SEQ ID NO: 4357 - DNA, 473 bp, Arabidopsis thaliana
  unsure at all n locations
  Clone ID: LIB22-043-Q1-E1-D10
tgttatcctgccgctaccggtccaaaantcccgggacaanacataaatactaatggagcaccaccaccatgcatcaccgtcaccaccaacgcgacgacggagaagacgatcgtcaatcctttggagtaccaccgccacacgtcgatgctccgccacaacctcatggtctttaccagtcacagcctcattttgatccttacgcgcctactcctcaagctccggcgccttaccgatcagaaactcaattcgaaccccacgcgcctccgccttaccgatcagagccttactttgaaactccggcaccaccgccttcatttggtcatgtgagtcatgttggtcaccaatcacccaacgaatcttacccaccgggaacaccaccgttacggaggttatcaacagccgtctaattccttactggaaagtcatggagatcacagtggagtcacgcacgtggctcaacatagctcaaatca

SEQ ID NO: 4358 - DNA, 421 bp, Arabidopsis thaliana
  Clone ID: LIB22-043-Q1-E1-D12
ttagattattcatccaaaagatgaacacacagaaactgtcttcaagctttaacgaaaacgaaaaatcttcaacggattaaaacctcaagaagctctctatccctttttgtcaatcgatctccacaatctgaggccttctctctgcagctttcttgcgtataaagataccccatctcaaagcagctttaagctttagccatccaacaacagctttccccgagcctctattacgttctcttcggtacgtgttatcgatctgagcttggtacgggatgctataaccgtaacaagactcatcaagtctgaccaaaccctccttgtgttcccacaagtgttcacaccgataccaaacgtcttcaacaagtctctgcatatcgtcagtctcaagcatttcagaactccttagtctgatttcttcggc

SEQ ID NO: 4359 - DNA, 452 bp, Arabidopsis thaliana
  unsure at all n locations
  Clone ID: LIB22-043-Q1-E1-D3
acgcgtccgcccacgcgtccgattcangagctcaataattaactgattcgaaatggcgaagatgtaccggaagttggcactctgcggtggtgagggaggacaagaatgggacgacgatgtatatgagggtgtaagaaaagtgtatgtagggcaagatctcaaccgtatcacttacatcaagtttgagtacgtgcaggaagacggcgaagtagtaacaactgaatatgggacaacaaatcagcaccctaaagagtttgtaattcaatacccggacgaacacatcatagcagtggagggaagttaccaccaagtggctctcattgccacagangtgattacgtccctcgtcttcaagacctcaaagggtagaaagtctccattgtttggtccaaacttacttgggnattaccgaccggtacaaagtttggttttgaaggattangggaaaagaa

SEQ ID NO: 4360 - DNA, 431 bp, Arabidopsis thaliana
  unsure at all n locations
  Clone ID: LIB22-043-Q1-E1-E1
acactttggcatatganaaatgttggnnggttcggaccgacttcaagcagtaccaagtccttaaacaaaatccattctggtggacacaccacanacatgatgggaagttgtggaacttgaacaattaccgcactgatgtcatccaagctcttggaggtgttgagggtattcttgagcacacattattcaaggggacatatttcccgacatgggagggacttttctgggagaangcgtctggttttgaggantcgatgaaatataagaagttgactaatgctcagaggtctggtctgaaccagattccaaatacaagattcacgctttggtggtcgccaacaattaatcgagcgaatgtctatgtgggtttccangtgcagttggatctgacaggaatatttatgcatggaaaagaatccacactttaggan

SEQ ID NO: 4361 - DNA, 418 bp, Arabidopsis thaliana
  Clone ID: LIB22-043-Q1-E1-E11
aaatgttcttccgcctttgacgccttaatctcatctccacaacccttgcagtcaagttgatgctgttgggatcaaagagtagcaaacaatacgagagcagaagaacttacttatagaaaaaaatgggaatttcaaaaccactccctctattttcgattttagtcctctatttttcactctacaccattacaccaacttcttcattagcctccctccaagatcaattcatcaactgtgtccaaagaaacacacatgtttacttcccacttgagaaaacgttctttgctcctacaaaaaatgtctctatgttcagccaagttcttgaatcgacggctcaaaatctccggttcttgaaaaaatccatgcctaaaccggggattcatattcaagccctattcacgagtctcaagttcaaagc

SEQ ID NO: 4362 - DNA, 409 bp, Arabidopsis thaliana
  unsure at all n locations
  Clone ID: LIB22-043-Q1-E1-E12
gggtttttgaatcattcatgatttcttagctctctcaaaaaaatggcgtacaaatccctaaattcaatcaccaaatctgatatcgaagctctaggaatctccggtgatgtctccgagaagcttctcagagatctcgaagacattattcacggttcatccacgccgccggagacgtggattcagatttctcggcggatccttcaccctaatctccctttctcttttcaccagatgatgtattacggttgctacaaggatttcggacccgacctacccgcttggatacccgacccgaaggttgcttctttaactaacgtaggcaagttattagaaaagcgaggcaaagagtttttaggtggaaattacaagaatccagtttcgaagtttctcccagttttcaagaagttcn

SEQ ID NO: 4363 - DNA, 431 bp, Arabidopsis thaliana
  unsure at all n locations
  Clone ID: LIB22-043-Q1-E1-E4
aattccttcaagctggggagattagcttcacttactacggccatgggggtttctcttcgtcacttgtctccttcctctttctgggtttcgcgtcgtcctcgtgtttcttcttcaattctttcttttcttgtccctcgccgtcgaatcctttgcaccaggaaagtagcaatcataaagggaaatgcgggatattcgactgctactgattgtggtggttctcatgggtttcatcattcaggtcatcaaaggtcatcctctgttgagtttagtggagagtggaaacttaatttgggatctaagacggcgagaatggttccgccaactgtgaaacaagctggagctgtaagtgcttggagggaggaagtcaataataagttaagaggaagaaataganaataagngaacaaccaagataaaggctttggggaatg

SEQ ID NO: 4364 - DNA, 443 bp, Arabidopsis thaliana
  unsure at all n locations
  Clone ID: LIB22-043-Q1-E1-E7
acgcgtccgggaaaaccggaatccaattgttcgacgattcgaggaatgggtttttctccgtttccgatttaggattcgattcgagcctaaacagctctaattaccacccaattggtgggttattcgccagcgttaatcagactaatccattcgcatccctctcgtcctcggatctttccaacagaggcaacaacagcttctctacccagctcaatgatctctacaccaagtatatgccgnnnnnnnnnnnnnnnnnnnnnnnnnnnnnnnnnnnnnnnnnnnnnnnnnnnnnnnnnnnnnngctcacactgaagattaagatcgctaatccttcgttgcggcggctattaagcggagcagtagctggagcggtgtcgagaacggtggttgcgccgttggagacaatcaggacgcatctaatggtgggaaantggaggaactcc

SEQ ID NO: 4365 - DNA, 420 bp, Arabidopsis thaliana
  unsure at all n locations
  Clone ID: LIB22-043-Q1-E1-E9
tcttcttcttcaaaatctctctcttcaccaaatcctcagaagatgagcaacgacaaggatagcttcaacgtctccgatcttactgctgctcttaaggacgaggatcgagctggccttgtcaatgctctaaagaacaagctgcagaatctggctggtcagcgttctgatgtgctcgagaatctgactcccaatgtgagaaagcgcgttgatgccttgagggatatacagagccaacatgatgaactagaggcaaaattccgtgaggagaagagctattcttgaagccaagtatcaaacgctgtatcagcctttgtatgtcaagcgttatgagattgtgaatgggcactactgaanttgaactggctccaagaggatgataccaaggtggaccaaaggagaagagaaaactgcaaaaganaa

SEQ ID NO: 4366 - DNA, 496 bp, Arabidopsis thaliana
  unsure at all n locations
  Clone ID: LIB22-043-Q1-E1-F1
ctgttacgcntgccaggtcccgggtccnagaattcccgggctctgtgttcaaaacaagttcattcgatctatagagacgaaacaaaaagagagatcgtacgcaaaagtttccgatatggctcgctcgtttggagctaacagtaccgttgtgttggcgatcatcttcttcggatgtttatttgcgttgtcctctgcaatagaagaggctacgaagttaggatcagtgatagggatagatcttggtactacttactcttgtgttggtgtttacaagaatggtcatgtcgaaattattgccaatgaccaaggaaaccgtattacaccttcatgggttggttttactgactctgaaagactcattggtgangctgctaagaatcaagcagctgttaatccagagaggactgtcttcgacgttaagagattgatcgggcgaaaatttgaggataagggangttcaaaaggatangaaacttgtaccctaccanaattgtga

SEQ ID NO: 4367 - DNA, 416 bp, Arabidopsis thaliana
  unsure at all n locations
  Clone ID: LIB22-043-Q1-E1-F10
aaaagcacgaggaaggatcaaatcggaaacttaacagaatttagctaccaattactgtctccggcgagatctcaatttgatccttcacggtggcgtcgacgtccgggcaacaacaagctctctcgagaagaaagcnnnnnnnnnnnnnnnnnnnnnnnnnnnnnnnnnnnnnnnnnnnnnnnnnnnntgttcgagctcctgcggcgaagaaaccgagtccggaatacccattttggcagcagaactggtttatcggtctgctattcgtgatggctttaggattcttctgtctcgctatcttcctttacctaagtctcgatcctgattccggttacacgtctgcctccgccgctgcttctggtaaagaaggtgtcgagattacttatggaagtgcgatcaagttgatgcacgaaaaa

SEQ ID NO: 4368 - DNA, 416 bp, Arabidopsis thaliana
  unsure at all n locations
  Clone ID: LIB22-043-Q1-E1-F11
acaacaagccgatctcattcctttcactaagtcaaagcttgacttccttctcgaccacttctctatcaccaaagactctcctcaagggaaagccataaaggagactttgggacattgtgatgctaaagctattgaaggagagcataagttttgtggaacttctttggagtcattgatcgatcttgtgaagaaaacaatggggtataatgttgacctcaaggtcatgacgactaaagtaatggtaccggcccaaaattcgataagctacgctttgcataactacacattcgtcgaggctccaaaggaacttgttgggattaaagatgttgggatgtcacagaatgccttaccttatgctgtttactattgccatggacataaaggtggaagtagaagtccttgaagttaanttgggt

SEQ ID NO: 4369 - DNA, 407 bp, Arabidopsis thaliana
  unsure at all n locations
  Clone ID: LIB22-043-Q1-E1-F12
acgcgtccgcttaagtagaaagagtgaaacatggctaatcacaaaaatctcttctttctatgtttcttaataggtttagggttatgttctgctagacgagcactactctcctcctctgaatccgaggctgaagtcgctgcctatggcgtgaatagtggtttaagtgctggtcttggtgttggtaggtggtggccctggaggaggctacggaggtggaagcggtgaaggtggtggagctggatacggannnnnnnnnnnnnnnnnnnnnnnnnnnnnnnnnnnnnnnnnnnnnnnnnnnnnnnnnnnnnnnnnnnnnnnnnnnnnnnnnnnaaggatacggtggtggacaangtgcctggtgctgganggangatatggaggtggangtgcccgggggacatgggang

SEQ ID NO: 4370 - DNA, 385 bp, Arabidopsis thaliana
  unsure at all n locations
  Clone ID: LIB22-043-Q1-E1-F2
acgcgtccggttttgcttttgaattttcaacgactctgttcactcacatatctctcttagtgtctactggattcggaatgagatcgatgagatctgggagagacaacaacatctgcttcctgggttttctctcctttgcccttatctcccttccctccttgtcacttgctcttaccaatcctgacgatgttgcggctattaacagtctcttccttgcactggagtctcctcttctccccggttgggttgcatctggaggtgacccangtggtgagagctggcaangtgttctatgtaatgcttcccaagtagaaacaataattctcancactgccagatcttggaggacagcttggtgttggcttaaacattgtcacctctcnta

SEQ ID NO: 4371 - DNA, 406 bp, Arabidopsis thaliana
  unsure at all n locations
  Clone ID: LIB22-043-Q1-E1-D1
acaaccaatggggtctccaatggcctctttagtggcaactttgcttgtcttaacaatctctctcacctttgtatctcaatcaaccgctaactatttctattcttctcctccaccaccggttaaacattacactcctccggttaaacactactctcctccaccggtataccactccccaccaccacctaagaagcactacgaatacaaatctccacctccaccggttaagcactactcacctcctccggtttaccattccccacccccaccaaagaaacactacgtgtacaaatctcctcctcctccggtcaagcactactctcccccaccggtttatcactccccaccancaccaaagaagcactacgtttacaaatctccccctcctccggttaagcacttantc

SEQ ID NO: 4372 - DNA, 432 bp, Arabidopsis thaliana
  unsure at all n locations
  Clone ID: LIB22-041-Q1-E1-G4
ntccggacgaagatacaagcgtcgatcgatggggagaaaacgcagagttaaatcggagtcgtctccgttcgattcatttccggaagattgcatctcctacataatctcttttacaaatccacgcgatgcgtgcgtcgctgctacggtttcgaaaacgtttgaatcgacggtgaagtcagatattatatgggagaagtttcttccggcggattatgaatctctgattcctccatcgcgagttttctcatcgaagaaggagctctatttctctctctgtaacgatcctgttctattcgacgatgacaaaaagagcgtatggttagagaaagcgagtgggaagaggtgtctgatgttatctgcgatgaacctctcaatcatatgggggaagataatcctcaagtattggcaatggattccaattcctgaatctan

SEQ ID NO: 4373 - DNA, 423 bp, Arabidopsis thaliana
  unsure at all n locations
  Clone ID: LIB22-041-Q1-E1-G7
tgtttcttcttctttcaaaatctcaagcaaaagaaaaaatggagctattcacaaaaggtaacaacgttaagttacgtagccacctagataagtttttagtcgccgacgatgaccaagaaaccatccgtcaaagccgtaaaggagatgcacggcgtgccgtttggacggtggagcccgtcgtcgataaacctaatctgataaggttaaagagcagccacggcacgtacttaacggcgagcaacaaaccgttattgttaggtatgaccggtgagaaagtgactcaaacggcgtcgtttaacaagctgatggattggcaaacgcagtgggaaccggagcgaagatgggtttcangtgaagctaaaatcctggtgcggtaagtggatgaagggctaacggtggaacgccgccgtggagaaactctgt

SEQ ID NO: 4374 - DNA, 425 bp, Arabidopsis thaliana
  unsure at all n locations
  Clone ID: LIB22-041-Q1-E1-H11
actcctatatctctctctcgctctcctccccctttccgccgatcgtcctttccccaccgtcgagtttttccctatccatctccgggtacgactttttctctctgtttcnaatcctacgccgcgatgttgtggatggtgattttctgtgttccgatctagtcttaggttttccttttgtaattcctgaaatgggttttgatctgatttgaaccttatcgattttccgattcatttttagggttcttcactttatctattgtagtttggtttcaagttggtcgtcgggtanttcaatttttcttcntttggtttgtttcaatgtctcattagcaggctttacgttgcacaccagatgtctgttgatctctgcangaagaatccatcttttcnttggtgtgactgtggttatatgancagggggaagt

SEQ ID NO: 4375 - DNA, 426 bp, Arabidopsis thaliana
  unsure at all n locations
  Clone ID: LIB22-041-Q1-E1-H12
anctcctcctccgctcgttcccgatcctcctcgacaccagggtcccaatgaccacgagaaangggcctccaagcangttggaaggcgggagcgtgctaaaccggatccatcgaagcaccaccacaggtctcatcttcctcattctaagaaaatcgagaccgaagaanagaggaggcttaggaagaagagggagttagagaaacaaaggcaagacgaaaaacatagacagcagatgaaaaattctcacaagtctcagatgcccaagggacacaccgaggagaagaagccgacgcccctactcaccaccgacagggtcgaagaataggttaaagaaaccaaccaccttcatctgcaagctcaagttccggaatgagctccctgaccctagtgcacaagcttaaagcttatgacccttttaacngggat

SEQ ID NO: 4376 - DNA, 428 bp, Arabidopsis thaliana
  unsure at all n locations
  Clone ID: LIB22-041-Q1-E1-H2
acgcgtccgcacctacccaaantgtcttcccagaggcgatgacacacaacctcaatctgttcgncgctgtcgcnnatcgganagatgggtgtcgatttggaatcggtgtctcgaagcaacctcnggagctattgggtcgcttctgagtacaacgatcttgtatcctcttganacatgtnaatcaaagttccaagccgaggttcgagctcgtggtcancaaanatacanatatctttccgatgttatgtgggaggcaatttctaaaggacaacgtcttttcactgtatcaaggccttggaactaagaattttcagtctttcatttctcaagttcatcgacttttatatgctatanctatttcaagagaattcataagtggaangactggttctaaancaattggggctanggctaatttgctcattgcc

SEQ ID NO: 4377 - DNA, 408 bp, Arabidopsis thaliana
  unsure at all n locations
  Clone ID: LIB22-041-Q1-E1-H8
aagccaagtgagaaaaagaannnnnnnnnnnnnnnnnnnnnnnnnnnnnnnnnnnnnnnnnnnnnnnnnnnnnnnnnnnnnnnnnnnntggtcttatgatctcatcaaacggagctttaatcgaacaacaaccatcagtcgtcgtgaagaaaccaccggcgaaagatcgacatagcaaagtcgatggaagagggagaagaatccgtatgccgattatatgtgctgctcgtgtttttcagctaacgagagagcttggtcataagtcagatggccaaacaattgaatggttacttcgtcaagcagagccttctattatagctgcaacaggaactggtacaactccaagcgagtttctcaactgcttctgtctctatccgtggagccaccaattctactctttagatnata

SEQ ID NO: 4378 - DNA, 445 bp, Arabidopsis thaliana
  unsure at all n locations
  Clone ID: LIB22-041-Q1-E1-H9
acgcgtccgttcntctttgttttttgctctcggctgatctctgtattggatttttgatataaggtttgaaatcatggaggtcgttgatattgatgcccgagctgctaagttagggattgattggtctcaggttaattttgattccatccaacttcctcctggagaagactttgggatcgagagtgatgatgaagctgtttaccaggatgaccagtctgaattcgacactggattcggtaacattatcgtggtcgatcacctccctgttgttcccaaggagaagtttgagaaacttgaaggtgttgtcaagaaaatttacaaccagttaggtgtgattaaggaaaatggactgtggatgcctgttgatcccgataccaagatgacattgggctactgttttaatgaattcaacactccctcanggancccaaaaacgccaaaggga

SEQ ID NO: 4379 - DNA, 426 bp, Arabidopsis thaliana
  unsure at all n locations
  Clone ID: LIB22-042-Q1-E1-A11
acgcgtgggcggacgcgtgggcccaaacccaaaggatgctagtcttttgttatcgcttggtantttcgctgatgtttatttccctccaagcaagagatcacgtgttgttgcacctacgatcttcagtgctttcgagaaaaagccagtttccattgatgtgctaccagatgagtgtctttttgagatctttaggcgtttgtctggaccacaagagaggagtgcttgcgcttttgtctccaaacagtggcttacgcttgtaagtagcatccgtcaaaaggagattgatgttccttccaagataactgaagatggtgatgattgtgaagggtgtttgtctaggagcttagatgggaagaangcaacagatgttagattggcagcaattgctgttgggaactgctggtcnttggggactggnaaaatgtc

SEQ ID NO: 4380 - DNA, 409 bp, Arabidopsis thaliana
  unsure at all n locations
  Clone ID: LIB22-042-Q1-E1-A12
nccacgcgtccgcggacgcgtgggattgagatcatcgncatgtatccgatccaacgccgaaagtacagagatggaattgacaaccttttggtcctcttgatcggtggnnnccccattgcnatgcctacagtcttgtccgtgaccatggctattgggtctcacaggttgtctcagcaaggtgccatcaccaagcgtatgactgccattgaagagatggcaggaatggatgtcctgtgcagtgacaaaaccgggacactaaccctcaacaaattgaagtgtggncaaaaacttggtcgaggttttctgcaagggtgtggagaaagatcaagtccgantatntgcagctatggcttccagggttgaagaancagggatgccattgatgcanccatggttgngaagctgctga

SEQ ID NO: 4381 - DNA, 473 bp, Arabidopsis thaliana
  unsure at all n locations
  Clone ID: LIB22-042-Q1-E1-A4
aantgttacgcctgccggtttcggtcgnanaattcccgggtngacccacgcgtccgctctaaacaagctcctcagtttgactttccaactactcctttttctacttagtgtttcatcggaatctccatggatcgccgaagatacgtctcaaatccagacgaagctcctcgaattcgcgaagagtccggaggtcttcgattggatggtgaaaatcagaaggaaaatccacgagaatccggagcttggttacgaagaactcgagaccagtaaactcattaggtcggagctggaacttatcggaatcaagtataggtatcctgtagctatcaccggtgttatcggatatatcggcaccggagaaccgccattcgtcgccctgagagctgatatggatgctttgcctattcaggaaggtgttgagtgggaagcacaagagcaaaatcgctgggaaaatgcaaggcttgcggngatga

SEQ ID NO: 4382 - DNA, 424 bp, Arabidopsis thaliana
  Clone ID: LIB22-042-Q1-E1-A7
ggaccaggtcgtttaatacagaacgtgacacagttcgctgatgctcaattcaaacaattctctactcgttatggacaacaagttataagacattctcgattttccaatcaagctcgtcttgtctcctttcactctcgcctttgatatcgctggctctgcacctcgtggttttggcatccctgagttcatctccaaaatttcgtatctctctgtttttgcggttgctacgcttggaacttatgacattgcattggatttgggaaagaaagtcatatgccaaagggattgcaaaacttgtaatgggtggcaggcattacggtgcactatgtgcaaaggaacagggagtgttcattaccaaatcaaagattacaacttgagaagtggagagaaaccaacagcagattgtgtcgcaaatgctatagtt

SEQ ID NO: 4383 - DNA, 451 bp, Arabidopsis thaliana
  unsure at all n locations
  Clone ID: LIB22-042-Q1-E1-A9
ggccgtcnacccacgcgtccgcgagaagctttggatttttgaatcacgaagacatggaaaaaacagaatctgtatcaggaaaggggaagagagtgattgttatcggcggcggaatcgccggctctctcgcttcgaaatttcttcaattcgattccgatctcaccctcattgatccgaangagtattttgagattatttgggcaagtttaangtcaatggtagagccagcttttgctgaaagatcggtgataaaccacaagaagtatttacaaaatggtcgtgttgtgacttctccagcggttaatatcacagacaccgatgttttgaccgcggatggtcctgtccttgggtatgattatcntgttattgctactggtcacaatgatgtgcctcccaaaactaagcaagagaaattatcccaataccaaacagaacatgaggaagattaagt

SEQ ID NO: 4384 - DNA, 486 bp, Arabidopsis thaliana
  Clone ID: LIB22-042-Q1-E1-B10
acattgttacgccgccggtaccggaacaaaattcccgggtcgacccacgcgtccgattctccactctctgcttatgttaacgtagagagagacggcgacgtagaaggagtaggaggaggaggcttcgtcgacaatgcgagaatggctcagtatagacaatcaggaacagagaggtttttgggaggtcgaagcggttacaatccttatgtcaacggtggagcttcgtcagatcacgtagcgatcgggatccgtaacggcggtggtagtaatttcggagttgtaactcagcacgggaaagctagtcgatggcggcgatctactcgattagataggaatcgtcgttgtggtgttggctctttggtgtttgttctttgtgttgtgctcgttgtttgtgtctcagcttactattatttctccggttatactaatttcggcaaaagatgataaaggaattgatacagctgaaggtgattttcctacgaatgt

SEQ ID NO: 4385 - DNA, 465 bp, Arabidopsis thaliana
  unsure at all n locations
  Clone ID: LIB22-042-Q1-E1-B2
ttacgccngccggtttcggtcgnaaattcccgggtngacccacgcgtccgcccacgcgtccgcccacgcgtccgcccacgcgtccgcggacgcgtgggatcctcttaatcggcttatcggatccgaatccggacccgaaagcctgaaaacccgacgattaattgcacgatgtccgatgctccgtcgtcttccccggatgccacggcgtcgcactggtgctatcactgcaacaaacgcgtcgtcgttgaaaccttagatgactttgtcgtgtgctgcgaatgtaacaaaggtttcgtcgagtcaattcaaccgactcccgccgcttattcatcgccggcgccaccgcagccactttccccagatctgaatgtagaagactccagtattggctcgcatttcctccaagatgctccgcttgttagcccangcgccttctcaacgttcaacaacaacgaaaaccctggn

SEQ ID NO: 4386 - DNA, 423 bp, Arabidopsis thaliana
  unsure at all n locations
  Clone ID: LIB22-041-Q1-E1-G3
angcgtccggtctaaattcctcgggagtcttaagtcgtatgtgcgtgaggaagatgctgctgtgattttgaaactcggtggtggtctttgtattgtgatcttttgtcttgattggatcgttcttgtgtgtgctttcttcttgaagtactatgcttatgtcgatggtggtgatggcgttgcgatgaagagaactggtaaggttcagagtgaggagaatccgaaggactggccatggccgttccaagtttaaagtttgtgtccttttgttttgtggtgagaactgttgagttaagatcaatatcaaatgttggttttaaggttctgtttcggtggggtattattgtgatttgttcatttgttttttgaagtgtttgatgtaattcgtcaatgatctgttacataatataaagtcctttctaaaaa

SEQ ID NO: 4387 - DNA, 418 bp, Arabidopsis thaliana
  unsure at all n locations
  Clone ID: LIB22-041-Q1-E1-D5
aacaccatccaaccaccacctccagagcaaagaannnnnnnnnnnnnnnnnnnnnnnnnnnnnnnnnnnnnnnnnnnnnnnnnnnnnnnnnnnnnnnnnnnnnnnattctgttggttttgcaatggtttggaggttcgttaatggcgtcatagactcgggagattaagggagaacaagtactctgcatcttctggatttctcactatttctccttctctagaggaataggcgagaaattgagattaataaaaaggggtgttttttggttctccttcgtttgtataaagcctgccgcttcttaaggttctttggaaattctcaagtgatggaggaaaatctggtttacttcgcatgagctattaacgaaatttcatcatgattgtctcactgtcacacttgtgggagtatgcgtgaatg

SEQ ID NO: 4388 - DNA, 419 bp, Arabidopsis thaliana
  Clone ID: LIB22-041-Q1-E1-D6
gagagcttcgttgtcttccccattgcaattagggttttcaaaacgggtaatcgaattcggtggtgctcggctttgaaattgaggatgagatcctttccacttccttctacctgctgacaatgggcaactgcggtactagagacgaggctgccgtcttcactcctcaagctcaagcccaacagctccagaagaagcactcccgatccgtctcagatctgagcgatccatccactcctcgcttccgagacgactctcgcactcctatttcgtatgcccaagtcatcccctttactttgtttgagcttgagaccatcaccaagagcttccgcccagattatatactcggagaaggtggtttcggtaccgtctacaagggttacattgatgacaatctccgcgtcggcctcaagtctctccct

SEQ ID NO: 4389 - DNA, 443 bp, Arabidopsis thaliana
  unsure at all n locations
  Clone ID: LIB22-041-Q1-E1-D9
acgcgtccgataaaaaagaggaaactgttgatgctttgattacgaacgtgcaagtgcaagatcagcccaaggaagattttgaggctgctgcaatagagaaagagatatcagaacaagaacacaagttgaatgatctcaccgatgtccaagaagatattggtacatatgttaaagtgcaagttcctgatgatgaaataaaaggtgatggccatgattcagttgcagcacaaaaggaagaaactagctcaatagaggagaagagagaggttgaacatgtcaaggcagagatggaagatgcaatcaaacatgaagtttccgtagaagagaagaacaacacatctgaaaatattgatcacgaagctgcaaaagagatagagcaagaggagggtaagcaaacaaatattgtcaaggaagagatncgagaagaagagaaagggattatc

SEQ ID NO: 4390 - DNA, 486 bp, Arabidopsis thaliana
  unsure at all n locations
  Clone ID: LIB22-041-Q1-E1-E10
aacgttattcctgccgccaccggtccaaaatcccgggtcgacccacgcgtccgnggacgcgtgggatgcttctgaaaccattaaccttaagcaacgatgaattcgaagttgatgagtcggatgaactgggcttctttgctcccttctataaagatttcaggataaggttctctaaactgttgagtgataaattcaagaagatggattataaacttgcaatgagtgttttgaaccctaagatcaacttcccanaggttgatttgactggaaattcaccagatggatttttgaagaaactcgacggagttctttcaccttatgatatggagagattcagagcatacactgccaatctcgttgacttcaatctggtttatgacatctgcaaaactctagctcatcattattttcaagagaagctcccagtctcgctgtcgtangttcaagcttccggtacccngtgtttgggcntgcaagagtcaaatt

SEQ ID NO: 4391 - DNA, 443 bp, Arabidopsis thaliana
  unsure at all n locations
  Clone ID: LIB22-041-Q1-E1-E12
acgcgtccgntttttctttgtggtttgattgattctttgaagcagcaaccaaagatgatgaacagctgtggaatccaacaaaacgcttttgaagagatgaggagaaacgccgccgtttctgatcggagagacgccgtgatttgtcctaaacctcgtcgtgttggtgctcttaatcaccactcttctcgatctctccgttggcaactcaatcatcagatggaattatgtgaatcgaattcaggaagtgagattttggatttcatcctcacaaagggtggtggtggtggtggtgagcaagatcagacgaggacggtgatgacgccacctctgttctttacagggtcacctccaagtagagtttctaacccattaacaaaagattcgctttttcgagaagagcttctcaaggtggcttctccgagtccatcgactccacgagcaaa

SEQ ID NO: 4392 - DNA, 422 bp, Arabidopsis thaliana
  Clone ID: LIB22-041-Q1-E1-E6
gattatcgttcacttaccagctcttatatctgctggacgctactggattttattctcttgggctacaagctcttgggattcaagtttgtagagctacagggcaagaactgatggatacatcctcaaggatttcaaagattcggaatcatgagcgtgagagacttcgtggtcctccatggttaaaaacggtgcaaggggcacttcttagctgctcatatgctgtgcttgactatgcccaaaccggtctaattgcagcagtttttatcttcaaaatgatggaatggtggtatcaatccgctgaagagagattatcagctccaacagtgtaccctccacctccacctcctccaagccccaaagatggccaaagaaggaatccctctacctccaagacagattcctctgtgctttttgcaagcata

SEQ ID NO: 4393 - DNA, 454 bp, Arabidopsis thaliana
  unsure at all n locations
  Clone ID: LIB22-041-Q1-E1-F1
cgggtcnacccacgcgtccgngagaagcagagaaccgtagactcggttttcgcagcagcaaagaccactgctcaaagaggagacgcgttgcacatcagaatcgtagcgatcaagaaactgttggcaaagctagaagcagagaaagtggacgttgattcaaagttcacctctttaacgacgagtctgtcagagcttctcaaggaggcgtcacaagcttacgaagaatatcacgangcggtgcataaggcaaaggacgagcaancggctgaagaatttgcggtgganacnacaaagagagcaaaacatattgggttnagtttcctaattcacttaattgaactaatgagattccntgatttgtgggttaaagcncaatgttcaattaaattgtgggtcctgngtttaanttccctgngttgnntttgtttgagaacnttgtttggttgccctaaaa

SEQ ID NO: 4394 - DNA, 482 bp, Arabidopsis thaliana
  unsure at all n locations
  Clone ID: LIB22-041-Q1-E1-F10
aactttattccgcccggcaccggtccaaaatcccgggtcgacccacgcgtccnctcaagaatgacgtggctaaaacaaatgtggtcaagcattttagtgctagccgtggtggtgatcggagccagagctgtgcccatcacgtatcttgaatctgcagtggctaaaggagctgtgtgtttggatggtagcgcgccagcataccatttcgataagggatcgggctcaggagtgaacaattggatcgttcatatggaaggaggaggatggtgcactgatatagctacatgcgttcaacgtaaaagtacaatgaagggttcttctaagcttatgaacaaagactttggtttctccggtatcttgggtggcaagcaaagcaccaatccagacttttacaattggaatagaatcaaagttcggtattgcgatggttcatctttcaccggtgatatagaanctgttgattcgacgcacaanctgttctt

SEQ ID NO: 4395 - DNA, 482 bp, Arabidopsis thaliana
  unsure at all n locations
  Clone ID: LIB22-041-Q1-E1-F2
aattcatcagntcgtcccggtcatacanaccgggtcnacccacgcgtccgangaagcgtgggcggacgcgtgggctggtttgggtgctgagataatcggaaccttcgtccttgtctacacggtcttctccgccactgacgccaagagaagcgctcgtgactcccacgttccgattttggcaccactcccaatcggattcgctgtgttcttggttcacttggcgacgattccaatcaccggaacaggaattaacccagctaggagtcttggagctgcaatcatctacaacaaggaccacgcttgggacgaccactggatattctgggtcggaccattcattggagcagctcttgcggctctttaccaccaacttgtcatcaagagccattccattcaagtccagattctgatttgatttccttccttaataaaaacttcattgttgcatcntgggttgtaaantnaagctttaaaaataattt

SEQ ID NO: 4396 - DNA, 424 bp, Arabidopsis thaliana
  Clone ID: LIB22-041-Q1-E1-F5
acgcgtccgctgtatgggaagttgctgttcagatcggagattctggagatattcagtggcatgcatttgagttcgtggttgtgtgtaccgggaaatacggcgacgttccaagaataccagcttttccggcaaagaaagggccggagatgtttcaaggaaaagtaatgcattcgatggattactgcaagttagagaaagaagaagcttctactctcctcagtggcaaaaaagtagccgtcatcggcttcaagaaatccgccattgatttggctttagagtctgctttagctaatcaaggggaaggaggaaaagcttgcacaatggtggtgagaacaactcattgggggattccacattattggggtgtggggcttaacattcctccctgttctactcctccaagagcttctcaagttcctccaag

SEQ ID NO: 4397 - DNA, 419 bp, Arabidopsis thaliana
  Clone ID: LIB22-041-Q1-E1-F8
aaggcattggcgtgtagacatgatcactgctgttcttcacccttgttcttcggcgtctctctctcttcccaaccgtcctcctcttagagtttcttcttgttcctccaggtacgccatccttggtgcaggttttgctggaatctctgttgcctggcacctgcttaaggagagtccaaaagagctgagattaagtgttgacgtatatgatgaagttggcataggaggtggtgcttctggtgtttctggaggactcctccatccttattctcctaaaggaaagctactttggcatggtgctgagtgttggagagaatgtttagaagctcttaaatgtggctgaaacagctgcttcttctagttaccaatctacggagaacaagagactttagcgagagtttcggaaattttatggttcgaag

SEQ ID NO: 4398 - DNA, 431 bp, Arabidopsis thaliana
  unsure at all n locations
  Clone ID: LIB22-041-Q1-E1-G10
aagttccattctttttcacaaagccattgtgctgttttctccatttggatcaaaatggttgctgnnnnnnnnnnnnnnnnnnnnnnnnnnnnnnnnnnnnnnnnnnnnnnnnnnnnnnnnnnnnnnnnnnnnnnnnnnnnnnnnnnnnnnnnnnnnnnnnnnnnnnnngctttggtcaaacctgaatccgagacacgaaagggcctttacttcttgtcgaatcttgaccagaacatcgccgtgattgttcgtacaatctactgtttcaaatccgaggagagagggaacgaggaagcagtccaagtgatnaagaaagctctgagtcaagttcttgttcattactatcctctcgctggacgcctcaccatcagtcctgaaggtaaactcacagttgactgtaccgaaaaaagagtttgtttgtggaaacacaa

SEQ ID NO: 4399 - DNA, 430 bp, Arabidopsis thaliana
  unsure at all n locations
  Clone ID: LIB22-041-Q1-E1-G2
caatcttctgatgcttcagtccaatcaaanacaaaatggccggaacagtctgaggagctattgggactgattgtgaattcacttaaaacccttgatgcggctgttccacaaggttgtccatgagcctanacgacgaccacactctgctcaaaanattgctcttgttttagacagagcacccaaacatttgcaaccagatttagttagtctggttcccaaattggttgagcattcagagcacccactggcngctttagcacttatanaacggnttcaaaagcctgaagctgaaccancgttgcntgaaccaatatacaatgctcttaanccanttagaatgngacantgnagtgtgggaggacattctatctcaagtccttttgaagcttttgancnacttagatnanggaatcctcttgtnggcggccaa

SEQ ID NO: 4400 - DNA, 430 bp, Arabidopsis thaliana
  unsure at all n locations
  Clone ID: LIB22-041-Q1-E1-D12
actttcttcccctaaaagatttcatctaaattcagtaaactcatctacgagttcttgtttttctttaaattttctaagagagagcctaagctgtttaatatagtcatctaatatttagagagatggtgggagagagaatgtggtggtggtcatcatcgtcgacgaaactccgatcaaaccttgaaagatttctcagaggaatcactccaaaacctccttctttctctttatcacagagctgcaagaatgatttgaacagtttgtggatccatgagaacaaagatgagattgaatatttcaggcttagtgatctttgggactgttttgatgagccaagcgcgtatggacttggatnaaaggtcgacttaaacaatggtgaatccgttatgcagtactaagtcccgtatctatccgccaatcaaatctatac

SEQ ID NO: 4401 - DNA, 419 bp, Arabidopsis thaliana
  unsure at all n locations
  Clone ID: LIB22-041-Q1-E1-B5
caagttagttcaattcagaatctttgagtttgaacttttttttgttgggagaaagagagaaatgtcaatagagaaaccattcttcggtgatgacagcaacagaggagtaagtatcaatggtggtcgttatgtgcagtataatgtctatggaaatctctttgaagtttctaaaaagtatgttcctcctcttcgtcctatcggcagaggcgcttctggcatcgtctgtgctgcatggaattcggagacgggtgaggaagtagcgatcaagaagattggtaatgcatttggcaacattatcgacgctaagagaactttgagagagattaagcttcttaagcatatggatcatgacaatgtcattgccattatangacataataagaccacctcagccagacancttcaatgatgttcacatt

SEQ ID NO: 4402 - DNA, 421 bp, Arabidopsis thaliana
  unsure at all n locations
  Clone ID: LIB22-041-Q1-E1-B6
tttctaacacacaaactcacatagaattcaagaaagagagaacgagggagagatgggtgaggatatgcgaggagtgaaagtantctcaaaatggccaccgatgatagttatggtgacatcacaagtagcgatgggttcggtgaatgcacttgtgaagaaagctcttgatgttggtgtgaaccatatgatcattggaaaataataccgaaaataacgtttaggctaatggtcgatcatttcatcagtggtttgctcggggcgagtttgatgcaatttttctatttgcttggtctgtcctacacgtcagcaactgttgcgtgtgctttggtaagcttgatgcctgcaatcacctttgctttcgctcttattttgagaactgagangataacaagatctaaaagacccaagcangaatgataaa

SEQ ID NO: 4403 - DNA, 416 bp, Arabidopsis thaliana
  unsure at all n locations
  Clone ID: LIB22-041-Q1-E1-B7
taagttacacgagactttcaatttctctgtatattttccttttgattcccagaaaatgtcactagattccactttctagcttgcgttttctcgggaatctgaagtttccttttgtgttgaatcgctgggaaaaatctgatggaagcagcttcaagttttttgtgtagaagtattcggattccgtcgactactacggcgacggcggcgttcacgttcactcgaccgccgttaaactacgtttgtgttgtcggagttcgtgttttcccgacgcggaaggtcttttgcagcggcgttaatggcggctccagtgttactaagaagaagccacgaaggaaaagtaacgtttccgataaacttangtttaagaaaattgagaagaggaacgataatactgaatctgagagtttaagtgttgt

SEQ ID NO: 4404 - DNA, 420 bp, Arabidopsis thaliana
  Clone ID: LIB22-041-Q1-E1-B8
ctatggatgctgttccttctatttgccagttggattgcttttgttatgtttgaggacacgcagcagggcctcacggtcttcacttcatatggtgcaactctttaccagatgtttattttgttcacaacatccaacaatcctgatgtctggattcctgcatacaagtcttctcgctggtcttcggtgttcttcgtgctctacgtgctaattggcgtctactttgtcacaaacttgattcttgccgttgtttatgacagtttcaaagaacagctcgcaaagcaagtatctgggaatggatcaaatgaagagaagaatgttggagaaagcctttgggtcttatagactcagacaaaaacggggagattgataagaaccaatgcattaagctctttgaacagttgactaattacaaggacgttg

SEQ ID NO: 4405 - DNA, 427 bp, Arabidopsis thaliana
  unsure at all n locations
  Clone ID: LIB22-041-Q1-E1-B9
angcgtccgcccacgcgtccgtgtcacttacattctctaaggctgtatttcttggaaacggtctggtggctatcctttcgggattgttnnnnnnnnnnnnnnnnnnnnnnnnnnnnnnnnnnnnnnnnnnnnnnnnnnnnnnnnnnnnnnnnnnnnnnnnnnnnnnnnnnnnnnnnnnnnnnnnnnnnnnnnnnnnnnnnnnnnnnnnnnnnnnnnnnnnnnnnnnnnnnnnnnnnnnnnnnnnnnnnnnnnnnnnnnnnnnnnnnnnnnnnnnnnnnnnnnnnnnnnnnnnnnnnnnnnnnnnnnnnnnnnnnnnnnnnnnnnnnnnnnnnnnnnnnnnnnnnnnnnnnnnnnnnnnnnnnnnnnnnnnagaaattccacatggcttcgtctttgcaaccttcangttaaccccaatgttgggaaa

SEQ ID NO: 4406 - DNA, 489 bp, Arabidopsis thaliana
  unsure at all n locations
  Clone ID: LIB22-041-Q1-E1-C10
aacgttatccgccgntaccggtccaaaatcccgggtcgacccacgcgtccgcgaatctgatcttcgttgatctctgtggaagaaacagataagagaaaatcgcatgaatttttttagaaaactaggttttaatccttcgattgcaagctacttcactaatacgagtcttctgatctcaattcttagtttttctcctcaattgccgatttctctctttcttttcgagcagaaatcgttagatcctttatcgctgtgtaatagtagtactaattttaataatcttgagagtaattactccgttcattgttgaatcatggagtccggaggcaaaactaatcgtcagctgcgtaaagctatttgcgtctcaacagacgagaagatgaagaagaagagatcaccttcagtgatagtgattgggaggtggtatggctgggaatttcaagccgctcgcactcttcaagatgcttcccttcaaggttgttgtantgg

SEQ ID NO: 4407 - DNA, 481 bp, Arabidopsis thaliana
  unsure at all n locations
  Clone ID: LIB22-041-Q1-E1-C12
cgttatccgccggnaccggtccaaaatcccgggtcgacccacgcgtccgntctctcaatccaacaaagaaaaaaaaagtcttcttctttttttacaagtctgagaattttctacagaaacaaaaatctgattgtttttcccactttgcatctgttttgaggatgccagctacggattttcaaggatcatttggaaggtcgttgctaagtttacggcgagaccaagttgactcatcaacagtcgtctccggaagtagtagccaccacgagccaagcaccatggaggttgagctagattcgtttcaaagacaagtcgctgagaaattcatcgatctcaacgcttcttcaaacgaccttctctctctcgaatggatcggaaagcttcttgattctttcctctgttgtcaagaagagtttcgagctatcgtattcaaccaccgatctcaagatctctaaatctccgatggaccgtttganttcaa

SEQ ID NO: 4408 - DNA, 423 bp, Arabidopsis thaliana
  unsure at all n locations
  Clone ID: LIB22-041-Q1-E1-C2
cacaacaaatcaaaaactccaagttcttacctttttcccatttacaatcggtaaatttctccgatcacgagatacaaatttcactttctgatatcttggatcttccgatcacnnnnnnnnnnnnnnnnnnnnnnnnnnnnnnnnnnnnnnnnnnnnnnnnnnnnnnnnnnnnnnnnnnagagaagaaaccatgaatgctttagctgcaacaaacagaaacttccgtcatgcatctcgaatcctgggtttggattcgaagatcgagagaagtcttatgatcccatttagagaaatcaaggttgagtgtacgattcctaaagacgatggcactctggtttcatacatcggatttagggttcaacatgacaatgctccgtggacccatgaaaggtggaatcagatatcatcctganggttgattca

SEQ ID NO: 4409 - DNA, 461 bp, Arabidopsis thaliana
  unsure at all n locations
  Clone ID: LIB22-041-Q1-E1-C4
gtccaaanaacccgggtcgncccacgcgtccggtttncctctgtctggagtctggccattgggattaaactaacttctcattctcattccaccttcttcttctttgttcttgtgtgctactaaaaatcaagaaagcacaaggagacaaataaacctatccatttcattaccaaacaagccgtacannnnnnnnnnnnnnnnnnnnnnnnnnnnnnnnnnnnnnnnnnnnnnnnnnnnnnnnnnnnnnnnnnnnnnnnnnnnnnnnnnnnctctcttcaactagacttattactcggatcagctattcatcttaaaaaccaaacttcattcaagacccaacagggagattcaagaagcttagaagagtggaagcatatctcagcaaaatcaacaaaccttccatcaaaacaatccacaagcccaagacgggagatgtaatagaatgtgtaccgtctcattta

SEQ ID NO: 4410 - DNA, 420 bp, Arabidopsis thaliana
  Clone ID: LIB22-041-Q1-E1-C5
acgcgtccgaagagaatgaacttctttcagccgcaccgaaagcacccagtttcacctctgatccaaagagaatcctgactgacgttgaacaaacacaagcccttgtgcgtaagctagactctgagaaaaaaattgaggaaaatgttttacaaggttcagaaactgaaaaatcaggtagagaaaagttacacagtggttctactggtccagttgtaatcataagggggttgacatctgtgaaaggccttgagggtgttgaattacttgacacgcttgttacatatctatggcgtgttcatggtctggactattacggaaaggttgaaacaaatgaagctaaagggtttgcggcatgtgagagctgaaggaaaagtttctgatgcaaaaggagatgagaatgaaagtaaattcgactctcat

SEQ ID NO: 4411 - DNA, 411 bp, Arabidopsis thaliana
  unsure at all n locations
  Clone ID: LIB22-041-Q1-E1-C6
gtgttttttttaactccgtttaaattttccgtctgaattttacaaaggaacactaatgtcagcttttgacggcgttgaaaatcaaatgaacggtccagattcatctcctcgtctctctcaagatcctcgtgagcctcgctcattattatcatcttcttgtttcccaatcaccctcaagttcgttgatgtgtgttaccgagtcaagatccatggcatgagtaacgattcttgtaatatcaagaaactattaggattaaaacaaaaaccgtccgatgagacaagatcgacggaggagaggacgatactaagcggagtcaccggaatgatatcacccggcgagtttatggccgttcttgggaccatcgggaagtggcaaatcctacgctactaaacgcagtcgcanggagactc

SEQ ID NO: 4412 - DNA, 418 bp, Arabidopsis thaliana
  unsure at all n locations
  Clone ID: LIB22-041-Q1-E1-C8
gttcgcagactcggttttctggtatggcttgtgaagcttatatatattttgtcaaagctcaaatcgagatggctttaggaaggtttgaaaatgcagttatggctgctgagaaagctagccaaatcgatccaagatgcaacgaagttgctatgttacataatactgttacattggttgctagggctcgtgctcgtggcaatgatctttataaatcagaaagatacactgaagcaagttcagcttatgctgaaggccttaggcttgatccttgcaacgctattctatattgtaatcgaacagcttgttggtttaaacttggaatgtgggaacgctcgattgaagattgtaaccaagcgctgcgttatcaaccaagttacacaaagccacttcttcgganggctgcctcaaatagcaagat

SEQ ID NO: 4413 - DNA, 484 bp, Arabidopsis thaliana
  unsure at all n locations
  Clone ID: LIB22-041-Q1-E1-C9
ctgttatccgccggcancggtccaaaaatccgggtcgacccacgcgtccgttattctctcattctttcttcttcattattcatttctctcgttattcgtttcgtattttgtttgtgtttatgattttacctccttagttgctgtgagatcaagaagtggtgaaagaaaagttactaaatctggatgttatttgattgtcgtcgttggtcttgagctatgaggagcgttaataatagtagtgtcgacaccgtgaacgccgccgcttccgccatcgtctccgctgagtctagaacacaaccgtcgtcggttcaagaaaaaaaggggaagctggtggagcttgtactggtgttttggatncaagaagaacaataaaaggataggccacgcggtgcttgtacccgaaccagctgcatcaggagctgcggtggctccagtccaaaactcttcgangcaattctacttcaataatcaaggccctttaaaa

SEQ ID NO: 4414 - DNA, 294 bp, Arabidopsis thaliana
  unsure at all n locations
  Clone ID: LIB22-041-Q1-E1-D11
ctgttattccgnccgccaccggtccaaaatcccgggtcgacccacgcgtccgnccacgcgtccgcggaaagccggtaccggtcaatgcagatgagagtgaagaaagttcaaaagcattttctgtggcatgctaagccagagaagtatgatatgtttcacatgattcttcattcaatttggtataaccgagttttccaaatttctgtttaaaaattttgttcaacaattcaatgtacattttttacagataaaatttctgagtaaactcaatttacaaaaaaaaaaaaaaaaagg

SEQ ID NO: 4415 - DNA, 484 bp, Arabidopsis thaliana
  unsure at all n locations
  Clone ID: LIB22-041-Q1-E1-B12
ctgttatcctgccgcnaccggtccaaaatccgggtcgacccacgcgtccgntggctcagtatgtcaatataaacagtggattgttgaagacatatgcgtttgatgataccaccattggatcatggatgattggcgtccaggcaacatatatagacgacaatcgcctttgctgcagcagcacaagacaagaaaaagtgtgttccatggcatgatcactgcatagatgatcctcttgtcccagagcaaagacggcggtttctcatcgcattcatggcgctccgatactcttttggggcagattcttggaccggatactgaacttatcattagttttgttagaatgggagtatgattaggccattcattacagtttatgattagaggcatgcgtatcccttgagctttggagtaagaaaatggggaaatggtatagatgtgaatgaagtataatttttcctttggnatcatatcaccatcaattgtc

SEQ ID NO: 4416 - DNA, 415 bp, Arabidopsis thaliana
  unsure at all n locations
  Clone ID: LIB22-039-Q1-E1-H11
aaaggttaactgcccaccaagtattatgtcatccatgggttcaagtcgacggtgtggctccagacaagcctttggattctgctgttctgagccgtatgaagcagttttctgcaatgaacaagttcaagaaaatggctcttagagtcattgctgagagcttatctgaagaagaaatcgccggcttgaaagaaatgtttaatatgatagatgcggacaagagtggtcagataactttcgaagaactgaaagcaggactaaaacgagtaggggcgaatctcaaagagtctgaaattctcgacttgatgcaagctgctgatgtggacaacagcggaacaatagattacaaagagttcatagctgcaacattacatctaaacaaaatagagagaacagggacaatttgtttgcangcttt

SEQ ID NO: 4417 - DNA, 413 bp, Arabidopsis thaliana
  unsure at all n locations
  Clone ID: LIB22-039-Q1-E1-H12
ttacaatgttangccggcccgtnnagncccaggtcgacccangcgtccgcccacgcgtccgctcttctcattagatcctctctctctctctctcaaaaagagaaaatctcagagccagaagaagacaaatatatcttttctattcctcagatctctgaaatcgaagtttctcgaactgttttgttttgttttttttccgatgaggtgtaagagacacacagtagatttcagtagcagtatcggcgtttgtgcttcttgtctccgtgaacgactctttactctcgccgtttcaaccgccgcgtctgaaaacgacgataacgatcatcgtcattctcgtatttctccacctcctctgctttttcctcgttctgtttctccttacgttgctcctagaaaatcngacgccggaaccg

SEQ ID NO: 4418 - DNA, 487 bp, Arabidopsis thaliana
  unsure at all n locations
  Clone ID: LIB22-039-Q1-E1-H4
tatgcctgtaanggtccagggtncacgggtccntccncncangcgtccgctcgatccttctcactaaagcgatcgtaccgatcttaatatctttnnnnnnnnnnnnnnnnnnnnnnnnnnnnnnnnnnnnnnnnnnnnnnnnnnnnnnnnnnnnnagcaataacggtggttcgaacccatctgcaggagaagaatttaaggatatgattaagggagtgactaagttcttgatgatggtgattttccttggaaccatcatgctttggatcatgatgccaacactaacctatcgaaccaagtggttgccacatctgcgtatcaagtttggaacatccacttattttggtgccacagggacgacgcttttcatgtatatgttcccaatgatggtcgtagcttgtttgggatgtgtctatcttcacttcaagaatcgaaagtcgccacaccatatccataagggagacgaagggaaggantgttggagtta

SEQ ID NO: 4419 - DNA, 456 bp, Arabidopsis thaliana
  Clone ID: LIB22-039-Q1-E1-H5
acgcgtccgtcattttccgatagaagaacttttttcacggcggcgataacaaatcaccggctaataaaggaaggaaaagaagaagaagagaagctatgacaacaatcagtcttcgcaagagtaacaccagactcccaccggaggtgaatcgcgtgctctacgttcgtaaccttccctttaacataacgagcgaagagatgtacgatatcttcggcaagtacggcgcaattcgccagattcgaatcggttgcgacaaggcgacgaaaggtactgccttcgtcgtttacgaggatatctacgatgccaagaacgccgtcgaccatctctctggcttcaacgtcgcgaatcggtacctaatcgtgttatactaccaagcacgcgaagatgaagcaagaagtttgaccagaagaagagtgaagatgagatcaccaagttgcaaggagaagtatgggagtc

SEQ ID NO: 4420 - DNA, 439 bp, Arabidopsis thaliana
  Clone ID: LIB22-039-Q1-E1-H6
atttgttaaatttttcttctctcgataataaaaacaacaaatgatcgttgatcgtttttctctagattcgattccgattccaaagaactagtctccggcgtgtaatctctgatcgttgaagatccaagctacgccgcatcttactcgccggcggcttgaatcatggctgataggagaaacaggtgtaaccagatcctccttttagcataccagagttttggcttagtgtttggagatttgagtatttctcctctctatgtgtataaatgtacattctacggaggattgagacatcaccaaacagaagatacgatatttggcgcgttttctttgatattttggaccatcactctcctttcactcatcaagtacatggtttttgtgttaaagtgcaagatgacaatggtgaaaggagggatcttggcttggaagccttgcc

SEQ ID NO: 4421 - DNA, 483 bp, Arabidopsis thaliana
  unsure at all n locations
  Clone ID: LIB22-039-Q1-E1-H8
ccnaaaagccaaagtcccgggtcnacccacgcgtccgggcttggtacgattgacttctcattcaccttcttcttcttcaagtgtgctcagaaggcaagagttcttggtacgaacgctttgtgggtcaccaatcatcagagcaatgagttccacatcagaggccgacgctgagagtgttcttagaaccgtgacgccatcgctcgatctcaaacgacacaaaggccaagctgggaagatagctgtgattggaggatgtcgtgaatacacaggagctccatacttcgctgccatttcaagctttgaaaatcggtgctgatttgtctcatgtattctgcacgaaaagatgcagctcctgttataaagaagctatagtcctgagcntatagttcaccctggttcttgaggaatcatatancatcagtcaactcaantgaagaagataaaagagaagttcaagataaatgcttggganaagtcggtaaa

SEQ ID NO: 4422 - DNA, 433 bp, Arabidopsis thaliana
  unsure at all n locations
  Clone ID: LIB22-040-Q1-E1-A1
ttctcttttttttttcgtgatggagaaaaacacaccggtgaggaaaccacacatgtcgacggcggatctactcacttggccggagaatcaaccgtttgagtctcccgccgccgtatcttctcgctccgccgccagatcgcaccagccgtcggatggaataagcaaagtcgtatttggaggacaagttacagatgaagaagttgagagcttgaanaagaggaagccttgttcaaattacaagatgaaagagatcacagggagtggaatattctctgtgtatgaagaaaatgatgattctgagttagcaagtgctaattccgccacanacggcaaatcaagaactttccagcaaccaccaagcagcaattatgagtcacatttcatttggagaagaaganattgttacaccgaanaagccaacgacggtgccana

SEQ ID NO: 4423 - DNA, 419 bp, Arabidopsis thaliana
  unsure at all n locations
  Clone ID: LIB22-040-Q1-E1-A10
acttcttcntcntctcctttcanaaacccagcgaccancttcttcaccggttatggtgacttcggagggattagcaagcgttgattcntggttatatcgccaaggtttcaacnttgattcatggntgctttctgataccttctctcacgacaacgatttgctcgcaagagctctccataccaccgtcacagnccctcatactctcactccttcctctgctttcttcgattcctccgctgtttctcacccttcttccactanacacactctcctctagcgtctccggtgcttctgatccaagaaatcatcngcggaggagctaaacggaaacgtaanngccttcttaccgacngtaaagcngccaagcgcngcgctcgtgcttccaagaaatctcagactactttcataacggcngattc

SEQ ID NO: 4424 - DNA, 433 bp, Arabidopsis thaliana
  unsure at all n locations
  Clone ID: LIB22-040-Q1-E1-A3
agggccgttatgtangcaanaagttattacggcgttgactttcacaaccaacaagacttcttatggaccttacggnaccaaatccggtttccangatttctgctccggaagccaccggtaaacagatctccggtttccttggtaccancggcaatgttctcaacaccatcgacgttcactattctcccatacctactggaggaactggcaccggaggaacnggcaccggnactggnaccggaactggcactggaactggnactggcaccggaactggcactggaantggcactggaactggnaccggaggaactggcactggaactggcaccggtactgggaggaactggcactggaactgngcaacggangaactggcactggncaccggcactggggactggcaatgggaacccggcactgggantgggca

SEQ ID NO: 4425 - DNA, 501 bp, Arabidopsis thaliana
  unsure at all n locations
  Clone ID: LIB22-040-Q1-E1-A5
actgttggcccntgcaggtacaatccggaattcccgggtcgacccacgcntccgcggacgcgtgggtctcactaccacgagctcttcatctccacttccttctccgacaacgcttcngtcgctctaaacctccacaccctcacgcgccgccctcatgtagccggtacagtggccaacgctgaagcagcggaatatgttcgctctgttttcacctcctctgctctcaaatcacacgtcgttgcttaccaagtgtctctaacttacccagttcatcgctctttggtactaacgccgacagactctgcaaagccaatcactttcttgctggaacaagaaaaactcggagacaatccttatgctaatgaagtgatgcctacttttcatggatacgctaagtcaggtaacgtttcaggtccagtggtttatgcaaactatggacgagtggaagatttcgtgagactcaaagaaagatatgggcgttaatggtctccgggagcccgt

SEQ ID NO: 4426 - DNA, 439 bp, Arabidopsis thaliana
  unsure at all n locations
  Clone ID: LIB22-040-Q1-E1-A9
acgatcgtcgaatcgtctatancacttggntcagtnatacagtcagatanagacaggagatcaatactcaacagtcaagttgcaagggcgtttagtanttctactgctgttgangangcatcaatatctcacattccagtgctctcagggtttantgtccccaaattagttctacaagtggtgtctgttgattcanttttccggataacaagtccaagctttaatgagcttgtcattctcaaggatactgctttttctgtanacaataaagctatganaatttcacnaggaatgcctaatgatgcatttttctcatcatcgttaccangcagattgtcttcagcgtngacaccantgaactctatttcaaggaacctggaaaaaactgcggtgggntccncgaaatgncaaggttctacncatccaaagaagatgggtg

SEQ ID NO: 4427 - DNA, 479 bp, Arabidopsis thaliana
  unsure at all n locations
  Clone ID: LIB22-040-Q1-E1-B1
acgcgtccgnccacacgtccgcccacgcgtccganggaattcaaacagtttgatgagctacgtattaaacttggnccattctctctagcgctttttgcttatggcaaagctaatggtttacttacaatgaanganttcaaacgaagccggctcctcaangtatgttggaaatnacaatgntccagacaaatgttnatanaaaattccgtttcatgttgttttgactccaatcaagatggggaaattnagtgtggatgactttttgcgggttctgcatccaaagaaanaaggaccttgcaaaagncaatttgcaaaaaggattggccccggtactcctcaataatggatggggaaagggtccaaagaaactggttcctcaaccggggaaaaactcctccttcctccnttggggggcntaaccgatgaaactccgaagactattttttgaaggtccttgggttcaaacgaattgagcccaa

SEQ ID NO: 4428 - DNA, 488 bp, Arabidopsis thaliana
  unsure at all n locations
  Clone ID: LIB22-040-Q1-E1-B4
ccttgcnggtaccggtccgnaattcccgggctcgtttctctaccggcgacgtaacctctctgtctctgttctgttccttgcctgcncgaggtgtgcatcttcttggaatcagctgactttgcggtcaatcggatttcttgggattgtttggagaaactttggaggtgatggacaacannaatgatcaggatattgatgttagatcagtggttgaagctgtttccgccgatctttcctttggtgctnccctctatgtgggttgaagaacatgtgcatgcgctgccaacaaaatggaacaancagattcctattgaccttaaatccccaactcaagnaaaggcntaataacctgcaattggatntccgcaattnnngggaaaggaataatgaaattcaattcccnaggcaaaatcnaacccnttgaanncggtannanccaaaaggtccaacctgggaagtnaaaataattgacccgcaaattntgaaaa

SEQ ID NO: 4429 - DNA, 449 bp, Arabidopsis thaliana
  unsure at all n locations
  Clone ID: LIB22-040-Q1-E1-B5
acgcgtccgaagtagaagagattcgattctccattatcttccttctaaatgccttccctaatgttatctgnnnnnnnnnnnnnnnnnnnnnnnnnnnnnnnnnnnnnnnnnnnnnnnnnnnnnnnnnnnnnnnnnnnnnnnnnnnnnnnnnnnnnnnnnnnnnnnnnnnnnnnnnnnnnnnnnnnnnnnnnnnnnnnnnnnnnnnnnnnnnnnnnnnnnnnnnnnnnnnnnnnnnnnnnnnnnnnnnnngtgaancagcgattcaagctcgganaagangangagcagcannaangttaagttgggcnttgaggatgttgaagttgataaccctaatgcggtttctaactttcggatttctncgcctttgagggataagcttaaggcnaantggtattgaagctcgtttccncgangcaagcttccangttcggatatgggtccccgaa

SEQ ID NO: 4430 - DNA, 415 bp, Arabidopsis thaliana
  unsure at all n locations
  Clone ID: LIB22-039-Q1-E1-H10
taacttcgcagactctgttgattagtcaacacagatcagaatctgaggctttggccgagacgagagaagcagaagaagaaaatggcggagactgtacattctccgatcgttacttacgcatcgatgttatcgcttctcgccttctgtccacctttcgtcattctcctatggtacacaatggttcatcaggatggttctgttactcagacctttggcttcttttgggagaatggagttcaaggacttatcaacatatggccaagacccactttgattgcttggaaaattatattttgctatggagcatttgaagctattcttcagctgcttctgcctggtaaaagagttgagggtccaatatctccaaccggaaaccgaccagtttacaaagggcaatggtccgggntgcttaatt

SEQ ID NO: 4431 - DNA, 499 bp, Arabidopsis thaliana
  unsure at all n locations
  Clone ID: LIB22-039-Q1-E1-F4
ctgtctcgtatgcctccgaaaattccaaggtcnacccacgcgtccgaaccatctctttctctctttctcaaaatcttgtttatttttttaataaaacaaagaaattaaaaagatgatggttacattagtactaaagtacgtcctcgtgatagtcatgaccttgatattaagagtcctatacgactccatttgttgctacttcctcacaccaagacgaatcaagaagtttatggaacgtcaaggcatcacggggcctaaaccccgtctcctcaccggaaacatcattgatatctccaaaatgctctctcactccgcttctaacgactgctcttccatccaccacaacatcgtcccacgccttcttcctcattacgtctcttggtccaaacaatatgggaagagatttataatgtggaacgggacaagaaccgagactatgcctaacgggagaccgagatgattaaagaantggctaacgaagcacaatccgggtcaccgg

SEQ ID NO: 4432 - DNA, 499 bp, Arabidopsis thaliana
  unsure at all n locations
  Clone ID: LIB22-039-Q1-E1-F5
ctgtcnacgcctgcccgtaacggtccgaaaattcccgggtcnacccacgcgtccggaattgatctaagaggaattgatccaacatgggtaacacagataagctgatgaatcagatattcgatttgaaatttacgtcaaagtctctgcaaaggcaatcaaggaagtgtgagaaggaagagaaagcagagaaattgaaggtgaagaaggctatcgagaagggtaatatggatggtgctcggatctacgctgagaacgccattcgtaagcgtagcgagcagatgaactatctccgtctcgcttctcgccttgacgctgttgttgctcgtcntgatactcangctaagatgaccaccatcaccaaatccatgaccaatatcgtcaaatcccttgagtcntctcttgccacaaggaatctacagaagatgtcagagacaatggnttcaatcnagaaacaatttgtgaacatngaggtccaanctgagttcaaggggnaaaggca

SEQ ID NO: 4433 - DNA, 444 bp, Arabidopsis thaliana
  unsure at all n locations
  Clone ID: LIB22-039-Q1-E1-F8
acgcgtccggtttttttttaccggtcaccggtttatggaatgactgattaccggctacaaccaacgatgaatctttggaccaccgacgacaacgcttctatgatggaagctttcatgagctcttccgatatctcaactttatggcctccggcgtcgacgacaaccacgacggcgacgactgaaacaactccgacgccggcgatggagattccggcacaggcgggatttaatcaagagactcttcagcaacgtttacaagctttgattgaaggaacacacgaaggttggacctacgctatattctggcaaccgtcgtatgatttctccggcgcctccgtgctcggatggggagatggttattacaaaggtgaagaagataaagcaaacccgagacgggagatngaattcgccgccgttttcnactcccggggggttaaggagtnc

SEQ ID NO: 4434 - DNA, 497 bp, Arabidopsis thaliana
  unsure at all n locations
  Clone ID: LIB22-039-Q1-E1-G1
ttaccctgncgtaccgctccgaaattcccaggtcgacccacgcgtccgcaaaaccccaaactctctctacgaaggcggatgcacgcttctctgtctccctccactctcgagtctcgtcccctctgtgtgtgattatcttctttggtgttgttgatgctggagatctcttattcagattgatcacgcctgaaaggtttattaggatttggcaaaggatggatagaatcaacggtctatcagatctcttctgatttgaattctagggcgtttgtttggaagaatcattgcttctttggttgaggatctttgtgaaacgctgggattttgtgttctagacttctagggtttttgaagcaagctgtagcataaggaaaattttgagaatgaaaggtgaaagagaagttaagaatggtgtttctgaagaagaagagagaagtgaaagaggaagagagtgatgggaacggtccgaatcaacaactccaacaactaaggttnaa

SEQ ID NO: 4435 - DNA, 393 bp, Arabidopsis thaliana
  unsure at all n locations
  Clone ID: LIB22-039-Q1-E1-G10
gacaactatggcatgaagttgagttgggaagagcagtttctgtcagaaattctagatcaaaaggacctaaagataagccaattaggtgtggtgaaacagaggctaaagcataagaaagtacttatcgttcttgatgatgtggataatctagagctattaaagactttagtgggacaaaccgggtggtttggacctggaagcagaattatcgtgaccactcaagataggatccttctcaagtctcacaagattgatcatatttatgaggtggggtacccatcgagaaaattggctcttcggattttatgtcgatctgctttcgacagaaactccccacctgatggtttcatgcaacttgcaaatgaagttacanagcttgttggtaatcctcct

SEQ ID NO: 4436 - DNA, 414 bp, Arabidopsis thaliana
  Clone ID: LIB22-039-Q1-E1-G12
caagtcgtctttgttcccttattgatagaataatcaaaaatccgagtcggagacgacgaagacccgagttccagctattaactatgcagataccatcaagagagcatagtttcattctatttctcttcatatctgcttttgtaattggtgctgcgtctgtacctgtacctgattctaattgctacgctctcgacaattcaagtcgtcttgtcgattttagcagctggatcggtcatccatttgaatatgatggcaaggaatttgatttggtggttagattttgcaaggatgtggaaacaagagggcaggcgggatatgttgattttgggacgatttgacccgttaagctactttgtttctagttctgaaaatttcgatttcgtgcaagggttttaccatgggcgaactgtcaaa

SEQ ID NO: 4437 - DNA, 485 bp, Arabidopsis thaliana
  unsure at all n locations
  Clone ID: LIB22-039-Q1-E1-G2
tgtncgtacgccccgaaattcccaggtcgacccacgcgtccgcaaaacttgctcttgttggaaaaggattgacatttgacagcggtggctacaacattaaaaccgggcctggctgcttaattgagctcatgaaattcgatatgggaggttcagctgctgttcttggcgctgcaaaagccattggtcaaattaagcctccaggtgttgaggtgcactttattgtcgcagcttgtgagaatatgataagtggtactggaatgagacctggagatgtcctcacagcctcaaacggaaagacgattgaggtcaacaacaccgatgctgaaggtcgactaacacttgcagatgctttagtttatgcttgcaaccagggtgtcgataaggttgttgaccttgcaacattgactggggcttgtattaatgctccttggnacatcaatggcaagcatatatacacctaatgataaaccttgcaaaaggangtg

SEQ ID NO: 4438 - DNA, 501 bp, Arabidopsis thaliana
  unsure at all n locations
  Clone ID: LIB22-039-Q1-E1-G3
ctgtntacgcctgttcggtaccgctccaaaattcccaggtccacccacgcgtccgcnttttancacncgataggtcagcgaancgtgagcgggcgcggagaaggaaaggccaaacacttcggccgaacgggaatgagcaacgacgaaatgacaagatgaggtgctccgggcacccccatttanatttagaaagaagggtcgaaggttttgggcctctagctttccccgtcccccctgagttgggtggtgcttgtgtggggggcgtgccaccagaaatcgggcttgaagctctcgccttaccaangagccgacagctgatggctatggctgttggtcacgactactaccaaaaggttccaatgaagatgaatatttcacatggaagagtgtgcatctgtatgttgggtgttctctgtcgtgcgacccggcggcttatgttcnacctgtggcccangcctcctaattgttcaaggcggcngcttnaactccgaatccattcgg

SEQ ID NO: 4439 - DNA, 440 bp, Arabidopsis thaliana
  unsure at all n locations
  Clone ID: LIB22-039-Q1-E1-G5
acgcgtccgcatttttctctctctacctaaccaatcctaagctcatctctctatctccaatggagtccgccgcactatcccgaatcggtctcgccggactcgccgtgatgggccaaaacctcgccttaaacatcgccgagaaaggtttcccaatctcagtctacaatcgaaccacttccaaagtcgacgaaaccctagatcgagccgccgtcgaaggaaacctcccagtctccggccaatactctccccgcgatttcgtcctctcgatccaacggcctagatctctcatcatcctcgtcaaagctggagctcccgttgaccaaacaatcgacgccttctccgaatacatggagccaaggagattgcatcatcgacggtggaaacgaatggtatcaagaacacagagcgacgggtntccgaagctgaacaaaaaagggntg

SEQ ID NO: 4440 - DNA, 480 bp, Arabidopsis thaliana
  unsure at all n locations
  Clone ID: LIB22-039-Q1-E1-G6
cggtaanggtccaaaattcccgggtcgacccacgcgtccgcccacgcgtccgttgatttgagtattgtagagtgaaaacaaaggcagagtctgctgcacctgttccacgtcctgtcccactttctaagctaactgatagcttcttagatggaacaagcagtgtgtatctagaggagttacaaagagcttgggaggctgatcccaacagtgttgatgagtcgtgggataacttttttaggaattttgtgggtcaggcttctacatcgcctggtatctcggggcaaaccattcaagaaagcatgcgtttgttgttgctagttagagcttaccaggttaatggccacatgaaggccaagcttgatcctttaggtctaagagaagagagagattccagaggatctcacgccaagtctttaagggtttactgaggctgatcttgatcgggaaatccttccgggtgtatgaagatntcggttttcc

SEQ ID NO: 4441 - DNA, 452 bp, Arabidopsis thaliana
  unsure at all n locations
  Clone ID: LIB22-039-Q1-E1-G7
acgcgtccgtagctctctcacttcagctttccaattaaagggaacaaagctttgatttttgccgcagtcagaagcattactttgcaagaacaagtgtgtaaacaaagatgaggagctcccaaaacggcggcgcaatgggtggacgagctgccggaaccggcggaggaggaccgtcggctccagttgacaaagaagttgactacgctcagtacttctgtacttactccttcctataccaccagaaggatatgcnctccgaccgtgtccgtatggatgcttacttnaacgccgtcttcnagaacaaacancactttgagggcanaacngttttagacntgggcaccgggantggaattcttgcaatttggncagctcaagctggtgcnagnaaggtttatgcccgttgaacctactaanatggctgatcaagccncgtgcccttgtcaaagcca

SEQ ID NO: 4442 - DNA, 491 bp, Arabidopsis thaliana
  unsure at all n locations
  Clone ID: LIB22-039-Q1-E1-G8
cgccgccggtaaggtccaaaattcccgggcngtgaggttgaggaancagagtgaagagaaagatagagagataagaagaagccatgggttcgatttcgatgcacataactccctctactgctctccctatacgccatttcagagctagagtctcttgttgctcttctgggcatgtatcatttatcaaagatgttgctgccactgaacctccaatgcatcttcatcacttactcaaagtgcttcaaacaagaggtgagacaatcatatctcctggagctaagcagggactgatccctcttgctattccgctttcgaagaattcgtcaggctctgttactgcgcttttgagatggcctactgctccaccaaggaatggatatgccggttgtggaagtttggaggagtggagtcangcttatanctagaaatgtnaaatgaatacattcaccgggattccaatttgaagaagatgcacaagagtttgnaagaac

SEQ ID NO: 4443 - DNA, 391 bp, Arabidopsis thaliana
  unsure at all n locations
  Clone ID: LIB22-039-Q1-E1-H1
ctccanaaattcccaaggtccacccacgcgtccgcangaagggtggtccgagtggaccgggacttttgcgttgaacactctgacttacagagagtattcgaacacaggagcaggggctggaactgcaaatagagtgaagtggaggggctttaaggtaattacggctgctgctgaagctcaaaaatatacggctggtcagtttattggtggtggaggctggttatcgtcgaccggtttccccttctcgctcggtctttgagagattgttgtgtaatgtgttcctacgtattgttggctacaaaaattattgattaatattgtatgaagcaaatcgtgttgtcctctttgttttgtttgggttgtgtactttctctaaaaaaaaaaaaaaagg

SEQ ID NO: 4444 - DNA, 505 bp, Arabidopsis thaliana
  unsure at all n locations
  Clone ID: LIB22-039-Q1-E1-F3
ctgttacgcctgnccgtacgcctccgaaaattcccaaggtcnacccacgcgtccgccttattttgagttcggattaaatctcgatcgcgatttggtccaatatctcctagcatcgagagatttctattctggctaaattttgtgttttctcaggtggataagaaattttctctttgtcgttttcctcgataattttcggattacggcgacgaatcagattgttttttggtttcaaattttctgatatttccaaaaaaacaaaaaaatctgatttttgagaaaaaagcaatgcaacggatcgtggacaacgctctcgctgtaaccaaagaatcagtaaaaactgttacatatgagtctttgaataacattgcgaggtgcataaatgggagtatcagctcttctgttgacccttctcccaaggaaggctaatattcttgaanggcttacatggctggggaactcaagcctacgtttcgtgggaccacgtttaacaacgggtgggtnc

SEQ ID NO: 4445 - DNA, 502 bp, Arabidopsis thaliana
  unsure at all n locations
  Clone ID: LIB22-039-Q1-E1-C2
aactgttaccctgccgtacngctccgaaattcccaggtcgacccacgcgtccggtcggttcttccgtaacgcagagctagagaaaacattggatcaagacttgtctaggttatatccagagcattggagttactttcaagctcctggatgtcaaggcatgttaaggcgtattctactcttgtggtgccttaaacatcccgagtacggttatcgacaagggatgcatgagcttttggcgccactgctttatgtacttcatgttgatgttgatcgtctctctgaagtgcgtaaaagttatgaagatcatttcatagacagattcgatggtttatcttttgaagaaagagatattacttacaactttgaattcaaaaagtttctgggaggatttcacggatgatgagattggtggtattcangggaattcaaagaaaataaagagtctagatgagctcnattccgaaatcaatccaaatgtgaanggttaagttaatgcctaatg

SEQ ID NO: 4446 - DNA, 486 bp, Arabidopsis thaliana
  unsure at all n locations
  Clone ID: LIB22-039-Q1-E1-C4
cgtagcctccaaaattccanggtccacccacccntccggnacaaggaaaggaaagancaggaattgagggcncttgcccaaaaanctcgctccgaaagaaccggtgctgctatgantatncctgtctcatctgacaggggtaggantgaaagtgttgacccaagaggtgattatgacaactatgaccaggatagaggaagggaaagagaaagggaagagcctcaagagacgagggannnnnnnnnnnnnnnnnnnnnnnnnnnnnnnnnnnnnnnnnnnnnnnnnnnnnnnnnnnnnnnnnnnnnaangttggatgccaaagatgctgccatggggaagaagagcatatcaccagagacagagaccgtgacatcagtgagaaagttgctcttggaatggcatctactggaaggaaaaggtgtggtgaagttatgtatgatnaacgtccgtttaaccaagacaaagggattggctccnggtttcccg

SEQ ID NO: 4447 - DNA, 500 bp, Arabidopsis thaliana
  unsure at all n locations
  Clone ID: LIB22-039-Q1-E1-C7
acaactgtcnacgcctgcccgtaacggtccaaaaattcccgggctcgtctccctccatcntgctatggatcgtcaagccggagagggagaatgatgaactaccatctccggcgataatttccgaccganttctggtaaatggtgttgtcaccccgttaacgttgaccgccgagggaaagctacnatcnacggaatctggacggcggaaatcnacnttggcaaaagaaatcctgantttcgtcgtggaaggtaacaaggttagagtaaagaccttggttgagaaaggaggaggaatttgctgtaaaggaantgctgganattatncaaggaacgatttcgttttcgagcctctctctgatgaatctagaaagctttggtccgataagttccatcaacacctcgtctctctcggtcgggcaaagaaattgctgtgtttgtgaaaccgtttggcggggaanaaaacancgagaangatatttcaagagggaagtaaancccat

SEQ ID NO: 4448 - DNA, 453 bp, Arabidopsis thaliana
  unsure at all n locations
  Clone ID: LIB22-039-Q1-E1-C9
gtaccggcccaaaaattcccgnagtcnacccacgcgtccgcnttcctacgaaaactcaaagaaacaatggcnnnnnnnnnnnnnnnnnnnnnnnnnnnnnnnnnnnnnnnnnnnnnnnnnnnnnnnnnnnnngctttggatccttcgtttcttcgtctttcgacctctctccaaagaagtagctttcctcaagattttcggtttggtgcagcttcgagtgcttatcagagtgaaggagcagccaacgttgatggaagagaaccaagcatatgggatacgtttactaaacaatatccagaaaagatttcagatggtagcaatggcgacgttgcagacgaattttattaccgtttcaaggaggacgtggcacatatgaaagaaatagggctggactcatttaggttttcgatttcttggtccanaatactacctcgangtacggttgctggagga

SEQ ID NO: 4449 - DNA, 414 bp, Arabidopsis thaliana
  Clone ID: LIB22-039-Q1-E1-D11
gaaaccgtgatttgctcaaatcaccaaaataatactctcttcaatctccatcttcccgttatctccgccacgtgtttctctctttttgtctcctttcttcttctccctaatcttaatctcagaaaccaacaacatcagtagtcagtacccccacacacacagagagaccctttttcgattctccactttctcataaaggaacgatttttcgagatgtgggtcagtgttgatttctctcctcttggcttatgagtttcgaattcgaatctcaaactaaaaagctttttgaaacaagcaacaaatgttactgacacctaagatgtttaagttcttggcttcgacaagatgtgaagaagatcctcaaacgcaaagacagtgatgctggtgaacgaagaaaaagcattgggaggactt

SEQ ID NO: 4450 - DNA, 498 bp, Arabidopsis thaliana
  unsure at all n locations
  Clone ID: LIB22-039-Q1-E1-D3
ttacgcctgntcgtacgccccaaaaattcccaggtcgacccacgcgtccgttttttctctctttctcataacaacaaaaaaacaaaaaaaaaacctaattagttttttctttctgcagagattatggaggtaccggtgattaatagaataagagatttcgaagttggtataaactcgattaatgatccttcgtttctttctcgatctgttgctgtttccggaatcggaaagctacaccaagcttatggtttttggaaatggggagctttgattatcgcatttctagcttatttcaccaactttgttagtaaactcaacagtctagttgttaggttaagaaaaatagatgtctctgtttcctctccaactctttttgatgattacgatagcgattccgatgtttcttgttcctctaacgtctcctctgacgatgaaaaagacgaagaagatgaaggctgatgatgaaagaatganggatgttgactcnattcttaaacc

SEQ ID NO: 4451 - DNA, 502 bp, Arabidopsis thaliana
  unsure at all n locations
  Clone ID: LIB22-039-Q1-E1-D4
ctgttacgcctgncgtaccgctccgaaaattcccaggtcnacccacgcgtccgggaaacacaccaaccattgttacactctaagagaagagaagagagaaggaaaaatggacggtgtatcaccaaagtttgtgttgccggagacattcgacggcgtgaggatggagatcacaggccaactaggcatgatctgggagcttgtaaaagcaccagtgattgtccctcttcttcaattagctgtttacatctgtttgcttatgtctgtcatgcttttatgtgagagggtttacatgggaatcgtcatcgtcctcgtcaaactcttctggaaaaaaccagacaaacgttacaagttcgagcccattcacgatgatgaagagcttggtaagctccaatttccccgtcgtcctcgtacaaatccccatgttcaacgaacgagaggtttataagctatcaataagagcggcgtgtggacttcctggccgtccgattgtctcgtgaatcaa

SEQ ID NO: 4452 - DNA, 499 bp, Arabidopsis thaliana
  unsure at all n locations
  Clone ID: LIB22-039-Q1-E1-D8
aatgttcacgcctggccggtaacggtccganaattcccgggtcgacccacgcgtccgcttaaaaagagctctgctttgagatcttagccattaagttctcttgatgatgtctggttcaagattagcctctagactaataataatcttctcaataatctccacatctttcttcaccgttgaatcgattcgactattccctgattcattcgacgatgcatcttcagatttaatggaagctccagcatatcaaaacggtcttgattgctctgttttagccaaaaacagactcttgttagcttgtgatccatcagctgttcatatagctatgactctagatccagcttacttgcgtggcacggtatctgcagtacattccatcctcaaacacacttcttgccctgaaaacatcttcttccacttcattgcttcggggtacaagtcagggttccctcgccaagaacctancctcngtttttccttccttgagtttcaaagtcca

SEQ ID NO: 4453 - DNA, 416 bp, Arabidopsis thaliana
  Clone ID: LIB22-039-Q1-E1-E12
taatgaagaaaactgcgaaagcgtgcagataagagagatctctctgaacagatattatagttgatagtttgcgtactaggagtctgtgaaagcttgcacaggaagaaagcaaatcgggaaagaaaggaatctgaatcggagaagcaatcgaggtttacgattaccaaattctgatctaatctgattaattgtggtgatttccgatggaagaagacggtggtggcggcggtgcgaaagttggaatgctggagaatttcatgaagacgcatcagagttctttgaaatcgttattccagagaaagaaatcatcctctggtcgtgatggagatgcttctccgtcgcctatcgcttccccgaaacctattccgcagctctctccttctcgccaattccgtcgtctccccgcctgttcaaaa

SEQ ID NO: 4454 - DNA, 500 bp, Arabidopsis thaliana
  unsure at all n locations
  Clone ID: LIB22-039-Q1-E1-E3
ctgntcgtacgccccgaaaattcccaaggtcnacccacgcgtccgaaattctcaancttctatacaaacctttctcaattcttcttgacattagggtttcctctttctttgagagggctaaaaccctaatatatccctctcattgactaaagagttaagcctactctatctactttggaagcgaaattcaaagggtaaggnaaaagcccttgaaagaggaagaaagatacaagatcctcaaagaacctaaagatctaaaggntgtaagaagaaaaacaaatggngtcgtcatcaaactcatacaactcaccatgcgcggcgtgcaagtttcttcgccgggaatgcatgccgggatgcatattcgcgccatattttccaccggaggagccacacaaattcgccaaagtccacaaaatctttgggngcaagcaacgtnaacgaaagctcctcaannnagntcctccctcancaangttgaaagangcagttcaactccctta

SEQ ID NO: 4455 - DNA, 451 bp, Arabidopsis thaliana
  unsure at all n locations
  Clone ID: LIB22-039-Q1-E1-E7
acgcgtccgaatatttcgtaaaaaaaaattctccgtttagacattattgttcgnnnnnnnnnnnnnnnnnnnnnnnnnnnnnnnnnnnnnnnnnnnnnnnnnnnnnnnnnnnnnnnnnnnnnnnnnnnnnnnnnnnnnnnnnnnnnnnnnnnnnnnnnnnnnnnnnnnnnnnnnnnnnnnnnnnnnnnnnnnnnnnnnnnnnnnnnnnnnnnnnnnnnnnnnnnnnnnnnnnnnnnnnnnnnnnnnnnnnnnnnnnnnnnnnnnnnnnnnnnnnnnnngtattgccgtgtgatactgtagattgtttcacctttgaagcaacaccttcaagagtcaaatccttttctttcttattcatcttcccttctttttcggtatattataaacacttttgaaaatgggatcacaacatttcctatggtgtancaattgtgaacaaagaatcagctag

SEQ ID NO: 4456 - DNA, 411 bp, Arabidopsis thaliana
  unsure at all n locations
  Clone ID: LIB22-039-Q1-E1-E9
aagccggcgagttcatggaacaagttttattactattccaaaactctcaggtttctctattgtatctcccaaacaagttgaggtagagtatgcagatggaaccaagttcaatttttcatcagagtttctgagaattcatagtccagctgctgatggaaaagtcagatcaatcggtggtgaaaaggtgatatctggaaggcggtatgtaggaatcatgtctgcagaaccggttggaaactacggggtaaggtacttacaaatactgcaaggtcattatgagttagccatcatgaagattcagatacctaagtttattgttttgcttataacttaatgcggttgggggctaaatcttttttgaggattcaagttagtgtttgatgacntgcatanaacaaggatatatccatg

SEQ ID NO: 4457 - DNA, 500 bp, Arabidopsis thaliana
  unsure at all n locations
  Clone ID: LIB22-039-Q1-E1-F2
acgttagccgntcgtacgcctccaaaatccaggtcnacccacgcgtccgcaaaatcacaacaccaacaaaacaaaaaaaaggttttgatcaaagagatcactgttaaaccctcacaaaatttcctcaggactaataatctgcgatcgatcgtcgttatgataagtctctaaagaagattgatgattctggattacattatcatgggaggagcttgttcaaggaagagagatcaacaagttgaggatattttaaacagaggtgtctctggaaaatatagcaagagttcaagttcgaaatggttagctacttcgctctctaggtctggctccgatgttaaacggaagaatggagaatgcccgtcgcttatgggagctctgtgtccgcaagatacaggaggacattgataagatataccaagttctctgacctanctagagatatcagtcagcagatttttgatgaatggntaatcccaagaggttacctttaaagtcccctg

SEQ ID NO: 4458 - DNA, 416 bp, Arabidopsis thaliana
  unsure at all n locations
  Clone ID: LIB22-039-Q1-E1-C12
aggaccaaagatcctattgaactagcaaaatatgatgtggttatgacaacttacgccattgtttcaaatgaagttccaaagcaacccctggttgatgacgatgagaatgatgaaaaaaattctgaaaaatatggtctcgcttctggcttctccatcaataagaaacggaaaaatgtagtgggtactactaagaagagtaagaagaaaaaaggtaacaataatgctggcgattcatctgaccctgactctggtactctagcaaaagttgggtggttcagagttgtactagatgaagctcaaacaattaagaatcatagaacccaggtggcaagagcatgttgcggtcttcgaagccaaaaggangtggtgtttgtctggaacaccaatacaaaatacaatagaatgatttatacaag

SEQ ID NO: 4459 - DNA, 495 bp, Arabidopsis thaliana
  unsure at all n locations
  Clone ID: LIB22-037-Q1-E1-B4
gttaccctgccgtttcgggtccgaaaattcccggggtcaacccacgcgtccganaatcctcaagganagagttaacccananaacagagcaatcctctaaaaaatctcaagaancctcactaaaatggggttcaacggcagagacacaattaactccggtgcaagtcaccgacgacgaanctgccctcttcgccatgcaactagccagtgcttccgttcttccgatggctttaaaatccgccttagagcttgaccttcttgagattatggccaagaatggttctcccatgtctcctaccgagatcgcttctaaacttccgaccaaaaatcctgaagctccggtcatgctcgaccgtatcctccgtcttcttacgtcntantccgtcttaacctgctccanccgtaaactttccggtgatggcgttgaacngatttacgggcttggtccggtttgcaaagtatttgaccnnnaaccgaagatgggtgttccantgg

SEQ ID NO: 4460 - DNA, 445 bp, Arabidopsis thaliana
  unsure at all n locations
  Clone ID: LIB22-037-Q1-E1-B6
acgcgtccgggaaactcaatcggggtctctctgttgttgacagtttcaaacttttgaagcaaggcaatgatttgactgagcaagaggttttcctctcttgtgctctcggttggtgcattgaatggctccaagcttatttccttgtgcttgatgatattatggataactctgtcactcgccgtggtcaaccttgctggttcagagttcctcaggttggtatggttgccatcaatgatgggattctacttcgcaatcacatccacaggattctcaaaaagcatttccgtgataagccttactatgttgaccttgttgatttgtttaatgaggttgagttgcaaacagcttgtggccagatgatagatttgatcaccacctttgaaggaganaaggatttggncangtactcattgtcaatnnacngtcntattgtccagtacaaaaa

SEQ ID NO: 4461 - DNA, 498 bp, Arabidopsis thaliana
  unsure at all n locations
  Clone ID: LIB22-037-Q1-E1-C3
ctgtttagccngccgtttccggtcgnaaattccngggtaaaccnacgcgtccgggcttangggtcnggtttatgtcggaaccggttgtcncttccgaagaatcncgctttanggattcaatccgcctcgaagcaaggacttttccccaagttgctggagttgttgtttccctcgtagcaagaagaagaatattcctgaagaaaaccgagctctgcgtatgagtgattatgatgacgaagagatgaatctctctctagtcccgaagaagttcggtaactcaacattcctcattgattcaattcccgttgctgagttccaaggccggcctctcgcggaccaccctgcggttaaaaacggggcgtccaccgggtgcactcaccattcctcgagaacttcttgatgcatcgactgtagcagaagccatttgctgttatctcttgctggtacgangataaaactgangtggggatnacgtnatcggatggatttaacnggtta

SEQ ID NO: 4462 - DNA, 422 bp, Arabidopsis thaliana
  unsure at all n locations
  Clone ID: LIB22-037-Q1-E1-C4
acgcgtccgaaactccattattctcctgcttcttcgtctcttcaattattttctctgagactagctttgattcaaccatggctaatgcagcatcaggaatgggcaagtccatgatgactgcaagctgaaatttatggaattgaagacgaaaaggacacaccgtttcatcatttacaagattgaggagctgcanaaacaagtgattgttgagaaaatcggtgaaccgggtcaaacccatgaggaccttgctgcaagtcttccagctgatgaatgccgctatgccattttcgattttgattttgtcaattctganggtgtcccaaggagcangatttttttcgtggcatggtctccggacacagcaagagtgagaagcaaggatgatctatgcgagctccaaggacaggttcaaganagaaact

SEQ ID NO: 4463 - DNA, 427 bp, Arabidopsis thaliana
  unsure at all n locations
  Clone ID: LIB22-037-Q1-E1-C8
ccattaatgctaccacccaactacaaggcttttctcacacactctcttctctcaatctcttggctcagaacaaagaagataaaaaaaaaagtgtgatatattgtgagaagattgcagaagcgtgtccaacttggttccctctctctctgaaattactcaatcatggggatttgcttgagtgctcaggtcaaagctgagagctcaggagcgagtacgaagtatgacgccaaagatataggaagtcttgggagcaaggcttcgtctgtgtctgtaagaccaagccctcgaactgagggtgagatcttacagtctccaaatctcaagagttttagctttgctgagcttaaatcagcaaccaaggaattttagaccagacagtgtgcttggtgaaggtggattccgttgtgttttcaaanggatggattga

SEQ ID NO: 4464 - DNA, 421 bp, Arabidopsis thaliana
  unsure at all n locations
  Clone ID: LIB22-037-Q1-E1-D12
aaagctaaggataaagaaaataaatagtaaatggaagggtttcttcgctttcttgtagcgaaagccatcttattggctttagcatcttcatttgtatcttgttacgacccaagtcctcttcaggacttttgtgttgccgtcgatgacgctagtggtgttttcgtgaatggaaaattctgcaaagacccaaaatacgtnaaagctgaagacttttttacttccggactaaacatcgccggaaacacaataaaccgcgttggctccaacgttacaaacgttaacgttgacaaaatccctggactcaacaccctcggagtgtctcttgtccgaattgactttgccccgggaggtcaaaacccgccacacacgcacccacgagccactgagatcctcgtgggttgtcgaaggaacaactccttag

SEQ ID NO: 4465 - DNA, 502 bp, Arabidopsis thaliana
  unsure at all n locations
  Clone ID: LIB22-037-Q1-E1-D2
ntgttagcctgcccgttcggtcgnaaattccgggtaaacccacgcgtccgcacacgcgtccggccacgcgtcccgaaaatgtttaactatgtgattattcttcctttagctctcttcctcttggcttacaaattcttctttacatctaaaaagcagcgttactatctccctccctctccatcttactctctcccaatcctcggccaccacctcctcatcaaaccgccggttcaacgtctcttccaccgcctttccaatatccatggcccaatcttctacctccgacttggttccccgccgtgccgtcgtcatatcttcntcctcgctgggcaagagaatgcttcacaggtcaaaacgatgtcattgtatcaaaccgccctcgttttctaacctccaaatacattgcttacaactacacanccatcggaacaacatcttacggtgaccactggcgtaacctccgccgcatttgctcnctcgaaatcgtctcctcaaaaacgtc

SEQ ID NO: 4466 - DNA, 449 bp, Arabidopsis thaliana
  Clone ID: LIB22-037-Q1-E1-D4
cctcaccatatccacaatcctcaagctatctcctttgtgtccataatcgaaacgctttttgcgatttatcctaatcttttttctatcttctgctacaaatttggttcttttttggttgaatttggataaaatcataatctcctcttcaattttcttgtgaaatggaagtttcagtgattggaaatcctcaagcgaggatctgcagagcagaattagcttacagagagcttggatttagatttggctctgatgtaatctccggtgaatcgagaaatagggttagtttctgcaaccaaagctctaaatggaaagagatcgcgatacgttgctcttcgagatctgtcaaatgtgaagccatccgtctccgatgacgcttctccgtttctcaaatccaactccaaaatctaaatcgctcgagaagtgtaaaaataattgttgggcctcccgtt

SEQ ID NO: 4467 - DNA, 419 bp, Arabidopsis thaliana
  unsure at all n locations
  Clone ID: LIB22-037-Q1-E1-D7
acacacgactagataaactctaaatcctcacagcagatcacgtgctaatcacatggctccggggcttactcaaaccgctgatgctatgtccaccgtgacgataacaaaaccgtcactgccatcagtccaagacagcgatcgagcttacgtgacgtttcttgctggaaacggtgattacgtgaaaggagtcgttggtttagccaaagggttaaggaaagtcaaatcggcttatccactcgtagtancgatgttacccgacgtcncggaggaacaccgtcgtatacttgtggatcaaggatgcatcgtccgtgaaatcgaanccccgtttacccaccccgagaaccaaactcagttcgccatgggcttannacgtnatcnacnnacgncgaacnccgtatctggaagttttgtggaagtan

SEQ ID NO: 4468 - DNA, 469 bp, Arabidopsis thaliana
  unsure at all n locations
  Clone ID: LIB22-037-Q1-E1-E10
tattggtccgnccttcccgggtcaacccacgcgtccggagaaccaggacgctattgatgcagccatggttggaatgcttgctgatccgaaagaggcccgagctggaatcacgagaggttcacttccttccattcaaccctgtggataagagaactgctttgacttacatcgactctgatggtaactggcacagagtcagcaaaggtgctcccgagcagatccttgaccttgccaatgccaggcctgaccttaggaagaaggtactctcttgtattgacaagtacgctgagcgcggtcttaggtcgttggcagtagctcgtcaggtggtacccgangaaaacaaaagaaagcccaggtggaccatgggaatttgttggcttgtttgcctctttttgaccctccaagacacgacagtgccnnagncattcnttagggcgtttgaancctaaggtgtttaatgntgaaagat

SEQ ID NO: 4469 - DNA, 414 bp, Arabidopsis thaliana
  unsure at all n locations
  Clone ID: LIB22-037-Q1-E1-E11
agaaagaagaagaagaagactccaaaaacgatgccgtattacaccaacgacgacaatgacgtcgacgatttcaccgaatacgatccgatgccttanagtggaggctacgacatcaccgtgacatacggccgttcaattccaccgtccgacgagacttgttaccctctctcctctctctccggcgacgcctttgagtatcagcgacctaatttctcttctaaccacgattcttctgcttatgacgaccaagctcttaaaaccgagtacagtagctatgcacgacccggacccgttggatctggatctgattttggccgggaaacctaattctggatatggagggagaacggaggttgagtatggccggaaaactgaatcggngcatggatttgggctaatgggtgggaangaatt

SEQ ID NO: 4470 - DNA, 460 bp, Arabidopsis thaliana
  unsure at all n locations
  Clone ID: LIB22-037-Q1-E1-F3
acgcgtccgcncacgcgtccgggaaggaactgtgtagaaactttcagcgtggcagttgtaggtatggggaaaactgtagatttcttcatccacaacaagctaagccaaataatccctttggctttggtacnnnnnnnnnnnnnnnnnnnnnnnnnnnnnnnnnnnnnnntagttcgaacccttttggatttggtgtacaaagtggtggttccagcagaccgaatcagttccagaatacttggtcacgaacggcttctacacctactggtggtggtgctgctgcttctacacagcagactggtaaacagacgcagccggcagatcataaatgcacagatcctgctgcgtgtaancggggtaatgcaagacgattttaagaatgaagagacccatgtggaagctcacatgctacggccactggaaataatttccatgtgatgtttaccgggtgatatcancc

SEQ ID NO: 4471 - DNA, 459 bp, Arabidopsis thaliana
  unsure at all n locations
  Clone ID: LIB22-037-Q1-E1-F9
ttaccctgccggtattggtccaaccattcccgggtcaanccacgcgtccgnaagagtttcagcaaccacaagtgnnnnnnnnnnnnnnnnnnnnnnnnnnnnnnnnnnnnnnnnnnnnnnnnnnnnnnnnaagtggctcgtttggtacaagcattcatagttcnagccgcaattcttgttctggcagcactggcttgtgtgtttggaagactatgcaaccgcggtggaaagcaacacaaagacaaaaacaacaacaaagcttcgaagcatnanaaaccatcgtcaaagaagagccgtgagattagacctgtggagcgtnaaccaanagaaagaggtgatgtggagtttggtttcnatatgaagcggcctggtcctatgagcaaacccactggtcgaaacggaggggacatagaatttgggtttganaacangngaggangaagtggtggtggaggangg

SEQ ID NO: 4472 - DNA, 503 bp, Arabidopsis thaliana
  unsure at all n locations
  Clone ID: LIB22-037-Q1-E1-B2
ttaccctgccgtnccggtcgaaaattccggggtcnaccaacgcgttcngatttgcaatnccttggttaannagtggaaacnaatccccccaaantggccgtngatntccaaagttttgcnaaatcccccggggaactttactgaaattttggagctantcatgtcntcggatcctgacaaaatgatgtccaaagccgacaaaatgacaaagctcacgcttactagatggagtgctgattgggagaggtgctactgagttgtatgagcaagcagcaaatgggtttagagcatcaaacaaatatgagaaagctaaagtggctctcgagaaagcttcaaaaggacaagagatgcaagcttctccttgggatgctgcaaagcatatggagtctgctgctgccttagcacagaagctaagtatttggnatgaagttgctgatttttataagaaaggcgtcnggagctgtatgttgaantgtggnaagggcacaaacccgcatcagatg

SEQ ID NO: 4473 - DNA, 361 bp, Arabidopsis thaliana
  unsure at all n locations
  Clone ID: LIB22-036-Q1-E1-E7
aattattggtttagacaaatatcttcagtattatgtctcaaaggcgaaatctggctgcggctctcggactacgtacatgcctacaatgcctgcactcaccagatgtacaacgggatcaaaattccaatggaagaagaaagaaaagacacctaccactcagaagagagaatctcaggtttcggttatgaacggtgagaattcttttggggtcacgcaaatatgtgtcagaataaacagcttgcanaaaatccgcagtgagcttgatgttgtggaaaaaagagtgatcacacatttgaggaactgttgagtcagctcacacccgaatgacttttccaacggcttagaaaaanaagttttgagc

SEQ ID NO: 4474 - DNA, 324 bp, Arabidopsis thaliana
  unsure at all n locations
  Clone ID: LIB22-036-Q1-E1-F12
tcaggttcgttttggtggtgaccactcctttattcacctacggtgagatcggcggcggagtctagacgacggcgataacgccggtgaccgacggaatcatgttaagatagtcactggcgaattcgttcttcttccccggagacgacaagcatcgaagaatctgtttagagacagctatgcttgtctctgtttctgcgttttctctttccgatcttgtctctcgngatccggtgaagaagctgccgccgatcacatcttccagtttccaagagattctaaancttttgtcttttgatccttcatcgaattcattgaggagattat

SEQ ID NO: 4475 - DNA, 402 bp, Arabidopsis thaliana
  unsure at all n locations
  Clone ID: LIB22-036-Q1-E1-F5
tttcacaaaatcaggttattgttatctctggagaaacaggttgcggcaagaccacacaaatcccgcagtttattttagaatccgagattgaagcaaaccgtggagctttttccagtatcatatgtactcaaccaaggagaatatctgctatgtctgtttcggagagggttgcttacgagagaggagagcagttgggtgaatctgttggatataaagttcgattggaaggtgttaaaggaagagatacccgcttactcttctgcaccacaggcattttgttgagacgcttgttggtagatagaaatttaagaggagttactcatgttatcgnggatgaaattcangagcgtgggatgaatgagagatttccgtcttatcagtcgtaaaggatctgcnatctcg

SEQ ID NO: 4476 - DNA, 401 bp, Arabidopsis thaliana
  unsure at all n locations
  Clone ID: LIB22-036-Q1-E1-F7
atattgttagcattaaattaggagacattatcccagctgatgcccgtctacttgaaggtgatcctttaaaggttgaccaatctgctctaactggagagtcccttcctgtaaccaagcacccgggtcaagaagttttctctggttcaacctgcaaacaaggagaaatcgaggcggttgttattgccactggggttcataccttcttcggtaaagctgctcaccttgtggacagcactaancaagttggacatttccagaaggttcttacagccattgggaacttctgtatctgttccattgctatcggtatggtgattgaagatcatccgtcatgtatccgatccaacgccganagtacagagatggaattgacaaaccttttggtcctcntgatcggtggt

SEQ ID NO: 4477 - DNA, 476 bp, Arabidopsis thaliana
  unsure at all n locations
  Clone ID: LIB22-036-Q1-E1-F9
aactgttccgcctgccggtacaaagtccaaaattcccgggtcgacccacgcntccgcaatctggtgccactgttggtgaactttattacaggattgcggagaagagcaaagtccatgggttcccggcgggtttgtgctcgagcttaggcataggaggacacataacaggcggtgcgtacggttccatgatgcggaaatatggtctaggtgcagacaatgttctagacgcaaagattgttgatgccaacggtaaattactcgatagagccgcgatgggtgaggatacattttgggctattagaggaggcgctggangggagttttgggataattctaacatggaagatcaagcttgttcctgttcctaagaccgtgaccgtctttaccgtcaccaaanacgttacaacaagacntgggtaacaagattatctcaaagtggcaaagaattgcgggacaaacttgttgaangagctatt

SEQ ID NO: 4478 - DNA, 482 bp, Arabidopsis thaliana
  unsure at all n locations
  Clone ID: LIB22-036-Q1-E1-G2
ctgtttacgcctgccggtaccngtccaaaattcccgggtcgacccacgcgtccgcttaactctaacgggagttaactaacgtcgacattatgctagagggagatgagaaacagagccgagctctggatttcaatcgactcgaggttttgtcattactaggtcgtggagctaaaggagttgtgtttcttgtccgcgacgacgacgctaaattgcttgctttaaaagttatacttaaggaagccatcgaggaagaaaaagaagggtagagaaagtgaagatgatgagtataaacgcgtgagtttcgaagcaaggagtattaagcagattcgaccatcctctctttccgtctcttcacggtgttttagctaccgataaagtcatcggttatgcgatcgattattgtccgggacagaatctcaattctttgaggaaaatgcaatcggaaagtatgttttccgacgagattatcaggtaaatttgtt

SEQ ID NO: 4479 - DNA, 396 bp, Arabidopsis thaliana
  unsure at all n locations
  Clone ID: LIB22-036-Q1-E1-G5
aactcaaagccctcgctttaccgaagaaataaaagaaataagtgttgatcatggttcatctaacaacaatggtacttcttaccaaactcttgatgagaaattcgttgaggacatcgagaatggcgataagttctctggttctttggagaaaaaacccctggttgggtcacatttgcctcctagtactccttcaacaacagctccttcacctctcttgggtcttcctgaggtttctcacattggntggggtcattggttcactctccgtgaccttcaactcgcgactaatcatttctccaaggagaagtatcatcggagatggtgggttatggagttgtttaccatggaantttgactaacaanngcccctggtggctgtcaaaaagttgctcaaan

SEQ ID NO: 4480 - DNA, 418 bp, Arabidopsis thaliana
  Clone ID: LIB22-036-Q1-E1-G8
aaaaactcaaaactcaaaaccatctttgtgaaaaaaaaatggaaggaagacaatattaccctccgagagaaaacgttgaaggaaacagaaccaccatgggaggaggacctcactcaccgtggcattcaccggttccttatctctttggtggtttagcagcgatgcttggtctcatagcttttgctcttctaatcctcgcttgctcttactggcgtctctccggttatctagacggcgaggaaaaccagagcagagagagagatcttgaagtcggagatgtgaaacctgacaaaacggcggtgaagcctgtagctttgccggagaagttcttggtgattatggccggaaatgtcaaacctacttacttagcaacgccgtcggtaaaaacgtgtacttgtgacgatgatgacgatgaaga

SEQ ID NO: 4481 - DNA, 421 bp, Arabidopsis thaliana
  unsure at all n locations
  Clone ID: LIB22-036-Q1-E1-G9
acgcgtgggcggagtccccgagagattgatcaccatcacttttgtaccttccttgtactacctatggcgtctgctagcttcgttaagcctaacacnnnnnnnnnnnnnnnnnnnnnnnnnnnnnnnnnnnnnnnnnnnnnnnnnnnnnnnnnnnnnnnnnnnngagtctccttcgcgatccgcgccggtgcttactccgacgagcttgttaaaaccgccaaaagcattgcatcccctgggagaggtatcttggcgatcgatgagtccaatgcaacctgtgggaagaggcttgcttctatcggcttggataacaccgaggacaaccgtcangcctacaggcaacttctgcntaacaactccctgggnctcgggngattacatctcgnggttccaattctcttcgaaggagactctttaacaa

SEQ ID NO: 4482 - DNA, 430 bp, Arabidopsis thaliana
  unsure at all n locations
  Clone ID: LIB22-036-Q1-E1-H12
agatggctacgtcaggaacatatgtgacggaggttcctttgaaaggatnagcggatanacactacaagcggtggaggaatgagaaccacnttttccccnacgccatcggncaccacatccaaggtgtcaccgtccacgacggcgaatgggactcccatggagccctcaagatttggaactacacattagatgggaaaccggagatgttcagggagaggagananatagacgatgatnaacatggcggtaacgttcgttggactanaaggtcacgtgatggatcagcttaaantgtatgataccattttacagttcattcaaaagtcnccggatnatatcgtttgcaagatcactatnacctgnggataagcgagccggatgactcncctgaaaccaacaactacantaaaggttggnccagagtccccct

SEQ ID NO: 4483 - DNA, 415 bp, Arabidopsis thaliana
  unsure at all n locations
  Clone ID: LIB22-036-Q1-E1-H2
acgcgtccggttataaggaagatattcaactaatgaagaatctaaacacagacgcattcagactctcaatcgcatggtcaagaatatttcctcatgggagaaaggagaagggagtgagtcaagctggtgtgaaattctaccacgacctgatcgatgagctccttaaaaatggtataattccgtttgtgactgttttccattgggacactccacaagatttagaagacgaatatggcggtttcttaagcgagaacattgtgaaagatttccgagaatatgcagattatgttttcactgaatacggtggaaaagtgaaaaactggatcactttcaacgagccatgggtcttcgctcatgcaggttacgacgtanngcaanaaggcgccaggacgtttgttctcgctaaccttaanag

SEQ ID NO: 4484 - DNA, 422 bp, Arabidopsis thaliana
  unsure at all n locations
  Clone ID: LIB22-036-Q1-E1-H6
acgcgtccggttttttttataattataatttatttgctctcggcaggatctatataatacacagaccagtctttgcgtgtgcttgtgtgcattcattgatcgggtttanatcttttcatcggattttctttgtcnagcaagagccatgtcactganacccaacgctaagacggaggttcgccggaacngatacaangttgcagtggatgcggaggaaggacgacggaggagagaagacaacatggntgagatccgtaaaancaagcgtgagganagtttgatgaanaagagacgtgaaggtatgcaagctcttcagggtttcccttcagcttccgccgcctccgtcgataanaagttggatagtcngaaggatatgggtcnctgggggtttnggtccgaatgaccctgcctttgcaagcntg

SEQ ID NO: 4485 - DNA, 473 bp, Arabidopsis thaliana
  unsure at all n locations
  Clone ID: LIB22-037-Q1-E1-A4
gttacgcctgccgtttcgggtccgaaaattcccgggtcaaacccacgcgtccgaatggcagaggcttcaaagtactttgagactactccagaaacattcacctaaattctttgggagactcatttactttcctttgaggtcaatatgagaaaacanaagtttctgcttgcattccaggctgtcaagcaattgcttaaattgggtgcagagaaccctgattcacatcgttccttggttaaattctttctcatgacagaatcgataagtgctccaacgactgaangctgagaaacttcgttggagggtcctagaggctgagcgcccatcaatcagtcaattgcagaataaatcactaatggaaagcaaacaaagagttcttgggaagacacgaagattcnttggtgcacagagctgcatatgcaaaaaatgcctgtaaaatttagattccaancaaagaaaacccgagggcanca

SEQ ID NO: 4486 - DNA, 494 bp, Arabidopsis thaliana
  unsure at all n locations
  Clone ID: LIB22-037-Q1-E1-A5
gccggtttcggtcgcnagtnccggnntaaaaattcccgggtcgacccacgcgtccgtgantgtatttcgctaccagatgaagttgtagaaacacaacacgtcaatacctctgttgaatcagacacatctgcttatggaacagcatttgatgcatttggagggggtgaaagtggaaaggaagcttgccatgctattgctgcattatgtgaagtttgctccattgattccttaatatcaaattttatccttcctttacagggaagtaacgtgtcaggaaaagatggtcgtgtccactgctccctgaatatcaacactgaaactggacgcttatcggctagaaggccaaatttgcagaaccaacctgcattggagaaagatcggtacaaantccgtcaggccttcatancatcacctggaaattcacttantgttgcctgattatggacaactggaacttagggattctggcacatcttgctagttngcgaaagcat

SEQ ID NO: 4487 - DNA, 421 bp, Arabidopsis thaliana
  unsure at all n locations
  Clone ID: LIB22-037-Q1-E1-A7
acgcgtccggttgccgttagccaggtgagaatccttaagcgcggcgaagaaatccccaaggagacttcagatctggttgtggaaatgtcagatctgggatctactcgtcggattggaccagatccgggtttgattccgggtcagatccgtttatctggccgcaaatcgaaatcagcaccgttttacgccggtcctgtgaccatgacctcgccgcctcctagcgatgtcccgcttccagctttcttcacgaagaaggcaacaaatgatctcatcaggatccttcgccnagacatcgcctgacggtgtctgtcaccgatcatttttgattttttaaaaatctcccgatgatccaaatggttaccaanagtgttacatttccgtattaccgatcgtccgattccgccctgaaaaacgggacatn

SEQ ID NO: 4488 - DNA, 419 bp, Arabidopsis thaliana
  unsure at all n locations
  Clone ID: LIB22-036-Q1-E1-E10
acgcgtgggcggacgcgtgggcggacgcgtgggcggacgcgtggggaaagctgccttctttatgtcgatcagctgaagcagaggtgtgttgaaggtttcaaagaaggtgttttgagcatcgagcagttagcttctgttgatggtttatgcgagtgggtgttgaaggctataggcgcatcggatccggttcatacttacaatatcaatctatcagttttcacttcgattcctgatctctgggggattgatcagctgttccctatagttcctatccataagctcgatcaaaggcccggggctcgcggaatcctttcagatttaacgtgtgatagtgacgggaagatcaacaagttcataggcggtgaatccagcttgccgttgcacgagctggacaaagaatggcaatgganggaaggtac

SEQ ID NO: 4489 - DNA, 505 bp, Arabidopsis thaliana
  unsure at all n locations
  Clone ID: LIB22-035-Q1-E1-G6
gaactgttaacctgncagccgccggtaacggtccagaattcccgggtcgacccacgcgtccggatgaaggaagacancctctctcaagaaagctacctattcgttcaagcagaataaatccttacaggatgttaattctgtgtcgcctcgcgattcttggtcttttctttcattatagaattctccatccagtcaatgatgcatatggattatggttaacgtcagttatatgcgagatatggtttgcagtgtcttggattcttgatcaattccccaaatggtatcctaanagaacgtgaaacatacctcgatanactctctctcaggtacgagaaggaaaggaaaaccgtcaggattagcacctgttgatgtttttgttaagtacagtggatccgttgaaagagccacccttgattacagcaaacacagttctttccattcctaacagtttgattatcctgtggataaggntgcgtgttatgtatcagacgatggtgcagctatg

SEQ ID NO: 4490 - DNA, 415 bp, Arabidopsis thaliana
  unsure at all n locations
  Clone ID: LIB22-035-Q1-E1-H11
tctacagtctccattcttggatgggtttgctctctgtttctctcttcgctgcccagtgggtgactgggttcatgagcttctggcatagangagaagtacggactacaagaaccacgtttcttccctggcatgtattcctcggactctatacctatggtttaaccantgccacagctgagaccggactgcntgagaaactgangttccttcagaccaagaggaatgtccccagacgcggttctgaatcaatgactgtcaatggtttagggcttggcttggctctacncgggttgcattgttataactgctgctattttgccaaagtatcangngccattctcntgatnagaaactcgtttaattcaatcgcaangatngtccnaaaatgttggtccgccctggaggttttagnttt

SEQ ID NO: 4491 - DNA, 467 bp, Arabidopsis thaliana
  unsure at all n locations
  Clone ID: LIB22-035-Q1-E1-H12
gtccgnaaattcccgggatcgtaggcagataacaacatgggaagcggtgggaacgaacaaagaatcaccgaaaaatatcaaggcaaagagtttcaaatttcgtgaattagcaaccgctacaaatagtttcaggcaagagttcttgatcggagaaggagggtttgggagggtttacaaaggaaagatggagaagacaggacaggtaaaaataaagtggtagctgtgaagcaacttgaccgtaatggattacaagggaatagagagtttctggtagagatcttcaggttaagtcttcttcatcatcccaaccttgccaatctcattggatattgccttgatggagaccagagacttcttgttcacgagttcatgcctcttggttcccttgaagatnatccccctaaatgttgtantaggacaacaaccattggattgggactccccgattaaaggattgccttaagaac

SEQ ID NO: 4492 - DNA, 453 bp, Arabidopsis thaliana
  unsure at all n locations
  Clone ID: LIB22-035-Q1-E1-H3
acgcgtccgcgagaaagtcggaatttttccgagaaaattcaaaagggcgaaaaaaagagcttttgcgtacagttttcgaattggtctccttcgtangggcaagctatggttcaagagaactatgaatgaaactgtggtgtaagagaatatnaatggttgttanctgctanaatgttttttggaccaagtgagtttgatgctgatgaaatgggttatgcaatgagtagacttgagatagaatccnatctatgtgatactggaaaagacgtttgtggagttggtantactantggtantcacangatcaagtgaacatttggctgatctagaccattganatcagccacgttactaaattgaaatcctagtcctcatcaacggtaaaaccctnaaagtcccctggggaaggagccngncccaanccatagcngacaagtccccngactgatacag

SEQ ID NO: 4493 - DNA, 426 bp, Arabidopsis thaliana
  unsure at all n locations
  Clone ID: LIB22-035-Q1-E1-H5
acgcgtccgnaaacactcatcgtttgtgcttcaaatggttgaatgggcaagatgggttgtgacctggcattttgaaaccatgagcaaagacggatcgtcgatctgctcttctgagcccttgtgcagtttcccgtctcacgcagaanactgtccgttttcatataagcctantggtaaccaagaaggaccaagtctatgtgattgtaatcgaaaatgagaanatgactgtgcaagagtttcccgangaattctaccgtgtcggacctgttacgcatagcaggacccaggggagctcgagatggtcaatgtacagcatcccgggcaaaggaagacctaaggccaangacttaaccnagacacctgtaagntgatctgaaatgcaagctnaaagatggggagatgtggtggagcctgatccaatccntg

SEQ ID NO: 4494 - DNA, 446 bp, Arabidopsis thaliana
  unsure at all n locations
  Clone ID: LIB22-035-Q1-E1-H8
tggatttggttcaacnaatggtggttttanaatatcaatgataggtgttaaaatctttttcctggccacantatatgcattgntcggatgtccactctcttatgtacnatggtacaggccactctaccgagccatgaggactgacagtgctttgaantttggttggtttttcttcacctacttgattcacattggcttcggcatcgttgctgccatcncccctccaatctttttccatggaaaatcattaangtaagtcttccaataatagcccnacgtttctacttgcgtttgagtgtactcttacttcanatgtagttggttaagtctggtgagggcttcaattgggnaagttcctaaaattggtctganacggttnattaanaattcantttgttacaaaattaatgacgattaaggacctacaagttggaagtgagaatcct

SEQ ID NO: 4495 - DNA, 442 bp, Arabidopsis thaliana
  unsure at all n locations
  Clone ID: LIB22-036-Q1-E1-A7
acgcgtccgtgacagaagaaggaatcgagagtcgggtatgcattatcctaacaacagaaccgaattcgtcggagctccagccccaacccggtatcaaaaggagcagttgtcaccggagcaagagctttcagttattgtctctgctttgcaacacgtgatctcaggggaaaacgaaacggcgccgtgtcagggtttttccagtgacagcacagtgataagcgcgggaatgcctcggttggattcagacacttgtcaagtctgtangatcgaaggatgtctcggctgtaactactttttcgcgccaaatcagagaattgaaaagaatcatcaacantgaangaagagattactagtaagtagtaacagaaganagagangagctctcccgtgggcnaagaaangcnggaggtggcngggaaaatcaggaagaggaaanaaacaa

SEQ ID NO: 4496 - DNA, 408 bp, Arabidopsis thaliana
  unsure at all n locations
  Clone ID: LIB22-036-Q1-E1-B3
tgattgatctgatcatcagatacttgcagcccccaataattcacnatctctctctcttactcttttgttacaattctgttaacaaactttgacgtcaccatttgaattcttatccaattcccatttccnaacagaatttttcctctttttctcnttctctttttcattccttagagattcntgattctcccacttccttctttagtcgttacagtcnttgctctgttttcaaaaaaanaaagttggttcctttctcaacttttttcccgggaaaagtgaatgagagctaaaannggtttatcatgtttgagattcccggggtaatacaaattcctctcaannaaaaaggttccanttttaaancctctttcgaaantctggtanntttatggagtaagnttaggggtt

SEQ ID NO: 4497 - DNA, 412 bp, Arabidopsis thaliana
  unsure at all n locations
  Clone ID: LIB22-036-Q1-E1-B6
aaaattcttcatcgactcaaattcaaaaactcatctctctctatctctatttctctggttccatagctcaccgtcgcatcgcagatctactccttccgcaataaattttaccggcggaggtatcagatctcgccgatctgttgtagcagctactgtattttgggcttctcatttgatattggggaaacgaggagtagaggacgatggaaaatctgatctctctggttaacaagatacagagagcttgcacggctttaggagaccatggagactccagcgctttacctactctttgggattccttgcctgcgatcgccgtcgttggtggtcagagctcanggaagtcttcagtcctggagagcatcgtgggaaaggactttttaccccgtggatctggcaattggttantcga

SEQ ID NO: 4498 - DNA, 417 bp, Arabidopsis thaliana
  unsure at all n locations
  Clone ID: LIB22-036-Q1-E1-B9
nnnnnnnnnnnnnnnnnnnnnnnnnnnnnnnnnacatttggnttccccggccggaattcgagaaccaggatctactaattacctgagagaaaaaagatctgctctgtttgtctgaaacagacagaagtcaacaaatctttcatttgttttttagcaaatcaaagaaatggccggagggttcgtcagtcaaacgccgggtgttcggaactacaattacaaactgacaccgaaagtgtttgtgacatgtttcatcggtgcttttggtggtctcatcttcggatacgatctcgggatctcaggaggggtaacctcaatgggagccattcttgggaaagagttcttcccttacgtctacaagaagatgaagagcgcacatgagaacgnagtactgtcgatttgatagtcagcttctcactc

SEQ ID NO: 4499 - DNA, 419 bp, Arabidopsis thaliana
  unsure at all n locations
  Clone ID: LIB22-036-Q1-E1-C6
cgccttcattctcctcagagccaactgtcctgagatttcgatttcgatttctccgatctctcttcctccgtcgccggcgaaaccatgtctcagtctattcaattctccactccttcacacactcctcaccttctccatctccctcactcacaattcaaccgtcctctctcctctatctccttccgtcgcttccctctaacaaccatcaaatacacttccatcagagcctcctcgtcatcatctccttcaccggatctcgattcatcgtcctcatcancatcctcgcaagtacttctctcanctaacggtactggtgctgtgaagtctgatgagagatccgttgtcgctacgngcggttangacngatacgtctgggattgaggttgatactgtgncggaagctgaagcttaaggaagaa

SEQ ID NO: 4500 - DNA, 415 bp, Arabidopsis thaliana
  unsure at all n locations
  Clone ID: LIB22-036-Q1-E1-C8
ggttttggaccttttggttctccatcttcaaaatctcatcaatccgattagagaaattagggcaacgtaattttggcgaaaatcctctctctgttacgaatagattgtttttgattactaaagctggattcgtctctggtgctgtagattttcgaagatccggtcagagtcgttcgtgaaaagctccttgtttaagtgttacgggctacatcggacgctgactggcttttcatggaatttgagtgccaagagagacttgaagctgcgaacgatcaaagaagtgagtctggtcttttgaataccgatttgagaataggtaatgatgggtctgttgagattccaaaatgtgaagttgtgttgtcagaaaaagaagggaactttagtgcccagtggcntcgaaacagttacncccctg

SEQ ID NO: 4501 - DNA, 422 bp, Arabidopsis thaliana
  unsure at all n locations
  Clone ID: LIB22-036-Q1-E1-D12
acgcgtccggagatttcgaaaccctagtcgatttcgagatccaactaactctgctccttatctcagcttgttgaatttgcgaagtatgggagacgctagagacaacgaagcctacgaggaggagctcttggactatgaagaagaagacgagaaggtcccagattctggaaacaaagttaacggcgaagctgtgaaaaaagggtacgtgggaatacacagttctggattcagagacttccttttgaaaccggagcttctcagagctattgttgactcaggatttgaacatccatctgaagtgcaacacgaatgtatccctcaagctatcttgggtatggatgttatctgccaagcaaagtctggtatggggaagactgctgtgtttggcctgtcnanctctacaacagatttggaccaatccn

SEQ ID NO: 4502 - DNA, 421 bp, Arabidopsis thaliana
  unsure at all n locations
  Clone ID: LIB22-036-Q1-E1-D7
aaactaaacaaaaaaccctagttctctctctctagttagccgccgcaaaccagatcaaatcttcaaacgccgttttgcctctttggtggtcggtttcggccggcaccgtgagagggcctctcttctctttttagttttttttttcctttgtgtcgattttttttagccggcggcggctcctccttctttgtggcttaatcaaagagttttaagtcgacggcgaagcggagatagttctctcagatggaggttcgttggtagatctacaatggggaactatgactctcgacgacggcancagatctgggtggatttcttcgtcagtctcttcgcggaggtacctctcctccgatgaacctccttggtagtggtggctcaatggttaagaaggtacatgaggtnggccggatcgtggttttcg

SEQ ID NO: 4503 - DNA, 449 bp, Arabidopsis thaliana
  unsure at all n locations
  Clone ID: LIB22-035-Q1-E1-G3
acgcgtccgcactgggacttgcttttggatgagctccaatcagaccantggcctgttcanccaggtcatcgtccccaacgatgcacaggggttgcattgagtgtagctgcaggattgcttggagcttgcttacctggaactggtgctaaaattgtagctttggttggaggtccatgtacagagggccctggaacgattatctcaaaggatttgtcagatcctgtgcgctcccacaaagatctagataaagatgctgctccttattataaaaaagctgtaaagttttatngatagtattgcaaagcagcttgtcgctcagggtcatgtgttagaccttttcgcttctgcacttgatcangtcggggttgctgaaatgaaaagtaancgttgaaagtacccggtggtccccgtgatccgtccgaaantttgggcaatccgtaattaaagat

SEQ ID NO: 4504 - DNA, 451 bp, Arabidopsis thaliana
  unsure at all n locations
  Clone ID: LIB22-034-Q1-E2-E9
gcccacgcgtccggacaaaaatgggaaaggcacgtacggtgggagtgggaatggantattctccgacgagcaaattacctctccggtgggcggcgganaatcnccntgaagacggcgacaccgtcatcntgattcacgtccaaccacaaaacgccgatcatacccgcaaaatcctcttcgaggaaaccggttcaccgctaattcctttggaggaatttanagaggttaatttgtctaaacagtatggacttgcttacgatcctgaggttcttgatgttcttgatactcncnctatggcnaaaaaggtgaaggttgtagcaaangtgtattggggagattcaatggagaaactttgtgatgctgtcnaaaatctaaaacncgattccattgttcntggnactctaaggtntggggttcctcaaaaggatcttgcggggttactgtgncaatc

SEQ ID NO: 4505 - DNA, 451 bp, Arabidopsis thaliana
  unsure at all n locations
  Clone ID: LIB22-034-Q1-E2-F11
gggaaaaattacatctccgcccaccgccgtcggaataatccangttatctgatcggcggngtcttccattgtcgcgtcngaaattattctctgtaattactgtcacgtttcgtctctcattgagggaatatttgcagatcgatctatcgtcgatttagatctggcgttcctanggttcatcgacgctggagattcatggtctctggtgattgcattttcgaatttttgctgaaattggggaaaattttaggtgctgtgtatatggatanangtgggangagatctggtgaatctccaggggtattgattaacaanagaagttcntctggttgcttaattgtgaagaagaacnatggtgttggtacgacttgttcgtttcagaaaatcgnccgaattgggagtccaataagaagtcaagatnattacaatnacccgaatccaacgataaaat

SEQ ID NO: 4506 - DNA, 443 bp, Arabidopsis thaliana
  unsure at all n locations
  Clone ID: LIB22-034-Q1-E2-F2
gtttcgaacaaacatttttggttccaaaaccgtggtttcgacagatccggatgtgatccaccagattttccggcaagagaacacgtcttttgagctaggctatccagacatatttgtgaaagtatttggaaaagataatttgttcttgaaggaagtgttcatccacaagtacctccaaaaaatcactatgcaaattcttggctccgagggtttgaagcaaacaatgttaggaaacatggacaaagcaacccgcgaccatattaggtccattgctagccaggggagcttcaatgttcgtaaagaagttgaaaacttggtagtaacgtacatgacaccaaagctgataagttancctaaancaagagacgcaatcaaagcctataagataatcccaacgccntcaatcctgaatgggttaagtccctcctaagactcnccacttg

SEQ ID NO: 4507 - DNA, 399 bp, Arabidopsis thaliana
  unsure at all n locations
  Clone ID: LIB22-034-Q1-E2-F3
gcttcttcttctttcttgtaaatttcagacctcgttggagagttttggacagcaagcctcgacggnatcagccaccgttagatagatattgtcttgtcctaacatgtcggcaaagtgcgacaagtgtagcttgcctatcaccaacggtccaggattcgccagaatcaactgtttatcatcagaanacacagagtcaggtaaatcttcttcaacnaattcactttgagtgcttagattatnatccttaaagaattcagtatgtgtgtanacatgtatgtacctgaatgtctcttttctggagagacttgtataagtcttcnaatgcgtgaataacacttgtatcnatgtccgtncagtgaaaaataanggtgtncgttaaaagnaagcgaacccactcta

SEQ ID NO: 4508 - DNA, 451 bp, Arabidopsis thaliana
  unsure at all n locations
  Clone ID: LIB22-034-Q1-E2-F4
gcccacgcgtccgctttctcactaacaccaaaaacaagtctttgaagaagaataaaaagattggattttgataagtttagtgaaaatgggggagcttttgtgttcttcactgtggaacccgtcacgattcattgttgcttctctcaaaaggtattttctgggtttagcttcttanaggttcttcgttcttaaaggtctgtttttttttaggttgtgatactttgaatgtaaaaaanggaagatttttagtttcgatatgtatatctctcggatgggtttgagtcggagtttcccgccgctttttgggggatttcgggaaattctanggttaagggttggataatgtcttcctctagcagtctctgcnacttttaaaatcccctcaaccttccttgaaaattaaaaaaggttttttaantggttggttcctccctgggaatccaaaattctg

SEQ ID NO: 4509 - DNA, 498 bp, Arabidopsis thaliana
  unsure at all n locations
  Clone ID: LIB22-034-Q1-E2-F9
ctggttgcagtgctngcctggacgtaacggtccggaattcccgggtcgacccacgcgtccgctttaacaaaaanaaaatggnaagcgcgaatccagaaancgcnaaacccacgcctgcaacggtggacatggctaatccanaggagcttaagaaagttttcgaccagtttgactccaacggcgacggcaagatctcagtcctcgaactcngcggtgtgtttaaggctatggngacttcntacacagaganggaactcaaccgcgtgctcgaagaagtcgatacagatcgcgacggttanatcaacctcgacgaattctcaantctctgtcgctcgtcttcctccgccgnagagatccgtgacgctttcgatctctacgatcaggacannaacngactgatatccgcctctgaancttcacnacgtgcttaaangtctcgggatgtcttgctctgttgannactgtaagcgtattatcggaactgtggatnctgacagt

SEQ ID NO: 4510 - DNA, 459 bp, Arabidopsis thaliana
  Clone ID: LIB22-034-Q1-E2-G12
gcccacgcgtccgcggcgacgaagctctctctcgactcctacttctgtggatcacatcttttgttttctggagaaaaaaggctcgtcgaagcaagtaagtgaacagtcatgaactcggcaagcgtttccggtgaatcctctctctccgatatgattcagacagttcatttttcctctggaaaccctagaatcggcgagactcgcggtgtcatgcatctaatttccgacaatgctgtttcgtcatcttcttcttcctcctcctcgaatctccctattggaaggaaccctctcgtttgcgttcttggggtgcccaaccacatgacatatgcagatttttgccagttctgcggctccttcattcagcacatactggatatgcgaaccgtcaggaatgatgacattgaaaataagatacagcattttgataaggtttgatagtcaggaatctaccgatacatt

SEQ ID NO: 4511 - DNA, 438 bp, Arabidopsis thaliana
  unsure at all n locations
  Clone ID: LIB22-034-Q1-E2-G2
gcntcttctccatttcgaaaagaagatgaaggtgatagataagatccagtcattagccgacgaaggcaaaacagcgttttccttcgaattcttcccaccaaagacagaagatggagtcgacaatctctttgagagaatggatcgaatggttgcttatggtccaacgttttgcgatatcacttggggagctggtggatctaccgcagatctaacgcttgatatagcttcgaggatgcaaaacgttgtttgtgttgagagtatgatgcatcttacgtgtactaacatgcctgttgagaagattgatcatgctcttgagactattagatctaatgggattcagaatgtgcttgctcttagaggtgatctcctcatggtcaagataattgtcaagttgaagtggtttgattgtcttggatctgttaacacattcgtacaagt

SEQ ID NO: 4512 - DNA, 448 bp, Arabidopsis thaliana
  unsure at all n locations
  Clone ID: LIB22-034-Q1-E2-G3
gcggacgcgtgggcttcaagtcttgattcaattacttgttggaagtgttcttcgtctctaacttgctgagaaattcatcgaatttgttgaacaattcttatggcgatttcgaaaggtagattgaaagtttggttcgataagaagatcagtgaaccacttatccagatcttgcgcagaggtgctgagccaaagcagctggctttttctgcggcattgggtattaccatgggagtatttccaatctgtggtgttacggtgttactatgtggagtggctattgcgtcgcttggatctctttgtcatgctccaactgtgatgttggctaacttcattgctactccaatagaactaagtcttgtggtgnccttccttacgacttggcgaaaaaataaccggtggacctcaatttccttaacaaccggagncctaaagaaggtttcaaaagggc

SEQ ID NO: 4513 - DNA, 446 bp, Arabidopsis thaliana
  unsure at all n locations
  Clone ID: LIB22-034-Q1-E2-G5
ctctanangggcaagtgagaggttactgtctctttcttctttcagacactcgagacgagaaaggctcgtatctgattttaccgccaccggaccatctgtgatagacaataatgggttacatangagctcatggtgtancaagctcttcataggtacaaatacagtggagtggatcactcttatcttgccatatacgtcctccaacctttttggactcgatttgtcaaagtcttccctctatggatgccaccaancatgataacgcttatggggtttatgtttctagtcacttcctccctgctaggctatatatattcacctcagttggattctcctcctccacgatgggttcacttcgcacatggtttacttctcttcttgtatcaaacatttgatgctgttgatgggaaacaagcaaganngacaaattcctctanccccctatg

SEQ ID NO: 4514 - DNA, 446 bp, Arabidopsis thaliana
  unsure at all n locations
  Clone ID: LIB22-034-Q1-E2-G7
gcggacgcgtgggttctactgcaacagtggggagcaattcaagttctggccaagttacaggattcatgccagatgctaaaggaatggatccagtccctgtattccagtctgaagttgaaaatttggcttatcctgataaacatgaagaaagtattgcctttggtatggtaaatttatcaaatgagagtagtagacatgagagtcatgagagttctttcagtgatcagcttggtgatatggatcaagattatactgttgaatgcgagtctagcgcgaatgatgaggtcagtcaccaggtttttgatgttgaaaacagttcgactcatggtagtcctcatgtangcaatgaattttttanaaagggtcgctcntgaaactaaggaggtttgtggtaaaatgttggtcccactaatgcgccactgaancaactataaacgaaattaata

SEQ ID NO: 4515 - DNA, 445 bp, Arabidopsis thaliana
  Clone ID: LIB22-034-Q1-E2-G8
gatttgctcttaagattcttcacatagagaagtcacatgttccttcttcttcttccttcatcatccccaaacacacacaaactaaaaaaaaggcaaaaccctagatccaagatcagacctaatctaatcgaaactcatagctgaaaaatgaagagagatcatcaccaattccaaggtcgattgtccaaccacgggacttcttcttcatcatcatcaatctctaaagataagatgatgatggtgaaaaaagaagaagacggtggaggtaacatggacgacgagcttctcgctgttttaggttacaaagttaggtcatcggagatggcggaggttgctttgaaactcgaacaattagagacgatgatgagtaatgttcaagaagatggtttatctcatctcgcgacggatactgttcattataatccgtcggagcttaatcttggct

SEQ ID NO: 4516 - DNA, 459 bp, Arabidopsis thaliana
  unsure at all n locations
  Clone ID: LIB22-034-Q1-E2-G9
gcccacgcgtccgctccgcttataaactttctctcttctgaaaacagatctctctactttgcttcttcactcgacttgtatctatcatccatggcttccgagaatcctttccgaagcatattgaaggcgttagagaagcctgatggtggtgaattcggtaactactacagcttacctgctttgaacgatcccaggatcgataaactaccttattccattaggatacttcttgaatcggccatacgtaactgtgatgagttccaagttaagagcaaagatgttgagaagattcttgattgggagaatacttctcccaaagcaaggttgagattccgttcaagcctgctcgggttcttcttcangactttactgggtgttcctgctgttgttgatctgcctgcatgagagatgccatgaataatctcggtggtgaatccaataaaattaatccgctggncc

SEQ ID NO: 4517 - DNA, 453 bp, Arabidopsis thaliana
  unsure at all n locations
  Clone ID: LIB22-034-Q1-E2-H1
gcagataagaactgggtggagttgaagggtaaatttgtaatccatggttcgccatcgagagtaatactataccttgaaggtccacctccacgagctgacattcttctcaacagtttagttgttcaacatgctaaaaggaatcgtccatcgcctcctcctttctacgagaatcctggtttcggagtcaatatagtcgaaaacagtgaagttttagatgggggaactaaaccatggttcactctagggaactgcaagttgagtgttggacaaggcgctccgcgcactctgcctccaatggcgagagacacgctaggtcctcacaaacctctaggtggaaactacatcgtttgtgactaacagaacgcagacttggttggtcctgctcaagatgatnaaccgataaaatcaaactcctccttacatatcaaatctcaaccttggtcaaaccttggg

SEQ ID NO: 4518 - DNA, 431 bp, Arabidopsis thaliana
  unsure at all n locations
  Clone ID: LIB22-034-Q1-E2-E5
gcccacgcgtccgggaggtgtaaggaaaactgacagtataggtaataagagttccaaggtaccggaaccagccaaaaaggcgacaaagaaaaacagggtttgggatgatgcggctcccaaacaatcgaaattggacttcacggattccatcgatgaanatgggaacaatgatcatgtanatattgtggctgctgaccaaggagaaagtatgatggacaaggaagaggttttcagcagtgatagtgaaagtgaagatgatgacgaaccaggaagtgatgagaagcctgctcaggctaagaaaaagggatggttttcttctgttttccagagtattactgggaangcgaatcttgaaaggacagaccttgnaccggcgttgaaanctctgaangaacggctcatgaccancaatgtggcagaaganattgctg

SEQ ID NO: 4519 - DNA, 430 bp, Arabidopsis thaliana
  unsure at all n locations
  Clone ID: LIB22-034-Q1-E2-B6
tcgaagtcggatcacgaggctttcttagagaagaacatgtgacgtatgcttccattcttctctacatcactctctctancggtcaaatcttcttcaataagtgggtattgtcatctaaggaaataaacttcccttatccacttggattgacattacttcacatgactttttcctctgttttgtgttttctcctcacgaaggtttttaaggtcatgaaggttgaggaaggaatgacattagaaatatatgttacatcagttattccaataggtgcaatgtttgcaatgactctatggttaggaaacactgcttatctctacatanctgttgcattttccaaatgttgaaagccatcatgccngttgctgngttaaacttggagttggggttgggcttgaaataatganctgcaanatgcttttgaaatgtc

SEQ ID NO: 4520 - DNA, 454 bp, Arabidopsis thaliana
  unsure at all n locations
  Clone ID: LIB22-034-Q1-E2-B9
gattttagttatctgccagagagaaagattttggatgggatttcatttgaggtaccggcagggaaaagtgtagcgattgttggtagtagcggaagcggcaaatcgacgattcttagaatgattttcaggttctttgacacagattctggtaatgttaggattgatggtcaagatataaaggaagtgacactagagagtcttcgaagctgcattggagttgtccctcaagatactgtgctcttcaatgacacaatatttcacaacattcactatggaaacctttcagcaacagaagaagaggtgtacnatgcanctaggcaaccagtgattcacgatacgatcatgaaatttccggataaatattcnaccncggtgggaaaaaganggctgatgctgattggtggaaaaaaacaaagantggcacttgcnccngcctttccngaaatcacaagcg

SEQ ID NO: 4521 - DNA, 451 bp, Arabidopsis thaliana
  unsure at all n locations
  Clone ID: LIB22-034-Q1-E2-C1
gcccacgcgtccggcaagatcaataaaagttttgatcaaaccggacttgacgtggcagatatcttcccaaagttgggcgatctgacaatagatcactgtgatgatctcgtggcactaccttcaagcatttgcggactgacctcncttagctgcttaagcataacaaattgtccacgcctcggtgaattgcccaagaacctcagtaagcnacaagctctcgagatctttagctcanggcaagcatatagccttaagatttcgacatctcacaatgtgtcagcctgagttgtcttccataggaaataggaaagctaaagaagcttgagaagatcgacatgagaaaatgttgcttccgggatanaacgagctctgccggttcactgaaatcctctgcgccatgttancctgcgataccgacgttgcattaagttggaaagaagttgagaaagnt

SEQ ID NO: 4522 - DNA, 430 bp, Arabidopsis thaliana
  unsure at all n locations
  Clone ID: LIB22-034-Q1-E2-C12
gcacaagatcgttaaaaagcttttagctccagatctgtggaaccgccatagctatggagttttatagaagttctagaagattacaaattcttggatctgtgattcttctgctctctattcatgtcgctcactctttttaccttcctggtgttgctcctcaggatttcgaaaagggagatgaattgaaagtgaaagtaaacaagttgacatctataaagactcagcttccatattcgtattactctcttcctttttgtcgtcctaagaagattgtggacagtactgagaatcttggtgaagttcttcgtggtgaccgaatcgaaaatgctccttattcgtttaaaatgcgtgaggcgcaaatgtgtaatgttctcggtcgtgttatgcttgatgcaaagtctgccaaagcgtttaaagagaanattgatga

SEQ ID NO: 4523 - DNA, 420 bp, Arabidopsis thaliana
  unsure at all n locations
  Clone ID: LIB22-034-Q1-E2-C2
atgagagaacggattattacattcgtttcgctgcttcttgtagctttgctttcgtttcccagtgttagctactgtgacgaccaaacgatcctgtatgaatcgtttgacgagccttttgatggtcgctgggtcgtttcagagaaagctgaataccaaggtgtgtggaagcacgagaagagtgaagggcatgatgattatggacttctagtgagtgagaaagctaagaagtacggaatagttaaagagcttgatgttgatgagcctctaaaccttaacgaaggaactgttgttcttcaatacgaggctcgtttccaagaagggcttgagtgtggtggtgcttacttaaagtatctccgtcctcaagaaactggatngggttcctcaagggtttgataatgaatcctcctaatccaacaagnt

SEQ ID NO: 4524 - DNA, 465 bp, Arabidopsis thaliana
  unsure at all n locations
  Clone ID: LIB22-034-Q1-E2-C3
gaantttcctaaattcttggatttgacatttcactttttccgatttgaaacaatgatgataactcgcggtggagccaacgcggcgaaatcnctgttagtggcggctggaccacntttgttctcgacggtccgtacggtttcntctcacnaggctttatcagcaagccatantttgaaccctggtgttacatctgcttggatatggacnagagctccgacgattggangtatgatattcgctancacgatcactctggganataaaactccgatgaacgatgaagacgcgaatcataaagatcacagagaacgaatccaacgngtggagaacgccgccgganggtaataacanngggaagataaagggantcgccaagctaatgggggtgtttgaancctaataagattactaaaataaaatggntcctgaatgggaanttggnactgnttcaaggccaatgggaa

SEQ ID NO: 4525 - DNA, 516 bp, Arabidopsis thaliana
  unsure at all n locations
  Clone ID: LIB22-034-Q1-E2-C4
ngtagccgtccgaaaattccagggtcgacccacgcgtccggagaaagcaaaatcaaagttgtgatgaaatctctattgatgagaaccggttcgatgccggttcttcaaaaccggttaatttcaggtggttcatcgcggaagatgacgcctatctccaggaccaactccgtcgaatcattatccagctacggcgagagattcgccggcgggaagatttcgatcgaggttaaggctaatgtagggatgcggagggtgttatcggaaagtgatgtgattagatctgagagaatgttgaaaagagttggatctaagccttcgccggcgagaatcccggaggatgatgaagcgggggaagaagaaaattangtttgcaagatggttgggggtcctatgattctcccggtgggtttaacctgtngganggagaaaatgtttcaacggggttggccgtnttttggtngttngattctgggntaaaaccggccgggttaatggaaaccggaaggaaggaaggcc

SEQ ID NO: 4526 - DNA, 417 bp, Arabidopsis thaliana
  unsure at all n locations
  Clone ID: LIB22-034-Q1-E2-C7
gcagcctcaggnacctctgctactttcagngcctccgtttcttcagctcnttcctcttcntcccanttgacccatttgaaatcanccttcaaagctgtcaaatatangcctctgccatcgtctcgctccaagtcatcatccttctccgtctcctgcaccatcgccaagganccgcctgttctcatggcngccggatctgacncggccctgtggcaangacncgnttcgttcggtcggtttgggaagtttggtgggaantatgtacctgaaacccttatgcacgcgctatctgagcttgaatccgctttctatgctcttgcnaccgacgatgatttccagaagagagttggctggaatcttgaagggactatgtgggtagagaaantcctctgtattngcagagaggttacngagcaa

SEQ ID NO: 4527 - DNA, 458 bp, Arabidopsis thaliana
  unsure at all n locations
  Clone ID: LIB22-034-Q1-E2-C9
tgatctcgcccttgcttcagggaaaatctatgaagatgaaggtttcaaatacatctctcaatcttttgagaaaggcactgtgcaccttattggtcttctaagcgatggtggagttcactctcgtttggatcaagtccagttgctgcttaagggttttgcagaacgtggtgctaagagaatccgcgtccatatttttactgatggtcgtgatgttttggatggttctagtgtcggatttgttgaaactcttgaagctgacctanctgctttacgtgcgaaaggtgttgatgctcangttgcatctggtggaggtcgaatgtatgtcacaatggaccgttatgagaatgattggagtgttgttaaacgangttgggatgcacaagtccttggggaaactccccanaaatttaaaaacgctcctgaagcanttaagacactgaagggnaagaacctggtgg

SEQ ID NO: 4528 - DNA, 513 bp, Arabidopsis thaliana
  unsure at all n locations
  Clone ID: LIB22-034-Q1-E2-D12
gttgcntgtgcttacctggacgtaacggtccggaattcccgggtcgacccacgcgtccgaattcggatcaaaattgtcttcaagcatcatggatccatacagggttcgtccttcaagcgctcatgattcccctttcttcactacaaactcgggtgctcctgtctggaacaacaactcttctttgactgtcggaactcgaggtccaatccttctggaggactatcatctgcttgagaaactcgctaactttgacagggagcggattcctganagggttgttcatgccaggggagccagtgctaagggtttctttgaagtcactcatgacattacccaacttacttctgctgattttcttcgaaggacctggtgttcaaactcctgttatcgttcgtntctcaactgtcatccatgaacgtggcantcccganactctcagagattcccgtggttttgctgttaagtttacaccaganangggaaatttgatcntgttgggaacaacttcctgta

SEQ ID NO: 4529 - DNA, 418 bp, Arabidopsis thaliana
  unsure at all n locations
  Clone ID: LIB22-034-Q1-E2-D2
ttttcgaaacttctctcaggcgaattcaagtttcatagttttggtctagtttttgtccaccgatctatctctttagttgaaacttatcagaatggctcgtccacaagaccctccacgtggtttcttcccttttggaaaccccttcaaaaatctatcttcgaagaactcggtactctcctcaaagcttctcccactcctgaacaattttgagaccaacttagcatcttctattagtaagcttgtccctaaggaaaagagcgatatcctgactgtctcatggatgaaacaagctatggaatctctttgcgagacacataatggtatcaagacccttataaccgatcttgaccttccngtatcagattgggaaggataaatgggttgangtcaaccttgaaattatngtgaaccttcttga

SEQ ID NO: 4530 - DNA, 434 bp, Arabidopsis thaliana
  unsure at all n locations
  Clone ID: LIB22-034-Q1-E2-D9
ggagagatagagagagagaaagaggcgaaaataatggcgtcgatccctccgccggagcttgacaacgactcactggcgtcatcgccgagatcggagtacgatagtcagccacgcgtacggttcatgtgtacttttggaggaaggatcttgccacgtccgccggataatcagctctgttacgtcggcggcgataatcgcatggtcgctgttcatcgtcacactactttcgcctctctccttagtaaacttgctaaactctccggtaaaagcaacataagcgtgaagtaccagctaccaaacgaagatcttgacgcgttgatttccgtatcaacggacgaagatgtagagaacatgatggacgaatacgaccgcgtcgcacanaatcaaaacccangcgcctctcgtcgtcgtcttttctcttcancaaaaactcc

SEQ ID NO: 4531 - DNA, 450 bp, Arabidopsis thaliana
  unsure at all n locations
  Clone ID: LIB22-034-Q1-E2-E1
ttttctctctatatacgtcgccattgttgttgcattcgaagcttttatagaagaagtaannnnnnnnnnnnnnnnnnnnnnnnnnnnnnnnnnnnnnnnnnnnnnnncgtgatggagaaaaacacaccggtgaggaaaccacacatgtcgacggcggatctactcacttggccggagaatcaaccgtttgagtctcccgccgccgtatcttctcgctccgccgccagatcgcaccagccgtcggatggaataagcaaagtcgtatttggaggacaagttacaagatgaagaagttgagagcttgaacaagaggaagccttgttcaaattacaagatgaaagagatnacagggagtggaatattctctgtgtatgaagaaaatgatgattccgagttagcaaagtgctaantcccgccacaaaacggnaaatcaagaacttccaacaaaca

SEQ ID NO: 4532 - DNA, 505 bp, Arabidopsis thaliana
  unsure at all n locations
  Clone ID: LIB22-034-Q1-E2-E3
aactgtttacgcctgccggtagccgtccgaaaattccngggtcgacccacgcgtccgatcgagtacaggatctcactctagcagcgagagctcttctctcaccgcttctaactctaccaccgtcgccgccgtctccgtcaccgcggcggcggaagttgcttcgtcggttattccaggttttgatatgcctaatatgaaaatttacggtaacgggatcgagtggtcgacgttacttggacaaggctcatcggccggtggtgttttctcggagatcggtggttttccggcggtttcagctattgaaactacaccgtttggattcgggggtaaattcgtaaatcaagatgatcatctgaagttagaaggtgaaactgtacancancaacagtttgggagatcgaacggctcaagttgagtttcaaggaagatcttcggattcgaataagggaattgaaccgttggattggggaanttgcngtggagattaaacactggttgattaanc

SEQ ID NO: 4533 - DNA, 436 bp, Arabidopsis thaliana
  unsure at all n locations
  Clone ID: LIB22-034-Q1-E2-B5
gcaaaatctgggtattgtaanttnaaacnatggcgatgactggaactgctgcggttgctacnggaacttcgacggtgaagagaaaaccggtgtttgtgaaggtggaacatctaaagcctgtgaactactggtcacacgttgactgttaaantcattgaggctaatatcgtggttcctgttacccggaagactcgtccagcgagttctctgagtcgtccttctcagcctagtcgaatcgttgagtgtctcatcngtgacnaaactgggtgtatcctcttcactgctcntaacgatcaagttgatcttatgaanccggntgctacggtgatantgctcaattcatggatatacatgttcaagggtanantgacgctangagttgatanatggggaccatcgaaaccactggatccncgtcnttcactgtcaaaggagg

SEQ ID NO: 4534 - DNA, 484 bp, Arabidopsis thaliana
  unsure at all n locations
  Clone ID: LIB22-033-Q1-E2-H3
ccgaaaattcccnggtcgacccacgcgtccgcccacgcgtccgaagaaannnnnnnnnnnnnnnnnnnnnnnnnnnnnnnnaaaatatctatcggttgaagaagatctgaagcttaactttgctctgttacagactctcagggatctgccggctacaaagtccggtggatagtgttattattagacaatggcgtctaataatcatttcatgaacagtagatccaatctatcaacaaactctgatgctgctgaagctgagaggcaccagcagcctgtgtcaaattctgtgacatttgcccgcaggactccctctggccgatatgttaactactccaagagatgatctcgataacgaacttggaaatgtttgatttaactgggctaatcggttcaaaatcctccaactccggntaaccaacctaaggattcgtccanctctcaaaaagttgangancantatgtctcgaaatccctgttcacgggg

SEQ ID NO: 4535 - DNA, 502 bp, Arabidopsis thaliana
  unsure at all n locations
  Clone ID: LIB22-033-Q1-E2-H4
aactgttacgcctgcctgtacngcncgtaannttcccgagngtcgacccacgcgtccganaaaagcgacgccgttttaaaggagatggataaacaaccggcgaccaagttggagtatccatacccggccggagataatcgccaagtacgaagatcttcgagcgagtcggatccggagcttacgccgacgtttacagagctcgccgtctctccgacggtctaatcgtcgcgctcaaggagattttcgattaccaatctgcgttccgggagattgacgcgctcaccatcctcaatggatctcctaatgtagttgttatgcacgaatacttctggcgtgaggaagagaacgctgtgcttgtgcttgagtttcttangtcggatctcgctgcggtgatccgagatggtaagaagaagaagaangtagaaggaagggatggattcccgttggggaaattaagagatgggtgattcaaattttaancggtgttgatgccttgtcancc

SEQ ID NO: 4536 - DNA, 463 bp, Arabidopsis thaliana
  unsure at all n locations
  Clone ID: LIB22-033-Q1-E2-H5
tcgagagcattttatatcttcaatcatcttacgcaggctgttgtagcagcagtgtctatcggagacgatgaagttcaacgtcgccaatccgaccaccgggtgtcaaaagaaactcgagatcgatgacgatcaaaaactccgcgcctttttcgacaagaggctctctcaggaagttagcggagatgctctaggcgaanggaattcaaaggggatacgtattcaaagatcatgggagggatgtgacaaagcaagggttcccaatgaaacaaggaattcccaactccaangggcgtgtnccgtcctttgcctnaaccgaaggtaatccttggtttaaaggacacgggaaaggaggactgggagaagaaggagacgaaaagtcngtcccgtggtttgcaatgtgaaccctgacctgtctgttcctaacttggtcaatgtgaaagaaaggtgtaagttgatcntcccg

SEQ ID NO: 4537 - DNA, 439 bp, Arabidopsis thaliana
  unsure at all n locations
  Clone ID: LIB22-033-Q1-E2-H6
acatgtcatagatgagtcaagtaaaagaaaaccatatgcagtcacagcttcaagtggaactggagaatcaatctgatgtcatgcgttacatacccaatggtcataanaaggctttgcggcaacaaaatacggcanaaactaaagatcacttgttttctgcaaattatggtggaatgagtgggtatggagcaagtcttggngcttctacagtgggttcccatggacatgtcaacatccctaaacgaacctcctcttcancgagtctctactcaacttcagaccattcnagattangaagcgtgggcttatctgatgtcaatattangaatggaaatattaatggaacagacttctccacagctggtggttatatggcaaagaacaagttgaattcattagctgagcactattccgctgaangccacatttgactggggat

SEQ ID NO: 4538 - DNA, 443 bp, Arabidopsis thaliana
  unsure at all n locations
  Clone ID: LIB22-033-Q1-E2-H7
gcgcacttgccttaaacttctccatattcttagtaatcggaagaacaggcgctgtaacaatccgggttgctggggttctcaaagactggattctcatagccctctccactgtcatatttcctgagtccacaatcactgggctgaatataactggatatgctatagcgctctgtggtgttgtaatgtacaattacataaaaatcaaggatgtaaaagcgattcaaccaaccactgacagcctcccagatcgaatcacgaaggactggaaggagaagaattcgtcagatggggggagccccagaggattggagcttaacgatgaagaancccctctgataacgtcgcggttgtcgcatattggccggactcancttggaaacacacggcagtctganaatgaccgttaatgttgttcacttccaggtgaaaatgtctttaacccc

SEQ ID NO: 4539 - DNA, 450 bp, Arabidopsis thaliana
  unsure at all n locations
  Clone ID: LIB22-034-Q1-E2-A1
gcgtgatccaagttattgtgtattgtcactgaatttttcagcttggtctggtgatcgatttgacaaacacaactcgttactattctacgacagacttgaagaaagaaggcattaagcatgtgaagattgcatgcaagggtcgtgatgcagtgccagataatgtgtctgtcaacgcatttgtcaatgaggttaatcagtttgtcctaaatctaaaacactcgaaaaagtatattctcgtccattgtacacatggacataatcggacagggttcatgatagttcattatctcatgcgatctgggccaatgaatgttacacangctttgaaaatcctttccgatgcccgcccaactgggatctataaaccaagattatattgatgccttatactcgtttatcaccaaataaaacctgaaagcgtcatttgccatcaactcccgaaagggaaaa

SEQ ID NO: 4540 - DNA, 430 bp, Arabidopsis thaliana
  unsure at all n locations
  Clone ID: LIB22-034-Q1-E2-A10
cgctgttgtnnnnnnnnnnnnnnnnnnnnnnnnnnnnnnnnnnnnnnnnnnnnnnnnnnnnnnnnnnnnnnnnnnnnnaagtgaaaaatggncgatggtgaggatattcagccacttgtcngtgacaatggnactggaatggtgaaggntggttttgctggtgatgatgcnccnatagcagtgttcctaagtattgttggtcgtcctaagcacactggtgtcatngttggtatgggtcanaaagangcatacgttggtgatgaagctcagtccaagagaggtatcctcactctgaagtatcnantccaacatggtattgtnagtaantgggatgacatggtaaagatatggcatcanactttctacaacgatcttcgtgttgcccctgaggaacaacnaattncaatcaaaagggtaactcttaanccta

SEQ ID NO: 4541 - DNA, 503 bp, Arabidopsis thaliana
  unsure at all n locations
  Clone ID: LIB22-034-Q1-E2-A2
aactgtttacgcctgccggtancngtccgaaaattccngggtcgacccacgcgtccgatttctagtagaaagagagaagggcgtgaattcctgagcgagagattcttcgccggagtaatctctttgcgtgatcttaccggctgcttaattcgtcttcgcctgattcgttggtttcaaaattcgtctctctctttcaatcggaggttaattgtttttctgtttgggggtcaaagcgaagatggtgaacgctatggtggagagagcgacgagcgagatgctgatcgggcctgattgggctatgaacctcgagatctgtgatatgctcaatagcgatccagcgcaagcaaaagatgttgtgaaaggcattaaaaaacggattggtancanggaatccaaaagctcaaccttcttgcccttaactcctgcttgaanacaataatgaaanaactgttggtgacaatgggtcaaaaatgcaatttggcttaaaaaaaggggttaatcaa

SEQ ID NO: 4542 - DNA, 443 bp, Arabidopsis thaliana
  Clone ID: LIB22-034-Q1-E2-A5
gcggacgcgtggggaactgctctatggatctacgatgtatgggttagaggtcgatctatggtcgcttggttgtgtgtttgcagaactcttgtctcttgagcctttgttcccaggaatttcagatattgatcagatcagcagagtgaccaatgtgctgggaaatttaaatgaagaggtctggcctggttgtgttgatcttccagactacaagtcaatctcatttgctaaagtagaatctcctcttggtattgaaggatgccttcccaaccattcaggggatgtgatatcgctgctcaagaagcttatctgttatgatccagctagtagaagctactactatgggagatgctgaatgacaaatatttaagtgaagagcctcttccagttccagttcagagctctatgtgcctccgacaatgagtggaccagatgaggatccccga

SEQ ID NO: 4543 - DNA, 441 bp, Arabidopsis thaliana
  unsure at all n locations
  Clone ID: LIB22-034-Q1-E2-A7
gctnnnnnnnnnnnnnnnnnnnnnnnnnnnnnnnnnnnnnnnnnnnnnnnnnnnnnnnnnnnnnnnnnnnnnnnnnnnnnnnnnnnntctttgactttttttgacaccgtagtctctttccccttccatcgatttagggtttccgattttcaaaatctcctttttatttgtttcctctccttgtgcaattcccgtctcgaatccatcttgacctgggggtctgatccgatctccctctaatcatatcgtgaagcgagattatgtttttgtgctgcgcttctgctttgatcgcttaggattatcaatcgtgttatgatggtgggtactcaaaatttaggtggttcgttgccgccgctgaattctcctaaaagctatggaattacgaagccgctctctcttgctgggccttcttcggcggatattaagcgtaatgtggagctg

SEQ ID NO: 4544 - DNA, 506 bp, Arabidopsis thaliana
  unsure at all n locations
  Clone ID: LIB22-034-Q1-E2-B1
anactgttcacgctatgccntgtgnaaattccaggggtcgacccacgcgtccgnnnnnnnnnnnnnnnnnnnnnnnnnnnnnnnnnnnnnnnnntctcaactctgtgaaaacctcgtccttgttcttcttctgcttctcccattccttcgatttttgcttcaatggatgtttgatttgctctctgactgcgtttgtttactatactatggaccctgagagtatcatggctgctgatgggactgattctgctcctgcaaatggtggtttagcaatggaaaatgtatgtgttaaagaaaatggggctgtttctgtcgaaaccgtggacactacttcagaaagtcagaatgagaattcggcaaacagttccactttggatacaattgaacacgtcaaggaggcaactgaaggcacacaaatttgaacatgtnnatgattcaaantgtatgaaaagggaaaaaactcaaacggaaaccaaaggnatgagaaactatcaaggtgggtaana

SEQ ID NO: 4545 - DNA, 458 bp, Arabidopsis thaliana
  unsure at all n locations
  Clone ID: LIB22-034-Q1-E2-B12
gcccacgcgtccgcaactctattgattccacgcgatgacgacgttttcaacgagctttcttttccttttgttggttttctgcttgatcggttcactagctgccgatgatctccaacataaatccggtcgggacgtctgctccggtggttctgatcttagaacccccgatattcgtcttaaccggccgacagactctgtcgtcggaaactgcccgacggaggcgagtcctttagttatggctgacgacgagaagtacggtaacaaaatggttatcaagtctcactcctcgcctttatgactatgtcctcaacaacgttcgtgagcatgagattttgaagcaacttcgagaagaaactgccattagtcaaattcangtgtcacctgatcaagcgcaattgcttgcaatgcttgtanagattcttggagctaaacnatgtattgaaatttggagttaaacn

SEQ ID NO: 4546 - DNA, 438 bp, Arabidopsis thaliana
  unsure at all n locations
  Clone ID: LIB22-034-Q1-E2-B4
ggacagatccacgatccgattctggtcaaattttacatttctgcagactccatacaaggtgacatttgtttaagatactcttgttcctggaacacatacgaanatnaagaaagtcntcggacaaactgttagagaccttaagagagaggtcaacaagaaagtgctcaaagttcctggagtagaacaagaaggttctatgatgctactagtaatgagccatggggtccacatggatcacttcttgctgatcttgcgcaagcttccagaaattatcatgaatatcagctgatcatggtggtcatatggaaacgccttagcgacaccggaaaaaactggcggcatgtctataangncttgacaattttggngtacaaggtaaggcaagggtnaanaaccttgttannaccaanatttgngaacgttcatatcaaantttca

SEQ ID NO: 4547 - DNA, 445 bp, Arabidopsis thaliana
  unsure at all n locations
  Clone ID: LIB22-033-Q1-E2-H2
gcnagacgcgtgggtccgtagctttggaagatcccacaaaaacacattccatgcatcatatccttctctctctctctcttctttctcaaagagtaaaatgaaacacaatctctgatgtgaagtcggttctgtccttataaatacccattaagacttctctctctctctctttctcaccaaatagtttcatcatctcttcttcactaaatacttagacagagaaaacagagctttttaaagccatgtctcttcagtatcatgttctaaactccattccaagtacaacctttctcagttctactaaaacaacaatatcttcttctttccttaccatctcaggatctcctctcaatgtcgctaagagacaaatccaagaagcggttccatacattgttcaaaagcttcgaactcaagaatacattaattctcaaaganggtcaacatg

SEQ ID NO: 4548 - DNA, 352 bp, Arabidopsis thaliana
  unsure at all n locations
  Clone ID: LIB22-033-Q1-E1-G5
gctgaattctgaatccagaatccatcccaaaaaaaaaacatatactgtgagcttcaagtagagagggccgttcagactgaggattggattttattggtactgagagtgggaacgtagtcattcatgagttaagttttgcttggaatggtcgtgagaagtgggtcatcgtctttttccctttgcgttgtgttgtgtgatgttggtacgggttatcttcgtgcttcttgtcgaattgagtatattgtatcagtaaagaatttataacttaaaaagagccttatgtcaaatacgacgtcgttttgtatggaaatggattttttacaccgctgaaaaaaaanaaaaaaaaagggcg

SEQ ID NO: 4549 - DNA, 512 bp, Arabidopsis thaliana
  unsure at all n locations
  Clone ID: LIB22-033-Q1-E1-H3
gcccacgcgtccgaagaaannnnnnnnnnnnnnnnnnnnnnnnnnnnnnnnaaaatatctatcggttgaagaagatctgaagcttaactttgctctgttacagactctcagggatctgccggctacaaagtccggtggatagtgttattattagacaatggcgtctaataatcatttcatgaacagtagatccaatctatcaacaaactctgatgctgctgaagctgagaggcaccagcagcctgtgtcaaattctgtgacatttgcccgcangactccctctggccgatatgtcaactactccagagatgatctcgataccgaacttggaagtgttgatttaactggctantccggttcacattcctcaaactccggataancaacctaagggntcgttcnanctctcaaaaggttgaggnncaattatgtcncaaaattccttgttcnangggcgggttttaaaagggtcnactccggntcanccntaanggaaaaaagtggnttcaaaa

SEQ ID NO: 4550 - DNA, 515 bp, Arabidopsis thaliana
  unsure at all n locations
  Clone ID: LIB22-033-Q1-E1-H7
gcgcacttgccttaaacttctccatattcttagtaatcggaagaacaggcgctgtaacaatccgggttgctggggttctcaaagactggattctcatagccctctccactgtcagatttcctgagtccacaatcactgggctgaatataactggatatgctatagcgctctgtggtgttgtaatgtacaattacatanaaatcaaggatgtaaaagcgattcaaccaaccactgacagcctcccagatcgaatcacgaangactggaaggagaagaattcgtcagatggggggagccccagaggattggagcttaacgatgaagaagcccctctgataacgtcgcggttgtcgcatattggccgggactcagcttgggnaaccacacggcagtctgagaatgaccgttaagttgttcacttctcaggtgaaaatgtcctttaaccccntttggaacccaaaacagttttaaataggaatttactccggattacntaacaattgttagttctanaa

SEQ ID NO: 4551 - DNA, 451 bp, Arabidopsis thaliana
  unsure at all n locations
  Clone ID: LIB22-033-Q1-E2-A1
gcccacgcgtccgaagaaaacaaaaaaaaaaaagatctgagagagagagtttcgaaattctcgtgttcgtaagcaaaaatggtttgggagaaagagaagatcgtcggaagttgtatagtcggaggagctgcgttcgccgtcggagcttctttccttcatcttttccttaaaggtgagcttccgttaggattaggtttaggtttgtcttgtccatggcgcattttgagaaaacgaaaacctgttcgcgtttacatggatggttgcttcgatatgatgcactatggccactgcaacgctcttcgtcaagctcgtgctctcggtgaccaattggtcgtcggtgttgtttccgacgaagaaattatagccaacaaaggacctcctgttactcctcttcatgaaagaatgacaatggtgaaagctgtgaantgggtggatgaagttatatctgatg

SEQ ID NO: 4552 - DNA, 455 bp, Arabidopsis thaliana
  unsure at all n locations
  Clone ID: LIB22-033-Q1-E2-A10
acggacgatttgccgtcgtttacggagtttagtttcgaccaactacgagctgctacttgtggattctctacagacagtattgtctccgaacatggtgttaaagctcctaatgttgtgtataaaggcagacttgaagatgaccgatggatcgctgttaaacgattcaatagatccgcttggcctgatactcgtcaatttcttgaagaagcaaaagctgtggggcagttgaggaatgagaggttggcgaatttgattggattctgttgtgaaggagacgagagattgctcgttgctgagtttatgccttttgaaactctctcgaagcatctctttcactgggatagtcagccaatgaagtggtctatgaaggtnaaaatggctttgtancttgcacaagcacttgagtattgtancagcaaaaggccngccttgttcaccattttaagcctaaagga

SEQ ID NO: 4553 - DNA, 449 bp, Arabidopsis thaliana
  unsure at all n locations
  Clone ID: LIB22-033-Q1-E2-A12
gctgggcgtcgcgctgcttctccacctatcaataccaaatcatcctttgtttttcagcccttggatgagtatccaacttcatccggtggtggtcctatggatgatcctgatgtgtggaggcctcctacccgtgatgttactagtcgaagacccgccagggctggtcaaactggtactagaaaatcacctcaagatggggcttgggctcgtggccctactacacggaccggtccagcttcccgtggtggcagaggtggggctactagtaagtcaactgcaggtgcccgctcttccactgccggaaagaagggagctgcctcaaaatctaacaaggctgagtctatgaatggtgatgctgaaagatgggaaatcaaaaaagggaattgtattaagggacctgatnaaggacttgctgctaagcttgaaanggaatttgttggctcaactnc

SEQ ID NO: 4554 - DNA, 437 bp, Arabidopsis thaliana
  unsure at all n locations
  Clone ID: LIB22-033-Q1-E2-A2
gaaaaacaaaaaactagctcatcgtcgtcatgtcgtctctgtctcctccaccgattccaatggaactccacgccggtaaccggaaaaagttactagaatcaatacgccgtcagttatctagttccaatcgttctctcgatggatttgttcttctacagggtggcgaggagaaaaatcgatactgtactgatcacaccgagctcttcaggcaagagagttattttgcttacttgtttggagtcagagagccagatttctatggagctattgacattggaagtgggaaatctatcctttttattccaaggttgcctgatgattatgctgtttggttgggagagattaagccattgtcgcattttaaggaaacatatatggttgacaaggntttcnatgtggatgagattaatcaagtccttaatgaacaatttaangga

SEQ ID NO: 4555 - DNA, 498 bp, Arabidopsis thaliana
  unsure at all n locations
  Clone ID: LIB22-033-Q1-E2-B1
ttaaactgtccagnaggcgtccgaaattcccaaggtcgacccacgcgtccgctcgactctgttccaagaaattcctctacttaatacagctgattctacagattcctgctacgaaatttctgggtctgggttgatctttgtctcaccagtcaacccaattcaggactttgataaaggtggaaatggcggctttattagcttctcagagctgctgctatggcggtgagaccgcaagagtcaccaaagctattggtttcagtagctctttggagaatcatttcactggggaagccactcagtgttatggcagcaagtctaagagatttcgtattgagatgagacagtcggaattgccctctaaggttggaatcaatggacgttcagtcaaaatggttcctgcgagtgaggtggtgaagaggaaagatggtgtgaatggatcggctgggaaaggtgttaatggagcaatttggttaatagtagaaacattaatggtgcggc

SEQ ID NO: 4556 - DNA, 467 bp, Arabidopsis thaliana
  unsure at all n locations
  Clone ID: LIB22-033-Q1-E2-B10
gctcttcccatctcgagatccgccgttaaactctttttgcccaaactctgagnnnnnnnnnnnnnnnnnnnnnnnnnnnnnnnnnnnnnnnnnnnnaatcacagagagactctcttctccagatctatcatttggtttaatcaaggttagctagtgaacatggcaacgggggctgagaaccaatggcttaaaggaagagtgaaggctgttacctccggagactgcttagtgatcacggctttgagccacaacagagctggacctccaccggaaaagaccattactttttcttctcttatggcacctaagatggctcgcagangaagtatanatgaaccttttgcatggggaaagcaaagaanttttgaagaaacttgcataagaaaaggaggttcaatcaaaattgaataanaagtggnaantaattgctggnaaaaaaatttgngcccgttttccttggaaaaaaa

SEQ ID NO: 4557 - DNA, 470 bp, Arabidopsis thaliana
  unsure at all n locations
  Clone ID: LIB22-033-Q1-E2-B12
gcttggagcgacctcgggttgtgtttttgggatcattacttggctaactaccgcaaagacacagtacggacgcgttgatcttgatagcaccgggaaaaatggccctatgttagctggtaacctcgttgcgattctaacaggggggttgatccatgcggtgtgtagtctagtccggccacagaattacgattggtcgacgacgagggagatcaaagtagtggaagcgtatgcttcaggggacgaagatgttgatgttcctgccgaagagctaagagaagagaagctgagaagagccaaagcttggattgtgaaatggggtcttgtcttcactatcctcattgttgtcatttggncaattctctctctcccaactcgcgtanttagcaaaggatattccgggttttgggcaaattgtggcaatanccttggggaactatanggttcatccgtgataattgggtttgccaatg

SEQ ID NO: 4558 - DNA, 450 bp, Arabidopsis thaliana
  unsure at all n locations
  Clone ID: LIB22-033-Q1-E2-B3
gggtaaaactctctcacaaagcaaaaaaaccaaacctaaacaaaaatctagaaagaaagatttccgaaaatctttttaatgaaaaaagagcagacaggacgagaattcgcttttctgaatcctttagagtattgttttctccgtcgaattcgcatgaacacttgagctcaacaagacggcgtggaagtggacggtgaggtagttttttttagtttttgaaagacatggcgcaaaacgggtacttggttccagcggatccttcggcggttgtgacggtgaagaagaaaacgccacaagcgtcgtgggctcttattgacgcgacgggacagagtgagccactcgatgttgataagtatgagatnatgcaccgtgtccagattcacgctcgcgatctccggattctagaccccaatttatcttaaccttccactattcctgggcgaaagagag

SEQ ID NO: 4559 - DNA, 435 bp, Arabidopsis thaliana
  unsure at all n locations
  Clone ID: LIB22-033-Q1-E2-B5
tcatttgcttcgtgtgcgatcgcgagaacaagggaaaattagggtttatatcctcaagctttttcgaacaccattgatcgttgatctaagatttttcttctagtcgagtttcttaaggggctttgatcaaactcaaaattgaagaccaatactttgaaggattctggtaaagctaagcaactatgagttcaaattcatgggctgatgtttctgaatcagagagggcaccatctggtggtggttggggttattctcgtccgtctcgaaccaactatgttcctccacatcttangagccgtacaccatcttcggagtttgttgctccttcacctggtaataatgatcgtgggggatatggtggtgcaaataatggttatggtggtcgaagccaaggttatggtggtcnaagttcgggctatggtggtagaagaagtc

SEQ ID NO: 4560 - DNA, 502 bp, Arabidopsis thaliana
  unsure at all n locations
  Clone ID: LIB22-033-Q1-E2-B6
aactgttcagccngcctgtaacggtccnaaattcncgggtcgacccacgcgtccgaattcatagtgctgcttcntcntctctctgagactctcacaaaatanaaacacagagatcgntannaagctttnagctccagatctgtggaaccgccatagctatggagttttagagaagttcnaggaaggattacaaattcttggatctgtgattcttctgctctctattcatgtcgctcactctttttaccttcctggtgttgctcctcaggatttcgaaaagggagatgaattgaaagtgaaagtaaacaagttgacatctataaagactcagcttccatattcgtattactctcttcctttttgtcgtcctaagaagattgtggacagtactgagaatcttggtgaagttcttcgtggtgaccgaatcgaaaatgctccttattcgtttaaaatgcgtgaggcgcaaatgtgtaatgttctcggtcgtgttatgcntgatgca

SEQ ID NO: 4561 - DNA, 537 bp, Arabidopsis thaliana
  unsure at all n locations
  Clone ID: LIB22-033-Q1-E1-G1
gatctccttcttcttctccttctcaaatcntttttttcaggcgtaacgaatcgaatcataaacacttacgcagaaacaaaaactaaactttggatcttttaaccgaccatagagattcgtgggttcttcttagtttcgacagattcttgatccgttttagttgttacgctcatctttgcttttatacatcagacccttctcttctcttccttctttatctaagaaacattagggttctttgaaatcttgctaaaaaaaatgggtgttgagaaaatggtgtgtttagcttctcgtacgggtcgtcagtttcaagagatacaacanagggtcgtcgtcaaagtcnttggatgtgttccttaacagattcaangctatccnatgatgggnaaatnagtgangaagtagnaagnttcttggttaaccccttcccaaaaaaagggcacgcccttaatggttnccccaaangggtgggttggggaaccttgatgaaatcgggtngaaagaannctgnatcaaggagaaaggtcctggaagaaa

SEQ ID NO: 4562 - DNA, 503 bp, Arabidopsis thaliana
  unsure at all n locations
  Clone ID: LIB22-033-Q1-E1-E3
gcaacgccaaattggtattactaggagatgttggagctggaaaatcaagtcttgtgctacggtttgtgaaagatcagtttgttgaatttcaggaatcaaccattggtgcagcttttttctctcaaacattggctgtgaatgatgcgactgtgaagtttgagatatgggatacagctggtcaggaacgataccacagtttggctccaatgtactacaggggtgcagctgctgctattattgtctttgacattactaatcaagcctcatttgagagggcgaagaaatgggttcaggaactgcaggcacaaggtaaccctaatatggtgatggctcttgctggaaacaaagctgatttattagacgcaaggaaaggtgtctgcagaggaaggcagagatatatcctcaagagaacaagcctttnctttatgggaaacctcaacgaaagaccgcaacaaaatgtcaaagacatattccancgaaataaccaaaaaggctacaacntt

SEQ ID NO: 4563 - DNA, 510 bp, Arabidopsis thaliana
  unsure at all n locations
  Clone ID: LIB22-033-Q1-E1-E4
gctctctcttctcttttcaagtcttcttcttcattactcgcaccatgaccaaaccctccgacccaaccagagactcccacgtggcagttctcgcttttcctttcggcactcatgcagctcctctcctcaccgtcacgcgccgcctcgcctccgcctctccttccaccgtcttctctttcttcaacaccgcacaatccaactcttcgttattttcctccggtgacgaagcagatcgtccggcgaacatcagagtatacgatattgccgacggtgttccggagggatacgtgtttagcgggagaccacaggaggcgatcgagctgtttcttcaagctgcgccggngaattccggagagaaatcgccaaaggcgggagaaggangttggtaccggaagtgaaatgtttgatgaactgatgccttcctcctgggttccccggctgataatggccaacggagataaaangcctccttganntngcgnttttgggaccgccggagcaaantcaatc

SEQ ID NO: 4564 - DNA, 530 bp, Arabidopsis thaliana
  unsure at all n locations
  Clone ID: LIB22-033-Q1-E1-E5
gaaatcgaaatcacagatgaaagcgaacatgtcgtcgtcgtcttccactcgatacagatccttcttcgtcttcccaattctcttcgccgtcttgttcctgggacttctgattccctcctccgccgataaccgccacgttatcaacttccgatcgccgggactctacccggagggactaacctgggatccaagggaccagcattttctagtcggttctctccacagccgcacaattcattccgtctccgacgctggagtcatcgaaaccctaatctccgatctcgatctaccggagaactccactatcctcggtctcgccgttgactctactaatcgccgtctccttgcctgtatccagagtttgccgcctctccctcccttcagtgccctagcctcctaacgaatctccggnagcggaaggccgttcgtgtaancctctctccgtctccncgttctccntcccgggagaacgaacgaangaacatcggctccggtgnaagtcngncaaatgaacgttggncggggtttga

SEQ ID NO: 4565 - DNA, 490 bp, Arabidopsis thaliana
  unsure at all n locations
  Clone ID: LIB22-033-Q1-E1-E6
ctttttattatggttttcaattatgcagtttccggataaaaaaaaaaaaaaaaagggcggccgctctagaggatccaagcttacgtacgcgtgcatgcgacgtcatagctcttctatagtgtcacctaaattcaattcactggccgtcgttttacaacgtcgtgactgggaaaaccctggcgttacccaacttaatcgccttgcagcacatccccctttcgccagctggcgtaatagcgaagaggcccgcaccgatcgcccttcccaacagttgcgcagcctgaatggcgaatgggacgcgccctgtagcggcgcattaagcgcggcgggtgtggtggttacgcgcagcgtgaccgctacacttgccaagcgccctagcgcccgctccnttcgctttcttcccttcccnttctccgcaacgttcggccgggctttcccccgtcaaggctctaaatncggggggcnccctttaagggttcccgaattaagn

SEQ ID NO: 4566 - DNA, 463 bp, Arabidopsis thaliana
  unsure at all n locations
  Clone ID: LIB22-033-Q1-E1-E8
ggaagaaagaaggaagacgatgatgatgctcagaatccgaagcagagatggactggagagagtcacagcggagggagctcatatcactgtttcccagctcaaaaccttgatcgcggatcagcttcagatccctctccataagcagaccttatccaccaatcgtgatctcctcctcgccaaaactcccgctgatctactcgccttcaccgacctcacggacccaaacctccccctctcctctctcaacctcggccatggctctatgctctacctcgcctacgatggcgagcgctccattcctggaagctcctcccgttactcctgccggatcttcgggaaggaagatgaccgtcgatgacttgatngcccgccaaatgcgcgtnactcgtcaggagactctcatgcaatccgtcccttcgattgcgaatgccgccaangctttcaacaataagtnaatgagtcc

SEQ ID NO: 4567 - DNA, 503 bp, Arabidopsis thaliana
  unsure at all n locations
  Clone ID: LIB22-033-Q1-E1-F2
caaacccgaaaacaaagaacattcgtctctacgtgaagcgtgtgtttatctctgacgattttgatggagagcttttcccgagatatctgagctttgtgaagggagttgtggactctgatgatcttcctcttaatgtttctcgtgaaattctccaagaaagcagaattgtaagaatcatgagaaagaggctcattaagaaaaacctttgacatgatacaagaaatctctgagagtgaaaacaaagaggattacaagaaattctggganaactttggnagattccttaaattgggttgtattgaagacaccggtaaccacaagcgtatcacaccgctacntagattcctcagttccaagnaatgaagaggaantgacaaagcttgggatgattaaatcnaggaacatgggagagaacccgaaaggggatttaacaaccccnccaactngnaantcctnaaagngnaaatttggcccctttcttnngggaaaacattcccnaagaa

SEQ ID NO: 4568 - DNA, 563 bp, Arabidopsis thaliana
  unsure at all n locations
  Clone ID: LIB22-033-Q1-E1-F3
gctccatttggaaatccagatcatgctctagagccctagtttagatctcgaaggaagacaatgggacggatcttcgagtacttcgtcgtgtgcggacttggtccagagatgcgaaccgtggatggagatcttggattccatggaatgcaaacattctacttgcctgctcttcttgaccagttccctcctactgatcaatctccttaccctgcccctcctcctcagcttcctacttgtgttcttcctgctggggtggagttccattcttctggttttgtttccagtgaccctgcaagtttcccacggagctatccccataagtccttgaacgggaggggtgatgggattaaaaaataatttggtcaagtttgcaattggcaantttccgggggaatncnaantcctggttgaagggaataattaaattggaaagccttaaaccgcctttaaccggcccgaaattacattacgcaagnaccaaagttggtaacccggtccctgggggtccccaaaggccccccaaantttcccgtgggttccntccgtaaattcccccccaaana

SEQ ID NO: 4569 - DNA, 532 bp, Arabidopsis thaliana
  unsure at all n locations
  Clone ID: LIB22-033-Q1-E1-F4
gcaaaaacttgcggactccanagtgagtgtgagaatcggagatgtctttttcagtagtagcagctttaccggtgcttgtagcagtagtggtactgtggacatggcggatcgtgaagtgggtctggataaaaccaaagatgcttgagagttctttgaaaagacagggtcttaccggaactccttacactcctctcgtcggagatataaagaggaatgttgatatgatgatggaagcgagatctaaacccatcaatgtaacggatgatatcaccccacgtctccttcctcttgccttaaagatgctcaattctcacggaaagactttcttcatatggattggaccacttccaacgattgtgataacgaatcctgagcagtnaaaggaanccttaataaantcaacgactttggagaaanncttccaaaatccccttngatcaanattggtaaccagggtgggncttgcaaatttaccaanggganattaaatgggccnaantcnnaagggaggnttnatcaaacccgggctttt

SEQ ID NO: 4570 - DNA, 490 bp, Arabidopsis thaliana
  unsure at all n locations
  Clone ID: LIB22-033-Q1-E1-F5
gggtgaatcgagtcatggtgctcactgagctcgctgcgttgtattactcaggtactgtagttgctaaccaatggctcaaattctcgtcgaatttaccatcgaaacctagaagtcctgtgttaatgtctagctcggttttcgcattgtgtgatgttggatctccatggagaagtcaatggaagcttttctcatgtaaattgacgaatctcacaatcactcataccaattgggtttgcttggagaaacatgaatggggtgatatattcgatatcatcaaacgaccgcgtttattgcgcggtaacggtgattctaagcttcttatgatcggtggattgaaatcgacgttttcgttgaacccggcttgttcaacgattctgatacttaggcttgatctagaaaccttggantggaaagaancaagtagaatgccgttanagatgtnccgaaggtttcaagaatcnagtaaanttaaaagtttttggaggtggan

SEQ ID NO: 4571 - DNA, 510 bp, Arabidopsis thaliana
  unsure at all n locations
  Clone ID: LIB22-033-Q1-E1-F6
gcccacgcgtccgcggacgcgtggggcctgtgactgccgttgtcgattccagcagccgagagtttcagctttatgaatcgggagtgtttgacggaacttgcggaacaaacctaaaccatggtgttgttgtggtcgggtatggaaccgagaatggtcgtgactactggattgtgaaaaactcgaggggcgacacatggggggaggctggctacatgaagatggctcgcaacattgccaatccaagaggcctatgtggcatcgcaatgcgagcttcataccctctcaagaactcgttttctacggataaagtttcggttgcctaataatatgaactaaatgtatgccatggaacggatcggttaagccattatcgttattcgactttgaaggaaactaaaaataatggtggccnattggtttggtttggtaaaaaataagccattggtatgggggcaatccaagnttgaaccttggaaaanaattccttgggtccaagtgataataatttnc

SEQ ID NO: 4572 - DNA, 509 bp, Arabidopsis thaliana
  unsure at all n locations
  Clone ID: LIB22-033-Q1-E1-F7
gctctcattcactaactttctctgcttctctctatctttctctgtgcataccaactctaaagtctctcatcaatggcggctcgaaaactagggtcgttgttacgtcaatactttttctctctatgcttcctcttcctcggttgcttcttcttccctaaagacgcagactataaacaaaagagaagaaagaagaagcttagaagagtnnnnnnnnnnnnnnnnnnnnnnnnnnnnnnnnnnnggacgtatttaaaacgagttttcttatccacgacaaggatatccaaatcccgtaaccaaacacatcctaacgttactttaacatccgcaagatatctcaaaactccctcgtcactctcgtcnaacccgataccacaaaccaacccgacccggaaacacgtattcatcagcaaaccggaattcganatccctccttcgacgagattttcccttgnaacncgtggnggcnaaattttcccaaanatcaatcccctcgagaatcanatcgc

SEQ ID NO: 4573 - DNA, 514 bp, Arabidopsis thaliana
  unsure at all n locations
  Clone ID: LIB22-033-Q1-E1-F8
gatcatcttatcttcacaagaagaacaagaagacgaaagatgttgtagctgataaagtcaaaacagaagtcaaggaagcaaaaacagaggaaatcaagaacacagagcctgaaacagagcaaaaacagagctgtgttataaacgagaatctgaagaagatcgctagaccggatcatttcttgcctgtgactgtgatcttggttcttgtgtttttggctttctttggaagatctgtagcgattatgtttacttgtatcgcttggtacttggttccaacgattcaagaacagagtggaaacagaggatcatcaccgtcttacgcgatgaagaagaaagatttcgctaggaaattgagtattgaaaacagaacatcgtttaatccaagaactggtccgtgatcattcncctcgcaagtnngaagaaatttctaantttggncngcncnntgaaaaaaaaccgcgttgaccgaaccnaaaacnttttttcccttggtcaaaaagttttttngggcccc

SEQ ID NO: 4574 - DNA, 507 bp, Arabidopsis thaliana
  unsure at all n locations
  Clone ID: LIB22-033-Q1-E1-E2
gaaagaagaaacctttttgattctctttgcgatttctttgttcaatctcttctcagattgtgtgaatcgggtttaaatcggggttttagggtctctgttttcaaaagggtaccaaaaagtttggagctttactgtagaaagatttgatttttcgttgacccactccgagattttcggatacaaatcagggttttagggtttttgttggaatggaagaggattatcaacagccgaggtttacgattggtaggcaatcatcaatggcgccggagaagattccggagccgtcggttcactcagaagaagangtgtttgaggatggagaagagatcgatggtggtgtgagactaatgtatttggctaaatgaangtgacattgaanggattaanggagcttattgaantccagggaattgatgncaaattnccggangacattggattnatncgggncngncnttacnngttggcnggcnttgtcaanggattggaaangaaagtttgttg

SEQ ID NO: 4575 - DNA, 496 bp, Arabidopsis thaliana
  unsure at all n locations
  Clone ID: LIB22-033-Q1-E1-C4
tcatcttctcctctttagcctttcgacaaaacacaacccacgagttaacttccatggccacgcagacaccaaccagcgtcgacagacatagacagtaaccgagctttgcgtacgaccttccttcccttaaaacctcaaacccttggaacacattcaccacgcccatcaccacacacgcgtacccgacaaaatgatggtaagacttccagtacctccggaacttattggtcgtctttggtctgaacagcaaagccagtgtttgcagcgccgctgctgtgaaagtagctatcccgaggctccgatgtaacccataggtcactccaggggaattatggccgagcacgattccaatggagaagccaatggttcctanggaggaaaccgggttagctgtattgctgcgtgggatgtagaancaagttgggtcctantgattgcaatttgggcggaggtaaccaactgttancggctnccgccgggganggagaaaaacccc

SEQ ID NO: 4576 - DNA, 513 bp, Arabidopsis thaliana
  unsure at all n locations
  Clone ID: LIB22-033-Q1-E1-C5
ggatcacttgaacacttanaaaaaatattttgctcttctttctatatatttatnnnnnnnnnnnnnnnnnnnnnnnnnnnnnnnnnnnnnnnnnactcattttctccgcagagaaaatacaatccatggcttctacttttaggctctctattagcttcctcactctcatcctcttctctctgtgggtagtggaggcacacacgtctagaaagttgatatcaatcaaggaaaaagaaggtcaagatattantcatttgctcaaagatggtgaatttgatgacccttcgttgtacatgtatttcacactcaatgatctcaaactanggaaccaaattgctgatttacttctacaagaaacgatcttcaaaagcttcntcccacttctcagangacancaagccgatctcagncctttcactaagtcaangccntgacgnccttcctcgancnagntcncnatcagnanngactcncgtcaangggaaangcnttaggggggacnttggggacctt

SEQ ID NO: 4577 - DNA, 500 bp, Arabidopsis thaliana
  unsure at all n locations
  Clone ID: LIB22-033-Q1-E1-C6
gaaatagagagagagagtgacagaggagtgtgtgaacatcctttttttagtagatttgggttttcgagatgccgtattgaatcggctacgaatttcccaattttgaattttgtgaatctctctctttctctgtgtgtcggtggctgcgatggaggccagtgccggcttggttgctggatcctaccggagaaacgagctcgttcggatccgacatgaatctgatggcgggtgcagaccaaacctttgaagaatatgaatggccagatatgtcagatctgtggtgatgatgttggactcgctgaaactggagatgtctttgtcgcgtgtaatgaatgtgccttccctgtgtgtcggccttgctatgagtacgagaggaaagatggaactcagtgttgccctcaatgcaagactagattcagacgacacagggggaatcctccgtgttgaaagganatgaanaataaggatgatgttgatgataccganaatgggttcaatta

SEQ ID NO: 4578 - DNA, 490 bp, Arabidopsis thaliana
  unsure at all n locations
  Clone ID: LIB22-033-Q1-E1-C7
ggaataacgaatcgaatcgggttgtcgaaacgcctaattcaattgagaatgctactgtttctggtggcgggtttggtgtttccgggtcgggtaatttcccgagacctgagatgtggggaggtgatcctaatatggggtttaggccaatgatgaatgcaccaagaggaatgcaaatgatgggaatgcatcatccaatggggataatgggtagaccaccaccatttcctttgcctttgccgttgcctgtaccgtcgaatcagaagcttagaagtgaggaagaggatttgaaagatgttgaggctcttttgagtaagaagtcttttaaggagaagcaacagtctaggacaggtgaggagttgcttgatctgattcaccgtccaaccgctaaagaagccgctactgctgctaagtttaaaagcaaaggaggatacaggttagtatactgtagtatttaactaaagangattgcctctcaatccgggtccanaaa

SEQ ID NO: 4579 - DNA, 520 bp, Arabidopsis thaliana
  unsure at all n locations
  Clone ID: LIB22-033-Q1-E1-C8
gagagaatcgtctctctggttcgttgagtcgtgagattaggaatctctcaagtcttgttcgtcttgatgtttcttggaatttgttttccggtgaaatccctgatgtgttcgacgaattgcctcagttaaagtttttcttaggtcagaccaatggattcattggaggaatacctaaatcgttggcgaattcaccgagtttgaatctgcttaacttgaggaacaattctttatcgggtcgtttgatgttgaattgtacggcgatgattgctttgaactctcttgatttaggtaccaatagattcaatgggaggttacctgagaatctaccggattgcaagcggttaaagaacgttaacctcgcgaggaacaccttccatgggacaagtaccagagagtttcaaagaacttcgagagcttatcctacttcctcgttaaccgaaatccaagtttgggctaatatctccttcagcgcttgggaatacttcangcattgcaaagaactttacgaactttgggtcct

SEQ ID NO: 4580 - DNA, 522 bp, Arabidopsis thaliana
  unsure at all n locations
  Clone ID: LIB22-033-Q1-E1-D1
gcncacgcgtccgcccacgcgtccgaaaggagggaagaaaaaagttaggttcgaaacgaaagtaaactagttaggtgaaaagcgaaacaacacccacacgagcaatggcccctgctctcgccgttacacgagatctcaccgccgtcggatctccggagaatgctcctgcgaaaggacgtgcttcggtttacagtgaagttcaatcaagccgtattaacaacactcttcctttgccttctgttctcaaaggagctttcaaaatcgtcgaangtcccgctagttccgccgccgggaatccagatgagatagcgaattgtttccgggtctatatggccaagccatcactagcantggttccaggtcaggatgcaccttcgtccggcaccgatatngaagattggtgttnttttggcnggnnnggtcaaggcaaccttggcngggnacaaattgtnaanttcngggacctgnttngattacctgcananaaccttgcgaaaaaggtaaccacantttacggggttc

SEQ ID NO: 4581 - DNA, 508 bp, Arabidopsis thaliana
  unsure at all n locations
  Clone ID: LIB22-033-Q1-E1-D2
cggtatattgatcttcgccggaggatatggcgatttcagaagaagaagccaaactcgaaaggttcctaggattggcttcaggtgaatggaggtgaattaagaggctgcaacatcaaatattctgactccctaaaaggatttggcanattcgcttccacctccactcaagcttccgatgaagttttgcttgttgttccgcttgatctggccattacccctatgagagttcttcaggaccctctcctgggccctgagtgtcagaaaatgttcgaacaaggacaagttgangaccgctttctcatgantctgttcctcactttggngcgtcttcgtatcaattcntcttggaanccgtatcctgatangcggtctactcgatttggcaacctcnttggatttctgatgatnaatcntttagcctaaagggataaanntgttcncggcaaccgagttacagaagaagnngttgctcccngnttnnccatgaccaagggganggtcctgggta

SEQ ID NO: 4582 - DNA, 509 bp, Arabidopsis thaliana
  unsure at all n locations
  Clone ID: LIB22-033-Q1-E1-D3
gattgggtttgggatcaagtgggcaaaccaatatggatccttctccgatcgctcagggaaatgacgatgacacaccggcgccggggaatcagtttgcccaattcggagctggatgtttctggggtgtcgagctggcgtttcagagagtcccaggggtgactcagaccgaggctggatacacccaagggaccgtagacaatccttcatacggagatgtttgttctggtaccacaggccattcggaggttgttagggttcaatatgatcttaacgattgcacctatgagtctctgcttgatttgttctggtctaggcatgatcccaccactttgaatccccaaggggaaatgacnttgggaacccaaatacagatctggaatatacttctacacacccganncaggagaaactancccgtgagtcacttgaacgtcaccagcaacanattggnggaagaaagtnnatgactgaaatccttgcaactangaaattccacanagctgaagagc

SEQ ID NO: 4583 - DNA, 502 bp, Arabidopsis thaliana
  unsure at all n locations
  Clone ID: LIB22-033-Q1-E1-D4
gcttttttttttgtgtgtgcaaaacgtctctctctctgtctcataaaatctcagagaagaaacatcgtcgggtcaggtcgaagaaaggagagaaatgagtggtcacgattcgaaatacttctccacgacgaagaagggagagatccctgagctcaaggaagagcttaattcccagtataaggataagagaaaagatgcagttaagaaggttattgcggcgatgactgttggaaaggatgtttcatcacttttcactgatgtagtcaattgtatgcaaacggaaaatttggagttgaagaagcttgtttacttgtatctcataaattatgcgaaaagccagccagatctgctaatccttgcagtaaatacctttgtaaaaggattcacangattcaaatnccgctgaatcgtgcctttgggctgtnccgggacaatggggctggcattcnnggttntgagaaaaancccnggnannanccaaggggntccccctccaaaaagt

SEQ ID NO: 4584 - DNA, 481 bp, Arabidopsis thaliana
  unsure at all n locations
  Clone ID: LIB22-033-Q1-E1-D5
gcaccgatgtaaaggtaagaggaagagatttgattgaatgactcattcattgttagtttttggctatgtttaggattatgttctaataagtgttcttttgctgttttcagatgagtcctacagatgaagatgaattctctatttacaaacagagaagcactcatatgagaaaccattctttagaagaggatttggaggctgagaagaccatttcctttcaagataaggttgatccaagtggagaagaacaaactctgatgagaaatgagtccatctcaagaaagcaaagcgatctcgagacaccggaaaagatggaatcatttagcacatttggcgatgaaatccaatccgtgggatcnnnnnnnnnnnnnnnnnnnnnnnnnnnnnnnnnnnnnnnnnnnnnnnnnnnnnnnnnnnnnnnnnnnnnnnnnnnnnnnnnntcaatgccttcagagcaaaactcaactagaaggagaagaan

SEQ ID NO: 4585 - DNA, 488 bp, Arabidopsis thaliana
  unsure at all n locations
  Clone ID: LIB22-033-Q1-E1-D6
gcaccgttctgattactgattcttcattgacggtaggagtcaccacttttggcggcgattccttgttctctattttttttgcacaagcaacatttagcttctgcaaactccagttcatctctcaaccctcatatcgccgtgttttctcgctctagtaccgcgagctcggacgaaccaggaagcaatccgttaatctagaagcggtgttgagaagatgacgattacatcaaatatctctgtacagaacgataacctcgttgttcaagggaagactatccttaccaaaatccctgacaacattatcctaactccggttaccggtaatggattcgtttccggttcatttataggcgcgacgtttgaacaaagcaagagtcttcatgtgttccccatcggtgtattggagggtcttcggttcatgtgctgtttccggttaagctatggtggatgactcaganatggaaactgtggaaagaaatcccttggng

SEQ ID NO: 4586 - DNA, 504 bp, Arabidopsis thaliana
  unsure at all n locations
  Clone ID: LIB22-033-Q1-E1-D8
gatcaaaattcacaccgtgcgattttgagattgttctctgattggcttaatccgagagaatcaaggaattgaatggccagtgaatcagatgcatcgagcattgctactctttcctgtgctcgctgcgagaagcctgcacatcttcagtgtccgaaatgcatagacttaaagcttcctcgtgaacaagcctctttctgcactcaagaatgtttcaaggcagcttggagctcgcacaaatcagtacatgtgaaagctcagctgtcttcaatcggtgatcagaactctgatcttatttctcaaggctggctctattgcgtcaagaaaggccaggctagaacacctaagcttccacactttgattggactgggcctctaaagcaatatcccatatctaccaagcgtgttgtgcctgctgagattgngaaacctgactggggcaantggatgggancccaaaanttgaaaccgaanagtgntttaanaacaggttgtttaggnataaaa

SEQ ID NO: 4587 - DNA, 499 bp, Arabidopsis thaliana
  unsure at all n locations
  Clone ID: LIB22-033-Q1-E1-C1
gctcacacaagaaaacaaaatcatgtctcgatttgctatcttagtaaccttggcacttgccattgccactgtttcggtggttatagctcaagtccctccggagaaacaattcagagtcgtcaacgaaggagaattcggtgaatacatcactgagtacgacgcaagttacagattcatcgaatcatcaaaccagagcttcttcacatcaccattccagctcttgttttacaacactacccctagcgcctacatcttagctctccgagtcggactcaggcgtgacgagtctaccatgcgttggatatgggacgcgaatcgcaacaaccccgtcggagaaaacgctacactctcactcgggcgttaacggcaacctcgtcctcggctgaagctgacggacgaatcaaatggcagactaacacaggctaacaaaggngtcaccggattccaaatcttaccaangggaaacatcgtcctacacgacaaaaacgggaaantcgta

SEQ ID NO: 4588 - DNA, 392 bp, Arabidopsis thaliana
  unsure at all n locations
  Clone ID: LIB22-032-Q1-E1-A5
gcccacgcgtccgcggacgcgtgggttttcttttccttcattctactaaaacagaggtttttgcctcttcctctcttgtttcactctttagggtacacacaaattcactcttttttcttctttgtttgggaggggaaaagttacagttttttcctctgttttggatcaaaatttcgtttttttggttgtgttaagaaagcaacagagagagagagaaagattgaaactttggatgtgaatttagggttttgtgaattggggaaaaagcaatccagagatggctcaacagagacaatttcagatggaaggtggtaataataatacaacagataccaagttgacgaaaatctttgttggaggattagcttggggagactcaagagagatacnat

SEQ ID NO: 4589 - DNA, 420 bp, Arabidopsis thaliana
  unsure at all n locations
  Clone ID: LIB22-032-Q1-E1-A8
gatcctcatccctccgattctcacccgtcgtannnnnnnnnnnnnnnnnnnnnnnnnnnnnnnnnnnnnnnnnnnnnnnnnnnnnnnnnnnnnnnnnnnnnnnnnnntaancgatcgagtcttcctcgacttctccctctgccccacctacttccgctcagatccctccgcgacactctcctccaccacaccttgctccgattcaactcctctcggccgcgtcgttctcggattatacggccgtcacgttcccataaccgtctcaactttcaaacgtatgtgtacttcatcttccacatcttacaaaaacacacctgtccacaaaatcttccctggtcagtattttctcgccggaagacaangangaggacggcgaagatacngcgganggttggttantcagcagagacttacctcgtn

SEQ ID NO: 4590 - DNA, 443 bp, Arabidopsis thaliana
  unsure at all n locations
  Clone ID: LIB22-032-Q1-E1-A9
ggctacaaagtggcggtggatgctgaggaaggaagacggaggagagaggacaacatggtcgagatccgtaagagtaagcgtgaagaaagcttacagaagaagcgtcgtgaaggccttcaagctaatcagctacctcaattcgctccttcttctgttcctgcttcatcaactgttgagaagaagttggagagtttgcctgctatggttggtggtgtttggtcagatgatagaagtttacagcttgaagcgactactcagttccggaaattgctttctattgagcgtagtcctccgattgaagaagtgattgatgctggtgttgtgcctcggtttgtggaatttctcactagagaagattatccacaacttcagtttgangctgcttgggcattgacaaacantgcttccggggacttcagagaatacaaaaggtgggtcattga

SEQ ID NO: 4591 - DNA, 431 bp, Arabidopsis thaliana
  unsure at all n locations
  Clone ID: LIB22-032-Q1-E1-B12
tanggaagactcagatgaacgagcaacatgatgctagtggaaacacgcatgtcgctgagcttactattttggatgttaaaagctctcgggaggtttcattcctcttagatcatgctgctcgtaacaggtctgtagggaagactcagatgaacgagcaatcttccagaagccattttgttttcacgctaagaatctctggtgttaacgagagcactgagcaacaagtacaaggtgtcttgaacctgattgatcttgcggggagtgagcgtttatcgaagagtggatcaaccggagatagacttanagaaactcaagcantcaacaaaagtttgtcgtcgctangcgatgtcatattcgccttagcaaaagaaaggaaagatcatgtaccaattccgaaactcaaaagctcacatatcttctcaagccntgct

SEQ ID NO: 4592 - DNA, 412 bp, Arabidopsis thaliana
  unsure at all n locations
  Clone ID: LIB22-032-Q1-E1-B3
agcagcaacaaaaaaaaaacatggagaaacagaacattatctcaaacacttcttcttcttcgtcttcttggattcgtggttcttgtgttggaagaggttgttttggtacagtaagcaaagctttgagtaaaatcgacggtggacttttcgccgtgaagtcgatagatctcgccacgtgtcttccttctcaagcagagtcgttagagaacgaaatcgttattctacggtcgatgaagtctcatccaaacatagtgaggtttctcggtgatgatgtgtctaaagaaggaacggcgtcgtttcgaaatcttcatttagaagtattcaccggaangtgacgttgctaacggtggaatcgttaacgaaacgcttctcaagcgttacgtgttggtgtcttgtcnccggctttgagtca

SEQ ID NO: 4593 - DNA, 425 bp, Arabidopsis thaliana
  Clone ID: LIB22-032-Q1-E1-C1
gctcactcatgttaaggagcttatcaaatggggaactgattactttctcaagactttcaatagtactgctgattccattgatgatcttgtgtcacaggttggatcagggaatactgatgatggaaatacagatcctaatgaccattactgttggatgcgacctgaggatatggactataaaaggcccgtgactacttgtaatggtggatgttcggatctcgctgcagagatggcagctgctctggcttcagcatctattgtattcaaggataacaaggaatattctaaaaagcttgtccatggtgctaaggtggtgtatcagtttggaaggacgaagagaaggagatatagtgcaagcactgcggaatcctagcaagttctataattcaagtatggtattggggatgattcatttgggggggggg

SEQ ID NO: 4594 - DNA, 435 bp, Arabidopsis thaliana
  unsure at all n locations
  Clone ID: LIB22-032-Q1-E1-C10
ggaccaagtcttcgtgtgctcgtaattggcgattctcaaattcgatctccgtacaaacaatggccgaaacctcgaagcaagtcaacggcgacgatgcccaggatcttcactcgcttctttcttctccggcgagggatttcctcgttcgtaatgacggcgaacaggtgaaagttgacagcttgttagggaagaagattggattgtatttttcagctgcttggtgtggaccgtgtcagcggtttactccacagctggtggaagtctacaacgagctctcttcgaaagttggttttgagattgtgtttgtgtcaggtgatgaaggatgaaagaatcatttggagattatttcagaaaagatgccctgggctcgccngttcccgtttaacngnatccggnaaacccgtngaccgttttgggattgagtttgttttaang

SEQ ID NO: 4595 - DNA, 427 bp, Arabidopsis thaliana
  unsure at all n locations
  Clone ID: LIB22-032-Q1-E1-C12
gattggctcatcactctattctcaatcgctactctccctaacactctcgttatgggcatacctttgcttcaggccatgtatggagattacactcaaaccctcatggtccaactcgttgttcttcaatgcatcatttggtatactctgctactattcctctttgaactccgagcagcgaggttgcttatccgagcagagtttccgggtcaagcagccggatcaatcgccaagatccaagtcgacgatgacgtcatttccttagacggcatggatccgctccgtacagaaactgaaaccgatgttaacggtcggatcaggctcaggatccgacggtccgtatcatccgtacctgattctgttatgtcctcctccttgtgcttaaccctaagagcctctaatctttctaacgccgaagattttcnccgtc

SEQ ID NO: 4596 - DNA, 424 bp, Arabidopsis thaliana
  unsure at all n locations
  Clone ID: LIB22-032-Q1-E1-C2
gcgttacttgggagtaaagaaacggcgtcaggaggtcaaatatgcggaaacatgacgtctggaggaacagaaagtatagtgttggctgtgaagtcatctcgtgactatatgaagtacaagaagggaatcacacggccagaaatgattatacctgagtcgggtcattcggcttatgataaggcggcccagtattttaaaatcaagttgtggcgagttccagttgacaaagacttccgagctgatgtgaaggcaacaaggcggcatattaacagaaacaccatcatgattgttggatcagcaccaggattccctcatggcatcattgatcctatcgaggagcttggtcaactggctcttaactatggaatatgctttcatgttgacctttgccttggngggtttgtgttacccttcccccctaaan

SEQ ID NO: 4597 - DNA, 422 bp, Arabidopsis thaliana
  unsure at all n locations
  Clone ID: LIB22-032-Q1-E1-C3
ttctccgtcgcggaaaagatggggaccaccaccaatctgagatcttggctgtatctcattcttctcttcatcgtcgtcgtcggcgtcaacgctcagaatcggagacctaagaatgttcaggtggctgttaaggctaagtggcagggtactcctcttctccttgaggctggtgagttgatttccaaagaatcgaagcagttgttctgggagtttactgatgcttggcttggttccgatggagatgattccgattgtaaatcagctagagattgtcttcttaagatatctaaacaggcttcgactctgttagctcaaccagtggcttctctcttccatttctcacttactctgaaatttgcttcgcctaaggcttgtgcttaacgtcaattggctgatgagtctcaancttccttcccccaagg

SEQ ID NO: 4598 - DNA, 426 bp, Arabidopsis thaliana
  unsure at all n locations
  Clone ID: LIB22-032-Q1-E1-C5
gctctctttcgtctctctacttcgaattgattgttttaaccgccggtgatcggagcaaactctctgacggtgaccgccggtgatcattttttgtgaacttcacttttggtgtataaagcatagttcgttgggaacttttttttacagctttggagtaactacctttcatggtttttggttccaacaatggggtcaaaatcatttggaaatctattagacttggcctctggggatcttttgngacattcctcagactccgagatatcttccaagagtgatgactgttcctggcattatctctgacgttgatggatatggaaattagtgatggcgaatcanatgtcanttcantaccttggccgtgagcggggaaatcattgtggccaattttcntcctttggaatgggtaaaaaggattcacnaact

SEQ ID NO: 4599 - DNA, 427 bp, Arabidopsis thaliana
  unsure at all n locations
  Clone ID: LIB22-032-Q1-E1-C6
ggcagatataaaggaagctccagaaggatccttcatcttgcttcacggatgtgctcacaacccaactggaattgacccaacaccagaacagtgggtaaaaattgctgatgtcattcacgaaaagaaccatatcccatttttcgatgttgcataccagggctttgctactggaagccttgatgaagatgcagcatctgtgagattatttgctgagcggggaatggagttttttgttgcncantcatatagtaaaaatttangtttgtatgcataaagaattggggcaatcaatgtcgtgtgctcctcagctgatgctgctacaaaggtcanagagncagttgaaaangaatgctcggcctangtagctccaatccaacanttcaagggggcgaagaatcnttggccaaantactggggtgatgttaac

SEQ ID NO: 4600 - DNA, 426 bp, Arabidopsis thaliana
  unsure at all n locations
  Clone ID: LIB22-032-Q1-E1-C7
gatttttnnnnnnnnnnnnnnnnnnnnnnnnnnnnnnnnnnnnnnnnnnnnnnnnnnnnnnnnnnnnnnnnnnnnnnnnnnnnnnnnnnnnngcgtgaattcctgagcgagagattcttcgccggagtaatctctttgcgtgatcttaccggctgcttaattcgtcttcgcctgattcgttggtttcaaaattcgtctctctctttcaatcggaggttaattgtttttctgtttgggggtcaaagcgaagatggtgaacgctatggtggagagagcgacnagcgagatgctgatcgggcctgattgggctatgaacctcgagatctgtgatatgctcaatagcgattcagcgcaagcaanagatgtttgtgaaaggcattaaanaacgggattggtaacaaggaatccaaaagcccaagcttcttg

SEQ ID NO: 4601 - DNA, 439 bp, Arabidopsis thaliana
  unsure at all n locations
  Clone ID: LIB22-032-Q1-E1-C9
gcaacaaaaactgaaacgtgcctccatttctaaaacccaaatccttcttcgtacaaacgacacaatctctcttaaatgccaaaggtcctctttttcgtcttcttccactctctctatacttctctcacaaatctgggcatgttttgaaatccacattcttcattcactgagtttcctttacctcttaaagtttcaatctttagattgagagagaaatttgaagtaatttaaggtaacaagaagagaacaattttgttctgttatggtgggggcgatggcaaacaatggaagaatccggtcagcttttccggtgactaatgggtcaaaagatctgacgccgaacagtgctccggcgagtacaancggatttgaataaggnccctgttgagttcacaaggaagaaagacgttgaaactcctccntaatgaacgaatcaaag

SEQ ID NO: 4602 - DNA, 426 bp, Arabidopsis thaliana
  unsure at all n locations
  Clone ID: LIB22-032-Q1-E1-A4
ggcccgggcattgagaaggaaggacgctttcagaggcgaaaggccatggggagataccgtctgtgatccatggatctccgatcgggaaaccgtatccaagctccgtggctagtctgcgctctttggactttgaaaacttagcgaactgaaacatctaagtagctaaaggaagggaaatcaaccgagaccccgttagtagcggcgagcgagagcggatttgggattttaagaaaaagaaagacgaagcttcgttccaaagtgttcacttctttttcgccaaggtttcattcgatttaatgtggattgggatgatggaaaaaccaacaagcccctcctcttcantccaagttacttcctaccctngactggaaagatccctaaaagggcgctgttaaaccggtnaattgtgaaaaaaggttggnaaaa

SEQ ID NO: 4603 - DNA, 469 bp, Arabidopsis thaliana
  unsure at all n locations
  Clone ID: LIB22-031-Q1-E1-F12
gcccacgcgtcnnnnnnnnnnnnnnnnnnnnnnnnnnnnnnnnnnnnnnnnnnnnnnnnnnnnnnnnnnnnnnnnnnnnnnnnnnnnnnnnnnnnnnnnnnnnnnnnnnnnnnnnnnnnnnnnnnnnnnnnnnnnnnnnnnnnnnnnnnnnnnnnnnnnnnnnnnnntggaagagtgtggcccaacatagagatatagagctgttatcgtctgtctttcatggcggagcagaggtgatcgtttcactattcaatttcactcgtcgatcattaccaacctctgcgggcaaagatggaattcgagaagatcaaggtgatcaatcccgttgttgaaatgggtggagacgaaatgactccaagttatctggaaattcatcaangacaagnttaatttccctttcctgggagctggntatcaaatactttgatcttggnctgcctaaccgnnanttcactgatganaaggttac

SEQ ID NO: 4604 - DNA, 455 bp, Arabidopsis thaliana
  unsure at all n locations
  Clone ID: LIB22-031-Q1-E1-F5
gctttgatgggattcagcttgttttctcaaatgttagttttttcttcatttgttatgcagcaagtattaaaaagcggcttggatgctaactgcaaactaatgggggatcttgtcaagagacagttttgantgttgatgtacatcaaagcaatcatgaacagacacaggcttctctcagcggcaacagatgaatgcaataaaaaacttggtcaagcttgctcttcttctttatctccagtccataactttctgaatgtccagccagaacaccggaaaactcctttcataaggtcacaatctccagattcacctggtcagctatggccaaaanattagttctcagagcaccttctctcggtctcccacctttgcacaaacctcnacttgtcacatcttcaactcctgagatcanaaacatcnaggaacagtctcctttctccctgatnctcctctaa

SEQ ID NO: 4605 - DNA, 464 bp, Arabidopsis thaliana
  unsure at all n locations
  Clone ID: LIB22-031-Q1-E1-F6
ttcatcaagcttgttgagaatgctgatgagtgcatggttcttgataacgaggccttgtacgatatttgcttcaggactctcaaactcactacccccagctttggtgatttgaaccatttgntatctgccactatgtctggtgtgacttgctgtctgaggttccctggtcaactcaactctgacctccgtaagcttgctgtgaatctcatcncattccctcgtcttcacttcntcatggttggttttgctcctctcacctcaagaggttcacagcagtaccncnccctcacaagtncctgagctcacccancatatgtgngacccaggnacatgatgtgtgccgnataccaangcacgggcgctaactcaaacctctgcnatgttccgttgnaagatntccacaaaggaattnacatcatatgctnaatgttcaaanaaaantccnccaacttggggggtgggtc

SEQ ID NO: 4606 - DNA, 466 bp, Arabidopsis thaliana
  unsure at all n locations
  Clone ID: LIB22-031-Q1-E1-F7
gcccacgcgtccgcggacgcgtgggtcgtcgaacaataaggccgtcgcatctcccagttatggctatggccggagaatcttccggcaaaannattggagactgtgacggtaaagtcncggggaacanacagcgaaaggtgggtcttatttacnacganacgatgtgcaaacacgacacacctgacggcgaggatcaccctgagtgtcccgaccgcatcagagttatctgggagaagcttcagctcgccggagtttctcaaagatgtgtggttcttggtagtancacagcagaagataagcatctccaattggttcacacaaaaggaccatgttaattaatttaagagtattagcacatacagagaagattaccggagaaacaaggattgcttcacagttgaattcgattaatctgaanggagggttatcctgaagccgcataccttgcanctggttctgttgtaaa

SEQ ID NO: 4607 - DNA, 520 bp, Arabidopsis thaliana
  unsure at all n locations
  Clone ID: LIB22-031-Q1-E1-G1
aatggttgcttggcctaccggtccggaattcangggtcgacccacgcgtccgcccacgcgtccgggaagagctcaggacgccaccggtaagtctggtggctctcttcggatacgcggagctacacgcgtccattactaagtatctccactcccagcagcctcccatcaacgctctggccttccccgacttctctcaaatctctctcctccttgctcatgatgatcagatcagccgaacctcctccttcagagatcctctcagcgtctccgattctgcttctcccattccttccagatgcggcggtattttgaaacgggactggttgcttaagcatcgcaccaaggtccctgcacttgtcgccgccttctttccctcacatcacatcttcggcgattcaactcaatggctacaggtctgctccgatntcgacaagcctcaaatccgtaatccgtcccaaaaacatcaaactggtggttgtcgtggtccaatcntctccccacgaaggacatttancgacga

SEQ ID NO: 4608 - DNA, 442 bp, Arabidopsis thaliana
  unsure at all n locations
  Clone ID: LIB22-031-Q1-E1-G6
gaacaaaactaatttaccattgagggttttcttcttccttcntcttcatcctctttgctgctatgattgagctccatggatctgcaatcatagttcttcgatttaggattcgtttagatcgcggtttttgagctcggttggtgaagacatatgcttgaaaacagaagtcttgtactgaagcatggctcttcggctaccagcttctaaagcagctgangttgcgattgggtctattggatgtggttangatctagctattgctttacggntgaagtattgcncaggangttcnaaagattctanattacntgacactaacagaaggtgatgataattgtgagattgttttacctggtggncatctccattcctaatgtttccncgtctancngttgcganaanggggaccttaggnggtttaagtccgtnttcctccttcaac

SEQ ID NO: 4609 - DNA, 469 bp, Arabidopsis thaliana
  unsure at all n locations
  Clone ID: LIB22-031-Q1-E1-H1
gcccacgcgtccgcggacgcgtggggcagattatatttatcgatatagatacaatggtggaggagcatcccaagtttggcttgcatcaggcagatatgttgtcatagatttgtctgcggggccttgtacatatgggaagattgaaactgaagagggcagtgttagtcccagaacagtgccaaggatacgaaacattgtgcttccaggaaatgttagccctgttggtcatcagtctacccatgatatcttttctggtcagttagcagcgttggtagctactacaattgancatgtcatagctccctgatgtcaggtttganacggttgatctagcaactagggtgctggtacctatcattgtgctccaaaaccacaatcgatntaatatcatggaaagangacaaaactacagcataantattgaaagagatanaatccngangtaaagaaaatgattcatcatggccaa

SEQ ID NO: 4610 - DNA, 474 bp, Arabidopsis thaliana
  unsure at all n locations
  Clone ID: LIB22-031-Q1-E1-H12
gtttgccggntctatgggcctngaaatccggaattcgcgggtcgacccacgcgtcngcatcaaatcccagctttcttccaagtgatccttcactctctatactgcgatttaccgttcttctgactcttgttgcgaattcggatcggctgacgcagctccgattgcacaacaatggcttctcgtatcatcaatcattccaaaaagttgaaacatgtttccgctttactgcggcgtgaccatgctgtggcagtccgctgtttctccaacagtaccaaccctctctcgttggnagagaagatatcttcaanggcccgcctgaattaatcccncngttaagaagaattcaaaatgtggnactggnaatgttacaatgcntaantggggattcaaaaacgggcacaaaactnagcagcccaatgggaggggcaaaactatttttagantttaagccccagatgggatnagtggaggggt

SEQ ID NO: 4611 - DNA, 408 bp, Arabidopsis thaliana
  unsure at all n locations
  Clone ID: LIB22-032-Q1-E1-A1
atcggcgataaacttgtgatgcagagacctagacgacgtttggaaggcaccgccatgggcgccaccgtgttcgatctccgtcccggcgtcggcatcggacctttctctatcggaatgccgatttgtgaagcatttgctcaaatagagcagcagcctaacatatatgatgttgttcatgttaaatactacgacgaggatcctttgaaactggatgttgttattagctttccagatcatgggtttcatcttcgatttgatccctgggtctcagaggttacggcttgttgaaatatttgatgtcaagcggcttcagatgcgctacgccacttctatgattgggggtccatcaactctggcaacctttgtggctgtttaagcacnttttggaccaaacnttccctggggaat

SEQ ID NO: 4612 - DNA, 440 bp, Arabidopsis thaliana
  unsure at all n locations
  Clone ID: LIB22-032-Q1-E1-A10
gggaggctcaagaaatgctcgacatccaccgatgttgaatcagttcatgatgttagtaaggtcacggatcctttgcagaaagctaagagagagttggataatgtggaaatcaaagaaaaacagaagaagcagaagaaccaaaatgaaacatctgagaaggaaactaaaaaattcagcaccgtttacgaaaagtttaatgatactattaaagaactagacagggtttctggaacatgtcccatacgacctgccattccattcacgcccccaaaggaaaaggtggaaccgatatatcacaatgagtgcaatttcgatgataaagctcatctgggaagtatctgacagcgccccttttgtacaaaggattttgatacttcccatccaagggcatgaaatcaagacagcaattgtgggatcatttcctcntccatgttggtaaa

SEQ ID NO: 4613 - DNA, 525 bp, Arabidopsis thaliana
  unsure at all n locations
  Clone ID: LIB22-032-Q1-E1-A11
ccgacgtacggtaangaattcncgggcncagacagaacanacaacgaagaaaattcaaaatcttatttcaattcaacgtatactttccttaaattaggaatttggttttcgagaaaattgagatccgaataactatggtgagactcaagacgagtctctgggttcttctccttgccctcgtttcaattcagttaaatggttcgtttggatctgaatcaagtaaagtagcttatgtcacacttttgtatggagatgagttcttattangagttagggtattgggtaaatcgattcgtgacactggatccactaaggatatggtcgctttggtttctgatggtgtctcagactactctaagaaagtttactccaaggctgatgggatgggaaagttagaagaaagaattaagntttactgggcaaaatcccaaaatcaaagnttcaatcccgaactaagggttcccnggggggtggttttaaataccaaaaggcctttaaagnattccttttaaccaatggaaccng

SEQ ID NO: 4614 - DNA, 424 bp, Arabidopsis thaliana
  unsure at all n locations
  Clone ID: LIB22-032-Q1-E1-A12
gctcaaattaaaagtcaatcatatcaaatcccaaatcctcccagatgtttttatcatcttcttcttcctgaagatttgatttcattttcctctctttcagatccctattctcatggcttctggatcttactggtgctatagttgtagccgattcgtttgggtttccgattcaatctcttgccctgattgcgacggtggtttcctcgaactcatccaagagcctctcgatttcacaccttccgattnnnnnnnnnnnnnnnnnnnnnnnnnnnnnnnnnnnnnnnnnnnnnnnnnnnnnnnnnnnnnnnnnnnnnnnnnnnnntccgcttctatgcacgccgataacagtcccactcctaccatcgttactcgtacacgaaagcaatcgatctcctaaaccaagttantgttctccgtggattct

SEQ ID NO: 4615 - DNA, 466 bp, Arabidopsis thaliana
  unsure at all n locations
  Clone ID: LIB22-032-Q1-E1-A3
ggccggtcaaaaattnccgggtcgacccacgcgtccgattcaatctacgttagccttccttcagatcaagacgacgacgttttaagcaacaagatgcagttaggtcagtttatctacgttgatcggcttgatccagggacacctgttccgatcatcaaaggtgctagaccgattcccggacgacatcctttacttggaactcctgagccattgatgagtacaagaggaaagattgagagttcgagacctagaagaggttcttggggtcaaaacggtgacgtttcgtctccgtttgtgttaaagcctgcacctttggattttgatcagtgtacgccggcgaaacatangcttggtacggggagatttatggcggcgtctccgaatgttatgactagagggaggtcacctgggtggngttaaatgttcctaaggtggangggcttttgtccaaaaatgggggggaatn

SEQ ID NO: 4616 - DNA, 519 bp, Arabidopsis thaliana
  unsure at all n locations
  Clone ID: LIB22-031-Q1-E1-F11
gtgccctggncctacaatccggaaatcgcgggtcgacccacgcgtccgcgtangnnnnnnnnnnnnnnnnnnnnnnnnnnnnnnnnnnnnnnnnnnnnnnnnnnnnnnnnnnnnnnnaacaagagaagagaagaaccaagttttcttcgaaaggattgaactttgtttctttctcttcagctacaacaaccaaaaaatgatcaagctttgcttcatgacttctcatggttattcaatccctggccttggtcttcctcaagacctctgcaacaccgaaatcatcaagaatagccggtctcatctggtgaatcccggagcaagacaagagatcatacctgcaagctccttcaatctgaatacagaactcttggaaccatggaaaccggtttcttcatttagccaattcgtggagattgattcagccatgatgaaaacctctgctcatgggatgttcatgaagaangnaacaagaatctctgaatttgagccttgggaatcgctgaaaagtttgcaagacaa

SEQ ID NO: 4617 - DNA, 482 bp, Arabidopsis thaliana
  unsure at all n locations
  Clone ID: LIB22-031-Q1-E1-B2
cacgcgtccgctgagttagaaaaaagtcttttaaggaagtgagagaaaacatgtcttctcttagtagagagctcgttttcttgatcttacagtttctcgatgaagagaagtttaaagagactgttcacaagcttgaacaagaatctgggtttttcttcaatatgaagtattttgaggatgaggttcacaatggaaattgggatgaggttgagaagtatctctctggtttcactaaagtagatgataatagatactctatgaagatattcttcgagataagaaagcagaagtatctcgaggctttggataagcatgatcgtcccaagggctgttggatataccaatgaagggatttgaaagtgtttcaaattttaatgaaggagcctttcaagggaaataacacaactccttgacattgggngaacttccgggaaaatgaacaattatccaagtttggggacaccaagtctgcaanaacgatt

SEQ ID NO: 4618 - DNA, 484 bp, Arabidopsis thaliana
  unsure at all n locations
  Clone ID: LIB22-031-Q1-E1-B6
gaanggctgttcccacgggaagcgcnaatctctttctccggcctctcatcctcgccgttctctcctttcttcttctctcttcattcgtctcctctgttgagtggctcgatatcgattcctcagatctcaaagctcttcaggtcatcgaaacagagctcggagtcaacagtcaacgttcttcggccagtgatgtcaacccttgcggtcgccgaggagttttctgcgagagacggcacnctgccaccaccggagaatacgttctccgtgtcacnaggctcgtctaccgatnnaggagcttgacggggactatcnctccggtcatcggaatgttttccgganctcaaagggaacttaacttggtcnaataaacaatttggcaaacgntggttcccgggtgggataaccttaaanctgttaagcaaacttnaaagnttcttggatnntccggaaaaataaaattttcccggtcaagaattccggggaa

SEQ ID NO: 4619 - DNA, 492 bp, Arabidopsis thaliana
  unsure at all n locations
  Clone ID: LIB22-031-Q1-E1-B7
attgtctgcctggcctaccggaacganatccggggnctcctttcggattcaaanctcagatctagctcaaccatggcgttgctcgtcgagaagacctcaagtggccgtgaatacaaggtcaaagacatgtctcaagccgatttcggtcgtctcgaactcgagctcgccgangttgagatgcctggactcatggcttgtcgtaccgaattcggaccttctcagccattcaaaggcgctagaatcaccggatctcttcacatgaccatccaaaccgccgtactcatcgaaaccctaactgctctcggtgctgaagtcagatggtgttcctgcaacatcttttccactcangacnagnccgccgcagccatcgctcgngacnccgncgctgttttcgcctggaanggtgagacncttcaggagtactggtggngtaccaancgttgcncnaaattggggtccanggggnggtcctgatcggatggttgatnacgg

SEQ ID NO: 4620 - DNA, 512 bp, Arabidopsis thaliana
  unsure at all n locations
  Clone ID: LIB22-031-Q1-E1-C1
atggtngcttgcctgcccgtccgaaattcaagggtcgacccacgcgtccggcggcggctcttactcaactctggccgctccggtccttcgattccagctccaatcagtaattctctctccaaagctcaaaagacaaagaaactcaataatgtctatgagaagctctcttgcgaaggtttcgttgatgatcagattgaactcgctctctcctctcttagagatggagctacgtttgaggctgcacttgattggctttgtttgaatttgccgagtcatgagttgcctgtgaagttttctactggagcttctcgttttccttccacaggaggttctgtgggtgtgatatcgacctcacgggacgattggaatgattcaactgacccttaagtcagggtaaaggaaaaggaacttgaanttttggtnctgttaaaggaaaacaagannaagaanataccctaantccgaaaaatnaacccaagctgaattgatccgnaagtatatgaataaacaag

SEQ ID NO: 4621 - DNA, 476 bp, Arabidopsis thaliana
  unsure at all n locations
  Clone ID: LIB22-031-Q1-E1-C12
gntttcttcgagtcnctctcgctctctccgtttcttcgcggtctctctctctcagatctctcngaaacattcttcgtggtgaancanaatggggttgagtttcgccaagctgtttagcaggctttttgccaagaaggagatgcgaattctgatggttggtcttgatgctgctggtaagaccacagtcttgtacaagctcaagctcggagagattgtcaccaccatccctactattggtttcaatgtggaaactgtggaatacangaacattantttcaccgtgtgggatgtcngggggtcangacaagattccgtcccttgtggngacactaattcaagacactcaanggtccaaaccttggttgttgataacaatgacagagacagagttgttganggtcnanaagaactccaanaggatggctgnatngnggannaaactgccttgatgcngtgttgccntgtgtttggcaaca

SEQ ID NO: 4622 - DNA, 505 bp, Arabidopsis thaliana
  unsure at all n locations
  Clone ID: LIB22-031-Q1-E1-C4
taccggtccganatcacgggtcgacccacgcgtccgcaaaccgcttctatctctctacatttctctttctgcaatggcgagattagtgcgtgtggctagatcctcctccctctttggctttggtaaccgtttctactctacttcagccgaagctagccacgcgtcgtcgccttcgccgtttcttcacggcggcggagctagcagggttgctccgaaagatagaaatgttcagtgggtgtttttgggatgtcctggtgttggaaaaggaacttacgctagtagactatcaacccttctcggcgttcctcacatcgccaccgggcgatctcgtccgtgaagagcttgcatctccgggactcccctctaaaaaccaaccggnaattgtnaatcaaggaaaattggnttcctgaatgaaatnaatgtagacttaatgtncaaaaaacttnaagntggtgaanctaaaagngaatcaagggttaaccttgaagggnttcctcgtaacaag

SEQ ID NO: 4623 - DNA, 465 bp, Arabidopsis thaliana
  Clone ID: LIB22-031-Q1-E1-C8
gaaaagcttcaatcagtgagctgcgttttttattctctgcttcatccagatctacatttctctgtttcagcctctattgctctgtttaacaagttctcaacggccggaatcgtcgccgggattctcgccaccggagttattgtgaaacggtgaaaatgggtttttgattttactggttacttcattgttcagtgcaaagtttggattgatttcactatggaggaagtagcagctaaggttgaggaagaaactgtggaaaccaatgtagatgcagtgaaagaggacaatgcaactatagctaatgaaagcagaagcccagagagtgtttctgcagtgtctgtggtgtcaaatcgagctgcttctactaaaaagaaaccagttattaattcgaatttaataaagccaactgcgtcctcctcaatacgggtctcgggtactacgcctgtggactatcaaggagaaata

SEQ ID NO: 4624 - DNA, 471 bp, Arabidopsis thaliana
  unsure at all n locations
  Clone ID: LIB22-031-Q1-E1-D11
ggctgacttactgagttgcattggcaccgatgcgacaatgcacgaccacataangaaactccttgatcggggttatgcaacaaaggatgctaatacacggttttctccaaccaacctgggtgaggcgcttgtgatgggatangatgacatggggtatgaactttggaaaccaaatctcagagcccttatggaacatgatatgaatgaagttngcgttggcaggaagaccaaagctgaagttcttgaaacatgtttgcagcaaatgaaancttgtttcttanatgcaagagtananaaatcanagctcctanaancactgncanttttctttgaaagatctaanaacactgatnanagtgaaagtcanacagctggtnaatttgtcccgacgattcaatcnccggaaaggatccacntatggcacncaggaaaaacccgggatggcaatttcacgggttgggtgcatgaaat

SEQ ID NO: 4625 - DNA, 476 bp, Arabidopsis thaliana
  unsure at all n locations
  Clone ID: LIB22-031-Q1-E1-D12
gacctcnccgacaattggtttcncggctgtatcnttttggccgtcgctgttttttctgtctccctgttcaatgttgttcagacagggacggtaaaanaagtatccacatgtgatgaaagtggcttcgttttacagcatagtcgggacgatccaatgtctactattctcgttanttatggaaagagaccttagtgcatggaagatccaacctaacttcgatcttatcncattatcgccaacgggnaacantcggangtgtantacgancangtgtacacgtaaagtgcacccaagatganaagnccttaatacctgccattggtcaaaccctttgggcatcctttgggcaacantccttggtaccaacntcctcctcaacaatcctcacnaanggcaatgtgttaggaacaaccatacctggttttgggatatttcaaaantgtccctggggacaattgganggaaaaccaaagaaa

SEQ ID NO: 4626 - DNA, 467 bp, Arabidopsis thaliana
  unsure at all n locations
  Clone ID: LIB22-031-Q1-E1-D3
gcaaaattccctcaaaaggaaaaactaaaaagccgatcttggcttttttgtttctgagtgcatctcgatacttggaagcattctttggtgaggctgattcattctcatctgtgaaagtctttggcttttgaagcaatactatggaaggaattcagcatcctatacctcgcactgtcgaagaggtttttagcgactttcgtggtcgtagagctggtctcatcaaggctctctctactgatgtacagaagttttaccatcagtgtgaccctgagaaggaaaacttgtgtctttatggacttccaaatgagacatgggaggttaatcttcccgttgaggaggtccctcctgagcttcctgaaccaacgttangcatcaatttcgcaagggacggaatgcaaagaaaaagactgggatttctttggttgcanttcacaatgattcatggcttanctctgttgcattttact

SEQ ID NO: 4627 - DNA, 455 bp, Arabidopsis thaliana
  unsure at all n locations
  Clone ID: LIB22-031-Q1-E1-D4
agatgcagagtcatcatcatcttccggttcatctgttggtccatctgcctcagacacattanctgcaangctactaggagccgctgataaatacaagttgcctagattaagtctaangtgcgagtcagtgctctgcaaggatatatcagtagattccgttgcaaatattttggcgcttgctgaccgttacaatgcttccgccttganatccgtttgtctgaaattcgcagcagaaaatctcatcgctgttatgaggtcagatgggtttgattatctaagggaacactgcccgtcacttcagtctgagcttctganaacagttgcgggttgcgaanaggattaagcggaggaggagggaagacgaagaacgtatgggggccaatttctcaaaacggtgganctgaaaacaaaacnggangacaancacaaaccttgggggaagaatatcaatgggg

SEQ ID NO: 4628 - DNA, 477 bp, Arabidopsis thaliana
  unsure at all n locations
  Clone ID: LIB22-031-Q1-E1-D5
cgntctaccggacgacattcccgggtngacccacgcgtccgacaaaagtcnctttgttcaaacactcgtttacgcgtagccganataanttttccaaaaacccatatccgaaaaagtcgatatatttattgaatttttgnnnnnnnnnnnnnnnnnnnnnnnnnnnnnnnnnnnnnnnnnnnnnnnnnnnnnnnnnnnnnnnnnnnctaagtctctctgttgtcttcctctttgtcttctatctcgctgcggtgacttcagatctagagtctgaccggngagctttacncgctgttcgtaacagtgnccgtggccgtcctttgctatggnacatgagtgcttcgtctccttgtaattggcacggagtccactgcgatgcgggtcgggtcacggctctccgattaccggatctggtttattcggttcnttaccantcggtggtattggtaatctaatccagcttangactctttctct

SEQ ID NO: 4629 - DNA, 489 bp, Arabidopsis thaliana
  unsure at all n locations
  Clone ID: LIB22-031-Q1-E1-E1
ggaanaacccgttaatctctctctgtccctttcttcttcttttttcaagaacaataaaaaaatgtctcaagattctgcaactactactccgccgccacctttaacctccgacgtttcaatgccttccggtgaagaagatgagccaaagcatgtaacatcggaagaagaggcaccggtgacttcggagacaaatctgaagctacctttgatgccggagctagaggagtcaaatcatacggcggaggttgtttcagagaaggtgacgccggagacgatgactttggagtcagaaggtctcaaccacgcggcggagggattcagagcaagacacatgaagtgacgccgggagacaagagactgcgaaactagaaggttctcaaaccacacgggnggganggattcaagagcaagacacatgaagttgacgccggganaaaaganactggtgaaatcaagaagtttcccaaaccaacgttggcgggagggatt

SEQ ID NO: 4630 - DNA, 470 bp, Arabidopsis thaliana
  unsure at all n locations
  Clone ID: LIB22-031-Q1-E1-B10
gattntttttccctctttattttccgagaaaaaataaataaaattatcctcnagttttcgatctcgatcatctggatccaagaaattactacgattgctataatgtcgatgtctcggctcggattgttgttgttcgtcgctatattgctcgtcttgcttcagtcttccacttgtctgattagttctccaagttctatcatcaatccttctaaagtcaaacaggtttcgtcgaagcccagggcatttgtgtatgaaggttttttgacggacttggaatgtgatcatctaatctctcttgcgaaagagaatctgcagagatctgcggttgctgataacgataatggcganaagtcaaagtcagtgatgttcgtaccaactccggcacttttatctccaaaaggaaaggattctantgtttccggtatcgaaggacaagctctcaacatggacatttctcccaaaagaaaacg

SEQ ID NO: 4631 - DNA, 440 bp, Arabidopsis thaliana
  unsure at all n locations
  Clone ID: LIB22-029-Q1-E1-G10
ggagaaattccaggagtgagttttgacaatcggagagaaatggggtcgacagaaaaagagcagacgacgcaacatcacccgcctcacatcagcagtctcgtcgtacgtcnctccggaagcaacgacagagaagacggccgcaacgccgccggagactatgagcccggagaagtctctcgtgaccggccttcgtttaatcgctcggatcggtataagggtgacaatggtggacatagaactcgggcaagttctagctcaccaggccgtcgtggatatgaagatcacaagcatggctctgatcttaatcattcangcgttccacctcgtggccgtgagttaaagcacanaanggaaacactgggagacacaagagactaatcccaaccctttagctagaaggtggagctggtgctccgtcccttatncgaagaaggttaaat

SEQ ID NO: 4632 - DNA, 492 bp, Arabidopsis thaliana
  unsure at all n locations
  Clone ID: LIB22-029-Q1-E1-G11
actgtctctggcnccacggtccggaaancccgggtcgacccaagcntncgttnnancccnacnggttcaancngannaaccacagnattggtacaaagacgagaagtatagtactaaagtgaaggacgcagacggtcatccttgttttgctcttgtaaacaaagctactggtgaagcaatgaagcattctgtgggagctactcatcccgtgcatctgattcgatatgtgcctgataagcttgacgagtcagtactatggacagagagcaaggattttggcgatggatatcgcacaataagaatggtaaacaatacgaggctaaacgtggatgcatatcatggtgacagcaaatctggtggtgtncgttatggnacgaataacctcctncnggaatggaaanaaaggnaaaaacaactccggaaaattcttcccttcctgaaaaattggcgtcctggaattggtaaaaagttccctttgtgtgtgctgttang

SEQ ID NO: 4633 - DNA, 482 bp, Arabidopsis thaliana
  unsure at all n locations
  Clone ID: LIB22-029-Q1-E1-G12
tttttctggcccccacggtccggaaaanccgggnngacccnagcctncngggaagatnatgaanangttgtggaatcagaaggagaaagagagtttgaacattgagaggtactcagattcgttgaagccgaagatgaagtctaataagaatggatctttctttgattttcttgttcttagacctgataacttccctaaagaacttcttggagatactcgaagagaacaacggcctgtgaagagagctaaatggagtcaagaagctgatttgcagaaattggatgtgtttgagaagcttgaagctaagtttaaggttgaaggcaaggaagagaaagaagaaggggaagatgatgaagaagttgtggaatcagannnnnnnnnnnnnnnnnnnnnnnnnnnnnnnnnnnnnnnnnnnnnnnnnnnnnnnnnnnnnnnnnnnnnnnnnnnnnnnnnnnnnnnnnnnnnnnnnnnnnnnnnnngcc

SEQ ID NO: 4634 - DNA, 510 bp, Arabidopsis thaliana
  unsure at all n locations
  Clone ID: LIB22-029-Q1-E1-G2
cggtccgaggaccgggtcggccnngcntncgnttaaatccaactcccccggcgnncaaagaaaaannnncattngggaaacctttgaaatgtcnacnggattanatatgtctctcgacgacatgatcgccaagaaccgtaagtctcgtggtggagccggccccgctcgtggaaccggatccggatccggaccgggtccgactcgccgcaacaaccctaatcggaaatcaacccgatctgctccataccaatcagccaaggcgccggagtccacctggggtcacgacatgttctccgatagatctgaagatcaccgatcgggacgttcctccgccggaatcgaaactgggaaccaaagctctacatttccaaatttgggattacggtgtcatgaaacgaaagacatcaagggaactggtttgcctgaaattttgggaaaactttaaacgcctaaaacaaatttcaaattttgganaaaaaattgggaaaantttaaaaggggaaactggcc

SEQ ID NO: 4635 - DNA, 428 bp, Arabidopsis thaliana
  unsure at all n locations
  Clone ID: LIB22-029-Q1-E1-G4
gcacaaancgttcacctcaatgaagccacggtgctcatgtctctcctccagcctgctcctgagacttttgatttattcgatgatancatcttggtgtcggaaggtcagatcgtgtaccaaggaccgagagacaacattcttgagttctttgagagctttgggttcaagtgtcctgagagaaaaggaacagctgatttcctgcaagaggttacttccaagaaagatcaagaacagtactgggtgaacccgaacagaccttatcactacattccggtttcagagtttgccagtagatacaagagtttccatgttgggacgaagatgtctaacgaaacttgcagtaccgttcgataagtctcgcggccacaaagcagctcttggtgttcgataagttctctgtcccaaangagggaacntcccaaagaact

SEQ ID NO: 4636 - DNA, 438 bp, Arabidopsis thaliana
  unsure at all n locations
  Clone ID: LIB22-029-Q1-E1-G6
tttttttttttttggagttagaatgctatgaattccaaaccagagaagattcaaataaaacagagactaaaaaggctgttcaaacagtaataattcttgcacatgaacactaaaccagaacgataacaggaaacaaagatacagtcagtactcagtagtttgagggcacctacggaaagcaagtaatactacagagggtagacgttccagtgcttaatgatgaaacatcatcagtacaagcaaacgtgtttttcatcatacaccgtatcactttcacaagtggctgcagtcattccgcagcataagggagattgacttcgagaagcaacatcaactttgcgcaaaaggancanggctaccagganatgggggactcccaattgcnacncctttcaggananatccccttanaanggaaaggccttttcaaaaccaagg

SEQ ID NO: 4637 - DNA, 446 bp, Arabidopsis thaliana
  unsure at all n locations
  Clone ID: LIB22-029-Q1-E1-G7
cgtcgccatggccatctggcttggcgccattcacttcaacgtcgctcttgttctctgttctctcattttccttcctccttctctatctctcatggtcttgggcttgctctctctgtttatctttatcccaatcgatcatcgtagcaaatatggtcgtaagctcgctaggtacatatgcaagcacgcgtgtaattatttccccgtctctctgtacgtcgaggattacgaanctttccagcctaatcgtgcctatgtctttggttatgaaccacattcggtgctaccgattgganttgtngctctttgtgatctcacanggtttatgcctaatcctaacattaaagttcttgcaantagtgctaaattcaaaattccctttcaaaggatatannggaaatggttagggncaacggcnnnctttaaggaaaaatttaaattccctttgg

SEQ ID NO: 4638 - DNA, 516 bp, Arabidopsis thaliana
  unsure at all n locations
  Clone ID: LIB22-029-Q1-E1-H12
tttttccgcccccgtacggtcaaaactcgggggaccccancctnccgggnncanaccnacnanacnaccctnctccnncccaaaacnagcgagaaggaggaagaagangaggaagtccctgagaaattttcgancangagggagatcattancattcatatcggacaagctggtattcaggtcggaaattcttgttgggagctttattgtctcgaacatggtatccaacccgatggcaccatgcccagtgatagtactgttggtgcatgtcatgatgcattcaacacattctttagcgagacaagctcaggccaacatgtgcctccaanctgtgtttcttgatctccgaaccaaaccgtcattgacgaacttacgaaaccgggacttacaagacaagcntttccaatccccgaagcaaacnttancctcctgggcaaaatgaaagaatgcaancccaaatnaccttttgctaaaaanggccaattaacaaccggttttgggaaaggggaaaaattg

SEQ ID NO: 4639 - DNA, 502 bp, Arabidopsis thaliana
  unsure at all n locations
  Clone ID: LIB22-030-Q1-E1-A1
ttntacgccgcccggtaccggtcaaaaattcccggggncgtagccacggttgtcatggctccctttgctctcatgttcgagaggaaaattaggcccaagatgacactagcaatattctggaggcttcttgctcttggaatattagagcccctcatggaccagaatttgtactacataggattgaaaaacacatcagcatcgtacacttctgcctttaccaatgcacttcccgccgtcaccttcattctcgccctcattttcaggcttgagacggtgaactttagaaaggtccacagtgttgcaaaagtggtaggaacggtaataacggttggaggagcaatgatcatgactttgtacaaaggtccggccattgagattgtgaaggccgcacataattctttcaacggtgggttcgagcaacaaaacccaaccgggcaacaattgggtcccttggaacataaccaattatggggcaantaccccnacaatggggctgctttct

SEQ ID NO: 4640 - DNA, 456 bp, Arabidopsis thaliana
  unsure at all n locations
  Clone ID: LIB22-030-Q1-E1-A2
gnnnnnnnnnnnnnnnnnnnnnnnnnnnnnnnnnnnnnnnnntttataggatcaatcgatcaaggaaccaccagcaccagattcatcatttacgaccacgatgctcgtcctgttgcttctcatcaagtcgagttcactcagttctatcccgaagctggatgggtggaacacgatccaatggagatactggaaagtgtgaaagtgtgcattgcaaaggctctcnacaaagccactgccgatggacacaacgtcgacggtggcttgaaggccattgggcttacagatcaganagagactactgttgtttggagcaaatccactggccttcctctccacaaggctattgtccgggattggatgctcgtaacaactccatctgcaaggagactaagagaaaangaactccccgggaaggaaaattcccaattttgtgggantccttgccgggttgccaaa

SEQ ID NO: 4641 - DNA, 484 bp, Arabidopsis thaliana
  unsure at all n locations
  Clone ID: LIB22-030-Q1-E1-A5
agnccgccccgtaccgaacaagaattcgcgggtcgacccacgcgtccgcttatcttccatagtataaaacagtcagaagatgtcactgatgcaacaaagtcaaagaactcacatgcgatctgtgagcttgggctgtcaataatcaatcacttaactcagaaagagcctgatctacaaggggaaatcacacctgtatcgctgcctccgacgctgtacaaaccttctgaaaaagttgaaggagacaagtctcaggtaggtgaagaaaaattgtggctagctgatgagactgtcctgttacacttcagggctctcaagttggagagtcatgctgatgcatctgtgatcccccaaacttcagaaaatgaggttatgattgatggggaaagtgatggaaatgaaattcctctggggtaaatagtanagcgtttganactcagggaaccaagactagaaagggcaaaaaggataaatccgtccagctgaa

SEQ ID NO: 4642 - DNA, 494 bp, Arabidopsis thaliana
  unsure at all n locations
  Clone ID: LIB22-030-Q1-E1-A6
tccgtaccgancacacattanttngccggtcgacgagctcantantcggcggccgccctttttttttttttttggagttagaatgctatgaattccaaaccagagaagattcaaataanacagagactaaaaaggctgttcaaacagtaataattcttgcacatgaacactaaaccagaacgataacaggaaacaaagatacagtcagtactcagtagtttgagggcacctacggaaagcaagtaatactacaganggtanacgttccagtgcttaatgatgaaacatcatcagtacaagcaancgtgtttttcancatanaccgtatcactttcacaagtggctgcagtcattccgcagcatannganattgacntcganaancagcatcaacttttgcgncaaaaggancaagggctacaaggaaaatgggggacctccccaatggctnacgccctttcaagganaacatcctcccttagnaagggagaagg

SEQ ID NO: 4643 - DNA, 451 bp, Arabidopsis thaliana
  unsure at all n locations
  Clone ID: LIB22-030-Q1-E1-B1
aggangcttcttcagggttcaggtgtgaaagctgacgccaccgtggcagctgacggtagcggtacatttaaaactgtggctgctgcggttgccgcggcccctgaaaatagtaataagaggtatgtgatacatataaaagccggagtttacagagagaatgtggaggttgctaagaagaaaaagaatataatgtttatgggagatggtcggacgagaactattatcaccggaagtcgaaacgttgtagacggtagcaccactttccactccgccaccgttgctgctgtcggcgagagattcttagctcgtgacatcactttccaaaacaaggcgggtccgtcgaagcaacaancngtggctctcccttgttggntccgaatttcccgnccttcnanaattgcnaaatgttaancttaacaaggacactcctnataacgttcantcctaaacc

SEQ ID NO: 4644 - DNA, 467 bp, Arabidopsis thaliana
  unsure at all n locations
  Clone ID: LIB22-029-Q1-E1-F9
gggtngacccaagccttcggataacaaatctctcttccattttctccacacaaatttctcttcaatctccgataatggaaggaaccggcgttgtggcggtgtacggtaacggtgcgataacggaggcgaagaaatctcccttctccgtgaaggtcggtttggctcagatgctccgtggtggtgttatcatggatgtcgtcaacgccgagcaagctcgtatcgccgaggaggctggtgcttgcgccgtcatggctttggagcgtgttcctgctgatatccgcgctcaaggaggcgtcgctcgtatgagcgattcacaaatgattaaagaaatcaaacaagccgttacgattccggtgatggctaaaggctaggattgggtcattttcgtttgaagctcaaattctttgaagcaantggnatccaattacatccgaataagagccaangnttttgactccttgccgaag

SEQ ID NO: 4645 - DNA, 437 bp, Arabidopsis thaliana
  unsure at all n locations
  Clone ID: LIB22-029-Q1-E1-D11
gcatgggggaacttaataagaatctttagtcccatcattgttgtgcccgttgtttctgttgtgagccttggcctattccttanaggcttcccactgcttgcaaactgtgtggaaatcggtctaccaatgctgattctgttgatcatcacacagcaatatcttaaacatgcattctcaaggatttctatgattcttgaaagatatgctttacttgtttgcctggctatcatatgggcttttgctgctatccttactgtttctggtgcttataataatgtttctaccgcaacaaaacanagttgtcgaactgatcgtgcctttctaagtcatcaagntcctgggattagaaatcccatatccattccagtgggggactccgatattcaaaacgantcatggttttggaatgttttggtgctgcaaatggtcgcaatctg

SEQ ID NO: 4646 - DNA, 431 bp, Arabidopsis thaliana
  unsure at all n locations
  Clone ID: LIB22-029-Q1-E1-D2
agcntncgggnaaacccaatttttgggccaanttnggnnaatncgcngcnggganaacncaggtngttacagatgataaacatgcgagataatccaacaatgcatgtcttacaagcttcaaagtttctatttttagctcttattttgatccagttgctgtctactcaactctttgctcaaagatctaaaagtccatggcaaacactcactggagatgctccccttgtcattgctcgtggtgttttctgggttgttgccagattcaagtctcgatgcttacagttttgtatcgcagactagtgttcctggtgctgttctttggtgtgatgtgcaactaacgaaagatgcaattggactttgcttccctgatgtgaagatgatgaatgcttcaatatcaanagttacccaaacggaaactctacttgctaang

SEQ ID NO: 4647 - DNA, 495 bp, Arabidopsis thaliana
  unsure at all n locations
  Clone ID: LIB22-029-Q1-E1-D4
cggtcggangacccgggtcggccnngcntccggaaaaaaaaccaancaacaactncaaannnaaggaacnagnnnnnnnnnnnnnnnnnnnnnnnnnnnnnnnnnnnnnnnnnnnnnnnnnnnnnnnnnnnnnnnnnnnattctgttggttttgcaatggtttggaggttcgttaatggcgtcatagactcgggagattaagggagaacaagtactctgcatcttctggatttctcactatttctccttctctagaggaataggcgagaaattgagattaataaaaaggggtgttttttggttctccttcgtttgtataaagcctgccgcttcttaaggttctttggaaattctcaagtgatggaggaaaatctggtttacttcgcatgagctattaacgaaattcatcatgaatgtctcactgtcacacttgtgggaantatgcgttgaatgattgtcaagaaaccgattctngttcccnacttcgtttgaacc

SEQ ID NO: 4648 - DNA, 335 bp, Arabidopsis thaliana
  unsure at all n locations
  Clone ID: LIB22-029-Q1-E1-E1
cggtccggacnaccgggtcgnncccagccgtcnggtnanagctggccgtaggatggaaacagtaagaaaagtacatccgaatcaacggctattgcgttctctcctcttccttcttgtgatgtggatttgtgtgtgtgtgatgtgtcggtgagtgtgttatagaagtcactatagccatcttcaaaggggagatagagctaggagtagtatttggtggtgtcacgtcgtttgttttttctatataatttttgtcactatgtctttctattatgggacatggcataatatatcatatgaataatttatcactaaaaaaaaaaanaaaaaaaaaaggg

SEQ ID NO: 4649 - DNA, 424 bp, Arabidopsis thaliana
  unsure at all n locations
  Clone ID: LIB22-029-Q1-E1-E10
cgacacgaccgatctatagattcggcgagatcagaagaaagcttcccggagcaactcggtcgttgtgactcattccgagttaaaaaaaacgggttttcgacaccatggatatgagttcaatggctggttcaatcggagtttcggtagccgtactccgattcctcctctgtttcgttgccacgatccctgtttcattcgcttgtcgaatcgtcccgagtagactcggtaaacacttgtatgccgctgcttcaggtgntttcctctcttacctcncctttggcttcaccnccanncttcacttccgtgttccgatgacgatcggatatnnttcaatgggcgatttanagacccaaagtgtgggaaacancaacgtttcntncctcggtttcgccctaacntaattggntggtcacgtggtttaata

SEQ ID NO: 4650 - DNA, 458 bp, Arabidopsis thaliana
  unsure at all n locations
  Clone ID: LIB22-029-Q1-E1-E2
cggtccggaanaccgggtcnggccnagcntncgggnaaaggnaattngcggncggaccntcanancttcaaggacgtttcatctgcggtcaagtggccgtctatttccctctcttagcttaactcatctcaagggcaagctatctctctccatcaactcgttttcctccaagattcagtctcatgctctccgaggagttggtataggcgagtcagataagaaaaatcccctgccgcgaggggccggagaaggagtcaaggaagatgcgaggagtaagctgcttcatgtagttttggtctctcctcagattcctgggaatacaggttgcattgcaagaacatgtgctgcctcagctgttggtctgcatttagtcgggccattaggttttcaagtggatgacgccagagttaancganctggtttgggataattggccgttatcctacctaanttgtcaa

SEQ ID NO: 4651 - DNA, 517 bp, Arabidopsis thaliana
  unsure at all n locations
  Clone ID: LIB22-029-Q1-E1-E3
tgtcctctggntccacggtccggaccnncatcgcgggncccacncncctcactaaacggcggccgccctttttttttntttttggnagttagaattgctatgaattccaaaccagagaanattcaaataaaacagagactaaaaaggctgttcaaacagtaataattcttgcacatgaacactaaaccagaacgataacaggaaacaaagatacagtcagtactcagtagtttgagggcacctacggaaagcaagtaatactacagagggtagacgttccagtgcttaatgatgaaacatcatcagtacaagcaaacgtgtttttcatcatacaccgtatcactttcacaagtggctgcagtcattccgcagcataaggagattgacttcgagaagcaacatcaactttgcgcaagangancanggctacaaggagattggggaactcccaatngtacgcctttcaggaaaatcnccttanaaggnnaaggcttttgcaaggcaagggnttcttggg

SEQ ID NO: 4652 - DNA, 502 bp, Arabidopsis thaliana
  unsure at all n locations
  Clone ID: LIB22-029-Q1-E1-E4
accgggtccggatgacccgggtcggnccangcctncgnngnaaaccttgggcggctncttgcggntncnagcccaaaancacggttgagcattgtgaagagaaaggttactccgtgataaacgtgagctgcgaggatcgaccaaagctcatgtttgacattgtatgcacgcttacggatatgcaatacattgtgtttcacgccacgatttcatcaagcggctctcatgcttctcaggagtatttcatcagacaaagacggttgcactcttgacacagaaggagagaaagagagagttgtcaaatgtctggaagctgcaatccatagacgagtcagcgagggttggagtttggagctctgcgcaaaggacagagttggattactgtcggaagtgacaaggattctgagagagcacgggctatcaattgtccnanagctggtgtgacaacaattaggagaacaagccgttaacgttttcaagtgaaagatgcttcaaggaatcc

SEQ ID NO: 4653 - DNA, 481 bp, Arabidopsis thaliana
  unsure at all n locations
  Clone ID: LIB22-029-Q1-E1-E9
ggccntcacggtccggaaatncccggggtcgacccacgcgtccgtaaaaataaaaataagtggagaaatcaaaatcatcgattctcctttgtttcgcctaacccaattcctaaatctcagcatctttcatcaatccaatctctcaaataagcgagagagaaacaaagattatcgaatccttggagacgaaaacatactccaatttgtaattttctcgtctttttttttacctgattttgttatacgtttgatcgaaatcatttgctctgatggatctctgttttgttaacccttttgagatttggtagatatggttttgaggattgatatatttgccgctgattgtcgttgaaaaattgtgaaatttgatttggtggtttagggttaaaatgaaattatatgatgaggaatataagaatccngatttttttnaataaaatccccaaatgttcctggtaactgtgaatgaaacnttgaattt

SEQ ID NO: 4654 - DNA, 500 bp, Arabidopsis thaliana
  unsure at all n locations
  Clone ID: LIB22-029-Q1-E1-F2
acggtcggagntccgggtcggccaagcgtncggcttaggggnnnaagtnaagttnaaacttnctnctnctnctnaccggaaangcgtctcgtaacactgatctctaatgatcttcgtctccaatggcgatatcagtacaacacgtcgtcgttttactcctctccactctcctcatcgccatcaccttcttcctcttcacctccgataacgccagattccctttcccttctctctccaccaccgattactacacaccaatcccaaaatctccaattcctcaccgaatcgtcgacgtttcttcagatcaaactccacagaagatgaagctaaacacttccctcgaggtgggagagctgaaatgggatctatgtaaaggtgcagaatctgttgattacataccttgtcttgataattacgccngccatcaaggaagtcaatcaagggagacattatgggggaatcgagaaagtcaattggccctgaaccaaagtcctaaaang

SEQ ID NO: 4655 - DNA, 437 bp, Arabidopsis thaliana
  unsure at all n locations
  Clone ID: LIB22-029-Q1-E1-F6
tttttttttttttggagttagaatgctatgaattccaaaccagagaagattcaaataaaacagagactaaaaaggctgttcaaacagtaataattcttgcacatgaacactaaaccagaacgataacaggaaacaaagatacagtcagtactcagtantttgagggcacctacggaaagcaagtaatactacagagggtagacgttccagtgcttaatgatgaaacatcatcagtanaagcaaacgtgtttttcatcatacaccgtatcactttcacaagtggctgcaatcattcccgcagcataaggagatttgacttcgagaagcaanatcaactttgcncanaggacaaggctaccaagaaantgggaactccncattgctaancctttaagggaaatcccttaaaanggaaggccttttcaaacaaggcttct

SEQ ID NO: 4656 - DNA, 424 bp, Arabidopsis thaliana
  unsure at all n locations
  Clone ID: LIB22-029-Q1-E1-F7
aaagcatttggggaagagtaggttttgcgatctgtgattttctgaggagaaacgaaaatggcgtttagagggaaggagatgatgaagaanctggtaaagaaagttggagcggagaatatcacgccggagctcaaggataagctcaaggcttgtgttcctgataccaaagtcgtcatgggcagagccaaacgcggtctctacgccggccgccacatccagtacggaaaccgtgtcagtgaagacggtggnaacaagtcaagaagatgttggaaaccgaatgtccancacaagcgattgttcagctacatattcgacagtcacagtatcngtcacaatcacnacacangcncttcgctgcatcnacaaagcaaganggattaaacgagtacttgctgaaaacancaatcccatnagattggccaca

SEQ ID NO: 4657 - DNA, 497 bp, Arabidopsis thaliana
  unsure at all n locations
  Clone ID: LIB22-029-Q1-E1-C4
acgggtccggacgatccgggtcggcccaagcntncnggnaaaacccggtaaatccgtnccnatggttcgatccttcccagtaaaacgcggcgtgttcgaattctgatcgcttttacgcgagaaagggggaccaccctctaagcctaagtattcctcaatgaccgatagcgtacaagtaccgtgagggaaaggtgaaaagaaccctatgacgggagtgcaatagagaacctgagatccgatgcgaacaatcagtcgaaggagtagtcaagcgcactcactctaacggcgtaccttttgcatgatgggtcagcgaggaaatgggaagagcggcttaagccattangtgtaggcgctttccaaaggtgggaatcttctagttcttcctatttgacccgaaaccgatcgatctagccatgaacaaggttgaananactctaacaggccttggnnggaccgaacccacnttgtggcaaaatncgggaatgacttttggtaag

SEQ ID NO: 4658 - DNA, 418 bp, Arabidopsis thaliana
  unsure at all n locations
  Clone ID: LIB22-029-Q1-E1-A5
taaagaaaggggcttgattttggacaaaggcacgtgtcttagttttttattcaagctccgatctataagttatgatttgggtttggttttgagttctccaattttagtctcatctctgtggttgttgtaactgggtttgtgatggaagctanaattgaangtgaagtagaaggtcacagtttagaatacgggtttagtggtaaaaggagtgtagagtgggatttgaatgattgggaatggaatggtgatccctcttgctacacaactgaatcacgggtcatccaacaactcntctacgtgctctgatgaaaggaaatgtttaaatcatgganaagaaaggggggttnanatggggaaaaaagaanaaaattnacancttttacggngggancaatgggaagaaaataactttaaaaat

SEQ ID NO: 4659 - DNA, 456 bp, Arabidopsis thaliana
  unsure at all n locations
  Clone ID: LIB22-029-Q1-E1-A7
gnttggttcatcaaatcccttttctcccatggaagaaagcaacaactcggccgttgtggattttcctgacaactttatggaccagctcttgtgggaggagtgctgggaagaagaggcaacgcagcatgaccaggcattatcatcaccatcagggctgaaggagagggtggcttgcgccatggggcacctgcaagaggtgatgggaganagggagttgctgatccaactgtgggtgcctgttgagacaaggancggccgantgctgancacngaggagcaaccttactctatcaacaccttctcccaaaagccaaaacctggcctctaacgatgacnccttcactggctacagcttccaacataanttgggttcnggncaacctgntggggctgcntggcctttgtcccggangaaaatgcctgantggacccaanacttccgntttttagggaagg

SEQ ID NO: 4660 - DNA, 464 bp, Arabidopsis thaliana
  unsure at all n locations
  Clone ID: LIB22-029-Q1-E1-A8
aattttgccgcgcntaccggtccannatcccgggtcgccccacgcgtccgaanagtgcggtgaggagagcttcgttgtcttccccattgcaattagggttttcaaaacgggtaatcgaattcggtggtgctcggctttgaaattgaggatgagatcctttccacttccttctacctgctgacaatgggcaactgcggtactanagacgaggctgccgtcttcactcctcaagctcaagcccaacagctccagaanaagcactcgcgatccgtctcanatctgagcgatccatccactcctcgcttccgagacgactctcgcactcctatttcgtatgcccaagtcatcccctttactttgtttgagcttgagaccatcaccantagcttccgcncagattatntactcnggagaaagtggtttcggtaccgtcnacgagggttacaattgatgaanaatctccg

SEQ ID NO: 4661 - DNA, 439 bp, Arabidopsis thaliana
  unsure at all n locations
  Clone ID: LIB22-029-Q1-E1-B1
attgaganaataatggggggtancggnanaaccaanaanccaaattcnanggaattnacaaaaannaacnacngtaaagttacttgattaaggggttaagaagagatactggtgttttttggcctcaatcagctaagatttttgtgcattgtatgatgagtatagcaaatgaacaacaatttgccatggatcaacttgtcgaaaccaatgatgattcngaaaagaaaccaagaattacatacacnaggaagtttcntatatccttgagcgagaaagacgtttgcaagaagctgccaaatctgcctggtgaatttgatgaagcactgttgcctgacttcnaagatccttcacccgancgaacaagaatttcaagggaatttttcgtcncatggnttcaggcggaatgaccaaaagttcaacgcctccaacaangggggaa

SEQ ID NO: 4662 - DNA, 437 bp, Arabidopsis thaliana
  unsure at all n locations
  Clone ID: LIB22-029-Q1-E1-B10
aaaaatgagagatcataaacgttaagtcggttatgtttcggtttgagctaattagaagttcatataatccgccgtccgctaatattcctcgattagaatctccggcgatcagaaatctcgcggtgaattttgatggaagaaaagctgccaaaatcgctcaagaatctcgatttgaatacgaatcgtggtcgtggaccagagaataagattcttgtttcagcttatgtatcttcgtcacgaatgtctccactgaaatcaaaacctccatctcttgtgagctcatgtcttggtgttattgggaagcatttggaggatatgattcgttgtttaactgaaatcnctgttatatttcctgcagacatcaaagatgtcgattgcagcaattcctaaaaagaaaaaaactgctgggatgaatgatgttaataacctggtttggg

SEQ ID NO: 4663 - DNA, 496 bp, Arabidopsis thaliana
  unsure at all n locations
  Clone ID: LIB22-029-Q1-E1-B11
gaactggttctcctgggcctcacggtccggnaatnccggggtcgacccacgcgtccgttaacttcttcgatctcttctttttctctacacgattcgattgattcaagtatcaatcaatcgaatccgagataagtcatgagtttcttcaaatgggtttcttttgttttgatccttcacttgcttaatccgactctgatttcatgttcctctaatgggttatctcaaataccttcaaagtttcttactttggctaaaaggaatgattttttcgattggatggttggaatcagaaggagaatccatgagaatccagagttaggttatgaggaagtagagacatctaagcttgttagagcagagttggagaagatgggtgtttcctaaaagtacccagttgctgttactggtgttgttgggtaagttggaactggtcatgctccttttgttgccttaagggctgatatggatgcacttgctaagcangaaaagggggaat

SEQ ID NO: 4664 - DNA, 478 bp, Arabidopsis thaliana
  unsure at all n locations
  Clone ID: LIB22-029-Q1-E1-B2
gggaaaaccaaccntaagtngttcccnantnatncanacagaangaaancctttttgtacttgtaatcngtttgtactttacttctctctggtcagtacgtttccnnnnnnnnnnnnnnnnnnnnnnnnnnnnnnnnnnnnnnnnnnnnnnnnnnnnnnnnnnnnnnnnnnnnnnnnnnnnnnnnnnnnnnnnnnnnnnnnngggcggccgctctagaggatccaagcttacgtacgcgtgcatgcgacgtcatagctcttctatagtgtcacctaaattcaattcactggccgtcgttttacaacgtcgtgactgggaaaaccctggcgttacccaacttaatcgccttgcagcaacatcccccttttcgccaagctggcgtaataacgaaanaaggcccgcaaccgatttgcccntcccaaanagttnccgcaacctgaaatggcaaattggnacnccccccggtaaccggggcaa

SEQ ID NO: 4665 - DNA, 485 bp, Arabidopsis thaliana
  unsure at all n locations
  Clone ID: LIB22-029-Q1-E1-B4
acggtcgganaccgggtcgnccaagcntncgggttnnggaatttggcnaaaatttggttaaggtaacctaagtttccncggattttgattaattnancnananggnnattgangtcggaccagttgatccatctgtcctatacgagcaagacctccatgtttcttctgctgtttgggaaggacaggaacgaggtctacttcgttgtcaagaacacacttcattgctacatcaatggaaactcactgatgaacaaattaacctcgtggacaaagctggtttcggttactttcgcaaaatcggtccaatgagtttaaacaattcactgatctctgcacttgttgagcgatggagaagagaaaccaatacttttcatcttcctttaggagaaatgactataaccttagacgaagttgcttantacttggacttgaaattgatgganatccatgttggttcaaaantggggataaggttccaagggana

SEQ ID NO: 4666 - DNA, 421 bp, Arabidopsis thaliana
  unsure at all n locations
  Clone ID: LIB22-029-Q1-E1-B5
cgattttgattaggctctctgtttctctttcttggttctaaaagatatccgtcactctttagtattatgggaatcggtgaagaaagcacaaagcctatttgggggagcgtgagccacacgtcttcaggctacgctctcaacggcaaaatcatgctctcctccgtgatcgttctattcgtcgccgttattatgatcctctgcttccacagctacgcccgttggttattccgtcgtcacaaccgtcgcattcgccgccgtattcgttctcacctccgcactctctccgcctcaccccgagaccaagctctcgaccaggctgttctcgacaagattccgatcttcgtttaatcctccaaagaatcaacaacaacaagaaganaaaggaggattgctccgtctgcttgtccgganttcaaggaaa

SEQ ID NO: 4667 - DNA, 477 bp, Arabidopsis thaliana
  unsure at all n locations
  Clone ID: LIB22-029-Q1-E1-B8
gcggacgcgtgggtttgtggggaacgaactatggccgagagatggaggaacacggctctactcgtcatcgacatgcagaacgatttcatagaggaaggtgctgtgacgcaagtgaaaggaggaaaatctatagttcctaatgttatcagagtcgtcgaactcgcgaggcagcgtggtattctcgtaatttgggttgttcgagaacatgatcgtcaaggaagagatgttgaattattcaggcgccataactacagttctgagaaagtcgggccagttattaaaggcaccgtangancagaattggttgatggattgatgatcaacgaagaagatgactataaagattgtgaaaactcgttcagttgcctttctttaagtaccaatccttcaatcccttcttgcaaaacttcaagggggttaccaaantttantgaattgcctggtgttgcaaaacncccgaactgtttcccgggaaaa

SEQ ID NO: 4668 - DNA, 492 bp, Arabidopsis thaliana
  unsure at all n locations
  Clone ID: LIB22-029-Q1-E1-C1
ctgggcncccaccgggtccggacgaacccgggtcganccnagcgtncggncnaanccccccccnccttcaataatttctgcaaaccctaactttctcattcggcgctcaagtttctctccaccccttcgagatttggtgcgatgatgttgcgtgctgtttttaggagagcttccattagaggctcttcttctgcttcgggattgggaaaatcattgcaatcctctcgtgttgcagtgtctgctcaatttcattctgtttcagcaacagagacgttggtgcctcgtggaaaccatgctcatagcttccatcaccgttcttgtccagggtgtccagactgttcaaggactattatcaacggttaccaaggcacagccctgcaaagatgggtcaaggccttttcatctgataatggggatgtcgtggaanctgttgtgcacacatgggtgaacaatcactgatggaacctancgcctttcgaanaaactggggaa

SEQ ID NO: 4669 - DNA, 441 bp, Arabidopsis thaliana
  unsure at all n locations
  Clone ID: LIB22-029-Q1-E1-C11
gctcaatttcaggaacccagaaagagggacttgtcttttacctccaaagggttcctgccgtttcttttctacaatttttctcctgctaattatcaaatttttcttctgattttcattgtttgttagagattcttcttctcctctgcttttctattctctgggagctcgatgatggatgataaagctcgcaaagaagaagaacatcatgtgtctcaccaacataatcattctcctctgcaaagggatggaaattctgctgagattgcacaaggacaagagctatcatcaccgggccgagacctatggaggcgangtctgtgttagatttaccatcaacaacacctgaagatactacaagagatgatcttttagacgaaatgcatctttaacntcaagtcctgttgccaaaagaatcaacttttctccaaaggtccaacccta

SEQ ID NO: 4670 - DNA, 523 bp, Arabidopsis thaliana
  unsure at all n locations
  Clone ID: LIB22-029-Q1-E1-C12
ctggtttcctgggccgcacggtccggaaantccggggcgcacctgtaatttctataatctcgtcaattatcatctattcaggggtaagctatgggatgtgcttcttctcttccagataggaactctggaactttaagtggtcttagcaattcagagaatgctgttccagctgatgccaaaaatctacgtgtgaagttagttctattaggagactctggtgttggtaaaagttgtattgtccttcgatttgtacgtggtcagtttgacgctacatctaaggtaactgttggagcctcgttcttgtcccaaactatagcattgcaagactctaccacagtgaagtttgaaatatgggatacagcaaggacaggaagaaggtattctgctccttgcaaccaactaataccaaccgtnggaagcctggaatttgctggttaanttgtgntatggataataacaaagcccctggaaatccgtttcaaaggaaaaagccacaagttaattggggtttaaagggaaacct

SEQ ID NO: 4671 - DNA, 504 bp, Arabidopsis thaliana
  unsure at all n locations
  Clone ID: LIB22-029-Q1-E1-A4
atgtctccggntccaccggcccgannatccgggtcggccaagcctncggnanangggtnnaccaannccctttnctcccatggaanaaancancancncggccgttgtggattttcctgacaactttatggaccagctcttgtgggaggagtgctgggaagaagaggcaacgcagcatgaccaggcattatcatcaccatcagggctgaaggagagggtggcttgcgccatggggcacctgcaagaggtgatgggagagagggagttgctgatccagctgtgggtgcctgttgagacaaggagcggccgagtgctgagcacggaggancagccttactctatcaacaccttctcccagagccagagcctggccctctaccgagacgctcagctggctacaacttcgcagcanaagttggtcggnnaactggtggggctgctgggccttntgttccnaaggaaatgcctgattggncccaaacnttcggtttttcaggaaggagg

SEQ ID NO: 4672 - DNA, 467 bp, Arabidopsis thaliana
  unsure at all n locations
  Clone ID: LIB22-027-Q1-E1-E12
tttatcnccggcacggtcaaaaacccgggncgacccacgcgtccnttttgttctgattctccccacttgaccaaccccgtgaggataaactgttgccgacgcttctcgccgataacaccggttttgttgtgacggaaaggaaaaatgggtttgatttctgggattctgttcgggattatcttcggcgtanctctaatggctggctggagtcgtatgatgactcaccgatcgtccaagcgagtcgccaaggcagttgatatgaaactactaggctctcttagcagagacgatttgaagaaaatttgtggtgataatttccctcaatggatatcgtttccagcatttgaacaggtcaaatggctgaataaactactgagcaagatgtggccatatattgcagaggcagcaacaatggtaataagaaattctgttgaacctctgcttgaagaatacagaccaacaaggaa

SEQ ID NO: 4673 - DNA, 475 bp, Arabidopsis thaliana
  unsure at all n locations
  Clone ID: LIB22-027-Q1-E1-E2
nccgtaccggtcaaaattcccgggnccacccacgcgtccagntctactagcaagggttgcaccatgtgaaatttggaaaatggnaaggtctgaatattccaactctagcactgtaagttcggaaggcagtgttcaagatctaagtcagaagattagtcaatcggatgaagcatcttcaaaccatcaggaaacgggtctggtgaagctctacagtgttggtgaaagttgcaacgagaacattccggaatgtagttcatttttccttccaaaagctgccattggatttatcacaaaccttgcatcaagcctttttggttatcagggttccacttcggttataagttcacattcacgttgcaatgattctgaagatcaaagtgactctgaagtccttgttcaagaaacagcaagaatcatatgacaactctgaaacaaattcaggtgaanttggtatgaccacaacgatggtcaacat

SEQ ID NO: 4674 - DNA, 432 bp, Arabidopsis thaliana
  unsure at all n locations
  Clone ID: LIB22-027-Q1-E1-E7
ncagaaacattttgangttaagtttttgaaaaaatcgcgagtttctggatctgtatactttcttagaggagattttgatagcatcgtttacaggagtaagatccgggaatggcaatggaggttggggagatgtctcagccggaggcgacggcgagtcttctctctctcgcttccgccactcagcaaccgtacgtctccgagctcctctctttcactcttgatcgtctccacaaggaaccggagctgcttcgagtggatgcggagcggattcagaggcaaatgcaagaggtggctgttggaaattaccgcgcgtttatcaccgctgctgatgctttgcttgcgatccgtcaggaagtttcttccattgataagcatctcgagtctctgattggcgaagtcccaaaactaacgtccnggttgcactgaattatc

SEQ ID NO: 4675 - DNA, 477 bp, Arabidopsis thaliana
  unsure at all n locations
  Clone ID: LIB22-027-Q1-E1-F1
ttctcccgnccgtaccggtcacaaatccgggnccacccacgcgtccaaaaaaacactactcttnncntcntcttctctctactctattctaattctaaagagagagagaaaagctatggatggatatgaagctactaggattgtgctctctagaatccaaagcttagaccctgaaaacgcatcaaagatcatgggtcttctccttcttcaagatcacggtgaaaaagagatgataaggctagcttttggtccagagactcttgttcactctgttatagtgaaagccaagaaagagttaggtctcatgaactgttcaaggtctccgtggagtcatcaagatgagttgattagccctaagaacaaccgtggctcttcactcaatccaacttccttgcccttttacctaatggaggaagatntccaaggaattaaccaacgaattcaactcatggatgatatgaactccagaagtaatga

SEQ ID NO: 4676 - DNA, 465 bp, Arabidopsis thaliana
  unsure at all n locations
  Clone ID: LIB22-027-Q1-E1-F10
ttagntcgccacggtcacacaacccgggccgacccacgcgtccaggaatttgaaaaaccttaaactggactatcttgatctttatataattcattggccggttagctcgaaacctggtaaatacaagtttcctattgatgaagatgattttatgccaatggatttcgaagtagtgtggtctgaaatggaggagtgtcagagacttgggctcgcaaaatgcataggagtaagcaatttttcatgtaagaagcttcaacacatactctctatcgcgacaatcccgcctagcgtcaatcaagttgagatgagtccaatatggcaacaaagaaagctaagggagctttgtagatcgaacgacattgttgtcacagcgtactcggtgttgggatctanaagagctttttggggaactcccaaaattatggaatctgatgttctcaaagaaatagcagaagcaaaggaaaa

SEQ ID NO: 4677 - DNA, 472 bp, Arabidopsis thaliana
  unsure at all n locations
  Clone ID: LIB22-027-Q1-E1-F12
ttctatctaggccggccacggtcatacntacncgggccgacccacgcgtccaannaaaaaatagtgaagacgacgaacctttgaggacactcttcggtttctccaatccttcatatgatgtcggacggaggagcaccgtcgagatacgtgaagttgacganggnacaagctccggtcgatgagattcatcccggtgaantcaatcancccattgangtttctcatctagctgttcacaaatgcantgagtgtggccaacctttgcctgagaattttgaagctcctgctgatgagccctggactaccggaatattcggctgcactgaggacatgaatagtttttggntgggacttttctgcccaagtgttctatttggacgtgtctatgaaactctgantgatgaggaaacctcgtggaaganagcatgtatttgcattccattgtantanaaagcggtcttactgctgcatc

SEQ ID NO: 4678 - DNA, 443 bp, Arabidopsis thaliana
  unsure at all n locations
  Clone ID: LIB22-027-Q1-E1-F7
tttacngggccggtaccggtaanacattcccggcccgacccacgcgtcnanaggaattggatggnggaggaggcaaggcttgtggattatttcgatgtcatctcaggaacaagcaccggaggtttgatagtggcgatgttgaccgcacaagaccaaagcggtggccatagccgcaacagcaaccgccctttgtttgaggccaaagaaatcgtccctttttatctcaaacactcacccaaaatctttccacanccacgagggatattctgtggttggggtgaaaccatagtgagacttgtangaggacccaagttcaacggtaaataccttcatgacttangntgaaggtttcttgggcgacacaaaattaactcantctttgacaaacgttgtcataccttgcttcgacatcaagananctccaaccagttatccttcncctc

SEQ ID NO: 4679 - DNA, 459 bp, Arabidopsis thaliana
  unsure at all n locations
  Clone ID: LIB22-027-Q1-E1-F9
cgcccaccggtcatacaatcccgggccgacccacgcgtccacggacgcgtggggcatccacatgttgacaagattgtattcactggaagcacaacaactggaagcagcattatgacttccgctgccaaattggtgaaaccagtttccttggagcttgggggtaaaagccctatcattgtctttgatgatgtcgatattgataaagctgtggaatggactatgtttggttgtttctggacgaatgggcagatttgtagtgccacatctcgacttcttgtgcatgaaaggattgctgacgagtttttggacaagctggtaaagtggaccaagaacattaagatttcagatccttttgaagaaggctgtangcttggtcctgttgtcagtaaaggacagtacgagagagttctaaagtttgtctcaaacgctangaatgaaggtgcaactgttcctttgtgg

SEQ ID NO: 4680 - DNA, 487 bp, Arabidopsis thaliana
  unsure at all n locations
  Clone ID: LIB22-027-Q1-E1-G1
ttctagcnggcccgtaccggtcanaaatcccgggcccacccacgcgtccaaagacgcgtgggcggtggcgtgggttacctttaacaaacaaaaaatggcaagcgcgaatccagaaaccgccaaacccacgcctgcaacggtggacatggctaatccagaggagcttaagaaagttttcgaccagtttgactccaacggcgacggcaagatctcagtcctcgaactcggcggtgtgtttaaggctatggggacttcctacacagagacggaactcaaccgcgtgctcgaagaagtcgatacagatcgcgacggttacatcaacctcgacgaattctcaactctctgtcgctcgtcttcctccgccgcagagatccgtgacgctttcgatctctacgatcaggacaaaaacggactgatctcccgcctctgaagcttcacaaggtgcttaancgtctccgggangtcctgcnccgttgaaaaacgtacc

SEQ ID NO: 4681 - DNA, 431 bp, Arabidopsis thaliana
  unsure at all n locations
  Clone ID: LIB22-027-Q1-E1-G11
cttcttctccgatcttcaaacattccggccgccaccgagttcttagccgttacaatgtcttcctctatgaacgtagcgacgatgcaagcactgactnnnnnnnnnnnnnnnnnnnnnnnnnnnnnnnnnnnnnnnnnnnnnnnnnnnnnngtgaccgttactggatactccggtagaagctcggcttacgcgccttctttccgttcgattaaatgcgtctctgtttctccggaagcttcaatagtaagtgatacaaagaagttggcagatgcttctaagagtacaaaccttataccaaatttaccgctgtatantccccgattagcttaatcctggttccttggcttaaccgttgttttggtcaaaagaaagatgaancggtgaaagctccctaaccttccnttttcgaagtccggtttgaagcctgggtt

SEQ ID NO: 4682 - DNA, 454 bp, Arabidopsis thaliana
  unsure at all n locations
  Clone ID: LIB22-027-Q1-E1-G12
cggtcanacaacccgggccgacccacgcgtccncccaagcgtccgacacttttcangaaaannntagaatactgagtactaaactggnaaccctttataagcaaaaagaccaanagttaaaagttaattaagatttggtttaaggcgctttgctttattagagaggaaggaacgaaccatcatagaaatctctccttcgttcaagtttttctctactgtgttggttgagcaatcgagtgatggttattgcggtggcgacgacgagctccattgtttccggaatcaagctttcagggatcttaacttcgttcaacgccgtagatgatgcgtccagtagttgcggaagaagcaacttgaccggagttagaatttttccgacattgaatcggcgacgattctcatcgattggagctgtttccccaattcgtggggatgctcaatcttccttaatccg

SEQ ID NO: 4683 - DNA, 472 bp, Arabidopsis thaliana
  unsure at all n locations
  Clone ID: LIB22-027-Q1-E1-G2
cggcccgtaccggtcaaaattcccgggncgacccacgcgtcnaaaaaagtaaaacatcananagatgatctataaaaatggaacgagacggatcatatgcaaaccataaaattaaactatctgccaaacacttaaaaaatcaactctagagatgggacttgagacaaaaccaaacctctcctttgtactcatcatcctactactcggcttctttgcagtctcttacgcttccgttcctcggaaactaaatccacatcaacgcatcggtttcttgaagcccttcccgaaagtcttcaccttcaagcccttaccaaaagtcttccccttcaagccctcaccgaaagccttcctccccaagccgatnccggttactccaaaaccagtcccagttaagcgaccacgaccaccaactcctgagttcgattctccaactgacgtagcccaactcctcccctcctctccaggcttctca

SEQ ID NO: 4684 - DNA, 473 bp, Arabidopsis thaliana
  unsure at all n locations
  Clone ID: LIB22-027-Q1-E1-G4
nccgtaccggtcacaaaattcccgggcccanccacgcgtcnagaacaatctgaaggttntggattcattgagttcgtcagccactctgtagcagagcgggttttgcagacttacaatggtgctcccatgccgagcactgaacagacgtttaggctcaactgggctcaggctggggctggagagaaacgattccagactgaagggcctgaccataccattttcgtaggtgacttggcacctgaggtgactgactatatgctctcggacacattcaagaatgtgtatgggtctgtcaaaggggctaaagttgtgcttgacaggaccactggaaggtccaaggggtatgggtttgttaggtttgcggatgaaaatgagcanatgcgtgccatgactgaaatgaatggtcaatactgctcgacaaggcctatgcgtattggtccggctgccaataagaatgctcntccgatgcaacc

SEQ ID NO: 4685 - DNA, 435 bp, Arabidopsis thaliana
  unsure at all n locations
  Clone ID: LIB22-027-Q1-E1-G8
acccacgcgtccgatncnctcttctctctccaatttcacaacaatgggagtcaaaagtttcgttgaaggtgggattgcctctgtaatcgccggttgctctactcaccctctcgatctaatcaaggttcgtcttcagcttcacggtgaagcaccttccaccaccaccgtcactctcctccgtccagctctcgctttccccaattcttctcctgcagctttcctggaaacgacttcttcagtccccaaagtaggaccgatctcactcggaatcaacatagtcaaatcggaaggcgccgccgcgttattctcaggagtctccgctacacttctccgtcagacgttatattccaacaccaaggatgggtctatacgaaagtgcttaagaacaaaatgggactgatcctgagtcanggaagttgaatctgantaggaaga

SEQ ID NO: 4686 - DNA, 397 bp, Arabidopsis thaliana
  Clone ID: LIB22-027-Q1-E1-D9
tttctctaccccaccttctgctctgcttccgagagctcagtgtacctcgccatggaaccaaacaccatggccagcttcgacgatgagcatcgtcattcctcattctcggctaagatttgcaaagtctgtggcgatgaggtcaaagacgatgacaatggtcagacttttgtggcgtgtcacgtgtgcgtttacccggtttgcaaaccttgctatgaatatgagcgtagcaacggtaacaaatgttgccctcaatgcaacactctttacaaacgccacaaaggctctccaaaaatcgccggagatgaagaaaacaatggtcctgatgattcagatgatgagttgaatatcaaatatcgccaggatggttcctccattcaccagaattttgcctaaggat

SEQ ID NO: 4687 - DNA, 431 bp, Arabidopsis thaliana
  unsure at all n locations
  Clone ID: LIB22-026-Q1-E1-H5
gctgataganagtaganagacacacgcacattttgagctgcgtgctctgttttaagcttgaaggaggaaaaacatggcagaccaanaatcagataagaacattgagatttggaagatnaagaanctaatcaaaggacttgaaaccgcaagaggtaatggaacaagtatgatctctcttataatgcctcctagagatcaagtacctcgtgtcactaagatgcttgctgatgaatacggaaccgcctcaaacatcaagagtcgagtgaatcgtcaatctgttttatctgccattacttctgctcaacaaagattgaagctttacaacaagagttcctccnaatgggtcctgttctctatactggaaccantgttactgatgatggtaaaagagaagaaagtgacgattgatttcgagcctttaaaccgattaa

SEQ ID NO: 4688 - DNA, 412 bp, Arabidopsis thaliana
  unsure at all n locations
  Clone ID: LIB22-026-Q1-E1-H9
ncaagacggcacaagtaaaaaatggctgaagaacctactactaccactctcgttacaccggaaaagctaccttctccgagcctcacgccttctgaagtatctgaatctactcaagatgccctaccgacagagacagaaactctggagaaagtgactgagactaatccaccggaaactgcagataccaccaccaagccagaagaagaaaccgcggcagagcatcatccaccgacagtgacggaaacagaaactgcatcgacggagaaacaagaggttaaagacgaagcatcgcagaaagaagtagctgaagagaaaaagagtatgattccacaagaatcttggttcattcaaagaagaaagcagcaaactttctgatctatctaattccgaagaaagaaatcactcgatgaac

SEQ ID NO: 4689 - DNA, 473 bp, Arabidopsis thaliana
  unsure at all n locations
  Clone ID: LIB22-027-Q1-E1-A12
ttctattccgncggcaccggtcanaaaatcccgggncgacccacgcgtccgaccacgcgtccgccgaaaccgaaactactaaccctaatctctcacatcacataaacaatcacttcacatagccgcaaaatttaatggcagacgtcaaggttcaatccgaatccgaatcctcggattctcatcccttggtcgactatcaatcacttccaccttatcctccgccgcatccaccggttgaagtagaggagaatcaaccaaaaacatctccgactccgccgccgccacactggatgcgttatccaccggtgttaatgcctcagatgatgtacgcgccgccgccaccgatgccgttctcaccttatcatcaatatccgaatcaccaccactttcaccatcaatctcgtggtaataagcatcaaaacgcttttaatggtgagaataaaactaattgggttggtgatttgcaaaactgg

SEQ ID NO: 4690 - DNA, 482 bp, Arabidopsis thaliana
  unsure at all n locations
  Clone ID: LIB22-027-Q1-E1-A2
aattttcccgcccgtaccggtccaaaaatcccgggncgacccacgcgtccngttctttgtcgtcctttgnttcgtctttcattcattctcctttgtgttttctctttttggagattttaacttcagtttttgtctaattagggttttaatttaaattggagggaaattttagatgcagtgacgtagtttttgggtaaattttcgtcggattctgaattgtctccggcgacatggcttctaatctccccatgagccctcaattggagcagatccatggcgaaatccgtgaccatttccgagccctcgcgaatggtttccagaggttggataagattaaggattcaactagacaaagcaaacaacttgaagaacttactgacaagatgagagagtgtaaaagattggtcaaagagttcgaccgtgaactcaaggatgangaactagaaatcccctgaagtaaataagcaattgaacgatgagaa

SEQ ID NO: 4691 - DNA, 431 bp, Arabidopsis thaliana
  unsure at all n locations
  Clone ID: LIB22-027-Q1-E1-A8
aaaaaaaccttcgtgtgcgtctctcgtcctctaaattgtcgaaaatgctggctaggctcgctgcgaagcgtcttctcgagatccgtcaagttttccgtcaaccaacctctcaggtgactcgtagcttatcgacggccttaaactaccatctggattctcctgataacaaacccgatcttccatgggagttttcagaggctaaccaatctaagaatcggctattctggaactgatttaagggagagacttagagtgaacgacccaaatggccaacagatttgaatctgctagtgtggcagaaagactgtccagaaattagtaaaccggtttcattgtagtttaaatcctaatactttcttgtgcatttagttccagtttactgtatcttcattctgggctacagtaatcntgcataacggtgaaatcgattt

SEQ ID NO: 4692 - DNA, 413 bp, Arabidopsis thaliana
  unsure at all n locations
  Clone ID: LIB22-027-Q1-E1-A9
nacactctcactactttctattgcatctgtgcacccagagttgggcaatgatgcgcnagggagaagcggagaagcagaagcagtatgttgcacttgtatggatttctcgtccacttgaagagaaagacttcaactcaatttcttgcctgaaagaattgaaaatcttgcagaagacaccagtaagagtgcttcaccgacgaagtccactggaccgtgaaaagattatacattggatgaaagttgaaaagataaaaggacactctcactactttctattgcatctgtgcacccagagtttgttcatggagatcttggtcgtaccactcccagcatgggatcaattttagggtgcanagcggagataatacaactagatgtgactgatgtgaaantgggcgaaccaatgaatncca

SEQ ID NO: 4693 - DNA, 471 bp, Arabidopsis thaliana
  unsure at all n locations
  Clone ID: LIB22-027-Q1-E1-B1
cccgtacggtcanaaattcccgggcccacccacgcgtccaaaagacgcgtggnggatgaaacatacggaggaggctacggagctccaccaccgtctggatcttcagattacggaagttacggtgctggacctcgtccgtcgcagccgtctgggcacggtggaggatacggagctactccaccgcatggggtttctgactatggaagttacggtggtgctccacctcgtccagcgtcttctggtcacggtggcggatacggaggttatcctccgcaagcctcttatggaagtccttttgcttctctgattccgtcaggttttgctccggggacagatccgaatatagtggcttgctttcaggctgcagatnaagatggtagtggctttattgatgataaggagcttcaaggagctctctcttcntatcaacagagattcagtatganaactgttcancctcctaagtaccaa

SEQ ID NO: 4694 - DNA, 431 bp, Arabidopsis thaliana
  unsure at all n locations
  Clone ID: LIB22-027-Q1-E1-B8
nactttatctcccaanggngaaaactcctcttcaccaacttaaaccctattaactaatcccaacaatcagatgtttcgaattcaacaaccagctcaggccataagattcatcccggagaaacaagaacgatgacaacacataaacatagaagaacagagaaaaatctctgttttaagcaatactacaaatggatcctctgttttatcctcactctctatttttttgcttccttctttgtcgaccatgatcaagatcatagatcttctacttccatatcaaagcatcttcttactaaccataaacctaagcttttcgcttctcgtgccatgtttgaatctaaaatccatgatcacaaacttgggtttacctctcaacaacctaacatcaaaacagacgtatcaacaatttgaaatctacgtcnatgacttac

SEQ ID NO: 4695 - DNA, 407 bp, Arabidopsis thaliana
  unsure at all n locations
  Clone ID: LIB22-027-Q1-E1-C10
ctttcatttcactcgatcaagtttgagcttagcttttaaaanaagagagaaacaaatcatgaggacaatggttgatttaggaaancaaagagatcataactatcaccacatgcaaatcataaccactcctacctccgtggantgttctcgcgaattccgtcaccgangaacacttcgttcactcatcgaatgcatgattccatactgttgcacttaccaacaacanccataccaanacgacaccctttcagtcncntccacttcatcntcgtcntcatcctcagaccactcttccncctcccanagtagcantaccgtatgtggaactttcttcggacaccgtcntggccgagtcagcttctgccttcaagacgccgccgtgggatcttcaacgctgctcctnctcg

SEQ ID NO: 4696 - DNA, 474 bp, Arabidopsis thaliana
  unsure at all n locations
  Clone ID: LIB22-027-Q1-E1-C12
aattctatttagttcgncacggtcacacnatcncgggncgacccacgcgtccagacactgttctctagttcccatcgacgttcttgatcctctctggttcgcacccgtgtttttaatcaattctggttcgcataggtgactccggtactgtttcttcgtcgatagccttttcctatggccacaacagaagatactccagcttctgctggtccaagatatgctccagaggacccaactcttccccaaccatggaagggacttattgatggaagcacaggaattctctattactggaatcctgaaaccaatgtcactcagtatgaaagaccttctgcgcctcctccccactctgccacaacaccgaagctagctcagattcctgtaccctcttcaggacaaggtcaccaagctcagcatgaacaagcaaaaccagttggtcatgtgtctcagcagcatggttttcaacaacaagcc

SEQ ID NO: 4697 - DNA, 484 bp, Arabidopsis thaliana
  unsure at all n locations
  Clone ID: LIB22-027-Q1-E1-C4
ctctccngcccgtaccggtcaaaaattcccgggcccacccacgcgtccagatgtttattgttagtggnagaggtagagagtctctgagcaattggctatctccttgtgaaaatcttggaatagcagctgaacatggatacttcattagatggaagagcaaagatgagtgggagacttgttattcgcctacggatacagagtggaggtcaatggtggaaccggttatgagatcgtatatggaggcaacagatgggacgagtatagagtttaaagaaagtgctttggtgtggcaccatcaagacgcagatcctgactttggatcatgtcaagctaaggagatgcttgatcatctagagagtgttctcgccaatgagcctgtggttgtcaagagaggtcaacacatcgttgaagtcaaaccacaaggtgtaagcaaaggtctaactgcggagaaagtaatcccgagaaatggtanaaacccggggag

SEQ ID NO: 4698 - DNA, 455 bp, Arabidopsis thaliana
  unsure at all n locations
  Clone ID: LIB22-027-Q1-E1-D12
nccacggtcatacatacccgggncgacccacgcgtccanggacgcgtgggccattttcgccacgggtatactagaaatgangtggagtggcgtangcatagacgaatggtggagaaacgagcagttttgggtcattggtggantatccgctcatttattcgctgtgtttcaaggtatcctcaaagtccttgccggtattgacacaaacttcacagttacctcaaaagcttcagatgaagacggagactttgctgagctctacttgttcaaatggacaacacttctgattccgccaacnacnctgctcattgtaaacttagtgggagttgttgcaggagtctcttatgctatcaacagtggataccaatcatggggaccactctttggtaagttgttcnttgccttctgggtgattgttcacttgtancctttcntcaaaggtttgatgggtcnac

SEQ ID NO: 4699 - DNA, 487 bp, Arabidopsis thaliana
  unsure at all n locations
  Clone ID: LIB22-027-Q1-E1-D2
aacttctcccgcccgtaccggtcaaaattcccgggncnacccacgcgtccnncaacaccgaaagtacagagatggaattgacaatctcttggtcctcttgatcggtggtatccccattgctatgcccacggtcttgtctgtgactatggctatcgggtctcacaggttgtctcagcaaggtgctatcaccaaacgtatgacagccattgaagaaatggcgggaatggatgtcctttgcagtgacaaaaccgggacactaacccttaataaattgagtgtggataaaaacttggttgaggttttctgcaagggtgtggagaaagatcaagttctactatttgcagctatggcttctanggtggagaaccaggacgctattgatgcaaccatggttggaatgcttgctgattcgaaagangccgagctggaatcaagagaagttcacttccttccaatcaaaccctgttggataaagagaactgctttg

SEQ ID NO: 4700 - DNA, 468 bp, Arabidopsis thaliana
  unsure at all n locations
  Clone ID: LIB22-027-Q1-E1-D8
gtaccggtaaanaattcccgggccgacccacgcgtcnaccgatgcgaacaatcagtcgaaggagtagtcaagcgcactcactctaacggcgtaccttttgcatgatgggtcagcgaggaaatgggaagagcggcttaagccattaggtgtaggcgctttccaaaggtggaatcttctagttcttcctatttgacccgaaaccgatcgatctagccatgagcaggttgaagagagctctaacaggccttggaggaccgaacccacgtatgtggcaaaatacggggatgacttgtggctaggggtgaaaggccaaccaagatcggatatagctggttttccgcgaaatctatttcagtagagcgtatgatgtcgatggcccgangtagagcactcaatgggctaaggtggcccatttcgccttacaaccccaagggaaactccgaatacaggccgttctcgtttgtacag

SEQ ID NO: 4701 - DNA, 429 bp, Arabidopsis thaliana
  unsure at all n locations
  Clone ID: LIB22-026-Q1-E1-H2
acggacgcgtgggcggacgcgtgggtggatagtgttgcaaatcaagtagtatcttctttagacattcttggctgagagatttacactaaaagcatagaataagaaacccctgtttggttagtatctacccgagtctcgtagtcctacacagatccggatcctagtttcgaagctagttcttgtttagctgaagctcagacccaaaatgctccaagaaccgtcggctgcattctccctccggcgtaactcattcagacgccgatctcccagatnaaatgtcgatgacaagaggctggaatccgctccatatcaaagccaagaaaangngatntgaaatctgtcaagcagcttctcgaccaaggaatggatgtgaatgctctaacatggggaaccaaatcaaaangagtnagttgcacttcaacttgcanc

SEQ ID NO: 4702 - DNA, 454 bp, Arabidopsis thaliana
  unsure at all n locations
  Clone ID: LIB22-026-Q1-E1-F10
gttcgcncaccggtcacacacanaagtnccnggcnacagatccggngtcaagcggtggtatttctgacgtctacggtgaggattccgccaccttggaccagcttgtcaccccttgggttacctctgtcgctagtggctacacattgatgcgtgatccgagatacaacaagggacttgcgtttactgataaagaaaganatgctcagtacttanctggtcnncatccccctgtgattttnngtcacagatgttcatgagaggaaggtgatgcacaatctccgtcagtacactgttcctctgcagcgttacatggccctgatggatcttcaggaaaggaacgagaggttgttctacaagcttttgattgataacgttgaggagttgcttccagttgtgtacacaccaacagttggtgaggcttgccagaagtatgggagcattttcaagaaaccac

SEQ ID NO: 4703 - DNA, 404 bp, Arabidopsis thaliana
  unsure at all n locations
  Clone ID: LIB22-026-Q1-E1-F12
ntctgacactaccaggcggcgttctgatcaatctacctatccttctagtccaacgcgacacggagctgtggggaaacgatgcaggagagttcaagccagatagattcaaagacggtctctcaaaggcaacaaagaaccaagcctccttctttccttttgcgtggggatcgaggatctgcattggccagaattttgcattgcttgaggcaaagatggcaatggcattgatactccagagattctcctttgagctttctccttcctatgttcacgcaccttacacagtcttcaccattcacccacagttcggtgctcctcttatcatgcacaagctctaatcgttcgtagcaacccattttgttgttatcaaatatactttccaatcacaagatgaaacaanttca

SEQ ID NO: 4704 - DNA, 409 bp, Arabidopsis thaliana
  unsure at all n locations
  Clone ID: LIB22-026-Q1-E1-F3
aaancttactcacatttacnatcnaagaactgggttttgagatcagggttgcantacggtgtggattttgtggcacancgtcaccatccatctcttgtcnactcggaatactcggttttagttcagtctggtgacagtgatcggttaagagtgtggtcagatatccattgtgctgttaggttaancggaactgttgcgaaaacgttgttgactctctacattaatggtaacttcanaggagaggatgtgaatctacttgtatgtttggagaacttcacantgnaagaacatncnanaantagatggagcccagaactcagtcntgaagatnaatccacacattcacaacagcatgttcncaacgtgagtaatttgaacactctttgaggaaacaatctcggtacncaag

SEQ ID NO: 4705 - DNA, 428 bp, Arabidopsis thaliana
  unsure at all n locations
  Clone ID: LIB22-026-Q1-E1-F6
gctcattctctcttcctcatatatttccaaaacaatacctttcntcttctctcttcagaagaaacgagagattcgagtgatgttttatgaactactantagtgtttntttccgtgaagtaaagagaaacggtaactttttctatttgttttcaagaaaagccaaagaaaaaaagaatttttaatatactctgttttttgcaatgattttgttttgtgaaatttttctcggagaagaaagtaatttagaagacggagagtggcannacgaaatataaaaagaaaagttttcaatttcttttaagaaaaanaaaagctttttcccttcntaaaacccttcctcngtttcagaagcaattgacataagaaagaaaatngattanaagctaattgngttcncatcncctcntcctctacagggttttaaaag

SEQ ID NO: 4706 - DNA, 468 bp, Arabidopsis thaliana
  unsure at all n locations
  Clone ID: LIB22-026-Q1-E1-F7
ggtaccgaacttnaattcgcnggtcgacccacgcgtccanccacgcgtccgggataatccagctatgaccttggacgaggtttccatggaacgcaacaagagcttcgttaaggcattgcaggagctcaagaacttgaggcctcaactttattcagctgctgattactgtgaaaagtcttatcttcatagcgagcaaaagcaaatggtattggacaatttgaaagactacactgtgaaggctctagttaatgctgttgatcaccttggaactgtagcttccaagcttactgatctttttgatcaccaaaattcagacatatcaactatggaaatgagagcttcttgtgttagccagcaactgcttacatgccggacatatatcgacaaagaaggtcttagacagcaacagctattaacagttatcccattgcatcacaagcattacattcttcccaattctgttaacaa

SEQ ID NO: 4707 - DNA, 425 bp, Arabidopsis thaliana
  unsure at all n locations
  Clone ID: LIB22-026-Q1-E1-F8
aagaaagcaatttgtcttcaaaacatatttctctctctaaaacctctttttcataaaaggttgcgtcatctatacgaatccatacgtctctttgcttttctccgatcggtcttcttttctcatcgccggaacgctttggtttaatggggcacaagacattttcntggntcaacccagttttttgatgatgancatnatcaaggctggaatcatacacacccagaacatccatattcgagtcaagcaacatctgggaccagtgagaacagatcacatgtttatccancagaanacatgttgaatgaaggaatgccagtgtcttctcattggaactcttctccaggaccaaatgcttatactgactcaggtcatagtgtggagagaccacactacatccgggggtttccggggccgttccaagatcc

SEQ ID NO: 4708 - DNA, 467 bp, Arabidopsis thaliana
  unsure at all n locations
  Clone ID: LIB22-026-Q1-E1-G2
ccaccggtcagacanatcacgggccgacccacgcgtccatatagctccacgcgctcgtgtcgctgtttacaaagtctgttggctcggtggttgtttcagctcagatattttagctgcaatcgataaagccatcgccgataacgtcaatgtcntgtcnatgtcactcggcggtggaatgtcggattattatagagacggtgttgcgatcggagcattcgccgccatggaaagagggattttagtancttgctcagctggtaatgctggtccgagtagttctagtttatcaaacgtagctccatggatnacaactgttggtgctggtaacttagatngtgattttccggcgcttgccantctccgtaacgggaagaatttcaacgggagtttccttgnttaaaggaaaanctttaacggataaattgtgccgtttaattacgctgggaaagctagtaatgctactaaat

SEQ ID NO: 4709 - DNA, 462 bp, Arabidopsis thaliana
  unsure at all n locations
  Clone ID: LIB22-026-Q1-E1-G4
cggtcanaaatcccgggccgacccacgcgtccaggatttttaggtcagatatcgtccatggaagaggctgattttgccgagaaagatccttctggccgttacatcaggtatgatgatgttctggggagaggagctttcaagactgtatataaggcgtttgacgaagtagacgggattgaagttgcttggaacctagttagcattgaagatgtaatgcagatgcctggtcaacttgaaaggctatattctgaagttcatctactaaaggntctaaaacatgaaaacatcatcaaactcntttactcntgggttgacgaaaagaacaagactattaacatgatcactgagcttttcaactccggtaatcncaaggtatatcgtaagaancataagaaagttgattccaaaggcatcaanaactgggcaangnaaattctcaaaaggctgaactaattgcaatcc

SEQ ID NO: 4710 - DNA, 430 bp, Arabidopsis thaliana
  unsure at all n locations
  Clone ID: LIB22-026-Q1-E1-G5
nctgaatccaaagcctctctctttatgacacaagatcgctcagaaatgtctgaagatgacgatgaccaacaatctccaccgttggatctaccctctaccgccatagctgatccttgctcatcttcctcttcaccaaacaaatctcgtaactgtatctcaaattctcaaactttccctgaccatgttctcgaaaacgtacttgagaacgttcttcagttcctagattcaagatgtgaccgtaacgctgcttctctagtttgcaaatcttggtggcgtgttgaagctttgactcgatctgaggtttttattggtaactgttacgctctttctccggcgaagttgactcagagattcaagcgtgttaagtctcttgtgctgaaagggaaacctaagtttgctgatttcaatctcatgcctccctgaatggggg

SEQ ID NO: 4711 - DNA, 418 bp, Arabidopsis thaliana
  unsure at all n locations
  Clone ID: LIB22-026-Q1-E1-G7
cgtggagatttaagaagtctgaaattgttagatcgcagctatgtcgtactctgactccgattcgtcgtctcatggtggcgagtacaagaatttccgacagattacgcgtgaacgactcttgtatgagatgcttagatctgcaaagacagggagctcaaaatccacctggaaggtactaatcatggacaaacttactgtcaagataatgtcgtacgcctgcaaaatggctgatatcacacaagaaggagtttcattggttgaagacatatttagacgaagacaaccacttccttcaatggatgcaatatacttcatccagccaactaaagagaatgtcatcatgttcttgtcagacatgtctgggaaatcaccttgtacaagaaggcattcgttttcctcagttcaacggnttccaagg

SEQ ID NO: 4712 - DNA, 441 bp, Arabidopsis thaliana
  unsure at all n locations
  Clone ID: LIB22-026-Q1-E1-G8
gcatgcatcnaagttcttagtgggccgtttttggtaagcagaactggcgatgataggatgaacctaacgttgagttaaggcgcccaaatgcacgctcatcagataccataaaaggtgttgattcataaanacagcaggacggtggccatggaantcggaatccgctaaggagtgtgtaacaactcacctgccgaatgaattacccctgaaaattgatggcgctgaagcgtgctgccgatactcaaccattagtgcanntttaatatgangcnctaatgagtaagagggcgtggggacaagtgtaaaancctttancgtgagcttgggtggaactgtctctagtgcagatcttggnggtantaacaaanattcaaatgagaacttngaaggccgaantgnaaancggttccatgagaacagcaattgggtcatgggntactc

SEQ ID NO: 4713 - DNA, 407 bp, Arabidopsis thaliana
  unsure at all n locations
  Clone ID: LIB22-026-Q1-E1-G9
ntctctcactggtaaaaagcaaacaatgttgctccgtcgtgcaaaaacactacccaaaaccctacaaaacctccggttattctctccggcggcgaacgcagctctatccctagatcatatccaagaaacccaattaacttacctccctggattccctcgacccgatccaaaacacgcagagacgatcttagccgttccaaggtctgtctccggcaagagcatatcagcgaaagagcgtaaagcgggtcgggttccttcgatcatattcgaacaagaggatggacaacacggaggaaacaagaggcttatttcagttcagacgaatcagatcaggaagcttgtgaatcatttgggttactcttttttcctctctaagctctttgatgttgaagttcgaactgagaatg

SEQ ID NO: 4714 - DNA, 404 bp, Arabidopsis thaliana
  unsure at all n locations
  Clone ID: LIB22-026-Q1-E1-H11
ngagaagagagaagagagaagaagaaggccatggaaagataatactctgctttttttttagaaatatacagaggaaataaagagagagagaaggagatggcgtattcaagcgattctgtctccattgatatggaggcattgtctcttggaggacaggaacaccttgtggagactacttatggcccggtttgtgttgccgtttgtggagatccagataaaccagctcttatcacttatcctgatatagctcttaattatatgttctgttttcaaggattattgttttgtccagaagctagttctttgttactccacaacttttgcatatatcacatcagtcctcttggccatgagttgggagctccaatgatcagtgttgatgctcctttgctctcaactgatga

SEQ ID NO: 4715 - DNA, 384 bp, Arabidopsis thaliana
  unsure at all n locations
  Clone ID: LIB22-026-Q1-E1-H12
cnctatttaaacatttatcttgtgacgtttcacataacaagatatatctacaataaccccaagaaatttaacagaatgaaagtaattacttccctaatctcttccantttgcntaaattcatccacaaagacttccatgagatttatgcaagaatgtccctcctcgatnggnttcctcctcctaacgtgcaaggagtggataaganggntccaaggnataagcctccaataatcctgggggtaaactanccttgaagtacgaaagactccttcaacaacaatacaatcctctcaacgtcggcaaaactccgactgggatccggttgatcctgcaaatanccgtaccggactgctgacggaaatcatgatcccttaagaagngtc

SEQ ID NO: 4716 - DNA, 429 bp, Arabidopsis thaliana
  unsure at all n locations
  Clone ID: LIB22-026-Q1-E1-F1
aagaaattctattatcaattcctatcatttgttaagaaaaagagttagaagtattaataatcttacaatatttatagataagataacaacaatatgaagcattctcacgtnttgcttcttctatttgttcaagtcattgtccttttgcctctcctttgtctatccgacgattttgttaactctagagctacttattatggcagccccgattgcaaagcaaatcctcggggacattgtgggtatggagaatttggaaagagatatcaataacggtgaagtgagtggtgtttcatggcgactatggaacaatggaactggctgtggtgcttgttaccaaggtgangtgcaaagatacaacacactgcagtgangaangagtatacgtagtggctacggactcccggagaaaggagatngcacggacttcat

SEQ ID NO: 4717 - DNA, 428 bp, Arabidopsis thaliana
  Clone ID: LIB22-025-Q1-E1-C5
aacaacaacgatgctgcttcgaatttctggtaacaatctgagacctttgagaccacaatttctcgctcttcgaagctcttggttatcaacttcgccggagcaatctactcaaccacaaatgcctccgagagtaccaaatcttattggaggttcttttgttgagtctcaatcatcttcgtttatcgatgttataaaccctgctacacaagaggttgtatctaaagttccattgactactaatgaagagtttaaagctgcggtatccgctgcgaagcaagcgtttccgttgtggagaaacacgccgattactacccggcagcgtgttatgctaaagtttcaagagcttatacgcaagaatatggataaacttgctatgaacatcacaaccgagcaagggaaagacttaaaggatcacatggggatatcct

SEQ ID NO: 4718 - DNA, 397 bp, Arabidopsis thaliana
  unsure at all n locations
  Clone ID: LIB22-025-Q1-E1-C8
atctgggggaatttggtgttcaatttcattaagacgcgatgatctcgtccaaaaacggagctgccatgatctcccgacctgtctttctttccgatcgagttgatgaagtcttctctagaaagcttgatttgtctgtctcttcttcgtcttcttcgagcctcctccagcagttcaataagactcatgaaggtgatgatgacgcacgcctggctcttgctcatcagctatacaaaggaggcgatttcaaacaagccctggagcacagcaacatggtttaccaagagaaacccattacgcactgataatcttcttctaattggtgctatttattaccagcttcaagagtatgatatgtgcatanctcgaaatgaagaaactcctccgtaatcaacctcaa

SEQ ID NO: 4719 - DNA, 404 bp, Arabidopsis thaliana
  unsure at all n locations
  Clone ID: LIB22-025-Q1-E1-D10
ganctttccagacttggagtcgccaaggatctcggtgatagtgtcggattcatcgccggtactctctctgagatcttgcctctttgggccgctcttcttgttggcgccgttcagaacctcatcggttacggatgggtttggcttatcgtcaccggtcgagccccgattcttcctctatgggctatgtgtgttctcatattcgttgggaacaatggcgagacctacttcaatactggagcattagtctctggtgttcaaaactttcccaagagcagaggtccagtggtgggtattctcaagggttttgctgggctaggtggtgcgatcatctctcagatatatacaatgattcactcatctaacccggcttctctcaatctcaagggaactgttacgcctgcant

SEQ ID NO: 4720 - DNA, 459 bp, Arabidopsis thaliana
  unsure at all n locations
  Clone ID: LIB22-025-Q1-E1-D4
ccgggncgcccacgcgtccnatantgctattggtggtggntctcctttgcgtaaaataactgatgagcaagcggatgctattaaagatgtccttgcaagcgaagaacattgctgctaatgtctatgttggtatgcggtattggtatccgttcactgaggangctgttcaacagataaagaaggacaaaattactagacttgttgtactgccattgtatcctcagtattctatctctacaacgggttcaagcatacgcgttctccaagatttattcaggaaagatccgtacctagctgngagtgccggtanctattataaantcctggtaccaaaggcgaagctatgtcaattctatngctgacctcattganaangagcntcaaaactttcccctgatcctaaaggangntatgatantcctcaattgcccatggtgttccggtcaactacgttnaaaa

SEQ ID NO: 4721 - DNA, 467 bp, Arabidopsis thaliana
  unsure at all n locations
  Clone ID: LIB22-025-Q1-E1-D6
aaacagnaattcgcgggccgacccacgcgtccatagattcttgcactcttggaggttgagcttagttcgacatgaaggtctttatctaatctccactcgctggcaatgaagatgagagtggaaaccgcacttgcgatccttttggttctcatatcaattcaacaatgttanggangtgtaagcaactatacatgtacgtgtttctcttcgggcaatcgaagtgatatcctggaatctaactgttccacatcatgtaattgcagaccancagacagagatcaatgggtatgtttgtgtcctgcaaatggatttccggttatagccattggtggttcaaattcgtcatgcttcacttcatgcaactgctctgctgggtgctacaaaatcttcaaagaagcaatatttatcgaggaaactcgttataanttatactactcctcctgcggtgtactaattcactaacaatt

SEQ ID NO: 4722 - DNA, 431 bp, Arabidopsis thaliana
  Clone ID: LIB22-025-Q1-E1-D8
ccaattgctttcaaggttttgcagattgtgttcttagacgaaaagggttttgaggtgtcatggattccgggacgcagccagaagggttgcaggcagcacagccagcagggttgcaggcagcagggttgcaggcagcacagccagcagggttgcaggcagcacagccagcagggttgcaggcagcagggaagcggaagccgcctacgacgaccgaggatccaaatgatccacagcatataatccacgatttcctcacaatagtgaacaaattggagaaggaagtggatcttccaggcgctataaccagggctagaacctatgatgctgaggttgatggactgataactgctgaccaaccacagacgaatctgggaagagcagaaagtgcccctattcctaatgctaagccagaaggccaaatgatatcatat

SEQ ID NO: 4723 - DNA, 461 bp, Arabidopsis thaliana
  unsure at all n locations
  Clone ID: LIB22-025-Q1-E1-D9
aactccattcgctcgncaccggtcacncaatcccgggcnacacaagatgtttaaccttctccatctgcgccacttgcaaactctcccattccaagaaactctcattcttctgttcctttagttgttggctgcgtaggcggtgctttttttcttctccttgtagctaccggtctctactttttcacaagtaaggccgggaaaactgtgaatccttggcgtactggtcttagtggacaacttcagaaagtattcgttactgatctgagattgaagctgcatgtgaagattttagtaatgtcattggatcttgtcccattgggaagttgttcaaaggaacattatcaagtggagtggagattgctgttgcttcttttgctactactactgccaaagactgggaaggacagtacaagaaattcacttcangaagaagattgaaatgttatcgaagatnaaccaca

SEQ ID NO: 4724 - DNA, 425 bp, Arabidopsis thaliana
  unsure at all n locations
  Clone ID: LIB22-025-Q1-E1-E1
attaccaacctctgcgggcaaagatggaattcgagaagatcaaggtgatcaatcccgttgttgaaatggatggagacgaaatgactcgagttatctggaaattcatcaaagacaagcttattttccctttcctggagctggatatcaaatactttgatcttggactgcctaaccgcgatttcactgatgataaggtataatgtggctattaagtgtgcgacgattactccggatgaagctcgtgttagggagttcggcttaaagaaaatgtggaggagtcctaatggaactataaggaacattttaaacggcacagttttcagggaacctatcatttgcagaaacatccctcgtcttgttccaggatggacgaagccaatctgtattggaaggcatgcttttggggatcaatatanaaccactga

SEQ ID NO: 4725 - DNA, 442 bp, Arabidopsis thaliana
  unsure at all n locations
  Clone ID: LIB22-025-Q1-E1-E10
gccacggtctgnaaatcccgggccgacccacgcgtccatgaaactgtcaaagcgatgctgaggatgagggttattccagttttcaatgagaatgatgctataagcactcgcagagccccctacaaggattctactggtatattttgggataatgacagcttagccgctcttctgtcgctagagctgaaagctgatcttttgattcttctaagtgatgttgagggcctttacactggccctccaagtgattctacctcaaaattaatacacacattcattaaagaaaaacaccaggacgagattacttttggcgaaaagtncaaattnagaccaaggggtangactgcnaaagttaaanctgctgttaangcancntanggtggcgttttcctgttaacaaaaccatgtggataccctctgaaaatatttaatnccttaaggg

SEQ ID NO: 4726 - DNA, 417 bp, Arabidopsis thaliana
  unsure at all n locations
  Clone ID: LIB22-025-Q1-E1-E3
cggttcttctttctctcttcttcatcttcagacgaaacctcctttacttccccttcaaggttttatatttcccaaatcctacacctgctcacatctcaagctcaagttttgttttcccgggaaaagtgacacaaacaagaacttaacaagggagaagaaaaagcttatattcatatcaacggttgacgttggaaagctattaagatttggttttctacaaatttgttcttcctgaaacgtcacgagacagagcttacaagaagagaaaacagaggaaatttcgttgcattttttttacatattgattcgattaatggattcaaataatcatctctacgacccgaatcccaacgggtcgggtcctcttcgttttagatnagctccgagntctgttctcgccgctttggttgaanaaca

SEQ ID NO: 4727 - DNA, 429 bp, Arabidopsis thaliana
  unsure at all n locations
  Clone ID: LIB22-025-Q1-E1-E5
tnnnnnnnnnnnnnnnnnnnnnnnnnnnnnnnnnnnnnnnnnnnntcattgattgagtcatcatcttcttggacaagaagtggtccgaaccaaaaccaagccagagaatgaatctctcaggggatcgaacaactctaaagcgtcactcgtcgctttcaacacttgtggctcatttctttggcatcttagctgttgttctgatgctaatttggcttctccactaccgtgaaggcatcgagtatggctccgacaacccccttaaggttttaaatgtgcacccatttctcatgtactgtggatttctcttcctcgtgggccaagcaatgatgacttacaaaacggcgtacgcgtcgcaccaagttcagaaaatggttcacggtgggcttcacttaatangcttagttctaagtaatgtcngaatctgcgccg

SEQ ID NO: 4728 - DNA, 430 bp, Arabidopsis thaliana
  Clone ID: LIB22-025-Q1-E1-E8
aaaaacatgaaaatcctctcactttcacttctcttgctcttggccgctacggtctcggcatccgttccagggctcatcgaactcgtcgattcgaaaaccatctttgggaacgtagccgaactcttagagaaagagaaactttccatcaactacgccaactgcagaagctggcaccttggtgttgagacctctaacatcatagacttcgacacggtgcccgcaaattgcaaagactatgttgaagactacttgatcacttccaaacagtaccaatacgactccaaaaccgtgtgcaaagaggcttatttctatgccaaaggacttgccctaaagaacgacaccgtcaatgtttgggatctttgacctagatgataccctcctctctaatatccctactacgcaaaatatggatacggaacaagagaagacc

SEQ ID NO: 4729 - DNA, 408 bp, Arabidopsis thaliana
  unsure at all n locations
  Clone ID: LIB22-025-Q1-E1-E9
nagagtttatgtacactgtgaagtggaaggaaactgagactccttttgagaaaagaatggagaagtactctatgtcttcttctcttccacatcatttggaaatccactggttctccattattaactcctgtgtcactgtccttcttttgactggattccttgcaactatcttgatgcgagtcctcaagaacgatttcatgaagtatgctcaagatgaggaagctgctgatgatcaagaggaaactggatggaagtacattcatggcgatgtgtttcggttccctactcacaattctttatttgctgcatcgctcggtagtggcactcaattgttcacgctcaccatatttattttcatgcttgctcctgttggagtgttctaaccatacaaaccgaaggagcactcct

SEQ ID NO: 4730 - DNA, 434 bp, Arabidopsis thaliana
  Clone ID: LIB22-025-Q1-E1-F1
gcccacgcgtccgggcggaggatgaaggaaactatctacaagatgcttgggagcatatactgacttgtgtttcacggtttgagcatcttcatctcttgggggaaggagcgcctcctgatgccactttctttgcatttcctcaaacggagtcaggaaactctccactggctaagccaaattccgtacctgcaattaaagaaagagcacctggaaaacttcagtatgctgcatctgctatgataaggggttcctacgatggttctggtgttgctggaaaggcttctaatacagtgacatctgaacagatgaacaacttgatatctaatctaaacttgctagaacaagttggtgacatgagtcggatatttactcgtagtcaaagattgaatagtgaagccataattgacttgttaaaaccctcctgcaaagttcca

SEQ ID NO: 4731 - DNA, 535 bp, Arabidopsis thaliana
  unsure at all n locations
  Clone ID: LIB22-025-Q1-E1-C4
cgggcgccctagcgggtccaanaanaatccccggggnccccccccaacgccgtcccnantaacccgantnanaaaatggtccggggtaaaagggaanaaatggaaccaagcctatccgggtatccgattctttggggaaccaactttactccntgcngtccngagttatgggcaaacacgaaccgttgttgangatnattggcggatgatcaaggggaacagaaccacgccatcttacgttgctttcaccgactccgagaggttgatcggtgacgcagctaagaatcangtcgccatgaaccccgttaacaccgttttcgacgctaanaggttgatcggtcntcgtttctctgacagctctgttcaaagtgacatgaaattgtggccattcaagattcaagccggacctgccgataagccaatgatctacgtcgaatacaagggtgaagaggaaagagttcgcagctgaangagatttcctccaanggttcctaattaanatgcnttgaaattgctgaaggcttaccttggtgtc

SEQ ID NO: 4732 - DNA, 441 bp, Arabidopsis thaliana
  unsure at all n locations
  Clone ID: LIB22-025-Q1-E1-A11
actcncatacccgggccgacccacgcgtccacccgttcaattcacggctgagtctcttgcaccggagtttaacaatgctattccctctagcctaacaagagagagcccttatctgacccatccaatcttcaacatgtaccacacggagcatgagttgcttaggtacatccacaagttacaaaataaagatctatcattgtgccacagcatgattccacttggatcttgtacgatgaaattgaatgccaccactgaaatgatgccagtcacatggccaagtttcaccaacatgcacccttttgctcctgttgaacaagcccaaggttatcaggaaatgtttacgaatttgggtgagctcttatgtacgatcactgggattcgactctttctcattgcaacctaatgccggtgctgctggcgaatacgcccggctcaatgggt

SEQ ID NO: 4733 - DNA, 409 bp, Arabidopsis thaliana
  unsure at all n locations
  Clone ID: LIB22-025-Q1-E1-A12
angtaatactcgtaagatttatcaacacaagcaaaaaagatggcccaaaagctagaagcaaagggtggtgagatgggagatgtatgggatgatggtgtttacgaaaatgttagaaaggtatatgtagggcaagcacaatacggtatagccttcgtcaagtttgagtatgtcaatggttctcaantggttgttggagatgaacatggnaagaagacagagctangagttnnanagtttgagattgatgcggntnactacatcntatacntggaaggttaccgtnagaaagttaacgatatgacgtcagaaatgatcacgtttctttctantaagacttttaaaggcaaaanctctcatcctatcganaaaagacctggggtttantttgtgccacatggtggnaaaatcg

SEQ ID NO: 4734 - DNA, 201 bp, Arabidopsis thaliana
  unsure at all n locations
  Clone ID: LIB22-025-Q1-E1-A2
ggccatggaacggatcggttaagccattatcgttattcgactttgaaggaaactaaaaaataatgtggtcgattggtttggttttgttatatattatgcatttgtatgggggtcagtcaatgtttgaactttgtataatatttctttgggtctagtgataaatattttcccttnnnnnnnnnnnnnnnnnnnnnnngggcg

SEQ ID NO: 4735 - DNA, 435 bp, Arabidopsis thaliana
  unsure at all n locations
  Clone ID: LIB22-025-Q1-E1-A4
angcacaccaccattgaattgaactnnnnnnnnnnnnnnnnnnnnnnnnnnnnnnnnnnnnnnnnnnnnnnnnnnnnnnnnnnnnnnnnnnnnnnnnnnnnnnnnngagaagtagagagaagctccgatctgataggaactgtgagtttccttgagtctccggagaaagaagtcgccgatttgctcctgataatcttagtctcgaaatcaaaacgatgttttgcgattgcttctactggaataaaggtttctccgagttggaatcggaatcgtccgagtcaaagcccttctcgcttccatctcctcttcctcaatggccacaaggcanaggttttgctactgggaangataagtcttggagaaatccaagtggtgaaagtcaccgagttcgatagaatttgggaatgtggnaactccgcctgggaaaataagaat

SEQ ID NO: 4736 - DNA, 485 bp, Arabidopsis thaliana
  unsure at all n locations
  Clone ID: LIB22-025-Q1-E1-A6
tttctacgcngtcggtaccgaacncnaattcgcgggncgacccacgcgnccanacagacacaaaaacaatggctaaacccacatcacgaaatgaccgatttgcccttttcttcataaccctaattttcctgatcctaaccgtttccaaaccggtcgcctctcaaaactgtggctgcgcctctgacttctgttgcagcaaatatggctactgtggtacgaccgatgagttctgcggcgagggctgccagncangaccttgccggagcagtggangcggtggagatcctgctgtttcacnanaaggaacggtgacacctgacttctttaactctatactaaaccaaagaggtgattgtcctggcaaaggattctacactcacgacaccttcatggccgcagctaattcttaccctancttcggtgcttccatctccaaacncgaaatcgcngggtttttcgctcacgttanccaagaaacaaggttc

SEQ ID NO: 4737 - DNA, 404 bp, Arabidopsis thaliana
  unsure at all n locations
  Clone ID: LIB22-025-Q1-E1-A9
atccttaccgctaccaaacgcttctcctttaatcatcatcatcatcattttatctccgtcccttcatgttccgttaccgttaacggctgtttttttttaatctccggtgaccgttctttttctgattccaggtgttgccagctgtttttttttttgggagatattttttttaattccttttaaagttagttataagtcagttttgtctgcttggattttcatttataaaacaaggtggaattaggtttcttccgatagagaaaggggcttgattttggacaaaggcacgtgtcttagtcttttattcaagcttcgatctataagttatgatttgggtttggttttgagttctccaattttagtcncanctctgtggttgttgtaactgggtttgtgatggaacc

SEQ ID NO: 4738 - DNA, 440 bp, Arabidopsis thaliana
  unsure at all n locations
  Clone ID: LIB22-025-Q1-E1-B11
cggtctggcnacccgggccgacccacgcgtcnanccacgcgtccgcccacgcgtccgcccacgcgtccgcacttccccaatctctagatgacaatctaacgatacagttccttttagatcgattaccaaatacaaaggatcaatttttcttacatgaacactctgttgtaatggcagaggagaatctagaactgagtcttttatgtacagagagcaacgttgatgatgagggcatgattgttgacgaaactccgattgaaatttcgattcctcagatgggtttttctcaatcggagagtgaggagattatcatggagatggtggagaaggagaagcagcatttgccaagtgatgattacatcaagagacttagaagtggagatttggatttgaatgttggaagaagagatgccctcaattggatttggaangcttgtgaa

SEQ ID NO: 4739 - DNA, 449 bp, Arabidopsis thaliana
  unsure at all n locations
  Clone ID: LIB22-025-Q1-E1-B12
tcgntcgccaccggtcacacaatcccgggccgacccacgcgtccaggaaatagagatttgaatctcgagtattatggagattaatgttgatgaagaagctgggatcatcaaagaagaaacagttccactcctggatgatcaaaatcgaaatcgggacttacctgacatagaaaggaacactatgatgcaaaaggcaataggtaagacttttcagacaacagctaatctagctaatcttttacctacggggacagttcttgcattccagattttatcgccaatttgcacaaacgttggacgctgcgatctaactagcagattcatgactgcgttgctagtttccatctgcggattctcttgtttcatacttagcttcacagattcttacaaggatttgaatggtagtgtctgctatggatttgcaacaatccaagggttctggatnattg

SEQ ID NO: 4740 - DNA, 392 bp, Arabidopsis thaliana
  unsure at all n locations
  Clone ID: LIB22-025-Q1-E1-B2
cacggtcataagncacgggtcgacccacgcgtccgggcagcgtcatccaagatggttcgggtggtgcgggtgctggtgggttctcgtacgagtatggggctcgtgattcagggtttggagtagttggggctcagatgagacatgttcaggcccatgggccgagaccatcggttaatgggttttcaagagaagtaggaactacttttgatgatggtttagggttggatttgcatctcagtcttgcacctgctggnnnnnnnnnnnnnnnnnnnnnnnnnnnnnnnnnnnnnnnnnnnnnnnnnnnnnnnnnnnnnnnnnnnnnnnnnnnnnnnnnnnnnnnnnnnnnnnnnnnnnnnnnnnnnaattccagtgaaaaaaaaaaaaaaaaaagg

SEQ ID NO: 4741 - DNA, 475 bp, Arabidopsis thaliana
  unsure at all n locations
  Clone ID: LIB22-025-Q1-E1-B5
cgntcagtaccgaacacagaattcgcnggncgacccacgcgtccacagattttgctttgaggctttaggctccccagatctctaatcgccgcagctttaagaaatggagactttcctattcacatctgantctgtgaacgaaggacaccctgacaagctttgcgaccagatctctgatgcagtccttgatgcctgccttgagcaagacnctgatagcatnnttgcttgtganacatgcaccangaccaacatggtcatggttttcggtgagatcaccaccaaggctacgattgactacgagaagattgtccgtgacacttgccgttccattggattcatctctgacgatgttggtcttgatgctgacaaatgcaaagtccttgttaacattgaacaacagagcccagacattgctcaaggtgttcacggtcacttcaccaaacgtccagaagacattggagctggtgaacaaagg

SEQ ID NO: 4742 - DNA, 449 bp, Arabidopsis thaliana
  unsure at all n locations
  Clone ID: LIB22-025-Q1-E1-B6
ggtacganattgaattcgtcggccgacccacgcgtccanccacgcgtccgcggacgcgtgggtcggattctgtttgggaaaagaagcttccggagaattatcaggatctgcttgatttattgccgccggagaggtatcatagtctcncgaagaaagatatcttcgctgtgctttctcgtccaattccttttgatgatgataataaggaagtatggattgatanagttacaggacgagtttgtatggcgatttctgctagaggaatgtctattactggaattgaagaccggagatattggaactggattccaacggaagaatctaggttccatgttgtagcctacttacagcagatttggtggtttgaagttgatggaacagtgagattccatctcccanctggtgtanactctctatcattcagaatccatctagggagattcacaana

SEQ ID NO: 4743 - DNA, 457 bp, Arabidopsis thaliana
  unsure at all n locations
  Clone ID: LIB22-025-Q1-E1-B8
ttcncgggccgacccacgcgtccanccacacacaccttaaacctcgcatctttgagctcaacagcctttactttaaactaacactctcaagatgcgtgaaattgttcatatccaagctggtcaatgtggtaaccaaattggtgccaaattttgggaagtcatctgtgatgaacatggtgtagacccaactggtacatatcatggagattcagatcttcaattagaacgtattaacgtttattacaatgaagcaactggtggacgttatgttccccgtgctattttgatggatttggaacctggtactatggactcagtccgtgccggtccattcggtcaaatcttccgtcctgataactttgtctttggacaatctggggctgggtaacaattgggctaaaggtcactacactgaaggtgctgaacttattgattcagtacttgatgttgtccgcaa

SEQ ID NO: 4744 - DNA, 337 bp, Arabidopsis thaliana
  Clone ID: LIB22-025-Q1-E1-B9
gatgatgtatacattgcacctgctcaggttgttactcaagctgcttttgtaccggaagctccattaaccaccacagattatccagcaatgccagttgcttagagagccttttcgttttctggtttaaaacccaatggggatggttctttttttgggacagtactagttttctcatgttattctaagttaatacttaaagttctggaggttgaattacatcaaggatatgaatgtatgtttttcgttatcttttgtttaaattttatttatctattaacgatttgtctttttttaattagaaaatttgtgtttatcgaaaaaaaaaaaaaaaagggcg

SEQ ID NO: 4745 - DNA, 458 bp, Arabidopsis thaliana
  unsure at all n locations
  Clone ID: LIB22-025-Q1-E1-C11
gaaactccattcgcacgccacggtcatacaatcccgggccgacccacgcgtcnanggacgcgtgggtttctctatctttaactcccttcacacctctccctctctcttcttcatatctctctctgtcacaatagtgtgatgatgcaatgagaatggagttgatttcagtgattttcttcttcttttgctctgttttgagttcctctgctttaaactctgatgggttggttttgatgaagtttaaatcctctgttcttgttgatcctctgtctttattacagacatggaattacaaacacgaaagtccatgttcttgcagaggaatctcttgtaataacgattctaaagtcttaactttgtctcttcccaattctcagcttcttggttcgattccttctgatttgggttctctcttaacacttcaaagtctcgatctttccaataaatccttcaatggg

SEQ ID NO: 4746 - DNA, 404 bp, Arabidopsis thaliana
  unsure at all n locations
  Clone ID: LIB22-025-Q1-E1-C12
caatcgtttcaatttctaaaattctcctctctcaacgcaatcaccaaatccaaatttagggtttcttttctctttctgcgatcgatctctgaaaactcataactgttgtttaatcgtgaagatggcatcaaacggatctttctctgctcagagaaacgcaaacgctagaacaacgatgaagagaagaagcgacaatcgcggttacggtggcggaatcggaggttatcaagaggagacgaaccgttacgcgccgccgcaaaaacgtttcagatcacaagcgcaacagcaattccgatctggtcataatcctctgtatcatcatcatggtagtaataataataacgtgtctanggtttcctctcaatcatataacaattgcggtgttgatgtgaatgcttcaaatc

SEQ ID NO: 4747 - DNA, 452 bp, Arabidopsis thaliana
  unsure at all n locations
  Clone ID: LIB22-025-Q1-E1-A10
tcgntcggcacggtctcacnatcccgggccgacccacgcgtccagagtttctttcgccgatttcgcaaaaaccctatggagctcctccgatccaacttgtctagggttcagatccctgaacctactcatcgcatctacaagcatgagtgttgcatctccttcgatactccgagatccgaaggaggattgttcgttgatatgaatagttttcttgctttcgggaaggattatgtttcttggaactatgagaagactggaaaccctgtttatcttcatattaagcagactaggaagtctattcccgaggatcggcctctcaagaaaccgactctgctcgctataggtgttgatggaggctttgataacaatgagccagagtacgaagagtcttatagcataagtcatacttccggattttgtttcactcccgtttccctccggttgagctaaca

SEQ ID NO: 4748 - DNA, 435 bp, Arabidopsis thaliana
  unsure at all n locations
  Clone ID: LIB22-024-Q1-E1-F9
gcttctgttcccaaaaccggaaactttacttcgtggaattttcccttgtttctgaaatggaagacacaacatttaccaaagtgttcgttggaggattagcttgggaaacacacaaagtctctctcaggaattactttgaacagtttggtgacattgttgaagctgtcgttatcactgataaatctagtggtagatctaaaggctatggctttgttactttttgtgatccggaagcagctcagaaagcttgtgtagatccagctcctgttattgatggaagaagagctaattgtaatcttgctgcttttggtgttcagagatccaaaccttcttctccnattcatggacatgtaggaggaagaggcatgaaggtgactanccctttcaagacacactttgggaccgcggctacngcnatccttccccacttccatt

SEQ ID NO: 4749 - DNA, 408 bp, Arabidopsis thaliana
  unsure at all n locations
  Clone ID: LIB22-024-Q1-E1-G10
tttttttttttttggagttagaatgctatgaattccaaaccagagaagattcaaataaaacagagactaaaaaggctgttcaaacagtaataantcttgcacatgaacactaaaccanaacgataacaggaaacaaagatacagtcagtactcagtagtttgagggnagctacgggaagcaagtaatactacatagggnngnnattccagtgcttaatgatgaaacatcatcagtacaagcaaacgtgtttttcatcatacaccgtatcactttcacaantggctgcagtcattccgcaagcataaggagattgacttctcagaancaacatcaactttgcgcaaaggagcaaggnnaccaggagatgggganctctcantgctacgcctttcatgaganatccccct

SEQ ID NO: 4750 - DNA, 482 bp, Arabidopsis thaliana
  unsure at all n locations
  Clone ID: LIB22-024-Q1-E1-G2
gaacgttagttgcccggccggtccaaaattaacgggtcganncacgcgtccgntctgattccctcgtttcaatctccgttttgctttgcctatcagataaatttcttcttgctttcctttctatctcataacgataagttgaattaatctttgcgtcttagttcatcagtagagagagtagggttttttccgcttatttttagggaatttcattttgttggaggtgagaatctctattcgagtccccaagattctctttatatccctagtttagttgtatggttgggttttgattggaatatcaaggggtagtttttagctaggttcactgatacttggaagatctgagttctttgggattctgttaagtttgtggagatctaaaagacacgaaatttgtagaaatctggttgatatcccanactttaaaaggaataagggtanatccnatagaatttgangcgggttttggaaaaattttt

SEQ ID NO: 4751 - DNA, 433 bp, Arabidopsis thaliana
  unsure at all n locations
  Clone ID: LIB22-024-Q1-E1-G3
nggcccggtccaaaaataaacgggtcgagccacgcgtccgntttcntctctttctctctctgcgtccttctgaggctggaagcgatgaccatgacagcatttctcgcgagacggnttatcggtaacggatcnagccanattctcgggacntcnagttctagctccggtccgttcatttccgtttctagggctttcttctcctcctccactccgatcaaagctactctctttcccggtgatgggatcggtcccgaaatcgcngaatctgtcaagcaggtgtttactgccgctgatgtggttantgattgggacgaacagtttgttggtactgaagtanatcctanaaccaatantttcttgacatgggataatcttcaatctgtgcctaanaacaaggttggtttgaaangaccaatggctactccaantggaa

SEQ ID NO: 4752 - DNA, 422 bp, Arabidopsis thaliana
  unsure at all n locations
  Clone ID: LIB22-024-Q1-E1-G5
cgctctttaagacatgatccttacagatttcttgataagaaatcacctagatcaagtcaattggcaagagatatcactgtgagagcagatctttcaggagctgcaacccctgactcttcttttcctgaaccagtgcagagattaagttgagctcaagactcanagggatattcttttgtgttgttgctggcatttcggctacttttctcattgtcctgatgattattgggcatccgttcgtccttctcttcgatccctataggagaaaattccaccacttcattgctaaactttgggcttccataagcatttatccgttttacaaaatcaacatcgaagggtttggagaatctgccatcatcagacactcctgctgtatatgttcaaaccancaaaagtttcctggatatccctnaaaccaa

SEQ ID NO: 4753 - DNA, 423 bp, Arabidopsis thaliana
  unsure at all n locations
  Clone ID: LIB22-024-Q1-E1-G7
cgtccgcccacgcgtccgcccacgcgtccgtaagtagtaaccacatttttctcgctttgccgtcttctccggcgattttcagacactaattttctctccggttgttgcaatcatattttctgtcggaagatattgaaatcagaaaccgggaaaaatgacttcgtttcttagtttctccgccatttcagctcatccacctactttttccggcgcttcatttcgtcctcgctctttctctccccgattgttcaagtcttgtgttaagtgcacttatgctgaagctggattaagcagcgcttcatggtcagcccctattgacattgtggcagatgtcaaatccgaaagggttgtagttcttggtgggaatggttcgttggctcagctatctgcaaagcancaatctccaatgggttaaantttttg

SEQ ID NO: 4754 - DNA, 168 bp, Arabidopsis thaliana
  unsure at all n locations
  Clone ID: LIB22-024-Q1-E1-G9
tagatcgcgagcggccgcccttttttttttttttttcttatgaacagacaaaatagaataatccttaacaaacgtcttcaaatcaacccaccagagatttccatatcnnnnnnnnnnnnnnnnnnnnnnnnnnnnnnnnnnnnnnnnnnnnnnnnnnnnnnnngggcg

SEQ ID NO: 4755 - DNA, 448 bp, Arabidopsis thaliana
  unsure at all n locations
  Clone ID: LIB22-024-Q1-E1-H10
cgtgggcggacgcgtgggagaaaagttgctggaaacattgagactaaccttaggatagtaggaagccaccgcaattgaagacaaattgcagcgtggtgtccctgaagcaatagaatctttgaggattgcagggataaaagtctgggtcttgactggtgacaaccaagaaactgccatatccattggcttctcatcnaggcttctgacaagaaacatgaggcaaattgtaataaatagcaactcgttggattcatgtccgaaggagcttanaagaagcaaatgccaatattgcaagtaatgacgaaaagtgataatgtgggccttgattaatgacggtaccaanctcatatatgtactccacaatgattcttgaagatgtgctgttccaaggtggcaatgntaagtgcccctgcnaaaaactccngctgccggggttgcnccctttcca

SEQ ID NO: 4756 - DNA, 496 bp, Arabidopsis thaliana
  unsure at all n locations
  Clone ID: LIB22-024-Q1-E1-H12
gcacgtccgatctctcctctctgagctctcatcacgagtcaacccctttctccgtcgaaattcgcatgcttaaactctgagagaagaagatgactatgacggaggagaaaccaacttccgacgggaaaggangttggggtttccttcaagattcaatttcgtaactcaagcgggtcacangaaacgccgctttaaattgctggctaactnctnccggttttcaatcctngggangctncctcctccttccaacttccntccnnnnnnnnnnnnnnnnnnnnnnnnnnnnnnnnnnnnnnnnnnnnnnnnnnnnnnnnnnnnnnnnnnnnnnnnnnttggggtaataaacnggtcctcaacggtgaatgggattngggtcaaaaaatcaacaatccggactcccttctcccttcaagtttcatccggttggctaagtcctttccntncctaactaaaacgaaagatttgaagccttgatcccttccngagaaaactc

SEQ ID NO: 4757 - DNA, 488 bp, Arabidopsis thaliana
  unsure at all n locations
  Clone ID: LIB22-024-Q1-E1-H2
aatgttcgttgcccggccggtccaaaataacgggtcgacncacgcgtccggtttcataaataaaactaataaagaagaagaagaaaacagagcaattaaagtccttaaatcttcttcttctccaattcaatggctcttccgttgccattgatcttccttatcttctctcatttgttcgtttctggagttagatcaacgagcttcattatggngaacaaatgcgaatacacagtctggcctggacttttatcaaacgccggagttccaccacttccgacgaccggattcgttctccaaaaaggcgaagaacgaacaatcagcgctccaacttcatggggaggaagattctgggggagaactcaatgttccancgacancgacggaaaantcacttgtctcaacggngattgcggatttggtaacctcgaatgctccnggttcnggagcaacaccaacaagcaacaactaaccgggaaatttttccccaa

SEQ ID NO: 4758 - DNA, 494 bp, Arabidopsis thaliana
  unsure at all n locations
  Clone ID: LIB22-024-Q1-E1-H3
gttacgtttgccnggccggtccaaaattaacgggtcgacncacgcgtccgtgccttatacacacaacttctggagtttgagtctcgggttgatgctgcgttaactagaaagaaagttgacatccaggaagcccttaaaaaccctccctgcatacagaagactcttaggatctacgttttcaactcgtttgctaaccaaaacaacacgatccctgggaatcctaatgctgacccgccaacatggactcttaaaattattggtaggatactggaagatggggtggatcccgaccagccagggtttgttcagaaagcaaacccattgcatcccaaattctcgtctttcttcaaaagggttacagtttccctggatcagaggctgtatcctgagaacccattgatcatatgggagaatgctcgattaacctggctcctcaagggaaggctttganaataaaaganggaaagggaatccagggagtttttttttttgcc

SEQ ID NO: 4759 - DNA, 481 bp, Arabidopsis thaliana
  unsure at all n locations
  Clone ID: LIB22-024-Q1-E1-H4
ngttacgttgcccggccggtccantntaacgggtcgacccacgcgtccgctcatatcccttatgatctcttacctgaatcagttgtgaaatctggttgcaagattgtttacatatggagagacccaaaggacacgtttgtgtcgatgtggacttttgctcacaaggagagatcacaacaaggaccagtggttagcattgaggaagcttttgataagtactgtcaaggtttatcagcttacggtccttatcttgatcatgttttagggtattggaaagcttaccaagcaaacccggatcagattttgtttctcaagtatgagacaatgagagctgatccattgccttatgtgaagagattagctgagttatgggttatgggttcacgaaaggaggaagaagaaggaaatgttgttgagaaagtantgaaacctttgtacctttgagactttgaanaancttgaanctaaccaaaaaaagggg

SEQ ID NO: 4760 - DNA, 426 bp, Arabidopsis thaliana
  unsure at all n locations
  Clone ID: LIB22-024-Q1-E1-H8
cggcgattcgattgccgacactggaaacttgctaggtctctcagatcataacaatcttcctatgagcgcgtttccaccgtacggagaaactttcttccaccacccaaccggtcgtttctctgacggtcgcctcatcattgacttcatcggtacttctctttatttatgtgtaaattgactgttttggcgcagttttgttaggttaaatttacataaaagcattctaattttgtgtgttctgttcactgaattcttaggtttcttatgtcaaatctttctctgtttttctattttcttgaacagcaagttaacattgtgaaacctcaagtgatgctccaaatttggttttcctttgcagctgaaattttgggggcttccntaangtgcctcctaacttcggatcaacaaatgggaaaaaaaccccnt

SEQ ID NO: 4761 - DNA, 434 bp, Arabidopsis thaliana
  Clone ID: LIB22-025-Q1-E1-A1
gattcggtggccaatacgcatcgcttatgagagaaatcactgagaaatctgtaagcggtggatttttaagagttacggcagtggtggcggaggagtgcgccgtagagacgcgactagtgaaagaaaacctaactcaattcgcggcggagatgaaaattcgtttccagattgagtttgtgctgatgaagacttttgagatgttatctttcaaagcgattaggtttgttgaggaggagcttacatcggaactccctcaccgtttctcggcaaaaaaactcaaacctttctctctaacttcaccgattttgagttttaaaccaacggttaagctcaattccagttgtcgcgctcaattgatcgatacggttcacaatctcttcatcggagttggagttggacttccatgtacgggtaatggatgtggtgataagata

SEQ ID NO: 4762 - DNA, 422 bp, Arabidopsis thaliana
  Clone ID: LIB22-024-Q1-E1-F8
gcccacgcgtccgggaactgtgagagaatccaaataacgaagcctactattactccacctacgccttttgtgttcttctctccaagaccggtcaccgagcttgatgcagctgcaactacgttacagaaggtgtacaagagttacagaacaagaaggaacttagcggattgcgcggttgttgttgaggagctctggtggaagactctggatgctgcagctttaaatttgagctcagtcgccttctttgaagaagagaaacatgaaaccgcggtttcgaagtgggcacgagctaggacacgagctgctaaggttggaaaaggattgtcaaaagatgaaaaagctcaaaagttagctcttcagcattggcttgaagctattgacccacgccatcgttatggccacaacttgcacttctaattaaa

SEQ ID NO: 4763 - DNA, 426 bp, Arabidopsis thaliana
  Clone ID: LIB22-023-Q1-E1-D11
gtctgatgaagagagatttatcacagacgcagagagagatggttctggctccgttcttggctttcagctcactcctcctggtgatcaacaaacagttagcactagcacaggagaaattacacatcatgaagagaagaaagaggctattgatcaaattgtaatggctgactttggcgtacctggaaatagagctgttgaagaaggagctgcagaggttgggattccgagtggaaaagctgaagttgtagtgtttgatgacgcggtgcacagtttccggaacgtattccagaaccaagttgagataaagctcatctttttcggttgtagagaagaaacaatgtttcaaagacacaacatttggatggtcaagtagcctcattgtttgaagctcacgattcttgtacctccgatcttgtagaactttct

SEQ ID NO: 4764 - DNA, 430 bp, Arabidopsis thaliana
  unsure at all n locations
  Clone ID: LIB22-023-Q1-E1-D12
gaaacagctagggtttgctttagcttctactgcggcttcagaatcgccatcggaagctacatatgatccggagctccgtttagttttcgagctcgctaccgattccgagttatatgagcttgagaaaatcctttttggtcccagctacttcagccctttgctgaaatcaatcccaaacaaaggaggaggtgaccggcttatgataggccaagacattgaagtgcgagatggttttatcgaagctcttgaatcgagattcttgtttctagctgcagatgctcgttcaacactcaggggttggaggccttcatacagaaacgttttacttgcggtgagaaataatttgaatattccctgctccaaccaantgccaaccgaaagacctagaagcagagatttttccttaacctgtcgacaanttccccgaagt

SEQ ID NO: 4765 - DNA, 453 bp, Arabidopsis thaliana
  Clone ID: LIB22-023-Q1-E1-D2
ggaaaaaagagactactaaaaatcataatgaggccgacaccaaaagtagaaatctggaagtcaccagtaccatatctctttggtggtctctttttgcttgttttgcttatagctttggcattactctcattggtctgcacacaccaaaaaccttcttcctctagcaataacaatcatatggatgaagaagacgatgtcggtgacaaggacgctaagcctattacaagagagtacttacctaagatcgtggtgattttggccggagacaataaacctacttgcttggctgttccggtcgtggttcctccacccacttccatttttcgttgtaactgtgacaatgttactgtcatctcaacctaaccattaacatctttttcctcctttgccgacagaaagattaagagatttcgacttttgtaataatcaacggcaattttgtaacaatcgata

SEQ ID NO: 4766 - DNA, 433 bp, Arabidopsis thaliana
  unsure at all n locations
  Clone ID: LIB22-023-Q1-E1-D9
gctttcgacgacgagtgaagaagaaagcgagacgaagaagcaaagatgttcagaaaccaatacgacacagatgttacgacatggagtccaacaggtcgtttattccaagtggaatacgccatggaagcagtgaagcaaggatctgcagcaattggactcagatctcgttctcatgtcgttctcgcttgtgttaacaaagctcaatcggagctttcttcgcatcagaggaagatctttaaagtcgatgaccatatcggtgttgcaatcgctggtctcacagccgacggtcgtgtattgtctcggtatatgagatcggaatcgattaatcactcttttacttatgagtctcctcttcctgttggtcgtctcgttgttcatcttgctgataaagctcangtctgtacccaacgatnatgggaaacgaccctatggt

SEQ ID NO: 4767 - DNA, 431 bp, Arabidopsis thaliana
  unsure at all n locations
  Clone ID: LIB22-023-Q1-E1-E11
gcaaaactgaatcaaaccccatggcatttacttttcctccttcgtatcgcacgctagtcgggttatattatatatttacacttatgcacacggctgtctcaacaccacccgatgatcctgtcaaatgtgtgtcaggaaacacgaactgtacagtcactaactcatacggagccttcccagacaggtccacatgtcgagccgccaacgtggcatacccaaaaactgaagccgagcttgtctctgtcgtggctgcagccactcaagccggacggaaaatgcgtgtaacaactcgatattcccatagcattactaagctcgtgtgtaccgacggaaccgaaggtttgttcataagcacaaagtttctaaaccatacggtacaagccgatgcaacagccatgaccatgacggttgagagtggcatgacgcttang

SEQ ID NO: 4768 - DNA, 451 bp, Arabidopsis thaliana
  Clone ID: LIB22-023-Q1-E1-E4
gcaaaacccaaatctttcttcctcaaagactctgttttttctttcttcctttcttcaatggcgttatcgaaaaacagtaacagtaacagctttaacaagaagaaagtttcgtatatctcagtcccttctcagatcataaactctttatcatcttcctcattacaatctcttcttgtttctcccaagaaatcatcaagaagcaccaacagattcagcttctcttataggaaccctagaatctggttctttactctcttcctcgtctcactctttggaatgttgaaactcggtttcaacgttgacccaatctctctccctttctcacgttacccttgttcaacgacccaacaaccactaagcttcgacggagaacaaaacgctgcatcccatcttggtttggccaagagccgatttgtctactgggtcatcgaattcgaatgcgaatatacaa

SEQ ID NO: 4769 - DNA, 454 bp, Arabidopsis thaliana
  unsure at all n locations
  Clone ID: LIB22-023-Q1-E1-F1
gggagaagagtggtaccgaagagagtgaggttgaagagaagaaagacaatggtagtagcgaagagagtgaggttgaagagaagaaagaaaacagaggtatagacgagagcgaggagagtaaagagaaagatatagatgagaaagcgaatattgaagaggcaagagagaataattacaagggagatgatgcttctagtgaggtagttcatgagtctgaggagaagactagtgagtcggagaacagtgagaaagtggaagacaagtcgggtataaagactgaagaagtggaagattctgttatcaagagtgttttgcctaacacaacagataatggggaaagcagtagtgatgagaagagtactggttcgtcttcaggtcatgaatccggattccttggagggaataaaatctganggtgaatctatggagaagaatgagttgttggagaanggat

SEQ ID NO: 4770 - DNA, 431 bp, Arabidopsis thaliana
  Clone ID: LIB22-023-Q1-E1-F11
gcaaatcctcaactccttcttcttcactaatagtataccacaaaacctcaaaattgtaatttattagattatcgtgatggccttagctaaagagttaatgggttatcctctcatcacagaaaggtcatcacttgtctcgtcggcgtcgcatttcaagaagaggacacagtcaacacagttctcgatcaacccttttgaccggagaccaagaaaaaccaaatccggcgtcgttgcagccatcagcgaggatttggtcaaaacgctgcgtttttccacaacgaccggagacagaaagagcgaagaggaggagaaagcggcggtgaagttcaaggtgagagctgtggttactgtgaggaacaagaacaaggaggatttgaaagagactcttgttaagcatttggatgcttttgctgataaaattggtcgaaaca

SEQ ID NO: 4771 - DNA, 426 bp, Arabidopsis thaliana
  unsure at all n locations
  Clone ID: LIB22-023-Q1-E1-F12
gcnagcggacaactgttgtaattcactgcaattccatgaagtcgggagcatcagccgcgtcgccaacggcgaaaagcttcaattttggatcttccagactcttagccttggcgcagcagctgcgtgtatacaagccgccgctttcgtcatccttcgacgagagggaagagctgcttgcgtacaaggaaagcaccaggaaatcgataacccacgttgggtttcaggaatctatggctccggtgaggttcagaccgaagaaagctgctgtcttgatatgtctcttcgaaggagacgatggtgatttgcgtgtgattcttactaagaggtcttccacattgtctactcactcaggagaagtttctttgccaaggtggtaaagcagaagaacatgataaggatgatgggattactgcaactaagagangc

SEQ ID NO: 4772 - DNA, 450 bp, Arabidopsis thaliana
  unsure at all n locations
  Clone ID: LIB22-023-Q1-E1-F4
ggatttattgtttttggaaataatcaaaacttaaaaactatcagaatgggaacgttcttaggacactttgtgcctggtctctcacttgctcttcttggtctttggcatctcttcaacaccataagatcttactgtcttaaaggccctgaagctttctctgcaaaattctggttccctttccctaaactcaaacatcttgagcttatcttgattctcttcttctccttcctctccatcactctcctcaccctagatttccctaatttcaacttctcctctctcaaaccagacaacctagaacatgcttccatgttcctccacctcattatctttgcgtgtttcgctctcttctgcgaactaaccctttgctcanatntcctctccggtctaatcggagttcttctgcctctgtctcgctcaagaactcctccttcctcantttcaatccac

SEQ ID NO: 4773 - DNA, 484 bp, Arabidopsis thaliana
  unsure at all n locations
  Clone ID: LIB22-023-Q1-E1-F9
actgtttacgccgnccgtaccggtccnaaaattcccgggnanaaattggacagaacatatcaagcatgtaatatacagaagccgacaaattgcaaaatttacctaaaccccatcttacaccaccgtcagattctgatgtaagtattatcaaagctcaagaacaatcacatcatcagaatctaacttatatatcaaaggtccagaattttctccattgaagctggattctaaggaaagttatcaaaagttttgagagctttggatagtgaagctcaaagaactaaacaatgggcttcagagtttgtgttattgtcgtcttcttgggttgtcttcttctagtccctgagaaaacaatggctcaagaaatgaaacgtgcatcgatcgttatccaaggagctcgacgagtttgtgagaccgatgagaactttgtctgtgcgacattggactggtggcctcatgacaagtgcaactatgaccaatgtcc

SEQ ID NO: 4774 - DNA, 431 bp, Arabidopsis thaliana
  unsure at all n locations
  Clone ID: LIB22-023-Q1-E1-G12
gcttcttcttcaaccttcagacttttctagttgcaactctcattcaattgttcaatttctctgtaaaaatcaaagctttttggaatctttcttcggcgagatatttcttcaccggcgcaagcttctcttgagcgtgattcatcactgggtttgcattttttcctggtgggtattcttcaaattgttcaaagctccgaccttttcttccttagaatctgattactggaatcttgaagctggagagactcgagtttatatggtttcaagcatcgttgagtcagagggatgatgtgaaagtgctagagaatgtgaatatggttgtagataataacaattacaagacgcagattgagtttgcgggatnatcagttgctgcttcttcgaatccatctacaaacactcagcaagaaaaatcagaatcttgtacagag

SEQ ID NO: 4775 - DNA, 454 bp, Arabidopsis thaliana
  unsure at all n locations
  Clone ID: LIB22-023-Q1-E1-G2
gcggacgcgtgggtgcgacctcagaatcagtttctaaagtccatgtattttcctctgacaatacttttagcaaggctctagcaaatgctagagatgttgaatttgaccgctcagatgtggagggaaatgcccaccctgctggtccacatgttcggataccatttgcttcactatttgatactctcggcatgtttttagctgatgagggcgccgtcttgctcctctactcattgttgcaagggaattccgactttaaggagtatgtgttggtgcgaactgatttggatactttgttgatgcccatcctggagacgctgtataacgcttcaaagagaacatcatctaatcaaatatacatgatgctaattgtacttctcatacttagtcaggattcatccttcaattcaagcattcacaagatgatactgccaancgtgccaanggtacaaggacc

SEQ ID NO: 4776 - DNA, 450 bp, Arabidopsis thaliana
  unsure at all n locations
  Clone ID: LIB22-023-Q1-E1-G3
gcggggaataggatcgaagggctctttccgatacttaatagtagtgggaagccttgtaaacaaggtgctgtgttgggtttgtctattcaatacactccaatggaaagaatgagactttaccaaatgggtgttggttctggtaatgagtgtgtaggagttcccggtacatacttccctttgaggaaaggcggtagggttactctgtatcaggatgctcatgttgatgacggtactcttccgagtgtacatcttgatggtgggattcagtatagacatggaaagtgctgggaggatatggctgatgcaataaggcaggcaagaaggttgatttatatcacaggttggtcagttttccatccggttangctggttcgtcgtaccaatgatcccaccgaaggtacattaagggagttgcttaaagtcaaatctcaagaangtgttaaaatgttg

SEQ ID NO: 4777 - DNA, 429 bp, Arabidopsis thaliana
  unsure at all n locations
  Clone ID: LIB22-023-Q1-E1-D10
gcncacgcgtccggttcattcgatctatagagacgaaacaaaaagagagatcgtacgcaaaagtttccgatatggctcgctcgtttggagctaacagtaccgttgtgttggcgatcatcttcttcggatgtttatttgcgttgtcctctgcaatagaagaggctacgaagttaggatcagtgatagggatagatcttggtactacttactcttgtgttggtgtttacaagaatggtcatgtcgaaattattgccaatgaccaaggaaaccgtattacaccttcatgggttggttttactgactctgaaagactcattggtgaggctgctaagaatcaagcagctgttaatncagagangactgtcttcgacgttaagagattgatcggggcgaaaatttgaggatnaggaggttcaaaaagggatagga

SEQ ID NO: 4778 - DNA, 449 bp, Arabidopsis thaliana
  unsure at all n locations
  Clone ID: LIB22-022-Q1-E1-H10
gctttcgggccngtccgagataagggtcgacncacgcgtccgcccacgcgtccgcggacgcgtgggctttttatcaaaattctctctttttcccaaaaagattcacaaatttgttgtagtctcgccgttaagatggcgccggcgacggagcatcagagctcgttcttgagtcgactaagccgtcgcaatcaagtggtttccaaggaggttaaccacgagcaagagcaaagaagaactcgaagattttcaaaaacacgtagctgaacgtttcgcggagctcttacaacgtcggattcgccggaatcttacccgatcttcgattcatggctaaggaanttcttgagtttcagtcaaagaatcggngttcatcgttttaaaacgaatcgtccaaattcgaaaccccgttggaaanttgtccggaatgctgatgggtgtaagcctgaattgtc

SEQ ID NO: 4779 - DNA, 428 bp, Arabidopsis thaliana
  unsure at all n locations
  Clone ID: LIB22-022-Q1-E1-H11
gcccacgcgtccgtcgaaatcccaaagatcagcgatggtgactctaaacgcttcttctcctctcacgaccaagtcgttcctcccctaccgtcacgctcctcgccgtccaatctctttctcccctgtcttcgccgttcattcgactgaccccaagaaatctacccaatcagcctccgcttcggttaaatggagtctagagagttggaagtcgaagaaagctttgcaattgccggattatcctgatcagaaggatgttgattcggttctacagacgctttcttcttttcctcctaaagttttcgctggtgaggctaggaaactagaaggataagcttggcaaancggcnatgggtcaagccttaangcttnaaggnggtaattgtgctaaaagtttcanggaatttaaggcaataacattagggancctt

SEQ ID NO: 4780 - DNA, 484 bp, Arabidopsis thaliana
  unsure at all n locations
  Clone ID: LIB22-022-Q1-E1-H12
cggtgccgccgngataagggtcgacgacgcgtccggtcgccntggtaagcctattgcagctgatgcaggggggaagttgtactcaataatggagatatgtcggctttttgatcaaatatccaaagagcatcttgatggantgcgtgctggtggtgaaaaagtgtacaacgtgtttgataaccagcttcctgcggctctgaagagactccaatttgacaagcagctagcgatggacaacatccggaagctggtcactgaggctgatggttaccagcctcacttgattgcncctgagcaaggttaccgtcgtctcattgagtcttcnattgtccccatcaaaggccctgctgaagcatctgttgacaccgttcaangctatcctaaaggattcnggntcanaantccgngaaattaaancggtgggaactaaaacaaatacccaacctctgaaaattggaggtgncaaaatgcggcgaataaaant

SEQ ID NO: 4781 - DNA, 430 bp, Arabidopsis thaliana
  unsure at all n locations
  Clone ID: LIB22-022-Q1-E1-H5
gctctgagatacaagaaggaggaaattgttataaccccaactcgttgagagcacatgcctcttttgccttcaatagttattaccagaagaatccaatccctagtagttgcaattttgatggaactgctatcactatcagtgctgacccaagtttaggttcatgccactttccatctacaagcacgagtgaatcgatattgaacgtaacaagtgaagatggattagggcttttcgggagaataccatctcatccaactcccaagcctgaagcttcaacctcctcctcaagaactttgatctcatttctctacttcctttgcttttgtgttttatatccacttgttataaccttaacatagtcatgtaatatataataggcaactttttctaggctaattcaagacgataagttttttcaaaaaanggttac

SEQ ID NO: 4782 - DNA, 451 bp, Arabidopsis thaliana
  unsure at all n locations
  Clone ID: LIB22-022-Q1-E1-H6
gcccacgcgtccgattttcttagaattcagtctctctccttccttagcaatggcttgtagactatatttggctttgatcttctcttgcgtttatctgatttgcctgtcaagtcaacaagaaaccgggtttgtctacaatggcttcgagcaagcagatctttttattgatgggatcgccaaaatactacctgatgggcttttgcagttgacaaatactacagagttgcaaatgggtcatgctttcttcaagaagccgtttgattttgatccatcttcatcactatcgttctatacacattttgtgtgtgcgcttgtgcctcctaagttgggagctgatggtggccatgggattgtctttgttgtatctccttccattgatctctctcatgcatacgcaactcagtacttgggggtcctcaacaacttaacaaatggggactcctctcanatc

SEQ ID NO: 4783 - DNA, 443 bp, Arabidopsis thaliana
  unsure at all n locations
  Clone ID: LIB22-022-Q1-E1-H7
catcctcctcacatggacacacgtctctctcacgctgactcagcccaccccgacgagctagatgaagagttcgacacttttcctacttcccgaccatctgacatagtcaggatgaggtatgacaggttgaggagtattgctggtaggattcagacagtggtaggtgatctagcaactcaaggagaaaggcttcagtctctgctaagctggcgtgatccgcgtgcaacagcgctcttcgtcttgttctgcttgattgccgcagtcattctctatgtgacacctttccaggttgtggctctttgtattgggatctatggcctgagacatccganggtcagatacaaactaccaatcccgttcctctcaatttcctcaagaaaggcttcctgcaagaaactgattggatgctctgacctgcaaaaaactgcttccaataccganga

SEQ ID NO: 4784 - DNA, 427 bp, Arabidopsis thaliana
  Clone ID: LIB22-023-Q1-E1-A11
ggaccaacagtgttcctgtaggaagcggcaaacttgcagctctgttctcttgaaatggagaaaacagtgagatgtgttcggtggggttatgaggttaatacctcttctgatgcttgcatcgacgcaattaactcctattttcaacaggttcttagttatgggaggaagaggaaagtgattctagaagcaccactctacgataaagattgtgttttgggcagcattttagctgctcatttcctttcttcatctgatccttctagagctaattcctatgttgaagctgcggcatctaatctcgaacaatctacaccttatgagaaagcggtttacgaggctgttacttacctaatctctgaggatagggatgacgacttggcttttgaaatgcacaccaagctacttaaaagattcccaaaggacttgg

SEQ ID NO: 4785 - DNA, 439 bp, Arabidopsis thaliana
  unsure at all n locations
  Clone ID: LIB22-023-Q1-E1-A9
ngttnnnnnnnnnnnnnnnnnnnnnnnnnnnnnnnnnnnnnnnnnnnnnnnnnnnnnnnnnnnnnnnnnnnnnnnnnnnnncttatacacttactaatacagagtaacagagagagacagagtggactcttcttagagtaagatgggaggtgtgacttcttcaatggcggcgaagttggcgttttttcctccgaatccgccgtcgtacaagctggtcagagatgaaacaacggagctttttctaatgagcccttttccccatcgagaaaatgtcgacattttgcggctgcccacgcgccgaggcaccgaaatcgtggccatgtacatcagatacccaatggccgtcaccacccttctctactctcatggaaatgctgccgacatcggtcagatgtatgagctcttcatcgagctcagtattcacctccgcgtcaatttg

SEQ ID NO: 4786 - DNA, 446 bp, Arabidopsis thaliana
  unsure at all n locations
  Clone ID: LIB22-023-Q1-E1-B1
cgtccgctccaaggcaaggattgctcaaaacgctcgccaggtttccagcagaatgagctggagcaggaactatgcagcgaaagagattaagtttggtgttgaagctcgagctttgatgcttaagggtgttgaagatcttgctatgctgttaaagtcaccatgggtcccaagggacgtaatgttgtgattgagcaaagttggggtgctcctaaagtgacaaaagatggtgttactgttgccaaaagtattgagttcaaagacaaaattaagaacgttggtgctaatcttgtgaagcangttgcaaatgctactaatgatgttgctggtgatggtactacttgtgctactgtcctcacccgggctatatttgcccaaaggatgcaaaatcagttgccgcaagaatgaatgcaatgggacttgccaaaaagtattccatggcanttgat

SEQ ID NO: 4787 - DNA, 429 bp, Arabidopsis thaliana
  unsure at all n locations
  Clone ID: LIB22-023-Q1-E1-B9
gaaaaagatctcaaaatgctcacgacacctccacgaacnnnnnnnnnnnnnnnnnnnnnnnnnnnnnnnnnnnnnnnnnnnnnnnnnnnnnnnnnnnnnnnnnnncaatcgaactctgtatacaactctttcctcaagtgtttctccgacaagacgaaatctccacaatcccaaatcactgacaatgtcttctctcagacaaaccctgctttctcctccgttcttcgtgcttacatccgcaatgcgaggttcaacacttcctctactcttaaacccaccatcataatcactcctcgctccgagagccacgtcagcgccgccgtcacttgctcaaaaaccctaaatttcctcctcaaaatccgaagcggcggccatgactacgatggtctctcttacatttccgacaaaccatttttcatcctcgacatg

SEQ ID NO: 4788 - DNA, 441 bp, Arabidopsis thaliana
  unsure at all n locations
  Clone ID: LIB22-023-Q1-E1-C1
tgaatcttcccggcggtgaaaaatggttgcggagaagaaggcgaagaagtcccatgaaggaatcaacagcagattagctcttgtgatgaagagtggaaagtacactcttggatacaagtctgttctcaaatcccttcgcagctccaaaggtaagctgatattgatatctagcaattgcccaccgttgagaaggtcagagattgaatactatgcgatgcttgctaaagttggagttcatcgctacaatggcaacaatgttgatttgggtactgcttgtggtaaatacttccgagtttcttgcctcagcatcgttgatcctggtgattccgacatcatcaagacacttcctggagatcagtgattctgattttgatgattttgccatgttgttctctatgcttgattatgctttgtgttcttcaaagactaatgttanatttc

SEQ ID NO: 4789 - DNA, 503 bp, Arabidopsis thaliana
  unsure at all n locations
  Clone ID: LIB22-023-Q1-E1-C11
actgtttacgccagccntttacgccngcccgataccgcgtcngaaaattcccgggtccacccacgcgtccgcncggatctccatcattcccctgacaacgtctatggatcacctttgagtggggtgtcatctcttgcctatgatgaagctggagtcaagagtaagattcgggaacttgaggtctcgctgctgagtggtgatacaaaagttgaagaattctcaggttttagccccgctgctgggaagtcgtggaactgggatgaacttttggctttgactccacagttggacttgaaagaggtgctggtggaggctgctcgggcagtcgctgatggggatttcgctacagcgtatggattccttgatgtcttggaacagatggtgtcagtctcaggcagtccgatccaacggctaggcacttacatggcaagaagggcttagagcgaggcttgaggggtctgggaacaatatatacaaatccttgaaatgcaatgaaccaacgg

SEQ ID NO: 4790 - DNA, 453 bp, Arabidopsis thaliana
  unsure at all n locations
  Clone ID: LIB22-023-Q1-E1-C5
gaaaatcantgaaagaaattttttctaaagataatttcaagaaaaacaagaaacttgttttgctatccgccgccgtagctttgctcttcgtagccgccgtcgccggaatctctgcnggagcttcaaaagccaacgaaaaacgaactcnanccccgtcgtctcacgccgtgctaagatcctcatgcagctccacgcgttaccctgagctctgtatctctgccgtggtaactgncggcggcgtcgagctaangtcgcaaaaagatgtcatcgaggcatcngtgaacctaacaataaccgccgtggagcacaattacttcaccgtgaagaagctgatcaagaagagganaggactgacgccgcgcganaagacggggcttcatgacngtttggagactattgangagacnctggacgacctcattaaacggtgggaagatttccatttgtntccaa

SEQ ID NO: 4791 - DNA, 449 bp, Arabidopsis thaliana
  unsure at all n locations
  Clone ID: LIB22-023-Q1-E1-D1
gcagtatcatcatcctcagcctcagcaacagatagatcagaagactcttgaatctcttggatttgatggatcgccttcttctgttgccgccactcaacaacattcgatgagatttgggatcgaccatcaacaggttaagaagaaacgaggtagacctaggaagtannnnnnnnnnnnnnnnnnnnnnnnnnnnnnnnnnnnnnnnnnnnnnnnnnnnnnnnctcctacttcgcctcttccttctgcttctaattcttacnnnnnnnnnnnnnnnnnnnnnnnnnnnnnnnnnnnnnnnnnnnnnnnnnnnaactcttccgatccacctgctaaacggaacagaggacgtcctcctggctccggtaagaagcagctcgatgctttangaggaacaggangagttgggttcacgcctcatgtcattgaggttaaaacaggagaagacatag

SEQ ID NO: 4792 - DNA, 481 bp, Arabidopsis thaliana
  unsure at all n locations
  Clone ID: LIB22-022-Q1-E1-H1
gcaacttctctctctaatggccaatcgatcggaggaagcagagtacgagaacgattctcggcgaaatcatcaagacaagaagaaagaaggagttttagatctggtactgaaacgacctttacggtggctaagaatgctcatcgaagagcttcactggagcttcttcttcggtgtgattatcgtctatggagttagccaaggacttggtaaaggtctcagcaaagtcagcacacagtactacttcaaagacgagcagaagatacaaccctctcaagctcagatttacgttggtttgattcagattccttggattattaaacctctccggggaatggttgactgatgttgtcccaagttttgggttacaaggagacgaaccctatttcaaattaanccggtttttcctgctatgattctccaatgatgggtgttatgggcttcacaacgnatcctgcatccttgcaactgggcnttgtccctg

SEQ ID NO: 4793 - DNA, 489 bp, Arabidopsis thaliana
  unsure at all n locations
  Clone ID: LIB22-022-Q1-E1-F11
gaccgcctccatttctcattctctctctctctaaaaaaccaaatccagagtcagagaaaatctgtgatggctctttccaacgcctcctctctctccaccagatctatctacggcggtgatctttctcaccgtccaagcaaccgtcaatcatccttcacatttcatcccgccgtcaacaccaagcctaaatccgttaacctcgtcacggctgtacacgcggctgagccagctagaaacgctgtttcagtcaaagaatccgtttgcgtcttcttcgtctgggtgcattgaaatggactccaagagaagctgggaaactgaagaaaggntcctggcaaactttctggattaaccctaaaggccaattgaagccttgaagtcctggtggcctaaaaaacgaataagaagggctttttcctcccgaaatggtggtttcggcccggagaaagcctaagggaatccttggaaagaagaanaatttgggttgaatgc

SEQ ID NO: 4794 - DNA, 457 bp, Arabidopsis thaliana
  unsure at all n locations
  Clone ID: LIB22-022-Q1-E1-F2
gcccacgcgtccgcttggtctacttttgttactctttgagttgggtgattatggcancagcaccacaggaggaacgatctccgtcgcttgacgattgccttaagctattgaaaggggagagagacgancagaggctcgccggtctacttctcgtcaccaaattctgtaagaacgatgacatcgtttctctcaacaaggtctacgaagccgttggtactcactttctcgaccgtcttttccgtactggtagtggcantggcgatggggttgataatcgtgatgtgtatctgcanatatctatcactgttcttgctgcattctgccgtgttccgggagatagcttcttcagaagagatggtctccagaattccccttattctccaanntaatgtccaaaggaataactacaaaacatgctccaagattgctaagaaccttctgtattggngtcaacggc

SEQ ID NO: 4795 - DNA, 459 bp, Arabidopsis thaliana
  unsure at all n locations
  Clone ID: LIB22-022-Q1-E1-F5
gcccacgcgtccgcccacgcgtccggatttcgatattctttgtacacatccaatgtttggtcctcagagtgtgagttcaaatcatggctggagaggattaagatttgtgtatgataaagttaggattggggaagagagattgagagtctcaaggtgtgagagttttcttgagatttttgttagagaaggatgtgagatggtggagatgagtgttactgatcatgataagtttgctgctgaatcacagtttataactcatactcttggtaggcttttggggatgttgaagttgatatcgacgccgattaatacgaaagggtacgaggcgttgcttgatttagctgagaatatttgtggggatagttttgatttgtattatgggttgtttgtgtataataacaactctttggaggtgttagagaagattgatttggcttcgangcttgcgtaaggaccttt

SEQ ID NO: 4796 - DNA, 466 bp, Arabidopsis thaliana
  unsure at all n locations
  Clone ID: LIB22-022-Q1-E1-F6
ggagtcagaaaataaaaagtagaagaagcagaagcgagagtgcaaaaaggaaattaggttttgagtggtcatgtctgctcctatctattctccgatagatatgcaagagattgttcaaaatcctcctgggtttgatacggaaccagtcccaatcagtacttaccgagacaatgaacctgtcccgctttcaacttaccgagaaaatgattcagatcatctcgacgccactcagcaagagaacgatgacttttgggaaaacggtttcagtagggaagaggccattgaagatccagagccttctcaggcaaaggaaaatggaaagagaagtgtagacaacagcgctttcactcatggggaaactgatctcaatcaacttcctgcgattcctccggtttcaactgggtcaaggtttgccgtatgcccctgttgattggncaaaccctgggtgangttatggacttggaga

SEQ ID NO: 4797 - DNA, 464 bp, Arabidopsis thaliana
  unsure at all n locations
  Clone ID: LIB22-022-Q1-E1-F8
gagaatattggaaatttctgaagcttttctatagttgatctcgagccatgcctccaatgaaagctgtgttgcaattgagcattcacgaggaaagaatcaggaagaaagcgtttgtcaccgtttctcgatgtccaggtgttacttcgataacaatggatgacaaaaccgggaaaatgacagtagttggtgaagttgatgtaccggttatcgtgatgaagctaaggaagctatgtaacacagagcttgtttcggttgaagttgttaaaccacctgagaaaaagcctgaaccagagaaaccggctccacctaaaccagctccagctccagctaaaccggctgaaattgttgcctggccggttcagatgaacaacccttaacaatacaatcctgcctatgcaaattcttactaacaaccatatggggaactctagatttgtaacggacgaatcnaattgtgtgaatta

SEQ ID NO: 4798 - DNA, 462 bp, Arabidopsis thaliana
  Clone ID: LIB22-022-Q1-E1-G1
ttcttcattgctaaaaactctcactttctgcaatttcgtctgcttgtttcactcacaagaatttcacatttttttcaaaaataaacactgcttaatgcggattggttgttcacaaaaggaccaaaaaatcgtagaagtttggattgatttcactatggaggaagtagcagctaaggttgaggaagaaactgtggaaaccaatgtagatgcagtgaaagaggacaatgcaactatagctaatgaaagcagaagcccagagagtgtttctgcagtgtctgtggtgtcaaatcgagctgcttctactaaaaagaaaccagttattagttcgaatttaataaagccaactgcgtcttcttcattacgggtctcgggtactacgcctgtgactatcaaggagaaataatactggagggagttacaagagaattaactggtactcctaaaggtctgcctaaacaaatg

SEQ ID NO: 4799 - DNA, 493 bp, Arabidopsis thaliana
  unsure at all n locations
  Clone ID: LIB22-022-Q1-E1-G10
ccgaggattaaangggtcgacgcncgcgtccgatctatnnagtgagtgactgagaaacagagaaggattccaagctgctaaagattttttgtcaagatttttaatttaagtttcctggaggaggagatcacagatcttcttttcatatgaagagatctttccttctcttgtatgtgctcctggtacaggccttctatggggcttggtgtantgttggagaaagcctgcattgtgaatattccaatttagcgagtcttcaccggcctcacagcgtatcgattacagagtttggancggttgganatggtgtgactctaaacactaaagcctttcanaatgctctgttctacctcaattcctttctccgaanaaagggcgggggccaaacctttttgttcccgcctgggccaantgggcttaaccggggagtttccgacccntaaacnagtccacctcancccttaangggctnagaataaaaggggggcaaacc

SEQ ID NO: 4800 - DNA, 437 bp, Arabidopsis thaliana
  unsure at all n locations
  Clone ID: LIB22-022-Q1-E1-G2
cctgagagagagagagagacaacaccttcgcattcgctaactttctctgtaaccgccatgggtattaagggtttaacgaagcttttagccgacaatgcgcctagttgtatgaaagaacagaaattcgagagctattttggtcggaaaatcgctgttgatgctagcatgagcatttaccaattcctcattgttgttggaagaactgggactgaaatgctcactaatgaagctggtgaagtcactagtcatttacaagggatgtttaatcgaacgattcgtcttcttgaagctggaattaagcctgtctatgttttcgatgggaagcccccggagttaaagagacaggaactggctaaacgttactccaagagagctgatgcaactgcagatttgactgggtgcaattgangcaagaaacaaaggaagacanttgagaa

SEQ ID NO: 4801 - DNA, 468 bp, Arabidopsis thaliana
  unsure at all n locations
  Clone ID: LIB22-022-Q1-E1-G3
gctccttcctccgatcttcgtctccaattcggaatcttcctatcacaatttcaaggctcctttaacccttgatcatcaccgattcaatcaattcggaatcacaatttcaaatcgagagaatttcaatttctcttgtaaaaccctaaattatgtacagcaatttcaaggaacaagcgatcgagtacgtgaagcaagcggttcatgaagacaatgctgggaattacaataaagctttccctctatacatgaacgcgcttgagtacttcaaaactcatctcaagtatgagaagaaccctaagatcagagaagctattacccagaaattcaccgagtatctccgtcgtgctgaggagatccgtgctgttctcgatgaaggtggatngggtccaggatctaacggtgatgcaaccgtcgcaacgaaggccaaaactaagcctaaaggatggagaaagtggtggtaaagaaggg

SEQ ID NO: 4802 - DNA, 459 bp, Arabidopsis thaliana
  unsure at all n locations
  Clone ID: LIB22-022-Q1-E1-G5
gattcagtctttaaagtcttaaaggatcttcattgtactttgaagtatagtttctgtaacaacaatggccaaaaccagagggtcttgttgtctcgtcaacgctctaatcgctatagcttttttggcgacagcccatttgtgtgaagctggcttgtctcagaaagaacaggacaaggtctcgaaattgcctggtcagaattttaatgttagttttgctcactactctgggtttgttgctactaatgagcaattgggaagagctctcttttactggttatttgaagccgttgaagatgctaagtctaagcctcttgttctctggctcaatggaggaccaggatgttcatctgttgcatatggtgaagcagaagagataggaccatttcacattaaggcagatgggaagactccttaccttaatcaatattcctgggnaccaaagctgnaaataatttggtc

SEQ ID NO: 4803 - DNA, 455 bp, Arabidopsis thaliana
  unsure at all n locations
  Clone ID: LIB22-022-Q1-E1-G6
aagcgaagaagcttgttggcaagagtgtcgttttgtccaagtcccaaagattttgcttcagattgggcagtgaagatgcaacactttcccaatggtaagagtactctttacaatttttagatttgtgttgtcacacatattgaaatatatatatggtatatttggacgaaaaaaaaaaaaaaagggcggccgctctagaggatccaagcttacgtacgcgtgcatgcgacgtcatagctcttctatagtgtcacctaaattcaattcactggccgtcgttttacaacgtcntgactgggaaaacctggcgttacccaacttaatcgccttgcagcacatccccctttcgccaactggcgtaatagcgaagaggcccgcaaccgatngcccttcccaacanttgcgcaancctgaatgggcnaaatgggaancngccctggtaaccggngcaatta

SEQ ID NO: 4804 - DNA, 413 bp, Arabidopsis thaliana
  unsure at all n locations
  Clone ID: LIB22-022-Q1-E1-G7
aagaatggctacatgtcctcctttcgatttctcgaccaaatattacgatggtgacggcggatgccagaggcagagcagcttcttcggaggcacgacggtgctcgatcaaggcgttggctacgccgtgattcttggttttggtgctttctttgccgtcttcacatcttttttggtatggttagaaaaacgatatgtgggagctcgtcatacatcggaatggttcaatacagcgggaagaaacgttaagacaggacttattgcaagtgtcattgtatcacagtggacatgggctgcgaccatactgcanagttcaaacgtagcatggcagtatggggttagtgggaccgttttgggtacgctagtggagccaccatacaagtgctgttgtttggtgtgatggcgantgagataaa

SEQ ID NO: 4805 - DNA, 398 bp, Arabidopsis thaliana
  unsure at all n locations
  Clone ID: LIB22-022-Q1-E1-G8
accagtgaaagctcctatctcttcctgaggcattgtgatctcttgttaaaatggctagtactctgaggaacattcatggtaacgagatctaatttgcaatctgagtttactggaaatggaggaagtaagagaagaaatcttcatgatgaaacagatcaaaatgttattgcttcagaagacactgtataccgctacttgtgtcccgtgaaaaagaccgggagcattatcgggaaaggcggcgagattgctaagcagataaggtctgagactaaatcaaacatgaggataaacgaggctttacctgggttgtgaaggagcgtgttgttaccatgtanttccactaactgaggagttgaatcattttgggagatgatggtgaaccttgtntgtcccgcctt

SEQ ID NO: 4806 - DNA, 473 bp, Arabidopsis thaliana
  unsure at all n locations
  Clone ID: LIB22-022-Q1-E1-G9
gtccgggataaanggtcgacggncgcgtccgcaacatgntanattttcagtttctacanacaaatctgtgagctattttttcattcttggttttctcngttttggcaaattttggaggaaaggaatctgaacaggaaacaagaatggncgtggtcgattggcttggtttgggattaggctctgttgctggagctttggtctcggaaggtctgaaagttttgatttcagaggcaaagaaggtgttagctttcaaatctgtgtctaacgagctcgcatcgacgatggagtcattgcttccggtgatcaaagagatcgaatcgatgcaagatggtatggaactacaagatcttaaaagacacgatcgataaagctcttttactggttgagaaatgttcacatgtcgagaantggatataatcctgaaatccgaagtacaccagaaaaantnagggaatcaataggaagatgcncca

SEQ ID NO: 4807 - DNA, 456 bp, Arabidopsis thaliana
  unsure at all n locations
  Clone ID: LIB22-022-Q1-E1-E9
gcatttgcaagacaacgtataattaagaattagaagtggtttaggagaggagagagaagagagagatggaggaatatagacttggagagctgagacacttgctgacaacggttttcctgtcgggattctccgagttcttggtgaagccagtgatgactgacgtcaccgtcgccgcggtttgctccggcctaaacgaaacatgttctctcgccgtctatctcaccggagtagaacaagtgacggtaggactggggacaatggtaatgatgccggtgatcgggaatctatccgatagatatgggaatcaaaacattactcactcctccgatggtgcctcctccaatcctcctccaaacgataattancgttatanaaagggatacgaaattccttccnacgcgttttacaataacccaagattccaatcnganaatggcccggccaaagggaccgttn

SEQ ID NO: 4808 - DNA, 454 bp, Arabidopsis thaliana
  unsure at all n locations
  Clone ID: LIB22-021-Q1-E1-C12
ganaccggtcaaaggactcccgggncgacccacgcgtccgagctggacctccaccggaaaagaccattactttttcttctcttatggcacctaagatggctcgcagaggaggtatagatgagccttttgcatgggaaagcaaagaatttttgaggaaactttgcataggaaaggaggttgcattcaaagtggattacaaggtggaagctattgctggaagagaatttggctctgttttccttggcaacgagaatcttgctaagcttgttgttaaaactggttgggcaaaggttagggagccaggtcagcagaatcaggacaaggttagtccttacattaaagagttgctacagcttgaagagctggccaagcaggaaggatatggtcgttggagcaaggttcctggtgctgctgaagcatctatcagaaatcctcctccttctgcaatggggaa

SEQ ID NO: 4809 - DNA, 495 bp, Arabidopsis thaliana
  unsure at all n locations
  Clone ID: LIB22-021-Q1-E1-C2
gtaccggcccgaaaattcccggannccncccacgcgtccgcgcaaggactccaggatcatttccaccaaagcatcatatgccagtgattgactcttctccaaaacttaagcctagaaacgacagaatttcaccttctcctgctgctaaacatgaggctgaagaggcgatgtcagttaagcgtaggcaaagaacacctcctactttgccaagaagaacgtctttgatagcgcaccagtcgagacaactaggagcagatatttcaaatatggcagcaaaggaaaccgcgaagctacatccatctgtgccatcagagtctgaaactaattctcatcaatctcgtgttcatgcttctcctgtgagtacgacgccagagccaaagagaacctctgttggatctgccaaaggaatgcagagtgaaagcagcaactctatctcgtcgtcgttgtccatgcangcattgagctctgtgatgatgcttccaccccatatattga

SEQ ID NO: 4810 - DNA, 455 bp, Arabidopsis thaliana
  unsure at all n locations
  Clone ID: LIB22-021-Q1-E1-C5
tccgcanacgcgtccgcgcagagtcacaacaatgacattcaccttccttctccaatcaccaccactcccaatttctccatctcctcctcaattctctctttcctcttctcctttatcaaaaacgcagcgattcatcactccaagccagggctctcgtctacggactttgtgtaccaaagtcatcataccaaacatgcaagattcaggatcaccaccactctcttatcttactcagcgagaagccgctgagattgatgagaccttgatgggtcctcttggtttctccattgatcagctcatggaattggctggtcttagtgtggcagcttcaattgctgaggtttataaaccggaagaatatagccgggttctagctatctgtggtcctgggaacaatggtggtgatggtttggtggcngcgaagcatttgcancactttgggatataaaccgttt

SEQ ID NO: 4811 - DNA, 505 bp, Arabidopsis thaliana
  unsure at all n locations
  Clone ID: LIB22-021-Q1-E1-C6
gcctgnccgtaacggtccgaaagttcccgggnccacccacacgtccgcncacgcgtccgagacgacgaagtcgagagaaagaaataatggcggaggagacgatggagaacgaagagagggtgaagctgttcgtcggacaagttccgaagcacatgacggagattcagctcctcacattgtttcgagaattctccatcgtcaatgaagtcaacatcattaaagagaagacaacacgagctcctcgaggatgttgttttctgacatgtcctacaagggaagatgctgacaaggtgatcaatagttttcataacaagaagacattgcctggggcatctagtccgttgcaagttaagtatgcanatggcgagttggaaagactagatgttcttgactgttcgtgcaatccagagcacaaacttttccgtccngtaaggcttccaaangaatgtctctgaaacctgaagtccagtcccntantcctctgaatacgggaccattaagggtt

SEQ ID NO: 4812 - DNA, 518 bp, Arabidopsis thaliana
  unsure at all n locations
  Clone ID: LIB22-021-Q1-E1-C7
tttgnaacgcttacgcctgnccgtaacggtccganaattcccgggnccacccacncgtccggaagcttttagtatttttttcaacaatcgcttttttttttctcgatctccgtgaagctctcgaatctctggttttgagttttggagaatggtgtttttccgcagcgtatcggcctttactaggctgaggtctcgcgtcggccaacaatcttcactcagcaattctgtcagatggattcagatgcagagctctaccgacctggacctgaagtcgcagctgcaagagttaattccggaacagcaggaccgtctgaagaaactgaagtcagaacatgggaaggtccaactgggaaacatcactgttgatatggttattgngtggaatgaganggatgactggattgctttgggaaaanctcattgcttgacccggaagaagggtattcccctttangggattgtccgattcctgaagtgccaagaaagtattacctactgcccaatctggaactgaaacc

SEQ ID NO: 4813 - DNA, 488 bp, Arabidopsis thaliana
  unsure at all n locations
  Clone ID: LIB22-021-Q1-E1-C8
taacggtccanaattcccgggncnacccacgcgtccgggagtctccaacgccttcctcctcattctccactctcacaccaccaacttctgattccagatctcaacgatgcaaagctccgccgtattctccctctctccgtcgcttcctctcctaaaaccacgtcggctctctctccgccaccatcccataaccaccgccgcttcttcaagcgatctaaacgtttctccaaatgttgtctctattccttctttatctcgtcgatcttggcgtctcgcttcgtctgattcgcctctccgtgcttggtccggtgttccttctccgatctctcactccttagacacgaatcgtttcagaaccgccgctactgcagttcctgaaagtgctgaagaaggtgataacagtggtaaattgacgaanggtttgggaacttggcttgttggttcgctaagtggtaacttttcaatatctactttaacaatctaacaaa

SEQ ID NO: 4814 - DNA, 456 bp, Arabidopsis thaliana
  unsure at all n locations
  Clone ID: LIB22-021-Q1-E1-D10
tttcttactgtnttcgcggcggatacggtcanaggnctcccgggncgacccacgcgtccgactaaacaaaagaccctagttctctctctctagttagccgccgcaaancagatcaantcttcaaacgccgttttgcctctttggtggtcggtttcggccggcaccgtgagagggcctctcttctctttttagttttttttttcctttgtgtcgattttttttagccggcggcggctcctccttctttgtggcttaatcaatgagttttaagtcgacggcgagcggnnatagttctctcagatggaggttcgttggtagatctacantggggaactatgactctcgacgacggcaagcagatctggtggatttcttcgtcagtctcntcgcggaggtatctctcctccgatgaacctcnttggtagtggtggctcagtgttaaganggtacagaggt

SEQ ID NO: 4815 - DNA, 458 bp, Arabidopsis thaliana
  unsure at all n locations
  Clone ID: LIB22-021-Q1-E1-D11
acgccgccggaaccggtccaagnantcccgggncgacccacgcgtccggtcacaagaacttcaagatgaagagaaacccacgtaaagtgaaatggactaaagcattcagagctgcacacgggaaggacatgactaaggatacaacatttgagtttgagaagaagagaaacagacctgagagatacgacaggaacgttacagagaatacactcatggccattaagaagattgctaagatcagaaccgcaagggaagccaaacatatcgaaaataggttgaagccaaacaagcagaagaaactcaatgacgatatgaaagaacttgatcagaacattcatatggtccaggctcccggggcacagaagatcaaagttgatgtttccgaaaagaagtctgttcaaaacgaagccatggaagagtgattctgtggtaacaatatgatccgtctaaaagcctct

SEQ ID NO: 4816 - DNA, 362 bp, Arabidopsis thaliana
  unsure at all n locations
  Clone ID: LIB22-021-Q1-E1-D12
aatgtattccaaacgccaacgccgnncaggnaacggtcaanaantcccgggtcgacccacgcgtccncccacncgtccgcccacgcgtccggttttagggaaacggctatgtcacagttgaataattcgtggttggtgcagactggtcaatgagcagtgattgtcaaaggatttgcactgtaaattatttatactctttgggttttgattatgaaacccttatggatgatcaanttanatttgttattaatacagaacattttttaggaatttggattggtgatataaatgtaaataanatggtcaannttggttggttatantgatttgtttaatcaaanaanaaaaannaaaaaagggcg

SEQ ID NO: 4817 - DNA, 501 bp, Arabidopsis thaliana
  unsure at all n locations
  Clone ID: LIB22-021-Q1-E1-D2
gtaccggcccgaaaattcccggnnccacccacgcgtccggtgatctcgtctcgaggctaancatagacgacaagatctcgcagctggtgaatncagctccagggataccgcgtcttggagttccggcgtacgaatggtggtcagaagctttacacggcgtancctacgccggtccaggaatccggtttaacggnacggttaaagctgctaccanctttcctcaagtcatcttgaccgctgcttcantcgactcctatgaatggttccgcattgctcaagttatatgaaaggaagcaagaggagtgtacaacgcaaggcaagcgaatggaatgacattttgggcaccaaanattaacatatttaggagattcaccggtggggaaaaaggcaatnanactccccggcgaaggattcgattantaaccggnacttacncnggggnntaagttataggactacaaggtgacncttttgacgtccggnaaacactccccaatcatc

SEQ ID NO: 4818 - DNA, 495 bp, Arabidopsis thaliana
  unsure at all n locations
  Clone ID: LIB22-021-Q1-E1-D3
accggcccganaattcccgganccacccacgcgtccgtcatgtcttcaagatgacttctcttttcttctttgttctccttttctcgtctcttctcataagcaatggcgatgccaacccaaattacaaagaagctctctccaagtcattgctcttcttccaaggtcagcgatctggtcctcttcctagaggccaacaaatttcctggagggctagctctggcctttccgatggctctgctgctcatgtggacttaaccggcgggtactatgacgcaggagacaacgtcaagttcaatttaccaatggcgtttaccaccacaatgctctcatggagcgcactggaatacggtaaacggatgggtcctgagctgggaaaatgcacgtgtgaacatccgttgggccacagattatctgctgaaatgtgccagagccacgccggggaagctttatgtcggtgtaggagattctaatgttgatnacaaatgctggggaacg

SEQ ID NO: 4819 - DNA, 515 bp, Arabidopsis thaliana
  unsure at all n locations
  Clone ID: LIB22-021-Q1-E1-D4
aactgtctcgcctggntcgtaccggccccgaaaattcccgnannccncccacgcgtccgaatcaacgcaacgccgaagaagctttttcaggggtttggtgcgttgaatttgtggatcaagaaacaatgcaaattcaatgcaaaaccctaacttttacagtttcttcgattccttgtaacccaaagctaccattcccatcttccctcactttacggtcatggaatccttcattcccgagtttcaggagctccgctgtttccggaccaaagtcatcactgaagctgaacaggtttttaagaaactgtgcaagtacgaatcaggagcttgttgttgatggagaaaccggaaatgggtcgatttcggagctccaaggagatgcagcaaatggttcgatttcgccggtggaagtggaagcagaagtagaagaagtgaaggtagatgatttggcgactcagagcatttggggacaagatgaaagagatcgtcatgtttaccggacctgccgcgggattgtg

SEQ ID NO: 4820 - DNA, 506 bp, Arabidopsis thaliana
  unsure at all n locations
  Clone ID: LIB22-021-Q1-E1-D5
aacggtccanaatcccgggnccacccacncgtccggagtgagagagtccatcgnnnnnnnnnnnnnnnnnnnnnnnnnnnnnnnnnnnnnnnnnnnnnnnnnnnnnnnagagaaagagatcttcacaaatatgactgtgatgaatcaccgacacaagcaatgtcattttctcctcctccttctgatcactgtcttctctgccgcgttggatggtgtttcttccgagacagacgtcggagggtttgactacggtgaagcattgtctaaaagcttactctactttgaagctcagagatcaggaagacttccgtacaaacaagcgcgttgacttgggcgttattaacccnggncccaaccgatgggccttgaaacaaagggggttnganttaagtggggaaggatatcacgaacgcccggagaaacaagtttaaaatttgggactttccgaatnggcntttaacggngaacaaatgttgtcatgggagtgttaataaaattacngggga

SEQ ID NO: 4821 - DNA, 408 bp, Arabidopsis thaliana
  Clone ID: LIB22-021-Q1-E1-C11
gaccagctatgctctccgtcgcaagacgtctcggttcggcgacgccgtcgcttcaaaacggagcttccttactccggttcatgagaacggaggcaagtcagccaagacggcggaacaaatttccctctctatcgccactcaagaagaaagaggagaaatcagagtggtggatcgtcgacggagagatgcacgagatcggagatcacgtacctctgcgtgagcgtttcacaatcccgagagacaatatccccaataagcgccggaaacagctccgtgagcagttcatgcgacgaactcgtctcgttcttaaagaatcggagcatgagccatggtgcaagaagtacatggaattgtataatgaggttagagaaaactgggagaggctttattgggatgaaggatattcta

SEQ ID NO: 4822 - DNA, 479 bp, Arabidopsis thaliana
  unsure at all n locations
  Clone ID: LIB22-020-Q1-E1-H5
gaaaaaactcttgctcctgtgttgagagcctaatccaagattctcttccatggcttctattttcagaccttcttcagcttcacttgatttacgaccaaaggttatttgcacgaatctctctacgaaagagcggtttgagtttcagaagaagagtgtgaggaaagaaaggatcaatgttaggttttatagcttgaaggctaaggcacaangatcgtcaattgaagggattagtgttgtacaagagaaagagcttaacaacaaaaccgattatggaagttgttgggggttcatcatgtccgtctgctctgcgagaanctanaacggtcactccgaagttttaacaagnacattttanggccttgaanatnaacggaagcaaaggctcancgacaangcttccatatananggagcntggntaaggggtangggtcnagaaaatgagtcngccttangggaggcttcaaagtnccaaattca

SEQ ID NO: 4823 - DNA, 463 bp, Arabidopsis thaliana
  unsure at all n locations
  Clone ID: LIB22-020-Q1-E1-H8
natttgatctcatctttaaatttttttgtttcccatttctctcagaaagtgttctgttctttttttcttttgtaatcactaaatgcttcaaaagtttgtccacaattatatttgaaaaaaatgtctgtatctgtagcagcagagcatgattacataggtttgtcagagtttccaaccatggaagcaacaacaatgtctgacaaaaccaaaaccagagacaataacaacggtctcaatttcaaggctaccgagttaagactcggtttacccggttctgagtcgccggagcgaagtcgactcaagattcttggctctcaacaagagtactgtcccgtgtcaggtgccaaaaaggtgttctccgacgcattaaccgactctaacaaatgggtcctcnctcctggattcaatactgncnactgggtgatgtcggtccgggtcctgggccccgtaaccccggtcntta

SEQ ID NO: 4824 - DNA, 393 bp, Arabidopsis thaliana
  Clone ID: LIB22-021-Q1-E1-A10
catctttgaaggaaacagagtacatgttacagagcaatcggaagacatgaaaccgaccaagtccgaagaagtgatgataagccttgaagatctggagaacaagaagaacattttcagaacgttttctttctctaaccatgagattgagaacggtgtgtggaaaagtaaccttttcttgggaaatttcgtggaagatctttctcctgcaacatcagggtctgcaattaccagcgaggttttatctgcacctgctgctgttgagaattccgaaactgcagattcgtatttctcgtctttggacaatattatcgatttcggacaggattggttgtggtcgtagctttgaataattgatttggtgaatgtaatgtctctctcttaatggcagtaatt

SEQ ID NO: 4825 - DNA, 465 bp, Arabidopsis thaliana
  unsure at all n locations
  Clone ID: LIB22-021-Q1-E1-A12
cttagcggcccanaacggtcaaanctcccgggncgacccacgcgtccgnaggcacttgagcttttgattgaattgggctggtaccgagccacggntccttaaacggcaacttgttgacatanttggttcgatgcttcanattgcanangctgattccctcnacgagagtacacgtcatcttgcgattgagtttttggttactctggctnaggcgcgtnancgtgcccctgcnatggtcaggaagcttcctcaagtttattgacaggttgtttgctgttcttatgaagatgctcgaggatattgaggactatcctgcttgggaaaaccgctgaaactgangatganagatgctggcgagacaagcaaactacagcatnggtcannagtgtttggatcgtttaacaattttccctggggaagaaacaccattgttccggttgcatntcagcantttttctgcctaac

SEQ ID NO: 4826 - DNA, 511 bp, Arabidopsis thaliana
  unsure at all n locations
  Clone ID: LIB22-021-Q1-E1-A4
aantgtctcgcctggtcgtaccggcccganattcccggggccccccacgcgtccgcnaacgcgtcngataatttacttctttctttataactaccatattctcaatcacaacactcgccactgtttcgaatagatggcttctatttcaaccccttttccgatttctctccacccaaaaaccgtacgatcaaagccgttgaaattccgagttttgacccgtccgatcaaagcttccgggtcagaaactcctgatctaaccgtagcgacacgaaccggatccaaagatctcccgatccgaaacataccgggaaactacggtttaccaatcgtaggaccaatcaaagaccgttgggattacttttacgaccaaggagctgaagagttcttcaaatcacgaatccgtaaatacaactccacggtgtacagagtcaacatgccaccgggagcttttatcgccgagaatccacaagtcgtggctttactcgacggtaaaagcttcccggttttattc

SEQ ID NO: 4827 - DNA, 495 bp, Arabidopsis thaliana
  unsure at all n locations
  Clone ID: LIB22-021-Q1-E1-B1
gtaccggccganattcccggangccncccacgcgtccgcnaacgcgtcngcggacgcgtggggattaaaagagttgaaaatctccttgcatgtgtctctcctctgctctgcaacaaatggttcccgaaacactcagctttagctttcggtcacttgttaagactgctaaaaaaaggaccagtggattaccaacgagtcatattacttatgctcaaggcattgctccaacacactcccatggatgcttcgcagagtccccacatgtacacaattgtttcacagctagtcgaaagcactctgtgttgggaggcattgagtgttctcgaagctcttcttcagagctgcagcccggtacaagggggcaccggtggatcccaccctcaggattcgagttactctgaaaacgggactgatgagaaaacgcttgtacctcagacttcatttaaagcccgaagcggactcttcatacgcaatgatggctgcaacaatgtcgca

SEQ ID NO: 4828 - DNA, 402 bp, Arabidopsis thaliana
  Clone ID: LIB22-021-Q1-E1-B11
cttttctcccagattcatcaatccctcctgctaccgcgagagagtaacaactcaccggacgtttcaaatccatcctccgataactatattcgtttcgttagatctagatctgagcgtcggtgagagattttctggatctgtgatacgttccaggaaacatggcgacgatgaaaagtttgataggtctgataaacaaaatccagagggcgtgtactgtcctcggagatcatggcggtgaaggaatgtcgctttgggaagctctcccaaccgtcgctgtcgttggtggccagagttccggaaaatcttcagttctagaaagtgttgtgggaagagattttctgcctcgtggatctggtatcgttacaaggaggccattggtgttgcaacttcataagactgaag

SEQ ID NO: 4829 - DNA, 451 bp, Arabidopsis thaliana
  unsure at all n locations
  Clone ID: LIB22-021-Q1-E1-B12
ctcnacgccgctcggaaccggtcacaaattcccgggncgacccacgcgtccggctgaattacatatgcttgcgtatacttggagtaggtcccgatggaggactagaaaacgcatgcaaacgggccaggcaatggattcttagccatggcggtgtgatttatattccttgttggggaaaagtttggctctcggtacttggaatctatgattggtctggagtcaacccgatgcctcccgagatttggttgctaccttatttcctaccaattcacctagggaaagcttttagctatacccggataacatatatgcccatctcttatctatatggcaaaaaattcgtgggtcaaattacacctcttattatgcaactacgtgaagaactacacttacaaccttatgaagaaatcaactggaacaaagcgcgacatctaagcgcaaaaggaanaca

SEQ ID NO: 4830 - DNA, 518 bp, Arabidopsis thaliana
  unsure at all n locations
  Clone ID: LIB22-021-Q1-E1-B3
aantgtttcgcatgggtcttaccgggccganaattcccggaacnacccacgcgtccgaagtttcagacataacatctcttcccatctctctcccctctaagcaattaagcagacangacactgatgatatgagacgaagagaaagaagtcttatcactcatcctttcctcttatgaatctctccgccgaccaagctcccgtcaccgccgtcgacgaactagctccgccttctcaaccgcatcgcttatctacatcangtgatctccacccagaagagcgtttctccggtttctgtccttcttgtctttgcgacngcctctccgtcttagatnanaangccgctccgccaccgtcttcttcttcccggaaacctcnctctanctccgctgtttcgttaaaagctctcttcaagccctcctctagtggtaacaaacaactccaacggnnaannggtcggggtcagacccgggttttctccccggaggctccgaagttacaaaagtcccttttccgcanag

SEQ ID NO: 4831 - DNA, 448 bp, Arabidopsis thaliana
  unsure at all n locations
  Clone ID: LIB22-021-Q1-E1-B4
atctnagtcgcgccgtcaactttttgttgagaagagatatcatctgttttcgatccaaagaatagaaagcttggattccgaaatctccctttttgcttccccaattcgttttcctttacaagctcggcgcttgatctcgctatctctcagagagctgagagctgaggatattggaaatttggaaggtggaatctcaaatggctgaacttcctggtcaaataagacatataggcggtcgaatgagtcaactgctagagcagatatatgggttttcgagaagatctttgtttcgggtcatatctatgggtcctataccttgtcatattgcctttatcatggatggaaatcggagatatgcaaagaagtgtggtcttttagatgggtctggtcacaaagcggggttttctgcgcttatgtcgatgctgcaatactgctacgagctgggtat

SEQ ID NO: 4832 - DNA, 506 bp, Arabidopsis thaliana
  unsure at all n locations
  Clone ID: LIB22-021-Q1-E1-B5
cttacgcctggccgnaacggtccganaattcccgggnccacccangcgtccgcaaatatcttcactcacaagttttgagtatgttgaaccaaatgggaaagatgtgggaatcaacgtgagaaagaaggcggaaaacatagtcgctcttttaaataataaagagaaaatctcagaaatcagagacaaagcagtagcaaatcgtaacaagtatgttggcctctcatcaacgggaataacatataaatctggttcctcagcttcatttggtggtagttttcaaagtggttcaagcaattttgacagctacaaggatagagattccagagaagacaagaatgactacgagtcttttcaaaagtcaagacgtggtgttaaaactgaggagcaaagctacacttctaagaagagtttttcacgctatggcagcacggaccatgacaatctatccagtggtaaaaagtcacccgattctgccaaaacataggtcatatgtatctgcagctcct

SEQ ID NO: 4833 - DNA, 499 bp, Arabidopsis thaliana
  unsure at all n locations
  Clone ID: LIB22-021-Q1-E1-B8
cctgntcgtaacggtccttnattcccgggnccacccacgcgtccgcagacgcgtgggttcattcttcatcgaatagtcgaaaaatatttgaactttcttaggaaaccaaaccaacaaaacaaaaaggaaaacgagataatggtgttaccttggagatcaagaggaggagtagcaaagagacgtaatcaattgatttccggcgatatctccgtcgtggaaaccaagattccagttcaactccgatcgccatcaaggatagagcggattcagtcaccgcgcgtgctgttgacgccgcgtgatgcggtggagataagtcggagattgcaaaacgcancggcgcgtgaggagtatgccgagtgtttggagattgtgagcaaaatcaagaacttgggaaagaagaaggggacacgaancaagaagtgtttggtccaaaaacggaagcgttttggctttgtctcctggttttgaaagattcgcggcggcgccntgatggacacat

SEQ ID NO: 4834 - DNA, 449 bp, Arabidopsis thaliana
  unsure at all n locations
  Clone ID: LIB22-021-Q1-E1-C10
cggtcanaggactcccgggncgacccanncgtccncttcttccctctttcgttttctcgcgactctctagggttagggtttgttgattttcatgcgttattcttcatcttcttctgcaattcgcaactagagaagctaattccattgaagttaaggtggggataatttttggttttagnanatactaatggctggagtactanctggggaatgttcttacagtgagagtggnntttcatcanactcaangaattcccatgaaaagcaagaanaggtttcccgctggtattttggaaganaagaaatagaagagaattcaccgtcaangttggatggtantgacttaaagaaggaaacatacctccgcanatcctactgtacatttttgcangacttgggcatganattgaaagttccccangttncaatatcnacagcgataatcctct

SEQ ID NO: 4835 - DNA, 499 bp, Arabidopsis thaliana
  unsure at all n locations
  Clone ID: LIB22-020-Q1-E1-H4
aanccggggccaccacgcgtccgcanttcttcaatttcggttaaaccattttcgttctttcttcttttaacaagaaaccaccgctctgtacaaaacaaagtctccgtcgtttcttctccgttctccggtcaattcgaattcctcagagagaaatttgtgctcgcgagttccgcgtgaaatacatggaaatgttggcggcgttggactcgcgttcttctctccatcttcatcgttccatgtctcgcgttgacctttttgccggtgttcgtatgaaaccatctcctacaagtcctgttccgaatacgcctcgaatatgtgggaagtaaactctgttgattcgactcttcctcctccctttaagtaattcctccgtttgnttttcctttgcaaccggaatttccaagattcaaatccgaaagctgtgaattaacctggtaancgtcctggtgttagtcctaatttaagggaagtggattctttcccgggggaaagaaattaa

SEQ ID NO: 4836 - DNA, 458 bp, Arabidopsis thaliana
  unsure at all n locations
  Clone ID: LIB22-020-Q1-E1-F5
ggnttctcattgttcctttgttagacttatccatttcacattccatttaaactaagagattggattaaattttcagaggaatggttcgaaggcaagcgacaacaacagactgtaccctgctcacagggagacattctcagccacagacgaagaanaaaagattcttcaaatcgacaggaaacacatcagttcttacacaagacgcaacagaccagacatgttctactcatcccacctcatcctagacaatgctggcctgtctgaaccagttttcgccacgccttttagcccgtcctcgtcgcatgaagagattacaagccagttttgcactgcaagagaacagtcctcaagtttatactcagctacttctanaaagcaaacgcagtggctttaaccgctanttctaatagncacngagcgantgcncaaaaagctgctgtgatggtgacatccaaanc

SEQ ID NO: 4837 - DNA, 523 bp, Arabidopsis thaliana
  unsure at all n locations
  Clone ID: LIB22-020-Q1-E1-F6
cattttttacggccngccggtaccggtaagaaaattcccggggtcnacccacgcgtccgcccacgcgtccgcggacgcgtgggttgcaatggcttccttcacaacaacttcttcttcctcgcttctcctcaaaactcttctccccgtaagccacctgaatcgtttctctacactctctggtatccgcgttggcgattcatggactcctctgctccggaacatctccaccgctgggtctcggcgtcgagtggcgattgtgaaagctgcgacggtggattcggattactcgtcgaaacggagcaatagcaatgagcagagagagacgattatgcttcctgggttgcgattacaatcattggctcattgtaatggagtttcctaaagatcnagcggccaaagtagggattaagatgatttgatacttaccttaaacaactccntgctactggtccttgggaancaatgggnannanggcgaaagaangaaacaatgtntggcaanttcaagtnaccaacgaacatt

SEQ ID NO: 4838 - DNA, 441 bp, Arabidopsis thaliana
  unsure at all n locations
  Clone ID: LIB22-020-Q1-E1-F9
ttctcttcttcttctccaaattgatggctttttaaggtttccccactcgatctaatctaacctaacgctccttcattaactttcttcagacagattacaataacgtgtaatatacaagacacagaaacatcattgattccgatctcaagttttgtctttttgatttcatatacacagatacatagataacaaacacacatctttgatcaaatgtctggactttggagattgaggaatctaaagtctctagctttacatgctcgttcgatttcacctgtttccaatctttattctctggaattaggatcatgccctcgtcgtcgtattcaagaacgattcaaatcggaacaaagnggcggangaagaagaggagatgatttccggttccggtgactcntccggaagttaagagcaagagccgaantgtcctccgttgctcaa

SEQ ID NO: 4839 - DNA, 550 bp, Arabidopsis thaliana
  unsure at all n locations
  Clone ID: LIB22-020-Q1-E1-G1
aactgtttttcctgcccgccancgggtccgaaaaancccggggtccacccacgcgtccgcagaagggttacatggtaggaaatgggctgatggacgatttccatgacaggcttggtcttttccaatatatttggtcgttgggttttatatctgaccaaacatacagcttactgcaacttcaatgcggtttcgaatcgtttattcactcctccaaacagtgtaacaagattctggagatagcggacaaagaaataggtaacatagaccaatacagtgtcttcaccccagcttgtgttgccaatgcttcccagtcaaatatgttgctaaagaaaagacctatgactaacccgcgtgagcgaacagtatgattccttgtacgggagaaacacactacaatttaattcaatccttccaagaagggttcaaaaaagccctccaatgttccaaccaaggaacttgcaacaatccaaaaatggggataacttgcaattgatggtccttgaantgaacaactgggaattgactcctcccttcctccgggtttctaaaa

SEQ ID NO: 4840 - DNA, 445 bp, Arabidopsis thaliana
  unsure at all n locations
  Clone ID: LIB22-020-Q1-E1-G12
cttctcatcatcatcgtccttctgtgcatttanctgggaagtttacaagcctccctcgagatgttcgcttcacgagcttatcaacttcaagaatgcggtccaaatttgtttcanccaattatagaaaaatctcaatccgggcatgttctcaggttggtgctgctgantctgatgatccagtgctggatagaattgcccggttccaaaatgcttgctggagatttcttagaccccatacaatccncggaacagctttacgatccactgccttggtgacaanagctttgatacagaacactcatttgatcaaatggngtcttgtactaaaggcactttcaggtcctcctgctcctaattggtgggaatgggtatatantccgtatcantcagatttacgacattgggatcnacaaagtgaacaaaccatacttgccaataacaacag

SEQ ID NO: 4841 - DNA, 520 bp, Arabidopsis thaliana
  unsure at all n locations
  Clone ID: LIB22-020-Q1-E1-G2
ctgtttattctgnccgccaccggtccgaaacancccgggtccacccacgcgtccgcaaaaccactcccactttatttcttcttctctggttttcttaccaaaagaaactttcttcgtcttcctctgtatttaagctttaacaccctgtttttggtttccaacgttcaatcttcatcttcttctcgctgaaggtgtgtttggctctaacggtttaaagctttcttgaaacaccaattgaatcttttctctctaccggcaaaaaaaaaaagattagtccttttaggtctggaaacgccaagatcactcgttctaaaccttagattttgtctgcatttcgggataatcatttcatcgtcagggttcttcaaccaaactacatttacagaagaagaagaaagaaagaaaaagttccgttaacttttaagcgtttggntaaacaaaactcaaagttcctcctcaatacatcgatnctgatttccaanattaaacntcgaaaagagaaaaaagcctctttaaatga

SEQ ID NO: 4842 - DNA, 503 bp, Arabidopsis thaliana
  unsure at all n locations
  Clone ID: LIB22-020-Q1-E1-G4
tttcgnccgccacggtccanacacccgggnccnccacgcgtccgcacacgcgtccgagaagaagaagaaagatggagaagaaatctcagatttcgtcancggaagctgttttccttggagctctagctccaggcgttaatggtccaacatggaacacattgagattcgcgtttctgctactgggtctatgtctanctttcatgctctctgtagctttcaccagtggccaatcantgttgcttgttcatgttggctttctcattgttancgcatctactctctttatcctcctcaattggtttcttgctcagacaggcttactacaagtggtaacacagatgcaggagctgaatttgttaccgtatgatcannacaaatggatcatgggcacaaccnggttgnangcaagacgcttgtgttaacaagttcaacaagttatcnaccagattatatccaagccaaattatgaanggactgggtttggtacaaccaagaaggnttca

SEQ ID NO: 4843 - DNA, 441 bp, Arabidopsis thaliana
  Clone ID: LIB22-020-Q1-E1-G6
acaactggcacgtctctctccttcgctctctcccttcttctccccaaccagcaacgctgctctactcttattcacgcgccgttcatggcttctccgctcgtctctcccctatccaaaccgccgccctccgccgtcatccttcagtcatctccgttatacctgatcaagcgcgtgagatccacacaactcacacgcctgccttcctcggtttctcccaaaactctggactctggagcaactcaaattacggggaagacgtgatcgtcggcgttttagatactggaatctggccggaacatccaagtttctcggattcaggtctcggtccaattccatctacctggaaaggcgagtgcgagatcggacctgattttcctgcctcatcttgcaatcggaagcttatcggagctcgaacgttttacagggatattaacgcaacgg

SEQ ID NO: 4844 - DNA, 506 bp, Arabidopsis thaliana
  unsure at all n locations
  Clone ID: LIB22-020-Q1-E1-G8
acattttacgccgccgtaccggaacaaatcccgggtcnacccacgcgtcngtccttattaaccaacaaggatgatgatttctctcttaaggccattgattttggtctctctgttttcttcaaaccaggccaaatattcaaggatgttgttggaagtccatactatgttgctcctgaggttcttctaacaacatccttgaatatttggtctctctgttttcttcaaaccaggccaaatattcaaggatgttgttggaagtccatactatgttgctcctgaggttcttctaaaacattatggtccagaagctgatgtgtggactgctggtgttatactctatatcttactaagtggtgtcccgcctttctgggcagaaacacagcaaggaatatttgatgctgtgttgaagggatatattgactttgatacagacccgtggcctgtcatatccgacagtgctaaagatctgatccggaagatgttatgctccaatccttctgaacgtt

SEQ ID NO: 4845 - DNA, 449 bp, Arabidopsis thaliana
  unsure at all n locations
  Clone ID: LIB22-020-Q1-E1-H10
caggcgtccgcccacgcgnccgggagctttggcgacgctttctggtgctaagactggtcgtgctcccagagataagcgtgttgttagagatgctactactgaggatgagctttggtggggaaagggttcgccgaatatcgaaatggatgaacatactttcatggtgaacagagaaagagctgttgattacttgaattccttggaaaaggtctttgtcaatgaccaatacttaaactgggatccagagaacagaatcaaagtcaggattgtctcagctagagcttaccattcattgttatgcacaaacatgtgtatccgacaactcaaggaggagcttgagagctttggactcccgnatttacaatatacaatgcctgggcaatttccaatgttaacgtttcactccantacaatgactccgccaacaaccgtagaccntaatcctggct

SEQ ID NO: 4846 - DNA, 472 bp, Arabidopsis thaliana
  unsure at all n locations
  Clone ID: LIB22-020-Q1-E1-H12
atccaccanatcaattgcctccttcttcttcaaaccaatttcttcttcttcttctctcaggtttgagtctgaggcatcacaacagataaagtcttgaactttgatcaagaattctaaacggagtttttgctcttctcgtcggtgaaagaaaaatcgagatgggttcaactccgttttgctactctatcaatccatctccatcaaagcttgatttcacgaggacccatgtgtttaatcctgtttctaaacagttttacttaagatttaacaaccgtttccggaaaacccggaggaataacctgggtttaaganccgtccaanctttgctccgaantaaaggcggcnacggcgttaatttaaaaaggnngaanaaananaaaaggcggttaacgggnaagaagaagaaatccaagggttttaattgcccgaaggtggnaanccganggattgggggtttgccttaaccggcnaa

SEQ ID NO: 4847 - DNA, 496 bp, Arabidopsis thaliana
  unsure at all n locations
  Clone ID: LIB22-020-Q1-E1-H2
ctgttattatgccgccacggtccgaaaanccgggtcgacccacgcgtccgantttacctctaaagccaaagaccaacatgtctaattcaaaccaaccacttctttccaaaccaaagtctcttaagcacaagaatctatgccttgtcctctccttcgtagccattcttggctctgtggctttcttcacagcccaattaatctccgttaacaccaacaataatgatgattccttattaactacgagccagatttgccatggagctcacgaccaagactcatgccaagctctcttgtccgaattcacgacgttgtcgctctcaaagctcaaccgccttgacctattgcacgtgtttttgaagaactcggtgtggcggcttgagagcacgatgaccatggtgaacgaaggctaagattcgctcgaacngtgttaagagacaaaggnaggttttgctggactggcaaggagatgatgggccgtaccaaanggttcgggttg

SEQ ID NO: 4848 - DNA, 517 bp, Arabidopsis thaliana
  unsure at all n locations
  Clone ID: LIB22-020-Q1-E1-H3
gactttcctcactctctgctctccctatatcagcgttttttagctgatcctctctccggcatttctctctctctcttttttttagccatggagaaatttgcgcctgtcgctgctctgttactgcttcttctctgttttccggtagctttctccggtcatgattatggtcaagctctttccaagagtcttctcttcttcgaagctcagagatctggtgttcttcctcgtaaccaaagagtcacttggcgctctcactccggtctcaccgacggcaaatcaagcggcgtgaatctgggtcggaggttactacgaacgcccgggagacaatgtgaaaatttggattaaccgatgggcttttaacgggtggaacgaatgaatgggcgttgggaagtgtgaatttgaagttacnggggaaattcaaattnacaaangcccaaacggggcgaaanccttggggaaaactccnaatttgacggccaaattaaaatngggggggtaaccgggaattaatttcaaa

SEQ ID NO: 4849 - DNA, 468 bp, Arabidopsis thaliana
  unsure at all n locations
  Clone ID: LIB22-020-Q1-E1-F3
gcggacgcgtgggtttcaacgtctcgtccttcaattttcgttttccgagaaaatttaggaaagaaagagaaagagagggcagagacaaaaatttcttcgccgtctgagtgggaaagatggcggaggatttcgctagagcggtagacgatgggcttaaactcgcgaaacggatttatttcggcaaagaccgagccgttgcggcgccgagaccacctgctccgatggacagatcttccactacgcagccttaccttcctacagcacctatggtttacgccgttatacccgacccgggaattgtggataacccggatttgcctagctatcagcctcacttgcaacggaaggtgcaaccaaccggctttgatccccccggaagatgaattcaattganctgggcttgaatggtaaccccaanacggtcctggttaacggtcaccggntcntggcgggttcattgggttaang

SEQ ID NO: 4850 - DNA, 435 bp, Arabidopsis thaliana
  unsure at all n locations
  Clone ID: LIB22-019-Q1-E1-F10
tgtggttaaattggnacctcnatncccggtnnngaaggnanaaatcaagcatctggacaccgtcagcctggattggttgacgaggctttgacagaaatgagtggaagccagttgagtttctctagtgtcgtagatggagtgtttggacttcagaaagtgacatctgctcttatgtcaattgatggacatggnttanttcccaaaaatctctctgctgttaccggccatggaaaagctccaatgttgactagctatcattcaaattccttgtataatcgacagggtcccttacaatctaactcttaaaatatgttatcatctccccctgggaaaggttcaactatgaagaagatanccatctctaactctgaccaagagttatccctgatactgtctcaaccctcctcaactgggaatggatcccctgancaggcc

SEQ ID NO: 4851 - DNA, 458 bp, Arabidopsis thaliana
  unsure at all n locations
  Clone ID: LIB22-019-Q1-E1-F12
acccacgcntccgcaaagcaggaacgagtgaaactgaaaaccatggagatggagaaaaaccaacacatttcttcgctggacatccccgttattgatctaagtaatcccgatgaagagcttgtggcaagtgcggtggtcaaagcgagccaagagtggggaatatttcaggtggttaaccacggaatcccgaccgagctgatactgcggttgctacaagtgggaatggagtttttcgagctaccggagacagagaaggaagccgtagcgaagccagaagactccttggacatagaaggatacagaaccaagtaccagaaagatctagaaggtagaaacgcatgggtggatcatctctttcaccgcatctggccaccgtctagagtcaatcacaaattctggcctaagaatcctccagaatacattgaagtgaatgaagagtacgcaagtcacataaagaa

SEQ ID NO: 4852 - DNA, 469 bp, Arabidopsis thaliana
  unsure at all n locations
  Clone ID: LIB22-019-Q1-E1-F3
ggaaaaatttggttgtttgttgacggaagcttcttcggtctctcttctccgtcttacgattgtcaacgcgtggttccatcttcaattttgtttctattttagcagaagtttctcgagcttcaaatactgtttcagatcaatcaatcagtcaatcatggctagctctggaaacaagaacatcaacgccaaattggtattactaggagatgttggagctggaaaatcaagtcttgtgctacggtttgtgaaagatcagtttgttgaatttcaggaatcaaccattggtgcagcttttttctctcaaacattggctgtgaatgatgcgactgtgaagttttgagatatgggatacanntggtcaaggaacgataccacaagttgggctccaatngtactacaagggtgcaanctgctgcaataattggcctttgcaattactaatcaaanctcaatttgaaagggcgaagaa

SEQ ID NO: 4853 - DNA, 511 bp, Arabidopsis thaliana
  unsure at all n locations
  Clone ID: LIB22-019-Q1-E1-F5
taccggtccganattcccggggcgccccacgcgtccgttactctaattaaaatggctgttcccacgggaagcgccaatctctttctccggcctctcatcctcgccgttctctcctttcttcttctctcttcattcgtctcctctgttgagtggctcgatatcgattcctcagatctcaaagctcttcaggtcatcgaaacagagctcggagtcaacagtcaacgttcttcggccagtgatgtcaacccttgcggtcgccgaggagttttctgcgagagacggcactctgccaccaccggagaatacgttctccgtgtcacgaggctcgtctaccgatccaggagcttgacggggactatctctccggtcatcggaatgttgtcggagctcaagggaacttactttgtcctaaataaccagtttggtcaacgctgttcccggtgggatatccttaagcctgttaagcaaacnttgaaagtttcctggatncttcgggaaaataagnattttc

SEQ ID NO: 4854 - DNA, 454 bp, Arabidopsis thaliana
  unsure at all n locations
  Clone ID: LIB22-019-Q1-E1-F8
attgatggggacagatgttgtgaaaaatgtgaataaaaacaatgcgtctcatgctgtgctgtttgaagctctatccctggtcatgcatcttgatgctgagaaggaaatgatgtcacagtgtgttgctcttcttggcaagtttatttctgtccgtgagcccaacatcagatatctaggcttggaaaatatgacgcggatgctgatggtcacagatgttcaagatatcataaagaagcatcagtctcagataatcacctccttgaaagaccctgacatcagtattcgtaggcgtgctcttgatttattatatgggatgtgtgatgtgtcaaatgcaaaggatatagtcgaagagttgctgcagtatcttaacacagcagagttttccaatgcgggaaagaantatcacttaaagctgcaaccntgctgaaaaatttgccctgatcaacaatggaat

SEQ ID NO: 4855 - DNA, 473 bp, Arabidopsis thaliana
  unsure at all n locations
  Clone ID: LIB22-019-Q1-E1-G10
ggntctctgtgttttttttaactccgtttaaattttccgtctgaattttacaaaggaacactaatgtcagcttttgacggcgttgaaaatcaaatgaacggtccagattcatctcctcgtctctctcaagatcctcgtgagcctcgctcattattatcatcttcttgtttcccaatcaccctcaagttcgttgatgtgtgttaccgagtcaagatccatggcatgagtaacgattcttgtaatatcaagaaactattaggattaaaacaaaaaccgtccgatgagacaagatcgacggaggagaggacgatactaagcggagtcaccggaatgatatcacccggcgagtttatggccgtttcttgggaccaatccgggaaattggcaaatcctacgctaactaaaacgcagtccncaaggggagactcccaagggattaaaacctcaaccgggaaaaatacnttataaaccga

SEQ ID NO: 4856 - DNA, 430 bp, Arabidopsis thaliana
  unsure at all n locations
  Clone ID: LIB22-019-Q1-E1-G11
atcactgtttccaggatcttcagaatcagcgaaggaagaagataagaggacgacgaagtaattgaagttggagaatcgcacatttggctctcgatatttgctcaatgacttcttattcgaggtagccttcaatttaggatcggagttcgtaaataaggtgatttagcgaagatgatggtcgaagatcttggtgtggaagcgaaggaagcggctgtgcgagaagtggcgaagctcttacccttacctgaacttttgcagtctatttcttcaatcaaggccgattacatcgctcgtcaacaggcaaatgatgcacagctcagtactatggttgctgagcangttgaacaagctcaagctgggttagagtcactttcatcatctgagaaaaccatttatgaactgcgggataattcatttcatcgacaagctt

SEQ ID NO: 4857 - DNA, 483 bp, Arabidopsis thaliana
  unsure at all n locations
  Clone ID: LIB22-019-Q1-E1-G3
aaggacaatgaagagaangcagagatgaagaaaatgtatgatctcattgangaanacaagcnaancggtcagttcaggtggatctccnctcagatggaccgggtanggaacggtgagctgtaccggtacatctgtgacaccaagggtgcttttgtccaacctgcattatatgaagcctttgggttaactgttgtggaggctatgacttgtggtttaccgactttcgccacttgcaaaggtggtccanctgagatcattgtgcacggtaaatcgggtttccacattgacccttaccatggtgatcaggctgctgatactcttgctgatttccttcaccaagtgttaagggaagatncaactcactggggaatgaagatttcaaaaaggangggcttcaagaagattganggagaaattacacttgggcaaaatccaaatcaacaagaagggctccntggacaattgaacngggtgttgtaaagg

SEQ ID NO: 4858 - DNA, 512 bp, Arabidopsis thaliana
  unsure at all n locations
  Clone ID: LIB22-019-Q1-E1-G4
ctaccggtccacattcccggggcccccacgcgtccgtnactctacaaaaaaaacagtagagagagatatagagagcatcaatggcgtcgtcgtcaagactttgcgattcgtgcaaatcgacggcagcaactctattctgccgcgcagacgcggcgtttctctgcggcgactgcgacggtaagatccacacagctaacaaactcgcatcacgtcacgaacgagtttggctatgtgaagtatgcgaacaagcaccagcacacgtcacgtgcaaagctgacgccgctgcgttatgcgtcacgtgcgaccgtgatatccactcagctaatccactctctcgccgccacgagcgcgtacantcactcctttctacgaacgctgtangtccaagcaaaatccggcttcntcctccggtaattttcgttagaatgaagatgggcggntgacgttaactggcttcgttgnntttaanctnaaggaagggatccganatcnctaaatttgttctccgattt

SEQ ID NO: 4859 - DNA, 466 bp, Arabidopsis thaliana
  unsure at all n locations
  Clone ID: LIB22-019-Q1-E1-G6
gaaactttccggcgaaattccgatggaagttggagatttgaaagagttatcatctctgcatcttganaacaattcattaacaggatttatccctaaggaattgaagaattgtgtcaaacttgttgatctgaatctcgctaagaacttcttgaccggagaaatccctaacagtttatctcagattgcttctttaaactcgttggatttctcagggaataggctaacaggtgaaatcccggcgagtcttgtgaagttgaagctgagtttcattgacttgtctggaaatcaactttcaggaagaataccaccggatcttttagcggtgggaggatcaaccgcgttctcacgtaacgagaanctctgtgttgataaagaagaacgctaaaacaaatcaagaacttgggggttgagtanttgcaattggctaacaaaacgntgaanaaggataantcactccaatggaaca

SEQ ID NO: 4860 - DNA, 471 bp, Arabidopsis thaliana
  unsure at all n locations
  Clone ID: LIB22-019-Q1-E1-H1
aaacgttaaatgatcttctcctccgatcattagtctctttaatctttctcagcctcttcttgttcgtgatctctcttcctccggaaaaagatgtcggccggtaacggaaatgntactaacggtgacggagggtttagtttccctaaaggaccggtgatgccgaagataacgaccggagcagcaaagagaggtagcggagtctgccacgacgatagtggtccgacggtgaatgccacaaccatcgatgagcttcattcgttacagaagaaacgttctgctcctaccacaccgatcaaccaaaacgccgccgctgcttttgccgccgtctcccgaaggaggaacgtcagaaagattcagcttcaaatctaatcagtgcatccgttaagcatccgtttaacnaagaagaattcaagggaccaaaanggtggttgaagaanggagatttccgggcgggagaaangaaagaaccga

SEQ ID NO: 4861 - DNA, 446 bp, Arabidopsis thaliana
  unsure at all n locations
  Clone ID: LIB22-019-Q1-E1-H10
cttctctctctctttctggtatctgcgtttgattcggagaagaaaaaaaaaaaaaaggcaaagagagagcttcaatggagttagcttctttccttggtagagctctgtttgtttccgtatttcttctctccgcatggcaagagttcaatgattttggtgaagatggtggccgatcagctaaatctttgaaaccaaaattcaatgcctttgtaaaccatgtgacaactcacactgggccagcaattgccaacagtcgatatgaagattcctgttgctgctgctatanccttgaagggtattgggggacnaattggttgnccttggcaactcaatgggaacctaacccctgcctcctgcaacaaacccttgccaacccaattcngtaagaattccacaactacgaagttgcaaaaaagggantcggcaactaatttcaaaanttacac

SEQ ID NO: 4862 - DNA, 436 bp, Arabidopsis thaliana
  unsure at all n locations
  Clone ID: LIB22-019-Q1-E1-H11
aaaatcctggcgttgatagcgattggttaattgtccgtgaatcaacgnnnnnnnnnnnnnnnnnnnnnnnnnnnnnnnnnnnnnnnnnnnnnnnnnnnnnnnnnnnnnnnnnnnnnnnnnnnnnnnnnnnnnnnnnnnnnnnnnnnnnnnnnnnnnnagagttttgtcagatctcgccgggaaattagcaatggcgttttagtctgtttacctgtgaagcttttgcgtaaacgctggattcttctcaaatctctctcacctgatctcttattagattccgaggatggcgctaaagcgagggctatctggagttaaccggattagaggaagtggtggtggatctcgatctgtgcttgtgcttctcatatttttctgtgtttttgcacctctttgcttcnttgttggccgaagaatgtatatcgaatcctcaaatgan

SEQ ID NO: 4863 - DNA, 491 bp, Arabidopsis thaliana
  unsure at all n locations
  Clone ID: LIB22-019-Q1-E1-E9
actgttaccctgcccgtancaagtccnaanttcccgggnccacccacgcgtccgcagacgcgtggggcagcttttagtatttttttcaacaatcgcttttttttttttctcgatctccgtgaagctctcgaatctctggttttgagttttggagaatggtgtttttccgcagcgtatcggcctttactaggctgaggtctcgcgtcggccaacaatcttcactcagcaattctgtcagatggattcagatgcagagctctaccgacctggacctgaagtcgcagctgcaagagttaattccggaacagcaggaccgtctgaagaaactgaagtcagaacatgggaaggtccaactgggaaacatcactgttgatatggttattggtggaatgagaaggatgactggattgctttgggaaacctcaatgcttgacccggaaaaggtatccccttaaggggaatgtccaattcctgaattgcaaaaaagttnt

SEQ ID NO: 4864 - DNA, 476 bp, Arabidopsis thaliana
  unsure at all n locations
  Clone ID: LIB22-019-Q1-E1-D5
gctntttaggattgaccgtgtatttgggtttacgagtagatgttttcaatcgaaaccggaatcttttagtatcctgagctttaggggaagtgagaagagtgccatggatggatatnngaagcagaagatggtaaatttagtgtggagacccatctccactcaaacctcttcagttattgctgaagctggaaatgaagtccaagaagtagctcagtgtagcaaatcaagtgatgtttctaaggaagttattgaaggagagacagcttcagttgtttcagctggaaagcattcagtttctcttgaggttggggcttctttgattaagttcattagagggaaagaagggancgacgcagatgaaactttgaanaaggaaatggggagtgaaagntcaatccntccatcaancaaaggaacaaagatnatatcanccaattganagncggttcantnggnattgtggtganccaaaagcc

SEQ ID NO: 4865 - DNA, 504 bp, Arabidopsis thaliana
  unsure at all n locations
  Clone ID: LIB22-019-Q1-E1-D6
tgncctacggtccatattcccgggtcncccacgcgtccggnancagcagctagaacaaaaacgtcaccgatggcgtctcaagctgcgaatctctgggttcttctaggtttaggtctcgctgggattcttatgcttaccaaaaagctgaagaagaccgtccgtgaagatttcggcgcttttatcgataaactcatgcttcttccccctccgcaacctgctcctcccaaagctcctcatcctctcaccggtctaacctttgccgtttccgacgtattcgatattacagggtatgtgactggatttggtcatccagactgggtcaggacccatgaagctgcttcgtcaacatctcctgtggtttcaactctcgttgaangtggagccactttgtgttgggaaaactgtagtttgatgaatttgcgtttaataattagtggagaaaacaagcatacgaatcacctncaaatcctgnaactcctantcgtaatcctggtgggcgcttgc

SEQ ID NO: 4866 - DNA, 477 bp, Arabidopsis thaliana
  unsure at all n locations
  Clone ID: LIB22-019-Q1-E1-D7
gccaacgcgtccgcggacgcgtgggggaagagttgtgttcaataccaaaggccttctctacccagacagcgtggttggaactgattcacatacaactatgattgatggtttgggagttgctggatggggtgttgggggtattgaagctgaggcaacaatgcttggccagcccatgagtatggtattgcctggtgttgttggattcaaacttgccggaaaaatgcgtaatggtgtaacagctactgatttggttctaacagtgactcaaatgctgaggaagcatggcgttgttggaaagtttgttgagttttatggtaatggcatgagtgggctgtccctagctgacaagggcgacaattgccaatatgtctccccgagttatgggtgcaaccatgggccttcctccctggtggatnaatgttaactcctacaataacctcaaanttgactgggaanaaaccaatgaagacanttggc

SEQ ID NO: 4867 - DNA, 491 bp, Arabidopsis thaliana
  unsure at all n locations
  Clone ID: LIB22-019-Q1-E1-D9
actgttgcccctgccngtanaagtcctaanttcccgggnccacccacgcgtccgaaaatacacacttcttctcttaacaacacaacacaactttgaatttttcaccctcactttcatttatctcaaatctccttccagaaaagcgagggaatagtgttgttgagaggtttgtgatttccttttgaaaaaatgatggcttgtggcttaagcaagagccttggcttgtcttcctccttgaagaagcaacaaggcatagtgagtatccttggtggcatttcgtcgaacacttcatctgcaccttcacttaggcgaactttctccgccgatttgtcctccaagacttgggtttcccaaaatgggttttctcctatgaagagaatctcttcctctgagaagcttcgtcctgacgaagaagaagcagaggaagaatcaagatccggagtcgatatctgggcacaagattcaacaagacaagaacgataagaagaaag

SEQ ID NO: 4868 - DNA, 505 bp, Arabidopsis thaliana
  unsure at all n locations
  Clone ID: LIB22-019-Q1-E1-E1
taccggtccgatnattcccggggcgccccacgcgtccgtaantctccgttttcgttttgtctttctttatcgtctcggtttcgtcgtctgangtcaacgacggngatgatctcgtgatccgtcaggtggttggtggagccnagcctcaggttttgaccncagaggatcacttttctctcttcaagcggaagttcgggaaggtctacgcntccaacgaggagcatgactanagattctcggttttcaaagcgaatctcangcgagcgaggcgtcaccagaagttggatccgtcggcaactcatggtgttacgcagttctcagatctgactcggtctgagttccgtaagaagcacttggggggttagaagtgggtttaancttcctaaagatgcaatnaacggntcccgatttcccctaancgnnaaatctccctgaaggatttngattgngggaaatnatgnnccgttactcccgtcanaaatcagggatcttgcggncctgccgg

SEQ ID NO: 4869 - DNA, 424 bp, Arabidopsis thaliana
  Clone ID: LIB22-019-Q1-E1-E10
gtgagcactaacttctcactcattcttcttcttcagctgaatccaaatacccatttccatttttaaccgtggttggattgttttgagagttgaaggaagaagatgacgtctgacggagcaacgtcgacgtcagctgcagctgcagcagcagcgatggcgacgaggaggaaaccgtcgtggagagagagggagaacaatcggagaagagagcggcggagaagagctgttgcggcgaagatttatactggtcttagagctcaaggtaactacaatcttccaaaacattgtgacaacaatgaggttcttaaggctctttgttctgaagctggttgggttgttgaagaagacggaactacttatcgcaagggacacaagcctctacctggtgacatggctggatcatcttctcgagcaactccttact

SEQ ID NO: 4870 - DNA, 437 bp, Arabidopsis thaliana
  Clone ID: LIB22-019-Q1-E1-E11
aggactatgttggagttgctcaatcaacttgacggattcagtagcgatgaacgtattaaggtgattgcagctactaaccgtgcagatattctggacccagcactcatgcgttctggtcgattagacagaaagattgagttcccacacccaaccgaagaagcgagagcaagaatcttgcagattcactcaaggaagatgaatgtccacccagacgtcaactttgaggagcttgcacgatcaacagatgatttcaatggagctcagctgaaagcagtgtgtgtagaggcaggcatgttagctcttcgccgtgatgccacagaggtgaaccatgaagacttcaatgaaggtatcatccaagtccaggccaagaagaaagcaagcttgaactactacgcctgatctctctctctcatcatttatttttatcaatgccgttt

SEQ ID NO: 4871 - DNA, 445 bp, Arabidopsis thaliana
  unsure at all n locations
  Clone ID: LIB22-019-Q1-E1-E12
taattcaaattttctccattctctcgttccaattattatttacttttttcacccaataaaaaaaaaaccatgcattcacttccggtgaatctcgtcctcaccgtacttacggtgttcctaacatcaccggcgcaagttatcggataccgtccatatccaccaaaaaccaacggctccgatcaaatcttcgacgcttcaaaaaaattcgaaggctcatcgaatctcgtccgcctccgttaccacatgggtccagtcttaaccaacaacatcaccgttcacccaatctggtacggcacgtggcaaaaatcccagaagaaaatcatccgttggttaatgcttggtacgcaggacccgacccggtaactccggttgagataaccggatctttgtgaaggtanttatggaacaaggaggtggtggttcgtacacaaggacaaatgtttga

SEQ ID NO: 4872 - DNA, 517 bp, Arabidopsis thaliana
  unsure at all n locations
  Clone ID: LIB22-019-Q1-E1-E3
acgtcncccggtctaccggtccganattcccggggcncccacgcgtccgctaagagagctttgnnnnnnnnnnnnnnnnnnnnnnnnnnnnnnnnnnnnnnnnnnnnnnnnnnnnnnnnnnnnnnnnnnnnnnnnntggtacttagatgcggttcttgtgccaagtgctttacttatgatgtttggttaccacatctatttgtggtataaggttcgaaccgatcctttctgcaccattgttggtacaaattcccgcgcccgtcgatcttgggtagcagccatcatgaaggacaacgagaagaagaacatcttagcggtacaaacactacgaaacacgataatgggagggacgttaatggcaaccacttgcatcctcctctgcgcangtctcgctgcccgttttaaagcagtacttatagcatcaagaaanctttaaacgacgccgtatatgggagctcaatggtgacntcactgttgcactcaaaatacgtaaccatcctcanaatcctcctctccg

SEQ ID NO: 4873 - DNA, 558 bp, Arabidopsis thaliana
  unsure at all n locations
  Clone ID: LIB22-019-Q1-E1-E4
cctggacgtaccggtccatattcccgggnccccccacgcgtccggaaagatggagaagaatctggcaataacgaggatgagcaanaaaaatagtgacatctgtataaacctctctggtgcatatatgaaagtgggatcaagatggtgttcttgatgcaggaatcangtggggctcnaacttgatgcacatatccatacctgagaaggcttacacttctccaattttggtgttcttgttccgtaatgatttaaggcgctaccacactgtaacgtatgtctccctcgactacaacagcttgtagtgaagattaangcaaaaaaaattcttggaagattggttcatcattntgctctcaaaaaagcctgcaaaaatttctccttaaaaggntaatccaaaatgaattgaccttgggattcttaattggattgaaagaattctccggccaaaccgggnnggattgaccttttgaaggaaaancctcaaaagttcctggccggcccaaacnggtttgntaanaaccccccnaaaaaaaaggcctttgcaaaanaaactggttc

SEQ ID NO: 4874 - DNA, 490 bp, Arabidopsis thaliana
  unsure at all n locations
  Clone ID: LIB22-019-Q1-E1-E5
gnactaccggtccacattcccggggcccccacgcgtccgcnancttcctcatatatttccaaaacaatacctttcttcttctctcttcagaagaaacgagagattcgagtgatgttttatgaactactactagtgtttttttccgtgaagtaangagaaacggtaactttttctatttgttttcaagaaaagccaaagaaaaaaagaatttttaatatactctgttttttgcaatgattttgttttgtgaaatttttctcggagaagaaagtaatttagaagacggagagtggcaaaacgaaatataaaaaaaaaagttttcaatttcttttaagaaaaaaanagctttttcccttcttaaaacccttcctctgttcagaaacagagacataagaagaaagatagatnacaagcctaattgcgttcctcntctcntcctcctcctactggggtttaaaatcanagaaaccatgtccggcgaattgttcna

SEQ ID NO: 4875 - DNA, 486 bp, Arabidopsis thaliana
  unsure at all n locations
  Clone ID: LIB22-019-Q1-E1-E8
gaaacttttgacaatgggccacagacacagcaagnnnnnnnnnnnnnnnnnnnnnnnnnnnnnnnnnnnnnnnnnnnnnnnnnnnnnnnnnnnnnatgttaaacctgccggagaacgccgcggatcatccggttccggaaccgtcggatcgtcaggctccggaacaggcggatctcgttccaccacatctactcagcagaatggtcggatcttaggtcggccgatggaggaagtacggagaacctatgagtttggtcgtgagcttggtcgtggccagtttggtgtcacgtacctcgtaactcacaaagagacgaaacaacaggtcgcttgcaagtcaatccctacgcgccgcctttgttcacaaaagacgaacattgaaagatgttccgccgttaaattcaagaattatgcaaccaatctcaanccggtcaaccgggaacataagtgggacttgaaagggaagcctaacgaagggacaagacaact

SEQ ID NO: 4876 - DNA, 508 bp, Arabidopsis thaliana
  unsure at all n locations
  Clone ID: LIB22-019-Q1-E1-D4
tggnctaccggtccatattcccgggncccccacgcgtccgggatgcccgggcattgagaaggaaggacgctttcagaggcgaaaggccatggggagataccgtctgtgatccatggatctccgatcgggaaaccgtatccaagctccgtggctagtctgcgctctttggactttgaaaacttagcgaactgaaacatctangtagctaanggaagggaaatcaaccgagaccccgttagtancggcgagcgagagcggatttgggattttaagaaaaagaaagacgaagcttcgttccaaagtgttcacttctttttcgccaggtttcattcgatttattgtggattggattgatggnaaaccancaagnccctcttctttcagtcgagttactcgtanccttgactgaangatcctaaanggcgctgtgaactgtaantgtaaaaaggttggaagattttggcnaaagaangggaatanccctgttagattccgttcctatggttcc

SEQ ID NO: 4877 - DNA, 502 bp, Arabidopsis thaliana
  unsure at all n locations
  Clone ID: LIB22-019-Q1-E1-B3
tgnactacggtccacattcccggggcccccacgcgtccgtaatagtcgacaatttgggatttgtttatggtttacttcacatgaatcacatacgttcatgtcgattcctttgagatactgtctcgatttcgtttttttctcttgtttaatttaaaattattgtaaagcacgtggatttgcttgtcttggttttgttttctccttcgacctctttgatgaaatcgaggaacctacaatttcttcgtcgatccaaatggtagcttagtggtggtgataataggtttctcctcttgattggctccagctttaggttttttttttatctttgtttctgcttcgattcccaaaatttacctttcgattttgagtctaactaagtcnaagttgactcaagtagagtccgaaagcctcctggggttacgaaagagacatcctcctaaattgaaacaaaaaccttccctttcaattgggctganaaaaaagcaagaatctttgaataatt

SEQ ID NO: 4878 - DNA, 511 bp, Arabidopsis thaliana
  unsure at all n locations
  Clone ID: LIB22-019-Q1-E1-B5
gtccanattcccggggcgccccacgcgtccgcaaactcttgggttcttctctgattgaaaatgagcttatcatcgccaaccagacagtgcttgtagctcgtccagatgttactcctcgggattatcgtttccgattggatttggatcgaatcccatcaatgtggattggtttgttacccaaaaagatacagtattgctgctcggaagttcgtagtggcttgctcctcctcctcttccgatccacttttggttaaggctgcaaaagggcaagccataagtcgtcctccagcttggatgatgaggcaagcaggaaggtatatggctgtttaccaaaagctcgccaagaaacatccgtccttcagangagagatcagagaaacactgatctaatagtggaaaatcctcctttgcaanccttgggaaagcaattcaagaccagaacgggtggtcaatcaattttnccctgaanatcctcaacccntttaacctggaatttcnggtggtccctttt

SEQ ID NO: 4879 - DNA, 528 bp, Arabidopsis thaliana
  unsure at all n locations
  Clone ID: LIB22-019-Q1-E1-B6
tctncctggtcgtacggtccatattcccggggggccccacgcgtccggaacatcaatggcttctacttcttctctagcgctctcacaagctctccttacacganccatctctcacaatggctctgaaaactgcgtctctataccagctttctctgctctcaantccacttctccacgcaccagtggcaccatctcttcccgtcgacgaaacgcctccacgatcagtcactctctccgccctctggttcgtgnagccnccgtataggcaatcgngacaagttctgattcgtccctggttgataagtcggtgaacacgatcaggtttctggcantagatgcggttgagaaggcgaaatcaggtcatccaaggtcttcctaatggggctgtgctcccgatgtctcacantttgtacgatgaagtcatganagtataaccccaangaatccctttaagggttttaaccgtgattggtttcggttctcctctggctggggacatgggattgcaatgttgcaataagcttcggc

SEQ ID NO: 4880 - DNA, 449 bp, Arabidopsis thaliana
  unsure at all n locations
  Clone ID: LIB22-019-Q1-E1-B7
ccacggaaatcttgtcgcaactgctgcaggagttatgaaggtggttccaaagttggataaaaatgatacatatattgcgtacttacctttggctcatgtgtttgagctggaagctgagattgtggtctttacctcaggtagtgccatcggttacggctcagcaatgactttaactgacacttcaaataaagttaagaaaggaaccaaaggagatgtttcagctctgaagccaactataatgactgcagttccagctattctggatcgtgtccgagaaggagttcttaaaaaggttgaggaaaagggagggatggcgaagacctttttgactttgcatacaagcgccggttaacanctgtggatggnaattgggttggtgcctggggtttggagaaaatgtatgggatgctcttgtctcaagaaatacccctgtgcttggaggaacatcc

SEQ ID NO: 4881 - DNA, 469 bp, Arabidopsis thaliana
  unsure at all n locations
  Clone ID: LIB22-019-Q1-E1-B8
actctatattaattactttacaaatttttgatccagttttctcaattttttctagactcgtatcgatatggcgaatcatgaaacgatatttgatcagctaaagaagcagattccagtagatgaggaagaacctctgattttgaatcgagactcaagcgttggtctcgtcatcgttgacgttgttaatggcttctgcacaattggctccggcaatatggctccaacaaagcataatgaacagatatcgaagatggtggaggaaagtgcaaagcttgctagagagttctgtgatcggaaatggcggttttggcgtttattgactctcatcatccagatattccggagagaccttaaccccctcattgtattataaggaactgaaagaatcaagaacttggtccctggctccngaaaatgggcttgaaaanttaanggattggtgccaacnccttaagaacnaaaagggatt

SEQ ID NO: 4882 - DNA, 441 bp, Arabidopsis thaliana
  unsure at all n locations
  Clone ID: LIB22-019-Q1-E1-C10
agaaccaatcccaaagctcatttattctttccttttcaattattctttcaatttttccgatcgacggaggttgatcggcgacggcgtaatggccggaggaatcgtctcaccggcctctctactcgacctaatcgctgatatcgtcgagattccactcaacaccggaatgttcaagaaggattgcgcagatctcactcgacgagtttgtctcttaacgcatttgttagaggagattagagactcaactcctatcgattccgccgcttcgtcgtcgtcggagaatgattggtggtctgatctcgtggtcggacttcaagccgcgaagcgtcttctctccacagctcgattccaagctcgcgattcctctgatggtgctgcgaagagaatctcatttcagttccaatggtgttacatggaagcttgagaaaagcantgagcaat

SEQ ID NO: 4883 - DNA, 477 bp, Arabidopsis thaliana
  Clone ID: LIB22-019-Q1-E1-C3
ggaatcctccactgcttctggtagtcttccttcgtatgactctccttctgtgagcattacatctggccggagcccgttttctcctcagggctctcagtcttgcatctcggatctccatcattcccctgacaacgtctatggatcacctttgagtggggtgtcatctcttgcctatgatgaagctggagtcaagagtaagattcgggaacttgaggtctcgctgctgagtggtgatacaaaagttgaagaattctcaggttttagccccgctgctgggaagtcgtggaactgggatgaacttttggctttgactccacagttggacttgaaagaagtgctggtgggaggctgctccggcaattcgctgatggggaattcgctaacaagcgtatgggattcccttgaatgtccttggaacaagatgggtgttaagtctcaaggcaattccgatcaaacgggtaagggaacttaaaatgg

SEQ ID NO: 4884 - DNA, 457 bp, Arabidopsis thaliana
  unsure at all n locations
  Clone ID: LIB22-019-Q1-E1-C4
gcaanatttgaaaaatgctgtatctcggattcatgattttgttttgttgctaagaaatgaggtaaaggcaggtcaggacacctctattgagggaaatgattttgttgagctgattgagggcttctccgtcacgttcaaccatgttttaagcggtgataaaagtttggacgattttgtttcgaatcttgctaatgtcttcaacgaggcgatggagcgaaaggtaagttttaggggtctagcttcctctgaggttgaaactctgagtccagattgcatagacaaggttgcattacccgagagcaaggttgtagataaagattcatctcaggaaatatatcaaaatgggatgttgtccaacaaacgaaccaaaggggttcaatgttgatgaaaacaagantttcaaggggtaatgaatccagattcccaaatttacagggaaaattanaagaaccggaga

SEQ ID NO: 4885 - DNA, 463 bp, Arabidopsis thaliana
  unsure at all n locations
  Clone ID: LIB22-019-Q1-E1-C6
gganctgtgacctctcttcttctattgtgagaaagagatcaacaaatggagacaaagagcgaggagaagctaagtgtcatcgaactactaaaacgagctcttaagctactctttggtaacatcaatctcgctctcttcctctttctttgctctctcccactgttttgtttcttgatcttcttcgagctctccctccaaaccactgtctcactcgcttccacatacatctccaaactagtcaattctgaggaggacttgtcggagaatgatcttcttccttggctgattcagacaactctgctctacttctttccctatactattcttgacctccttaccaccaccaagatngttgcagcatcatccgattgctacacatctgaaggaanagccgtttagggttgcttatttggtaaggggagattcttcaagnctaagtcagaacaaaagtanggaggttgtt

SEQ ID NO: 4886 - DNA, 501 bp, Arabidopsis thaliana
  unsure at all n locations
  Clone ID: LIB22-019-Q1-E1-C8
tgntctacggtccatattcccggggcccccacgcgtccgcnancnctaacgttaccatctccgtctttggtgtcggtgaggagcactaaactcggacgaagtgttagtaatggtggccggaattggtcgggacttactaagttgtcggagaaatcgaagactaaacgaggtaatggtctctgctgcaaggcggagctgtcggagctagctccagtcgtctctgctacttatggtgtacttcttctaggaggcggtctcttcgcttatagcaaatctggaagcaaaggttctctctttgggggtttgaccggttctgttcttatggcatctgcctacttccttactaaatcaccagagacaagagttctcgggcgataccataggtcttggtgctgcttccccctctcttctgtctcggattcgtttggcatcctctccggaaacaagttcaactggtccaatactaactccctttcaatccggnatgtttgtccttccttg

SEQ ID NO: 4887 - DNA, 491 bp, Arabidopsis thaliana
  unsure at all n locations
  Clone ID: LIB22-019-Q1-E1-C9
actgttacccctgccggtacaagtccnaaattcccgggnccacccacgcgtccggaaaatatgtgaacgcttttggggccaatcgttatcctttcagtgaggaccttggaagacaagctcagatgataaccgaggtttctggtcgattatccgagcttaaaaccacgatagatgctgggttaggtcagcgtaacattcttttgcagaccattggagataagtttgaactatggaacctcaaggtacgcaaagagaaagctatctatcatacattgaacatgcttagtcttgatgtgacgaagaagtgcctcgtggccgagggctggagtcctgtctttgcatcaagagaaattcaagatgcattacagcgtgccgccgttgactccaattctcaagttggatnaattttccaagtcctaagaaccaaagagtcgccaccaacttattttcccacaaacaaatttacttctgcaatccaagaaattgttgat

SEQ ID NO: 4888 - DNA, 489 bp, Arabidopsis thaliana
  unsure at all n locations
  Clone ID: LIB22-019-Q1-E1-D11
actgttacccctgccgtanaagtccnaanttcccgggnccacccacgcgtccggatgagagtaattcactacacacacacaaaaaataaattgagtgcctcccccaaaaacaaaattggtagataacgagcaattgttttttttcagatttgatcctgaatttttacatttttttttttgcaatctccccctaatctgttgtttctcgcttcttcttctgttaatcatctgtctttcaaaaagaaagaaaaaagaaaaattcgatttctgggtttgtttttgtcatacagaaaaaaatcaagcttatgaatttgtgtttaattttttgttttaatttgaaaggcaggttttttcagaacgagatcgttttttcaaatttcttctgattttacctctttttttcttcttagattttagtgaatcgagggtgaaatttttgattccctcttttcggatctacacagaggttgcttaattcaaaccttttag

SEQ ID NO: 4889 - DNA, 470 bp, Arabidopsis thaliana
  unsure at all n locations
  Clone ID: LIB22-019-Q1-E1-D3
gccaacgcgtccgccctgttccatcaagatgctcatttatgggctccggtcgtanatactacttctcgtgacatggcagttgctgcaagggaaagctcaagaaagcttcaggccttatcttcagaagataggaaacaaattctacacgacattgccaatgcccttgaagtaaatgagaaaacaattaaagctgagaatgatttagatgttgctgcagcacaagaagctggatatgaanagtctttggtagctcgcttagttatgaagcctgggaagatctcaagccttgcagcttccgttcgccagctagccgaaatggaagatccaataggccgtgtattaaagaaaactcaggttgcagatgatcttaattttagagaagactcatcaacaatangtgttcctcctgattgtttttgaatccccgggccttgatgcacttgttcaagataacttcgcttgcaatccng

SEQ ID NO: 4890 - DNA, 427 bp, Arabidopsis thaliana
  unsure at all n locations
  Clone ID: LIB22-019-Q1-E1-B10
cgcaaaaaaaatctccaccgctctnnnnnnnnnnnnnnnnnnnnnnnnnnnnnnnnnnnnnnnnnacgcaccaactgttgcggctcaaagagatctcgatcgggatccacaagacggagatagatagagagagagtgagagctaacggaaatgggatctcagctacttgagtgttgcttccgtttcgtcttctactgtcactcccacagctccaactgttttccttgattgtttttcttttatctcggcgttttactcggaagcttacaacacactctctcagggatttgaaatcctcacgtttcagcacattctttgtggttcccatctattctctagccagttcggagtttgcctgaagaaatcaaatgggttcgagatacgcatctcaccaactcaacaatgggctttttgtgtctggccggnc

SEQ ID NO: 4891 - DNA, 533 bp, Arabidopsis thaliana
  unsure at all n locations
  Clone ID: LIB22-018-Q1-E1-A7
gaaatttttgccgcncctgtaccggaaaanagaattcnggggtcgacccacgcgtncncccacgcgtccgtttccttcctaatttccaacctctgttcttagcaatatattttttctccaaaaataattctcagtttgattttcttcttctagctcttaagtatatttctttgttgttatttatcttttaatcctttaatctcatctttgtttatctttaatcaaaacccaaaatttacatgggttcttnnnnnnnnnnnnnnnnnnnnnnnnnnnnnnnnnnnnnnnnnnnnnnnnnnngctaatggtcttaaatatggagtctaccggagaagctgttagatcaaccaccgggtaacgacggtggtantacggtggtaaattcgaagcgccgtcaaaattccaagtnnctcaaaagattangaaagctcaaaaccaatctcccaacttcggtcaatcctcctccaacaaaagccaacgtctcaacaananaaggtcctccggccgctggaaaatttcgacgggggacaact

SEQ ID NO: 4892 - DNA, 490 bp, Arabidopsis thaliana
  unsure at all n locations
  Clone ID: LIB22-018-Q1-E1-A8
ggtaccggtaagaaattcccgggncgacccacgcgtccaatttcgtagtccccagtttcagcattcaaatgcccctccaagtgaaaacttatttccaggcaggcaacatcagagaactacatcttctgggagtgtcagatcagttgacagtaatttcatgtctatcaagtcatatacttcgggtggtttaggggaagccgtatctgaaagtcgtcaaaatacaggaagccagcaaggtaaaacatctaatcatgttcctttagtagcagagtcgacaaaggctcctatagatttgtttcagttgccaggagcgccagtggctcaatctgtcgatacatttcaaccttcaatagaaccccgattctccacctgtgatcttcaacaagctccacaagacattactcaatttaccccggnaaattcntttgctggaaatttgggtcaacaacccacttcaagaccatcagaanttgtctgcgcctaagaacna

SEQ ID NO: 4893 - DNA, 436 bp, Arabidopsis thaliana
  unsure at all n locations
  Clone ID: LIB22-018-Q1-E1-B1
aacaacaggancttcggacttagaaactttaggtacatcgaggagatcaaggaagctctcgagagggagtgtcctggtgttgtctcatgttctgacattctcgtcttgtccgcaagagaaggcatcgaagcagtaggaggaccttatattcctttgaagacaggaaggagagatggacttaaaagcaggacggatatgctcgagtcatatcttcccgaccacaacgagagtatctccgtcgttcttgaaaagttcaaatccatcggtatcgacactcccggcctcgtcgccctcctaagggtcacacancgttggaaaaactcactgtgtcaaactggtccatccgtttgtacctgaagtggacccgtccntaaancccggacaagtcctcacatgctanacaatttcctgaatccattctganccaaagggggtc

SEQ ID NO: 4894 - DNA, 424 bp, Arabidopsis thaliana
  unsure at all n locations
  Clone ID: LIB22-018-Q1-E1-B2
acggnggagaaatgggtctancacgcctctcatcacgatctaacatcatcactccgtcccttctcgcgccgccttcagccgattaatctcaacggacacaactccgatcacaatcgagacttcgcttcctttcacagctcacttatgtgatccancgtcacgctccgtcgaatcatcgagtcaagagcttctcgatttcttcanaaccatggcgttgatgcganntanggaaatcgcagccgattcgcattacatngcgaagctaatccgacggttttgtcatctctacaacgncaagaacctgtagctataggcatggaagctgcgaatacnacgaaaggacncgantantactggntaaccgtgattnactgtatttcctaaggtcgtngtggttcgcttcatgaggtttcccaaaacttaa

SEQ ID NO: 4895 - DNA, 503 bp, Arabidopsis thaliana
  unsure at all n locations
  Clone ID: LIB22-018-Q1-E1-B4
tacggtcacnaatcccgggnccnaccaagcctncnaatctttatggaagaagacgggtctgattggggcggattggctccagagatactcatcaacatcatttcaaggcttacgattcaggagctatggaccggtccgatgttcgtccaaaaatcgtggctaactgtttgcagagatccgtatctctggtctatcttcgatctggagccatggttcgattcctatcccgagtcgactcacttgtggtcccctgagttcgagcagaaggtagacttaatgctacgatcagtcgttgattggagcgaaggtggtctcactaagattcgcgtccgccattgcagcgaccacgctctctcttacgcagccgatagatgcccgaatctacaagttccttgccattagaagcaatcctaacgtgacaagacgcatcgatgacnaagatancgtttccgtgcaaggagtttaaaggaacttgatatcaanttactggtcacaagataccn

SEQ ID NO: 4896 - DNA, 460 bp, Arabidopsis thaliana
  unsure at all n locations
  Clone ID: LIB22-018-Q1-E1-B7
cgctagaacaataactttgatcgttcttcttcttctcnnnnnnnnnnnnnnnnnnnnnnnnnnnnnnnnnnnnnnnnnnnnnnnnnnnnnnnnnnnnnnnnnnnnnnnnnnnnnnnnnnnnnnnnnnnnnnnnnnnnnnnnnnnnnnnnnnnccatcacaaaggtgattcgtcgncttcatcatcatcagatgacgacaacgagaanaagtcttcgtcatcgtctccaaagtctttgaaatcgaangtttatcgtttgttcggaagagagagacctgttcataaggttctcggcggcggaaaancggcagatatanttacgtnggaagacaaagaaaatgtcaggangtgtaatttggccgtgctacaattgcaagggttgcaatttgaaattgattggagtaacancctcctaatccgttangtccacgttaagattcgttgctcctgcngtgttgttc

SEQ ID NO: 4897 - DNA, 429 bp, Arabidopsis thaliana
  unsure at all n locations
  Clone ID: LIB22-018-Q1-E1-C11
ncgactctctctctctctcacaaatttttgatctatttcactctccttgtcgtggctttgttttgaccggaacattattccggcagctacccaagacctcactcctcgactatttagtttcctcgctgtcactatctcaacgccggaggaaaaacttaaacaaagagtgataggtcgaagtgacaccggtgttgtaatcggtaaacccagaagaagccctaagagtaccgtcgatttttgtgctcntatcttcttctgctcaatctatttcgcgcacattgtacagtggaaagtaacagtagctttgcatgagcctgattttcagataaacaaagatgagtcacgatagaagtgttaacgtttcgcatgatgctgtgattgctaaacccgancgtggcactatgcttcagagcttctcacctaggagcc

SEQ ID NO: 4898 - DNA, 473 bp, Arabidopsis thaliana
  unsure at all n locations
  Clone ID: LIB22-018-Q1-E1-C2
ctttgctacattatcctcttcatcatgcatacagacaagaagaacaagatgaagatgcttggtttgctttttgtggtgtttgctgtggttggagtgattgtagctggaagtttgcagatacctgaccagctcacacggtggtactttgtcgggttcttgagctgcggttctcttgtttcaatgtttgcctcgccgttgtttgttattaacctagtgattcggactaagagcgttgagtttatgccgttttatctctcgctatcgactttcttgatgagtgcttccttccttctttacggggttattcaacagcgaatgcctttgtttaaacaccaaatggnataaggaacgaatccntgggaattgtgcanctgggctttgtaactgttactaacacaaggaattcnaatagaaagaagaaacaaaaagagcctttgaatgggttcctaacntgtgaaggttccccccaaaaa

SEQ ID NO: 4899 - DNA, 551 bp, Arabidopsis thaliana
  unsure at all n locations
  Clone ID: LIB22-018-Q1-E1-C3
cctcgcgnacctaccggtcaccaaatcccgggncncccacgcgtcnanatgtatgggcttcataaccaacagtatcagcaatggaacttcgccgtcgtctgattgttgtaactcgctgaggtctttgaccaccggaggaatgggatgtctttgtcnaattgtcactggaactgttcctttcaatattcctattaancgcacaaccgctgtctcacttccccgtgcttgtaacatgcctagagtcnctcttcaatgccaagccaatattgctccagctgctgctcctggacctgctgctacatttggaccatcgatgtctccaaggaccaagagacggnttcaattgttccaagagccaaatccggnaactcaaacaccaacagtctgatacaaccccgaccaattacaacaacccgttcnaacnggtgggagctcccaacattcanaacnaacgggngggaancaacaanttcgaacctttctgaanactcccttcaatcccggcctaacgcaaatcctcaaacaatcctccnttcccctttccttcaagc

SEQ ID NO: 4900 - DNA, 562 bp, Arabidopsis thaliana
  unsure at all n locations
  Clone ID: LIB22-018-Q1-E1-C5
cngtaccggacacaaattccngggtcgacccacgcgtncnggagattagaagagtagaaaaaacgacaagaagaaagaaacacagttgcaggagagaaagagatatggctgtccggataaacgcgatggcggtgacgtttgtggcgcacgcgctggcggtaatagcggcgattatggtactggtttggagtatcagttacagaggtggattggcctgngaagctactaacaagaatctcatcttcaatctgcatcctgttctgatgctcatcggatttataatcttgggangagaagccatcataagttacaaatcgcntccgctggtgaaaaccagttgaaagaagttgattcaaccttatactccaatgccaattgctctggctccttggggaataatttggcatcctgttgcaaacccttttaaagaaaccaacnaattgaaaaagccaattatcccctnaatcctcctaacaagtcctccaaattccctgggaatttgggnaatttggganntccantttcccccttttaaaggggctttccaaattggggttgttac

SEQ ID NO: 4901 - DNA, 436 bp, Arabidopsis thaliana
  unsure at all n locations
  Clone ID: LIB22-018-Q1-E1-C7
gactattttatggtggtggagctggcatgattggaaatgataattttggttcgggtaaccctaatgctgacagaagaggcagtcgaggaagggctggtggttcctatcttccttctggcccacctaatggtgctagacctggactacacccggcagggtacccgatacctatggttccactttcaccctttcctggtggtcctccttctcagccatacgctattccaactcgtggacctgttggtgctgttcctcatgctcctcaacctggaaacatggttttgganctggtcgtggaactcagttgggggcaccttccgcaacaacaanccaccaanataatgttggaacattggcctaattaaacttcccccttgatatccgaataaccaaccttaactggtggtccncatcccaacctggatatggnaccaat

SEQ ID NO: 4902 - DNA, 462 bp, Arabidopsis thaliana
  unsure at all n locations
  Clone ID: LIB22-018-Q1-E1-C8
nccaaaatcctcgnnnnnnnnnnnnnnnnnnnnnnnnnnnnnnnnnnnnnnnnataatggcgtcgatccctccgccggagcttgacaacgactcactggcgtcatcgccgagatcggagtacgatagtcagccacgcgtacggttcatgtgtacttttggaggaaggatcttgccacgtccgccggataatcagctctgttacgtcggcggcgataatcgcatggtcgctgttcatcgtcacactactttcgcctctctccttagtaaacttgctaaactctccggtaaaagcaacataagcgtgaagtaccagctaccaaacgaagatcttgacgcgttgatttccgtatcaacggacgaaagatgttgagaacatgatggacgaatacgaacgcgtcgcacanaatcaaaacccangcgcctctcgtcntcgtccttttctcttaacaaaaaagtcgccg

SEQ ID NO: 4903 - DNA, 465 bp, Arabidopsis thaliana
  unsure at all n locations
  Clone ID: LIB22-018-Q1-E1-D11
aattctacggngtcggtaccggtancaaattcccgggncgacccacgcgtccngaagtaaagaagaagaacttctctgcatcaatggcgatctccaagctccatctactcttccttctctcagtctttctctcccttcatcctcttgttctttccgacaccgccggtaattaactctctcatttcccgtcaatgtcttcttggttattcaatttaggttcttgaactctatcgatcgtaatttgtttacctagatctggtctgaaatcgttgaatcttcttaattcaagcttagttcggttcttgatttgtgtgtcattgtgtgttctgttctgtttcgaatctttttgaatcggatcttgatttttgtgtgtgttccgttttccttttggatatacacaagatgaagaaagaagttcctcctacangnaacaacaagtacaagagcaacactaaacctaacaan

SEQ ID NO: 4904 - DNA, 533 bp, Arabidopsis thaliana
  unsure at all n locations
  Clone ID: LIB22-018-Q1-E1-A4
tgcggtccntacggtcatgaattccggggcngnccacgcgtccgatacttcctcagagaaattctgtgttgttgtatacagagagatgttctcatcttctacactcgtttattctctatctctcttcctctctctttctcttctcttcttcctcntcatcctctcaccacacatccttctctcttcctctancctcatttccaccgccgatgacctagacgacctctctctcttccaccgcgccgtcgtctcttcctccaccaacaacaaccgtcgtctcatctccctctctccaaatccacccccaaagatcgctttcctcttcctaacaaactccgatttaaccttctaactctctgggaaaaggcttctccaaggncaacaagatntctacaacgtttacatccacgcaagattcaancctcctccggtctcctcctccttctcgaantccntcaatcaaatcaaanggctaaagttcaatcccngggngaagaaggaaacggnaaggaagctttctccggaacgtttaa

SEQ ID NO: 4905 - DNA, 492 bp, Arabidopsis thaliana
  unsure at all n locations
  Clone ID: LIB22-017-Q1-E1-F3
tcccacggtcacaaatccgggtcgacccacgcgtccantgctttgaagtgaaatcagctttggctatggcttcttcgacagctttgtctctctcatggagctcctctccttgttggtcacacagcttcaatggcggtgcaaatgaaaccctaaaagtatctgagcgaaggttcaattttgaagttgtttcccagaagaaagctaagaaacttcgcaaggtaattttgaaagaggatgtgacggatttgggtaagcaagggcaattacttgatgtgaaagctggatttttcagaaacttcctcttgcctactggaaaggctcagcttatgactccacttctgctcaaggaattnaagatggaagacgaaacggattgaaggaagagaaagcaaaagggtgaaaagaaagaaggcacaacaactgggccgatggtattccaaaaccgttggtgcnttcaaggttaaaccncaaaggcggtaaaggcaaactgat

SEQ ID NO: 4906 - DNA, 478 bp, Arabidopsis thaliana
  unsure at all n locations
  Clone ID: LIB22-017-Q1-E1-F4
ccacggtcacaaatcccgggnccacccaagccgtcaaaaaacgcgtggggtttctctatcgagcacggtgaagggtctgagagaacgtcctccatcgtcttactctctcaagatggagtctttcaacacactcatgaagtctgtttacactgagagatacgaatctcgtccttttagggtcggtagatacaactggacgcttgttgtgtatccgaagggaaacaagaacgataacggtacagggcacatttcgctatacgtcgtcttagacaactcaactctcacctctcaaagtgaagaggttcatgtagatctcagattttacgtattcaacaagaaagagacgaagtactttacgatccaagatactgatgtatggcgattcagtgcaatcaaaagaatgtggggattttctaaggttcttcctctgattacgtttaacaacctaaaaaatggatacctttatgacgttgaccat

SEQ ID NO: 4907 - DNA, 438 bp, Arabidopsis thaliana
  unsure at all n locations
  Clone ID: LIB22-017-Q1-E1-F6
cnctttgtttgtgtagcaaaaaaaaacgcgattttttttctgggtttcttccgatgttagatttgcagccgtcagatcggcgtcatggagctccgagtagtagcggcggtgttagtggtggtgatgagctgatcagaacttataaaggctggaaaggcaataacgtgttcttccttggaggaaggctcgtgtttggacctgatgctcgatctattctcatcaccgtcttcttaattacagctcctgtcattgtattctgtatttttgttggcagaaaatttatcgatgattttcctcaccatagaggagtatcagttttagctgttgctgttggtctgattttattagatctagtatttcttcttctaacctccgcgagagacccagggataataccacgtaatctgtatcctcctgaaccaaanaataatgaaggca

SEQ ID NO: 4908 - DNA, 438 bp, Arabidopsis thaliana
  Clone ID: LIB22-017-Q1-E1-G1
acaaatgacacaagtgtgtcctcgctgtgtaacggcatcatctcacattcagaagaccctgaatacgaaaaagaatcatcattgtcagcatccgtaccagtctctgaagaaggaaaggaagttgacgtaaaggttgatacagtagattctgaatcaaaccgttctattgacatggaacatgattctggaacagatcatcaagaagaagaagcaaatgggaaagaagatccaacggttgaaaatctggctgttgattcttcttgtttggacattactactccatctccatctgctgctacagagttcatacctcaggagaacgaacgttcagacaccgagtccaaacctctggagaaaagacattcagacaccgagtccaacaaaccgctggagaaagacatttagacagcgagtccaaacccctggagaaagaacatt

SEQ ID NO: 4909 - DNA, 459 bp, Arabidopsis thaliana
  unsure at all n locations
  Clone ID: LIB22-017-Q1-E1-G12
anaatcccggggcccaccaagcctncggnactngcccggccaccgatctcgctgtcctgttgggtcctaatgccacggcggcggccaactacatctgtggccagttaggcgacgtcaacaacaaatttatcgacaccgctttcgctatagacaacacttaccttctcttctccgcctaccttgtcttctctatgcagcttggcttcgctatgctctgtgccggttccgtgagagccaagaatactatgaacatcatgcttaccaacgtccttgacgctgcagccggtggtctcttctattatctgtttggctacgcctttgcctttggatntccgtccaatggtttcancggtaaacactactttgggtctcaaaagacatccccacgggnctctgctgactactccaactttctctaacaatgggcctttgcaatcgctgcggtggaatcacaagtgg

SEQ ID NO: 4910 - DNA, 411 bp, Arabidopsis thaliana
  unsure at all n locations
  Clone ID: LIB22-017-Q1-E1-G6
tcttatcanataactaacaattcacaanaanaaacaatggtacactctcgttttttaaacgttgttttagtcctagtgaccattgcttccatattctccacatttgccgangccaataggggctttgggtggggttggggtgganactccaacaattcaannnnnnnnnnnnnnnnnnnnnnnnnnnnnnnnnnnnnnnnnnnnnnnnnnnnnnccaactattcaagtggttcagcttcaaccccaaggtcaggatggggtttcggctctagtcnaaacggctcaagctggggttggggttngggcngngttccaacatacanacanctcaaggtcnggttgctccggttgggcntggggctaaaanaatacagctcgggatctgcgctcgggttcggctgggganatgga

SEQ ID NO: 4911 - DNA, 437 bp, Arabidopsis thaliana
  unsure at all n locations
  Clone ID: LIB22-017-Q1-E1-H2
cgtccgcccacgcgtccgcccacgcgtccgagcaaaatctcactgctcaggaagagaagtctggactacttcagctctctgactcatcagaggactcttccaacatttatgtttttcagatttccacgacgaaccaatcaactatagacattgcctttgtctctggaataaaagaagaaacgtccaacatggaaaatcgtataatgagtcttacaggtttgccactctctagtctacttgaagagaaacatatagcatttaatgctaagttcaatgaatgcttcaacctttctgacaagcttgatcctgaaactttggtggttggtaaagcagcaatcgggaacatgcttggaggcattggttacttctatggtcaatcaaagattcaatttcccaaaagtcctctggctaaaagtgaggatgatttcttgctanat

SEQ ID NO: 4912 - DNA, 498 bp, Arabidopsis thaliana
  unsure at all n locations
  Clone ID: LIB22-017-Q1-E1-H3
cagntcccaccggtcaccaaatcccggggccgacccacgcgtccnancacgcgtccggaaaaaagctttttcgaatctcgcttgctttttgtcgccatgagtctctttgggttaggaagaaatcagaagactttccgacctaagaagagtgcaccttctggaagcaagggtgcacagcttcgaaagcatatagatgccaccctaggaagtgggaacttgagagaagctgtaagacttcctccgggagaggatgcaaatgaatggcttgctgtaaacactgtggatttctttaatcaggtgaatttgctatatggcacccttaccgagttctgcacacctgataactgtcctacaatgactgctgggccaaagtacgagtatagatgggcaagatgggtgtacaagattaaagaagcccaaccaaggtttctgctccaaaattatgtcgaagtacnttgatgggattgggatcaagacccaactcgatgatgagacttt

SEQ ID NO: 4913 - DNA, 468 bp, Arabidopsis thaliana
  unsure at all n locations
  Clone ID: LIB22-017-Q1-E1-H4
gtccaccaacaccngggccgaccaacgcgtcnaaccacgcgtccggtcgccgatctcgtttcttcattttccgcgtgttgattggtacaaaggtttaatcaaatggttggaggaggagttatccagcaaattcttaggaggaagcttcactcccaatcacttgcaactccggttttgtcttggttttcttcgaagaaagctcatgaggatgctggttcttctggtgtaagagcacttgccttgttgggtgctggtgttacaggactgttgagtttttctacagtagcatctgctgatgaggctgaacatggattggagagtccaaagtaccttgggctcatgatgggaatcctanctcatatgancatgcctcgattcgtcntgggcaacaagtttatcaacaaatctgtgcatcatgccaatcaaagtcnccgatttcaaaaccgagaacttggngggtgtccccct

SEQ ID NO: 4914 - DNA, 487 bp, Arabidopsis thaliana
  unsure at all n locations
  Clone ID: LIB22-017-Q1-E1-H9
aattccttcgccggtccctaccggtccannaattcccgggncccaccaagcntncgaaataatttgncaacctttnggcnacccnaaaaattncccnggggaaattggttngtaaaaaaacccttcaacaaagaaaatgctcaaaggtccctgaacaccaaagttgctggtcacattgctagtgatgggaagctcggtccactcgtagatgaccaaggccggttcttcaagccacttcanggagattctcgtggcgaacacgaggctaagttctatgagtctttcacatcgaacatgaaggttccagatcacatccatagatacttcccggtgtatcacggcactcagctaattgaagcatccgatggatntggcaaacttcctcaacctggtcctgatgatgttgtttcaaggtacgcaaanccgtccgtaatgggatgttnaaattggatttaaggacatnggaccccgatgtntcaaaagaata

SEQ ID NO: 4915 - DNA, 423 bp, Arabidopsis thaliana
  unsure at all n locations
  Clone ID: LIB22-018-Q1-E1-A10
ttctctgatcttcgagttctgataattgctcttttttctctggctttgttatcgataatttctctggattttctttctggggtgaatttttgcgcanagatgggttcggngaacaacgagtacgagtttctgagtgagattgggctgacttctcacaacttgggatcttacgttgctggcaaatggcaagccaacggacctcttgtttcaactctcaatcctgctaacaatcagccaattgctcaagttgtggaaacttctcnagaagatacgaacaangnttgaaaagcttgccaaggaacaactaaaataaggatgcaagttangggtcccaaaganaagtgatatcctcaagacaaaatgggggatgcactaaagattcnaaactttgactaatcntgggcgtcctccntccccttgaaa

SEQ ID NO: 4916 - DNA, 477 bp, Arabidopsis thaliana
  unsure at all n locations
  Clone ID: LIB22-018-Q1-E1-A11
tttangcgccagtacggaanagnatcccgggncgacccacgcgtccngaaaaaccctagaaaccattacttatctctcccactggctctgtctctgtcaaatctcggatcgatttcgcggtgggctcgattcgtgattcctcaaagttcatcatccctaaggcactgtcacttaatggcatcggaatcgaaaagctacgctaggagagatcgtcttcttgagattgaggccactgttcgaaagtggtgggaagacgaggatgtattcagagccgaatcttgtgagaatcttccaaaaccaggagaaaagtttttctcaaccttccctttcccgtatatgaatggttatctacacattgggcatgccttttcattgtccaaggttgattttgcttctgcttaccataggctaagaggagctaatgtgcttcttccatttggtttccattgtactggtatgccaattaaggcttctgcn

SEQ ID NO: 4917 - DNA, 513 bp, Arabidopsis thaliana
  unsure at all n locations
  Clone ID: LIB22-018-Q1-E1-A3
cggtagcggaaanatcttgggtcgacccacgcgtccggaaaacaaaaaaaacaatggcggataagctcactgacgatcagattacagaatacagggaatctttcaggttattcgacaagaatggtgatggttccattacgaaaaaggagctcggtaccatgatgcgttcaatcggtgaaaaaccgacaaaagctgatcttcaggacttgatgaacgaagcggatttagatggtgatggaaccatcgatttccctgagttcttgtgcgtaatggctaagaatcaangtcatgatcaagcgccgcgtcacactaaaaaaacaatggcggataanctcactgacgatnagattacaagagtacaaggaatcttcaaggttantcgacaagaatggtgatggggtccaatacgaaaaaaggactcccttacgttatgttttccccccggtaaaaaaccggncnaaaacctgttcttcangacatgatgaacgaaattggatttaaatggtgatggga

SEQ ID NO: 4918 - DNA, 466 bp, Arabidopsis thaliana
  unsure at all n locations
  Clone ID: LIB22-017-Q1-E1-F12
gcgcnccgtacggtcaaaaatcccgggnccnaccangcgtncgaaanaaaaaccttttttcccncttcangcttagcctatcatgagcaacatccctagatctctcaccgactcagatctttctctatttactctcataatctcttctgctgttgatccttggcctttttctatcaccgttttttagcatcaacaaaactcaccggaaaatctctaacaaccaccaccgtttaacacttctcttcctcctcgtcgatcgtttttaaaccaatctttgtgtttcttgtttggtttttcggtgaaaaagattccttcttcttaatgggttttgaagaaaaccaaaaacagagtccaaaacagagtccgaatcatatcaagcatatggtgttcaagttccacttccatgttcctcatctccacatactccctcatcatcaacaccaacaccaccatgatgttcctaaan

SEQ ID NO: 4919 - DNA, 484 bp, Arabidopsis thaliana
  unsure at all n locations
  Clone ID: LIB22-017-Q1-E1-D2
ccaccggtcanaaatcccgggcctanttggaggaagatcaaaattttcaatccccattcttcgattgcttcaattgaagtttctccgatggcgcaagttagcagaatctgcaatggtgtgcagaacccatctcttatctccaatctctcgaaatccagtcaacgcaaatctcccttatcggtttctctgaagacgcagcagcatccacgagcttatccgatttcgtcgtcgtggggattgaagaagagtgggatgacgttaattggctctgagcttcgtcctcttaaggtcatgtcttctgtttccacggcggagaaagcgtcggagattgtacttcaacccattagagaaatctccggtccttantaagcttcctgggctccaaagtccccatcaaatcggattctgctctcgctgctccgtctgaagggaaacaactgtantggacaacttgttgaataaccgatgacatcaaattacatgc

SEQ ID NO: 4920 - DNA, 482 bp, Arabidopsis thaliana
  unsure at all n locations
  Clone ID: LIB22-017-Q1-E1-D5
gcgntcggtaccggacacaaattcncgggcccatcttctcttccantcaaatctcacattccctcttcacaacaacagcttcgtattcgctcatcttcttcgctttctgatcttggaaatcgcaggcattgttcgtctactcgaggatttcaattttggtcatnnnnnnnnnnnnnnnnnnnnnnnnnnnnnnnnnnnnnnnnnnnnnnnnnnnnnnnnnnnnnnnnnnnnnnnnnnnnaccggcggttcgtatttccgacgggaatctaatcatcaaaaaccggacgattctaaccggtgtaccagataatgtcatcacgacgtcagcatcggaagctggaccggtagaaggagtcttcgtcggagctgtatttaacaagggaagagagtnaacacatcgtaccgatcggtacgcttcgcaattcccggtttaagtcctgttccggtttaagctctggtgggatggccaanagatggaaaa

SEQ ID NO: 4921 - DNA, 437 bp, Arabidopsis thaliana
  unsure at all n locations
  Clone ID: LIB22-017-Q1-E1-D6
nctcaacactatcctcttctacattttccaacgatggcctcaaacgcactctcgtctttcaccgccgctaatcccgctctgtctcctaagccactactccctcacggctctgcttctccgtcggtttctctcggcttctccaggaaagttggcggcggcagagcagtggtcgttgcancggctacggtggacacaaacaacatgccgatgaccggagtcgtgttccagcctttcgaagaggtgaagaaagccgatctggccattccaatcacatctcatgcctctctcgctccgcagangtttgccnacgctagcgaaggactcattaatgaacaantcaatgtggaatacaagtctccaatgtgtacaatcaatgtacgcatactttgacaagacaacgntnccaatgaaggantagccaaattttcaangaaaca

SEQ ID NO: 4922 - DNA, 491 bp, Arabidopsis thaliana
  unsure at all n locations
  Clone ID: LIB22-017-Q1-E1-D7
ggtaccggaacatgaaattcgcgggncgacccacgcgtccnatcgaaaagaatacaagcagtggatcttgagaaccattgagcaaacttggaatttgtttaacaaaaggttcattgcgctatgggatcaaaacaaagatggaccaggcgaagcataccttgcagatatctataacaataccgaggttttgaagtttgttcaagaaaactacatgaggaatttgttgcatgactcactcggattcggcgctgcaaagatgattaggagaattgtgggagtggcacatgttgaggactttgaatcaatcgaagaagataagcgaagagctatttgcgagagaagtgcactcgagtttgcgaagatgcttctcaaggaaagganaaagtttaagaantatccggtgaaanttgttcaagcaattccaacaacaaagctaaagaacaantttaaaatggttcntccggctgaagttcttgaaaagtcctggtttt

SEQ ID NO: 4923 - DNA, 472 bp, Arabidopsis thaliana
  unsure at all n locations
  Clone ID: LIB22-017-Q1-E1-D9
gtaccggtcanaaatcccggggccaaccaagcgtccgaatcccctccgngggcnctctctcaagaacaacnnttcctcaacnatttcaaaattnncggggttggtttgaaggcaactaacggtcgtccctctccgtaaaccgtctccaaggatcatcaancttctcaatttccgaaagcattttattcnctaataggtaaaagttatgtaattttcgtttacaaacaatgttgaaattgtagaagttggaatttagaaactgctttttatcaattcattagcttttgtagtatagtcaatggtgggattcattagcttttgactcaagatataaagcttaatatatattgcataccaagtgttcgatgatatgcctaaatgaantctgtccacaaaactccttgaatttgngtttaatttcaaagaaatatgtaatgctgtgaatccaaatagtagagtttcagtcaattct

SEQ ID NO: 4924 - DNA, 484 bp, Arabidopsis thaliana
  unsure at all n locations
  Clone ID: LIB22-017-Q1-E1-E10
aattctcccgccccgtaccggtcaaaaatcccgggnccnaccaagcctncganaaagccttcngatgaaattacnaacgacnctgcnccnctttatcggagctctcatcttctccggcgccggtactgtcagatccgatgcctccgaccaccgttacaagggacggtgactccgttcctctctacgccaacaaggtcggcccctttcacaatcccagtgagacgtatcgctatttcgatctccccttttgtattccagagggtgtgaaagataagaaggaagctcttggtgaggttttgaatggggataggcttgttagtgctccatacaagcttaactttagagatgagaaagactcagaggtgtactgtaaaaagaagcttaatagagaagaagttgaacactttcgaaagaactgttgaaaaagattaatactttcaaatgtataagatgatttgcctaattggggattcattgggaaagt

SEQ ID NO: 4925 - DNA, 481 bp, Arabidopsis thaliana
  unsure at all n locations
  Clone ID: LIB22-017-Q1-E1-E11
cgccngccccgtaccggtccaaaattcccggggnccacccacgcgtccggttcaacgttgcgaatccaactactggatgccagaagaagctcgagatcgacgatgaccagaaactacgtgcgttttacgacaagagaatctctcaagaagtcagtggagatgctttgggcgaggagttcaaaggatacgttttcaagatcaagggtggttgcgataagcaaggtttcccaatgaagcagggagttttgactccaggccgtgttcgccttttgcttcaccgaggaactccttgcttcagaggacatggaaggagaactggtgagaggagaagaaagtctgttcgtggttgcattgtgagcccctgatctctctgttctgaaccttgtcattgtgaagaaaggtgagaacgatctcctggggcttaccgatactgagaaaccaagaatgagaggaccaaagagagcctccaaagattcgtnaa

SEQ ID NO: 4926 - DNA, 470 bp, Arabidopsis thaliana
  unsure at all n locations
  Clone ID: LIB22-017-Q1-E1-E12
gtaccggtcaanattcccgggncccaccaagcntncgnnagcccttttttttttttttnnaanataattnaacncttgtttttttcaaaagtcatagtccttgaacaacttcttaacttgttcaagcgtaacaaacaaaaccaccgtgaacggtgcttgtctcgaaaccgtcgggataaaacctttatacaaagacataatcccttccgctttcaccgttttcaaagcacaatcaaccgctcctttatacggcggagcaactccagccaccaccttcatattcatcactctcgtcttaatcacatcaacaggattactcgcaacgctcgcaacaaaccccgccgcgaaactcgccgacacatgagtcccaagcccatctttgaacaaccctttctccaaaatcgtctctttaacagaatcatacgaagccaactgcgatgacgtcacaaagcattgcctgtttatcgtca

SEQ ID NO: 4927 - DNA, 496 bp, Arabidopsis thaliana
  unsure at all n locations
  Clone ID: LIB22-017-Q1-E1-E4
ttccttcggtgccacggtcacaaatcccgggnccacccaagccgtcnancaacgcgtccggcctgcttctactcgagttccttctcagagaattacacctcacagtgttccttctccaagaccaagttcaccaagaggtgcctccccacaagccatctcttcaaagccgccttctccaagagcagagccaccaacattggacactccaagacctccctctccaagagctgcttctctaagagcagacccaccaagattggatgctgcacgacccaccacgcctaggcctccttctccactagcagacgcaccaagattggatgctccacgacccactacgcctaagccgccttctccaagatcagacccgccaagattggatgctccaagacccactacgcctaaagcccccttctccaagatnggtttctcctaaggctgtngagccggcgggaagattgtttataagaacaagaagccaacgcttccggtcaaa

SEQ ID NO: 4928 - DNA, 433 bp, Arabidopsis thaliana
  unsure at all n locations
  Clone ID: LIB22-017-Q1-E1-E5
ccgntcggtaccggacacaaattcncgggtcgacccacgcgtccncggacgcgtgggatgaaagcaaacctgaaagacgtcccacaaaacacatgcccactccagctcaatggactaacgcattcaatcctgcattttcgtattatgtctactattgttatgctaacctctatgtgttaaataagcttcgagagtcaaagggcatgactactatcacgctacgaccacattctggagaggctggtgacattgaccacttggctgcaacttttcaaacatgcnatanantcgcacatggattcanccngcaaattcncggtgtncattatggtaaacccnccaatggtcnggaattcccagngcaaaatccttgttnnantacacggaccttnctgttttcaaaaggcnagtttcttgtnaggagcccttaatc

SEQ ID NO: 4929 - DNA, 439 bp, Arabidopsis thaliana
  unsure at all n locations
  Clone ID: LIB22-017-Q1-E1-E7
ngtttctgaatgtgaagcttgaggagagttctatatccttttgaattgctgtaatttggatcttacatagacgagagcagtccttctggatctacgcggtttaggcgggaggaggttttggtattgggaatgcgtttttgagctgatcttatacgtctattcaggtttagctcagtctagaattggttggcttgggaaaggtcgatgaagaacgggatggctgagtgcagcgtatgtcgttcaaggttggtttctcccagtagcaaagctatttcaagggcttatgacaactacaactacaagattagagtatcctcaaaacaacgagctctcaatgtctttttggtatcggtgactgcatgctagttggtctacagcccgtctaagtgtacatgtccaaaagtggatggaaagttcaaacttaatcctattaacgtca

SEQ ID NO: 4930 - DNA, 469 bp, Arabidopsis thaliana
  unsure at all n locations
  Clone ID: LIB22-017-Q1-E1-F1
gcccacgcgtccgcggacgcgtgggcaaacttggatctcgcaccagtttctttgtttcagaatgtgattttgaggatcttgagaatttcaacttcattgtctgttagtctctcttgtgaatttctttggagatgaaaagattcgagaggccaagaacttcgattcactcgcagccaaggaccagtaccagttcaggtaagaaagatcagaagccgcgtagtagtagtagtaaaggatctggtgtgaaaccgttgaatgcggctcagctggtttctagagttttagatgcaacaaacaagctctgagcccttccttcaagtcccctggttaactgattcaaactaactgggatnaagaagtccctcctgaaagtcctatgagaaatggtgaaatgttgcattacaatgggatgatgcctaatgagaaatccaagaactgaatggcaaanctagtgggttgtgaanaaaaa

SEQ ID NO: 4931 - DNA, 488 bp, Arabidopsis thaliana
  unsure at all n locations
  Clone ID: LIB22-017-Q1-E1-F10
gaattctcccgcgccgtaccggtcacaaatcccgggnccaaccaagcntncgantaataaanaaccccccttnccccccctnnattngtaaaatttgaaaatttggaaggaaaaaaaggaagaaaaantgggagaagatgaagagtatgcaaatggggtgtgattgggagcattgtttctatcaagttgcatcttctgtctccattgtcatttgcaacaaagctttgatgaccaatcttggtttcccttttgcaacaacacttactagttggcatttgatggtaacatattgcacacttcatgtggcatataaactaaacttctttgagaataaaccaatagacatgagaactgttgttctctttggcctcctcaatggcatttccattggtctcctcaatctcaagcctcggctttaattccatcggcttctatcaaatgaccaaacttgctatcataccattcactgttcctttaaaaancctcct

SEQ ID NO: 4932 - DNA, 483 bp, Arabidopsis thaliana
  unsure at all n locations
  Clone ID: LIB22-017-Q1-E1-D12
cttttcccgcnccgtaccggtccaaaaatcccgggncccaccaanccgtcggcacacgcgtccggagaagaatggagagtacaggcaaatgcttattcaagccatccatgcttgtgcagttaagttccccgaagttgcaagcacagtggtccatcttctgatggatttcctgggagatagcaacgtggcttcagctcttgacgtggttgttttcgttagagagataatagaaacaaatcccaagttgagagtttcaatcatcaccaggttgttggacacgttctatcagatccgtgcaggaaaggtctgcccttgtgcactttggatcattggtgagtattgcctatcactttcagaagttgagagtggcatttcaactattacacaatgccttggcgaattaccattttactccgtttctgaagagtctgagccaactgagacatcaaagaaagattcaacctaactcntccgccaaggtgt

SEQ ID NO: 4933 - DNA, 424 bp, Arabidopsis thaliana
  unsure at all n locations
  Clone ID: LIB22-016-Q1-E1-B4
gaaaaaaaaaaaaacttttgtctttcccttaatttctctaattttccctcgatttctctggcatcaacagtctcattctcattgatctttcttttttgtagcgagaaagatncatttttttcggttcgttctcttctgggttacgaatcaaagagctacacagacacagacacacactgtttcctgtttctccccggattgcaaacagaactagggtttgttttcacaaattttggatcttttttttgaagaaaagaacaaaatttggatgaaaggaaaccagaaagactcgtcggaaaaaccgatatgggatcggagctcatcaagtacatctatacccggaatgtggtctttaacccgacccggtccaaaacttaagggttggcttatctgttcattgtcttcacttacattatcnacatgc

SEQ ID NO: 4934 - DNA, 416 bp, Arabidopsis thaliana
  unsure at all n locations
  Clone ID: LIB22-016-Q1-E1-B5
cgtgggcaaaaatgggacacctaattcctcaaaccggagatgaagagaccgagcttggtttagctgcggttaggctagctaactgtgcagccttcccaatggttttcaaagctgccatcgagctcggtgtcatcgacactctctacttatgctgctcgtgatgacgtcaccggatccagttccttcctcacaccttctgagatagctattaggctccccacaaaacctantaaccctgaagcaccagctctgttggatcgtattcttcgnttacntgctagctactccatggtcaaatgccaaattatcgatggtaacaagagtctacatcncanancccattttgtccgataattccttgaanngataatgtttgatgaacgaattaaggnacactttgccttctcaaacttaat

SEQ ID NO: 4935 - DNA, 466 bp, Arabidopsis thaliana
  unsure at all n locations
  Clone ID: LIB22-016-Q1-E1-B7
gccgntccgtaccggtcataaattcccgggccgacccacgcgtccanaacctgtgtctgacaaggccattgaggaggtagaagaaaaatttactagcgaatcagactctattgcagactcctctaagttagaatctgtggataccagtgctgtagagccagaggttgtagctgccgagagtgggagtgaaccaaaggatgtggaaaaagccaacggattggagaagggtatgacttatgctgaagtaatcaaggcagctagtgcagtagctgacaatggaaccaaagaggaggagagtgtgctcggtggcatagtcgatgatgcagaagaaggtgttaagttaaacaacaaaggagactttgtggtggactcatctgctattgaagctgtgaatgtagatgtggcaaagccaggggttgttgttgttggagacgtaaggtgagtgangtgctggaaactgatggca

SEQ ID NO: 4936 - DNA, 469 bp, Arabidopsis thaliana
  unsure at all n locations
  Clone ID: LIB22-016-Q1-E1-C10
cttcttcgcccgncaggtaccaatcaagaattccgggtcgacccacgcntccgcgaaattgacccgtcggtgattcttaatctctcctctctgttcttctccgatcaaacctcattccaaagaaacaaaccatggatctccaaccagaagagcttcaattcttgacaatacctcaactacttcaagaatcaatctcaatcaagaaacgatctccaagaaccttctacctcataaccctctccttcatcttccctctctccttcgctatcctcgctcactcactcttcactcaaccaatcttagccaaactcgacaaatccgacccaccaaactcagatcgttcacgtcatgattggactgttcttctaatcttcaagttcagttacttgatnttctccttggcttcctctccttctctcaaccgctgctgttgtcttcacggtcgcttctcnttacaccgggaaagcct

SEQ ID NO: 4937 - DNA, 413 bp, Arabidopsis thaliana
  Clone ID: LIB22-016-Q1-E1-C12
gctctgtcatttacttgctccctcgattgtttgttgcgtccttcactttggtgttgcctttcttccccactggctcctttgagagaatggaagaggaaggagatgtagcaactgcttttaccatggcaaggattgtctctaatatccccatttcacgcggtggtccgactagtgttgtcatctatgacattcacgctttgcaggaaaggttttactttgccgatcaggttcttcctttgtttgagactggaatcccgttgttgactaaacgccttcaacagcttcctgaaactgagaaagtcatagttgcatttcctgatgatggagcctggaagcgtttccataagctgttggatcattatcccacggttgtgtgtacaaaggttcgtgaaggcgataagagaatagtcaag

SEQ ID NO: 4938 - DNA, 470 bp, Arabidopsis thaliana
  unsure at all n locations
  Clone ID: LIB22-016-Q1-E1-C3
gngctgatgatattcaaccaatcgtgtgtgacaatggtaccggtatggtgaaggctggatttgcagganatgatgctcccagggctgtttttcccagtgttgttggtaggccaagacatcatggtgtcatggttgggatgaaccanaangatgcatatgttggtgatgangcacaatccaagagaggtattcttacnttgaagtatcctattgagcatggtgttgttagcaactgggatgatatggaaaagatctggcatcacactttctacaatgagcttcgtattgctcctgaagaacaaccctggttcctccttaacccgagggctcctccttaaaccnaaaagggccaaacaataagaataaagaatggaactccaaaattcaatgtttttgganaacccttttaaantcctccccggctaatggttnntgttcgcccaatcccaaaggcctggtttctcctcccn

SEQ ID NO: 4939 - DNA, 421 bp, Arabidopsis thaliana
  unsure at all n locations
  Clone ID: LIB22-016-Q1-E1-C4
gggggaaactctctctctctcgggaccggaacacagactgaatanggaaggaagaatgtcgtcgccaatcaanaaggtcaaacactttacggaccttgaccagaaatgtgtcaacacgatccgaacgctgtgtgcggatgtcgtgcagaaggcgaacagtggacaccccggggcgcccatgggatgtgccccgatggcccacgttctcttcaccaagtgcatgaagttcgcgccgtcccaccctcactgggcggaccgtgatcgctttgttctctctaacggccacggttgcgctctgttgtatgcgctcctgcacctcactgggtatgaacgacccacgatggacgacttgaagaaattcagacagctttgactcggtcacanctggccaacctgagcgcaaccacggtcttganggtat

SEQ ID NO: 4940 - DNA, 425 bp, Arabidopsis thaliana
  Clone ID: LIB22-016-Q1-E1-C8
gaaaaccgatatttccgggtcgggtcaaaagtttcgtcgcggttgttttacggaggagaaagctaagcagttgaggaggaaaaccgcagaagcttccacgttccatgacgtaatgtatcactccgccattgcttctcgacttgcgtctgatatcaccggccgagtcgaggattgaaacggattcgggtcagatctggagacgaatcaattaatgaataattaatcttttttttcttaattcagtgttcttgtaggatgcagaccatcttctatcggtgctcctttttcatttgaaccgttggcttgtgtttggtctttgtgtgttgtaaactctaagttccctttctgtttcttctgtaatcaaccgttggatttccacttgttaattttagacatgtgttccctagttagctcttttaacctaa

SEQ ID NO: 4941 - DNA, 420 bp, Arabidopsis thaliana
  unsure at all n locations
  Clone ID: LIB22-016-Q1-E1-C9
gccacactaatcggaaaaaatggcacagaagcttaacttgcttaatctcgccgtccctccggtcacccaccgctctaacttcccttccaccttcaccttcggcgtcgccacttccgcttaccagattgaaggaggttggaatgaaggtaaaaagggaccaagtatatgggataagttcactcatatcgaagggaagattcttgatggaagtaacggcgatgttgctgtggatcattacnatagatacaangaagatgttgatcttatangacaattaggattcggtgcttacagattttctatatcttggtctcgaattttccctgatggcctgngaactgaagtcaatgaanaagnattgctttctacaacgatcttnttaatacacntcttgaaaaaggtattcagccgtatgtaact

SEQ ID NO: 4942 - DNA, 423 bp, Arabidopsis thaliana
  unsure at all n locations
  Clone ID: LIB22-016-Q1-E1-D5
gatttgagcaaagacattctcttgacccatggaggaacttcttgtatatctttgggtcaagagaatgtctcgtttacgtgatcttagtctcaacaactgcaataatctggtatcactcccccaactttcagattcccttgattacatatatgcagataattgtaagtccctcgagagactggattgttgctttaacaatccagagatccgtctctatttccccaaatgcttcaaactgaatcaagaagccagagatctcatcatgcacacttgtatagatgcgatgtttccaggtacacaagtgcctgcctgcttcattcatcgagctacttctggggattccttgaaaatcaagttgaaggagtcgcctcttcctacaaaccttgagaattaaggcttgtatcatgcntggttaaggttaat

SEQ ID NO: 4943 - DNA, 483 bp, Arabidopsis thaliana
  unsure at all n locations
  Clone ID: LIB22-016-Q1-E1-D6
aaagnaactccaccgctcggtaccggtcatcnaattcccgggncgacccacgcgtccagggacagatgttacctatgtagctgaagccattatacctttatttgaaaccgcaaaagagttgatcttacggaaaatgggagacgacttagaggtgcaagagaagccggcgttgattctatgccatgttttcagaagggttgatgaaccttctcttctgtcagctgcatctaagtttgggtttaagcttgcagacagatgggctgcaaattcaaaggaatctcctattgggaacatcattgacagttggttttccgaaaaggatttggtcgcagaaatcccgagttctgcgttgcatattctctattttcagatggagtaactatgtggtagaggagcaaatgttgattaactgggagagttcttttatattaaaaaatccctcattgaatcccaaatcaatgaatgtcctacatgtattcntcc

SEQ ID NO: 4944 - DNA, 469 bp, Arabidopsis thaliana
  unsure at all n locations
  Clone ID: LIB22-016-Q1-E1-D9
ctttcttgnccgccagtacanacaagaattnccggtcgacccacgcatccgcggacgcgtgggcatgcgtgggttagagaaggcgggaatgctactgatatccctgtcgacatttcagttctgaacaacttaagacaatttgtgagatacagccgtctaaagcaatttgctttaagggcgcttgctagcacacttgacgaggcagagatctctgacctcagagatcaatttgatgcgattgatgtggataaaaatggcgtcattagtcttgaagagatgagacaggcacttgccaaagatcttccttggaaactgaaagactcacgagttgctgagatccttgaagcggtagttatatttttgttttccattgcaattgcatctctgggggtatcagagggagacgtagtttcataatgagccgttgtgtacttgtatccttgctggtcacagattgatacancactga

SEQ ID NO: 4945 - DNA, 415 bp, Arabidopsis thaliana
  unsure at all n locations
  Clone ID: LIB22-016-Q1-E1-E10
gaaaanagttactcagatctcacgatttgagcagaatacgcaatgaggacaccgacgacgattctccttcttgtcggagctatcctcttctccggcgccggctatgtcagatccgacgcctccgaccaccgttacaaggaaggagacaccgttcctctctacgccaacaaggtcgggccatttcacaatccangtgagacgtatcgatattttgatcttcccntcggtntcccacatggtgtgnaagataagaatgaagctcttggcgaggttctaaacggngatcggctagttagcgctccatacaagctcaanttcagagatgnnatagagtctgaggtatactgcaacangaagttgagtaaagaanangtcatacagttcagaaaagctgttgagaaggactactacttcc

SEQ ID NO: 4946 - DNA, 470 bp, Arabidopsis thaliana
  unsure at all n locations
  Clone ID: LIB22-016-Q1-E1-E12
ttctattgntccggcagtacaaaccngaattnccgggtcgacccacgcatccgaaacctctctttctctctctctccgacgatggcttccggtgaccagagcaagaagagaaaacagcattatcgccctcaaaacagaccagtgaagaagaagggatcttancctttgaagccaggtgttcaaggttttttcatctcttgcgatggcggacgcgaattccaagctgctcaggaagctattaacgtcattgattcctttttcgaggagctaatacaagggactgactcgaaagtgaatcctggtttgtttggtaatccaataaacaaaaaagttacattttcgtatagcgaggatgaggatgangaggaagatgagagtaataatggcgaggaagaaggaaaacatagganatgggggataaggcagtagtgagtgaangcggtaatgatctaattgaatgagaaaagaaa

SEQ ID NO: 4947 - DNA, 419 bp, Arabidopsis thaliana
  unsure at all n locations
  Clone ID: LIB22-016-Q1-E1-B3
ntcacttttccaatcaaaacgtanagaagaagaggaagaatggntacatgtcctcctttcgatttctcgaccanatattacgatggtgacggcggatgccanangcagngcancttcttcggnngcacgacggtgctcgatcaaggcgttggctangccgtgattcntggttttggtgctttctttgccgtnttcacatcttttttggtatggttaaaaaaacgatatgtgggagctcgtcatacatcggaatggttcantacatcngnaagatcgtttcgacaggacttattgcaanttgtcattgtatcacattggacatgggctgngaccatactgcaaagtttcaaacgtacatggnntatggggttagtgggacgttttggtacgctagtggagccacatacatgtgctgttgt

SEQ ID NO: 4948 - DNA, 398 bp, Arabidopsis thaliana
  unsure at all n locations
  Clone ID: LIB22-015-Q1-E1-F12
tctctctctctctattgttgctctctctctcgctttttatgtgactttcagatccgccgagtcttctttttgtggaatcttttcaaggagctcagtattctatatacacctctctttgtttgatcgatttcacaaaccctagcttcggcgatcttaaatctgcaaaaaatctatggcgtcttctcctggtccttttcttcacaaccagtacgatcagcagcactacgctccgcctggtatctccgctcaaccatctccggtgactcagcagcaacaggatgtgtcttcctcttccgccgcgactaacttgcatcctcaagagaacgctgtcttatcccangccaactctcaatctacaatccccccgttccaatcacaatcccggtacgcacancctc

SEQ ID NO: 4949 - DNA, 425 bp, Arabidopsis thaliana
  unsure at all n locations
  Clone ID: LIB22-015-Q1-E1-F9
naggacgcgtgggtgggaactgtgtttcccatggcgttcgggatgatgtaaatttgtttagtagagatgatgatgaaaacttttccaagtacattcacccgcgtgttacaanacattcacctaggactgtacctcgtattggggacagaagaatcaggaagatattggcttctagacattggaaaggaggttcaaggcattcagatacgaaaccgtggagaaattattacttgcaccagcagaggagctatcctatcaagaaaaggaaaaactttgaccacatatctgattccgttactgatgattaccgtatgcgtactaagatgcatagaggtagtagaaaaggtcaangggcatcctttgtggcaagcgactcccatgtgaaactacnggtnaaatcgttcaaaggtgcctgaacctttcaa

SEQ ID NO: 4950 - DNA, 471 bp, Arabidopsis thaliana
  unsure at all n locations
  Clone ID: LIB22-015-Q1-E1-G11
ctattgttcgccncggtctcnnnaacccgggtcnacccacgcgtccgaacggagtcacggttcctcgttcgtcctctcccgtcgtctctccgcactaaattgatgggcacatcatctgggtccaatcttcctcaccagatgctacctccacgtcagcaactacaaacatctctttcgcttgtatcttcagatccccacttgtcacggtctaattctggcattgtgcgtgaatcaccagctgaaagtgctagctctcaagaaacttggccaacctcaaaatctattatgggaaggaagacagatagcggaaagacagggcctgactctcatgatcaacatgtgatccgccatgtttccattgctgataaggtatcgctacgggacatagctagagagagacttgacatagtcgctganaaaatgcatcgattaccagaagaatatctccangagtttaaagaatgggncctt

SEQ ID NO: 4951 - DNA, 422 bp, Arabidopsis thaliana
  unsure at all n locations
  Clone ID: LIB22-015-Q1-E1-G9
ttaacctgcgcttgcttattggagctcttaacctacgcggatgctccgattttatgacagctgagctcgatttggttgataaacaaaggcttcaagaattctaccggaatcaatggaggttctggtaggttctacgtttagggatcgtagcagcgtcacgacgcatgatcaggccgtaccggcgtctctgtctagccggattggtttgaggagatgtggtagatctcctccgccggagagttcgtcgtccgttggagaaaccagcgaaaacgangaagatgaagacgacgccgtttcgtcatcacaaggaagatgggtcaattcgtttaagttcanctttgggaaagaatccccttccgattaagaaaanggattatcaaaccaattacattagggaaatccgaaatccgtttgggaantta

SEQ ID NO: 4952 - DNA, 410 bp, Arabidopsis thaliana
  unsure at all n locations
  Clone ID: LIB22-015-Q1-E1-H12
tcgtccttatacggtaacctaagtccgcaacgagttagagaatggatcgcttaccacgttagattcttcggtgaacggtcacatttcgtgctacacgacgccggagggattcatgaggaagtgttcgaggttttaaagccatggattgagctagggagagtgacgttacatgatattagagatcaagaacgattcgatggatattatcataatcagttcatgatagtgaatgattgtttgcataggtatagattcatgacgaagtggatgttcttctttgatgttgatgagtttttacatgttccagtgaaagagacgatttcgtctgtgatggaatctttggaggaatattcncagtttactattgaacagatgcctaagagtatcngatttgttaatcccgtgatggn

SEQ ID NO: 4953 - DNA, 417 bp, Arabidopsis thaliana
  Clone ID: LIB22-016-Q1-E1-A11
gcagagagtcgccgaaataaattgaaatccggtgagaagattttggattcactccttccttctttcttcttctttatcatcatttgagctggttttggtatctctcctgacgaatttgaatctctcagccattttctcttctcgcatctgtgttttcgtgcttggagctgtacacgtttctttaatttgaatagtgattttgcgttcgttaattagccttctcgtacgagtgggctattttgggaatgatttaggtggttttaagttactgggtagtagtcactgctgagcgatttctgtttctcctgttgaatgattgattcagaaatttgaaattcacatcgaaaccaaatcttaaatcatattggtagctttttttttgttttgtgattagatactgtttttttatagtattaa

SEQ ID NO: 4954 - DNA, 435 bp, Arabidopsis thaliana
  unsure at all n locations
  Clone ID: LIB22-016-Q1-E1-A2
gtaccggtcataattcccgggccccttcgtcttcgataacagaagacagaattcaatgtcgtcgacctacangctcaatcacactgattcatttgcaaatggagatgcanagagtttgttgccgaacccaganaatggtttcactcatttgacttcacttgctcaatcagagaaggctgttcaggagcttcttcttcaacagactcctatgcaggctactgacgaccatctcgttgagttctctgaggctttgagaactgttgcaaaggcactaaggggagctgctgaaggaaaggcgttggctcaagctgaggctgctgaatggaagcgtagatacgagttatngaggtctaataacgtggagttgcagcataaagaactgtcaaatggagtgtgtgccgatgaatctaatgggtcaaaggatggagcacttan

SEQ ID NO: 4955 - DNA, 423 bp, Arabidopsis thaliana
  unsure at all n locations
  Clone ID: LIB22-016-Q1-E1-A5
ncgccgtttcactcccttctcctgctctccctcgccttcgtgtttcatgtcaagcctcctccgtcacttcgccttcttctccttccgatgtcaaaggaaaatctgacctgaaagactttctggcaatagatgattttgacacagccaccattaaaacgattttagacaaggcttcagaggttaaggccttgctgaaatcaggggagagaaattatctaccttttaaagggaagtctatgtctatgatctttgcaaaaccttccatgaggactcgggtttcgtttgagactggttttttcttgctcggtggccatgcgttatatctaggtcccaatgacattcagatgggtaagcgggagggaaactcgtgatgttgctcgtgttcnttcacgctataatgacatcaataagggtccgtgtatt

SEQ ID NO: 4956 - DNA, 463 bp, Arabidopsis thaliana
  unsure at all n locations
  Clone ID: LIB22-016-Q1-E1-A6
ggtaccggtcntaaattcccgggncgacccacgcgtccgtctcactttcttcacatctctgaagctcttcgtcacgcatctacaatggcatcgatgatgcaaccgcagatcatactgctgaaggaagggacggacacatctcagggcaaagcgcaactagtaagcaacatcaacgcttgcactgctgttggagatgtagttcgaaccacgctcgggccacgagggatggacaaactcattcacgacgataaaggatccgtcaccatttctaacgatggtgctaccatcatgaagctcctcgacattgttcatcctgctgctaagatcctcgtcgatatcgccaaatcccaagactccgaggtgggtgatgggacaactacagtggttctcttgcagcagagtttttgaangaagcgaagccatttattgaaggatggtgttcacgctcagaatctaattagga

SEQ ID NO: 4957 - DNA, 447 bp, Arabidopsis thaliana
  unsure at all n locations
  Clone ID: LIB22-016-Q1-E1-A7
cacgcgtcnaagattcttctccggagcgatcagatttcaccgacgacggttgtttttgcctcctctttcaatcnnnnnnnnnnnnnnnnnnnnnnnnnnnnnnnnnnnnnnnnnnnnnnnnnnnnnnnnnnnnnnnnnnnctcctctcgtccagtattagggttttaaaggcaagaactactagaacaagagaaggtacaaaaaaaaaatgtcgggcctccatcgatcatcaagttcatcgaagaacatcggaaattgccttccctccaaagaactccttgatgatcttgcagtcgatttgttttgaatgtccctgaagaagatnaacagtcattncaagaagaattttggtttctgggtggaagtaatgcttaantggtaactaangaangataatgctggnnaagaatgatncaanagcttaaagtccctgtcctttgaaaanaa

SEQ ID NO: 4958 - DNA, 375 bp, Arabidopsis thaliana
  unsure at all n locations
  Clone ID: LIB22-016-Q1-E1-A8
ncgcgtgttgtcttcttcttcttcctcctctcgacgacgaagagattaaaaagagacggccttttctcagtttctgctccgattcgtatatcttctgtttcgtacgantgttgtaagacgtttgttttgcctgagactagaggtttgtcatggatatanatcttcgactacattcaggtgacctttgcaaaggagatgatgaggatanaggacttgataatgtgttacacaatgaagaacatatggatattggcanaattgangatgtttctgttgaggttaatactgatganagtgtaggcatgggtgttccaactggggggatttggttgagtacactgaagggtatgaatcntgaacctcntaatggtatgg

SEQ ID NO: 4959 - DNA, 424 bp, Arabidopsis thaliana
  unsure at all n locations
  Clone ID: LIB22-016-Q1-E1-B1
cgcccacgcgtccgcccacgcgtccgttgaaaatcactcgccgtgtctctctaagcttcttcttcactgtgaaaacctcagatcgcaaatatgcacgcaccggtactcgttctgagcgattcgttgaagcgtgaatctggaagtaaggttcatcatggtaatatccaagcttccaaggctgttgctgatatcattcgtacaacattgggtcctcgttctatgttgannatgcttcttgatgcnggtggagggattgttgttacantgatgggaatgctattcttcgtgaggctatatgtcgctcatcctgcanntaaagtcaatgattgagtntgagccgttngcaagaanntagaantttgggttatggggacaaggntcngtttagtgnttcaancctgggtgacaatgcttcacgtttgca

SEQ ID NO: 4960 - DNA, 410 bp, Arabidopsis thaliana
  unsure at all n locations
  Clone ID: LIB22-016-Q1-E1-B2
agctccttgaagaagatgaggatgaatcgatgcattcaggagctgacgtagacgcgttccaagctgctctgaatcgtgatattgaaggttctatgacaacttcaataccccacgtgacaaacccaggaaacaaccattcttccaggcagcagttttcgacatggaagaatggtattggagattctaatatcaatgtccagactcagcatagccttgaaagtactcagatgaaggagcaagaaggatcgactttagaaaatcaacatcaacatgatttgaaacgcgcaaatgaacctcatttacaacacaaccagcctcaagacttcatcganctggtcaactctggggagatccctcgcaagtccccaatcaactggggttaccgattagtgaaaagaatcctactgggt

SEQ ID NO: 4961 - DNA, 469 bp, Arabidopsis thaliana
  unsure at all n locations
  Clone ID: LIB22-015-Q1-E1-F10
gaaattccactcgcacggcacggtcagcacacncgggncgacccacgcgtccaacttttcccaccaaacnnnnnnnnnnnnnnnnnnnnnnnnnnnnnnnnnnnnnnnnnnnnnnnnnnnnnnnnnnnaatgaaaggtccgtaaggggaagaagacagatgattgcgaaagagcaagacgaatacaaattacgccaacaaggtcttgtttttcaaatggcttctcttttcctctctttcgattactccttactcttcttttggttgctcttccgcgttttcttatacgagaatcacgaacgaaaactccagattttctagcacacctcttctctctgcatcgccatcttgttttttcccccaaattttcgatttttttttttgtataacttttgagattctgatagattcggtacggagtcatgtatatggagaattcntctgcttccgatgaatccattgcctacgtt

SEQ ID NO: 4962 - DNA, 451 bp, Arabidopsis thaliana
  unsure at all n locations
  Clone ID: LIB22-014-Q1-E1-H10
tggtcgaggcccgcgtccgatcgnaaatcactcagagaaacagagaagacgatagatagagaaaaaaaaaaaatggcgttggctcttcgtanactctcctcttccgttaagaaaccgatctcgcttctctcctctaagggcggttcactccgtttcatgtcgtctttatcaaccgcagctatggcggaatcggngaaatctcgttctagttggattaagcaattgnatgcatctctagatgaaatcgatcctgaagttgcggatattatcgaattanagaaggcnatacaatggaanggatttgaacttataccgtcagagaanttcacttctctatctgtgatgcaagccgttggttctgttatnactaataagtataatgaaaggatacccggagctagatataatggngggaatngagtncattgacatggctganacattatgtcaa

SEQ ID NO: 4963 - DNA, 484 bp, Arabidopsis thaliana
  unsure at all n locations
  Clone ID: LIB22-014-Q1-E1-H2
agcggtccgaaaaatcccggggcgcgccacgcgtccgggaagaaacctgtttccacctcggtaaacaactctttggttgagctgagtaattacaaccaagaaaagagaagagtttgnccctgaatatgacaatgatgctgagcaactcttggcggagatggagttcaaagagaacgatactcctgaagaacatgaactgaagctgcgtgtgttgcgtatctattcaaaaaggcttgatgagaggaaacgtagaaaagaattcataatagaaagaaacctgttgtacccaaatccctttgagaangacctgtctcaggaggagaaagtacaatgccgacgtttggacgtttttatgcgtttcattcanaagangagcacgacgagctactccgtaatgttgtaaaccaataccgcatggtgaaacggctcaaagatntcaangaaactcaattgcaaggtgtccttcaacgggtgaaacaaataa

SEQ ID NO: 4964 - DNA, 462 bp, Arabidopsis thaliana
  unsure at all n locations
  Clone ID: LIB22-014-Q1-E1-H3
cttagctacaaaagaacagtcgccggcaaaagtctcagcctttttcctctccgccgttcacagttcaccggcatttctctcttctttctttttctccgactagatttccttgtctctttggtttcttggcgatgggagacgagaagccggtgattgttatggccaatcgagaaagagatcgagagcttctgattcccgtcgctgattccggcgacaaagacgacggnnnnnnnnnnnnnnnnnnnnnnnnnnnnnnnnnnnnnnnnnnnnngcatcaatccagccacgagactttaagcttgttcattaggggctgggcgtcaaagaagttcatgacaggctgtgttatcctacttcctattgcaattacttttctatataacatgggtgggttaatcaactttgtccatnggattccntcctcctccaaataataatggcacaaactttgggaatcaaacn

SEQ ID NO: 4965 - DNA, 479 bp, Arabidopsis thaliana
  unsure at all n locations
  Clone ID: LIB22-014-Q1-E1-H4
ggtcgaaaaccggggggnccacgcatcggtnctncttcttcttcatcatcaatctctcaagacatgctctcttttttctctaaccagatcgaccggcannaaagatgtgtctaatgangaaaaaaccctaaccaatctcgannaatntgncggttcacaattccctggcgatgactaccgtccgtccgatcggaaaaactggatggctggtcttacgttggngaaactaactctaaacaagatcgtgtggccaggaacgcatgattcagccaccaacgatatcggaatacctctgatttctcgtcctttaactgaatgccaatcgctctctatctacnaacaactcgtcctcgggacacgtgtcctcgaaatccgtgttcaanaagnttgccaaatctggcaaggggaatncggacgtcaaaagaaattnaagttggcaantggagaagttntcaaattcctggccggagaatcaatnc

SEQ ID NO: 4966 - DNA, 497 bp, Arabidopsis thaliana
  unsure at all n locations
  Clone ID: LIB22-014-Q1-E1-H7
atgtttnaggcgccgtacggtananaatccgggtcgacccacgcgtccgctgaccttcttccactgtcatattctcttcaggcgacttctcattgacctctcctaacgactctctctgttctttggccatggtgttggtttataatcaagctctcttgctcgcattcttcgcattgcttggattccagtactttcctttactcaccgaagcaggttgtccattggactttacttcatctaacttcactctagtggcttccgtatgctcgaacaacaccgagagagctaaatgctgccgctacatgaatgctttcgttgcaatatctgtcgcccgctatgcaaactacacagctgatcttggagttacatcagatttgactgaaatctgtatcactactatctctagaaccatggagctttatggaatcccaagaaatgctaccatcttctgtggattagggaccaagattcttgttaactatgattgtgagggtctg

SEQ ID NO: 4967 - DNA, 473 bp, Arabidopsis thaliana
  unsure at all n locations
  Clone ID: LIB22-014-Q1-E1-H8
gaagacctaactcttaacgaacttttagataaaagcttataactgagagagacatagatcgacaaaagtctctataccttcttgtaacgtggtggttaattaatcatggccgatcaaatctccggcgagaagccggccggagttaatagattcgctcttcaatgtgctatcgtcgcctccatcgtctccatcatctttggttacgatactggtgttatgagtggagcgatggtgtttatagaagaagatttgaagacaaacgacgttcaaatagaagttctcactgggaattctcaaccttttgtgcccttgtcggattnattgctcgccgggaagaacgtccggacaataaaccgggaccgggcggttacaacaaatccgtccttnggcctcaataacaattcaaggtttagggcccnaanaattgaanggggttgggggtccggaaatttacccgggttcccccaaacccg

SEQ ID NO: 4968 - DNA, 471 bp, Arabidopsis thaliana
  unsure at all n locations
  Clone ID: LIB22-014-Q1-E1-H9
tgnacggcccggtccaaaacaanccgggtcnagccacgcgtccgatcttnatcatttgttcttctgttggtggtggngatctaagttttcaaaagaatcgattttgccaagtgggttcttcttgataacctttcttcttctttgaaatgggttcttctgtggagcagaacattcttgttactggtggtgctggctttatcgggacgcatactgttgttcaacttctcaaagatggttttaaggtttcgatcatcgataattttgataactctgttatcgaagctgttgatagagttagggagcttgttggtcctgatctctccaagaagctcgacttcaatctgggtgatctaagaaacaaaggggacattgagaaactaatcctcaagcaaanatttgatccgtgaatcaatttgcgggtcctaaaactgtggttaagaattgttgaaacctccgcgcacttgacataac

SEQ ID NO: 4969 - DNA, 424 bp, Arabidopsis thaliana
  unsure at all n locations
  Clone ID: LIB22-015-Q1-E1-A10
gnaattttttctaaacaacaaatccagcatcgagaaaagtttctatttttggattttccaaatattaacagttatagcttcgtgacttcaagaaatatccatttcaagattatttaacctttttttgtctagcaagtcatcgtattctactttgttgttgcaaatgggaagttcatgtttacctccagggttccggtttcatcctacggatgaagaactcatcgaatattacttgaaaagaaaagtcgaaggtctcgagattgagcttgaagtcattcccgtcatcgatctttatagtttcgatccttgggagttaccaagacaagtcgtttctcccaaaccgggacatggaatggtacttcttctgctcaangggacaaaaaatatcctaatgggtttcgtacaaatcgaaggaacaaaaggn

SEQ ID NO: 4970 - DNA, 425 bp, Arabidopsis thaliana
  unsure at all n locations
  Clone ID: LIB22-015-Q1-E1-B11
gcggaaaccacagcgacggacggacggacggacgataaaacttttgcctctaatttgctcctacaaatctggaatcagccggagcgaatctcgaagcttatgatctcgacttgctgaagaggctgggaatggctggtaaagaggagactgatgtatctgcacaagggtctttaaccagggaggccactgagatatggaggagtgagttggaatctcgccggtttcaggtagatagtttagaagctgaacttgtggatgtcaaggcttaccttgagtttggctcagaagaagatgccagaaaggagttaggagttctttcgggtaaggtcagatcgactgcaactatgttgcgttatttgagatnaaaaagctanaatccttgggcaatcctgatgatctaacaaatgtgtcatgcngtgtggaaa

SEQ ID NO: 4971 - DNA, 411 bp, Arabidopsis thaliana
  unsure at all n locations
  Clone ID: LIB22-015-Q1-E1-B12
gntctcttctctttgcgcagtcaatttgctacaacttagaaaatggcggcggctacttcatccatcgctccttctctttcatgcccatctccttcttcttcatccaaaaccctttggtcttccaaagccagaaccttggctctacccaatatcggtttcctctcgtcttcttccaagtctctgaggtcgcttactgccaccgtcgctggaaatggcgccactggatcctcccttgccgctcgcatggtttcttcgtctgcggtcaaagcccctgtttctctcgattttgagacatctgtcttcaaaaangagaaagtttctcttgctggttacgaaagagtacattgtgagaaganggaaaaaacttgttcaagcatctccaagatgctttcaaggggattaancagattg

SEQ ID NO: 4972 - DNA, 420 bp, Arabidopsis thaliana
  unsure at all n locations
  Clone ID: LIB22-015-Q1-E1-B9
tcgaaaaatcagatttttccagatcaatcagagagttagagatggagtataataacaacaatcagcaatctttttggcagttcagcgaccagctgagagttcagacaccgaatctagcgaatctgtctctcaacgactcgatctggagcacaaactctgtcttcaaagagcgtcgaaacttagacatagccgccaccaccgacaagaacaacaaccagatcgactattatcagaagaagacaacttccgacaacatcaattccaactggaactggaagtcttctggttcaaacaacgacatgggtttaggattcggacctgtgggttcaaaatccaccgtcgatttaaacccaatcgacaaattcaactcancgttcaacgacacgtgggaaattcaactcagtcaacgttaacgttaac

SEQ ID NO: 4973 - DNA, 417 bp, Arabidopsis thaliana
  unsure at all n locations
  Clone ID: LIB22-015-Q1-E1-D10
gantgagaaaccctagatttcaattcccaacaccttaattttgttcgacaaacccaagaagattcgatgggtaagaacgattttctaaccccaaaggcgattgcgaatcgaattaaagccaaaggacttcaaaagcttcgatggtattgtcagatgtgtcagaaacaatgccgagacgagaatggattcaagtgtcattgtatgagcgaatctcaccagaggcagatgcaagtttttgggcagaatccgactcgtgttgtcgatggttactctgaagaattcgagcagacgtttctcgatctgatgaggcggagccaccgtttctctcgtatcgctgccactgttgtctacaatgagtatattaacgatagacatcatgttcacatgaattcgacggagttggcgacttgacggatt

SEQ ID NO: 4974 - DNA, 426 bp, Arabidopsis thaliana
  unsure at all n locations
  Clone ID: LIB22-015-Q1-E1-D11
gcttcttcctcctgatttgactctctcgagtctcgtcgatttcctccgggaggagacttgaaattcgtgactttccgattgtgaattccccgatggatctgcctagcctcgctttaatcgttggcgcggctgctttcagtcccaatcctgacgagcgcagagctgctgagcagagccttaatcagttgcagcacactccacagcatttgataaggatattgcaaataattgttgatggtggctctgatctttctgtacgccaatctgctagtatccatttcaagaatttcattgctaagcactgggaacctcattctggtgaccaagaacataatcttgccaagtgataagaatgttgtcaggaancaagattcctgtaatttgtcctcaaagtgccccganttttgagagttaanatggggaaga

SEQ ID NO: 4975 - DNA, 426 bp, Arabidopsis thaliana
  unsure at all n locations
  Clone ID: LIB22-015-Q1-E1-D9
gctcaaaaccctctcaaaaattccaaaacataatctcatttctcaagtttaacattttcgagcccctttagaacagtggagaaagatccacacagataaaaaaacgggtgagttttatatcaaatagacgaaaatgcccctgtcggcgacggcggatacaagcaagacggtgaagctggagaggtacaatagctacctccggaagattcacagcaccaaagttctcaacgcttcttctaaagttcttttccgagcaacgcttctcgtagctcttgtcctcgtcctcatcttcgccatcaactaccctccactctccgatagccgcgccgccgcagcacaccanctccaacgtcgtagcttcttatccaacgggactcctctcctcctcctcntcttcctctctatcggtggagccgcgtgggaaaa

SEQ ID NO: 4976 - DNA, 507 bp, Arabidopsis thaliana
  unsure at all n locations
  Clone ID: LIB22-014-Q1-E1-H1
acgtnttctgccgcccggtccganatacccgggtcgncccacgcgtccggcagtgacgaatccagatgaagtagcggacgaagttctcgccttgacagaaatgagtgtgagaaaccataccgagaggaggaaactaggttactttacttgcggaacaggaaaccctatcgacgattgttggcgatgtgaccccaattggcacaagaaccgtaaacgcctagcggattgcggtatcggatttggaagaaacgcgatcggtggtcgtgatggacgattctacgtagtcactgacccaagagacgacaatccggttaaccctagaccggggactttacgtcacgccgtgattcaagaccgaccactatggattcgttttcaaacgtgacaaggtgattcaactaaaacaaagagcctaacgttaacaatttcaaaacgatncaaggacctngcgcaaacttcaacaatgctaaacggtgggtgcatcaccaatcaattttgtgacnaatg

SEQ ID NO: 4977 - DNA, 436 bp, Arabidopsis thaliana
  unsure at all n locations
  Clone ID: LIB22-013-Q1-E1-H12
ggagaagagaaggtaagaatactatgaacatcatgcttaccaacgtccttgacgctgcagccggtggtctcttctattatctgtttggctacgcctttgcctttggatctccgtccaatggtttcatcggtaaacactactttggtctcaaagacatccccacggcctctgctgactactccaactttctctaccaatgggcctttgcaatcgctgcggctggaatcacaagtggctcgatcgctgaacggacacagttcgtggcttacctaatctattcctctttcttaaccgggtttgtttacccggtcgtctctcactggttctggtcagttgatggatgggccagcccgttccgtaccgatggagatttgcttttcaacaccggagcgatagatttcgctgggtccggtgttggtcaaaanggccgaggtat

SEQ ID NO: 4978 - DNA, 515 bp, Arabidopsis thaliana
  unsure at all n locations
  Clone ID: LIB22-013-Q1-E1-H3
ngttagcttgccgtaccggtccaaaattcacgggtcnacccacgcgtccgangtggtccaagggagccttggcatgacattcactcccgtcttgaaggtccaattgcttgggatgtcatgtacaacttcgagcagagatggagcaagcagggtggtaaagacattctggttaagttgagagatcttagtgatattattatcaccccttctcctgttatgttccaagaggaccacgatgtgtggaatgtccaattgtttaggtccattgatggaggagctgctgctgggtttcccgagtcgcctgaagctgctgcggaagccgggcttgtaagtgggaaagataacatcattgataggagtatccaagatgcttacattcatgcaatcagacttctaaggattcatcctacnttnaaaacaantacttcccttgggaattccttttgccttgggcaaccgatgggaattaactccctgaaggacatcnatgcccctgcaacnttaatcccaaaaag

SEQ ID NO: 4979 - DNA, 505 bp, Arabidopsis thaliana
  unsure at all n locations
  Clone ID: LIB22-013-Q1-E1-H4
ctgtttagttgcncgtgccgtccanagatcaangggtcnacncacgcgtccgggcaccaccaagagagccaaagccaagtactctctgctcttaaaaccctaacgtatctgcgataaaccctcgcgcctttgctaaaatagctgcctttatataacttagccgccactttaattctcgaaagtcatgttctttcacttttcttcgctggttcttcttcgcgctctctcttcttgccatggttggatttcccgctaatcaagcaaaaaccgttgaagaagagctacctttgcaagtcgtagccgatcaagaccccaaggtaaaaactttcaaggactcttttgatttcccttccatcgattcctttccggatttcgattctatcacttggcctgagataaaccgggaacgttgaggatttaanaatagaagataccggccttggattcctttgngttacaacatgggggaaacctccagaaanagttggtaaccggtaaccangtt

SEQ ID NO: 4980 - DNA, 435 bp, Arabidopsis thaliana
  unsure at all n locations
  Clone ID: LIB22-013-Q1-E1-H5
cctcaagtgtttttgggggaaattgatttcgttgagaaaaaccctaaattccgaacttgaagcaatttttcaatttcgtttgcagaaaaatggcaaaggataatgaagcaatcgccattaacgatgcggttcacaagcttcagctctatatgctcgaaaataccactgatcagaaccagctcttcgcggcgaggaagttaatgtctcgatcagattacgaagatgtcgtcactgaacgagcaatcgctaagctctgtggttatactctttgccagagatttctcccttccgatgtttctagaagagggaagtatcggatttcgttgaaggacataaggtttacnatttacaggagacgagcaaanttttgctcgcctggtggttnaattgatancaaaacntttccgggaattgcaaaaggccctanattggatt

SEQ ID NO: 4981 - DNA, 447 bp, Arabidopsis thaliana
  unsure at all n locations
  Clone ID: LIB22-013-Q1-E1-H7
gggaatcgcttcccgaagcttccaacattctcttgtttctcctttgtctctcaatttcagtttcctatattatacgcttgtattaatcaccagtatacattttgtcgtttctgggtctggaaccctagtagttattatagcatccatcgctttcttcaatcgccgtccatcagagtttcaagggatttgctttaaagatcaatcctttcctaagaaaatagcgacaattcatcagcttttcctttcccatccttcattaccttaacttactcgagattcatcttccagctgaaattgtgaaacttcgtttctgggtttttatcagaaaacactctgtgactattgtgtggtgatcgaggaaagaaaaaagatggttggtggtggaacaggagagatganggatcnatgccnatcaanaaaacaacttgttggcngctttggaaaact

SEQ ID NO: 4982 - DNA, 455 bp, Arabidopsis thaliana
  unsure at all n locations
  Clone ID: LIB22-014-Q1-E1-A1
gcgnacgcgtgggggctgttacgtgtgccaaaaatctcagcaagtttgagaatcggcaactaatgcttccaagttagcttttgaaaaatatgtcttctcgaaaacctccaagaccaatgctcgcacagaagctgagatcacactgttggagagtaatattgttgtctataagtttgcccaggacctgcatttctttgttactggaggtgaaaatgaaaacgagctcgtcttatcatctgttcttcaaggcttttttgatgctgttgcgttacttctgaggaacaatgttgaaaagatggaagcccttgaaaacttggatctcatctttttgtgccttgatgagatggttgatnaagggatggtacttgaaacagacgccaatgttattgcngggaaagtnacaatgcaaaacgcaaaaacaagtgggtcantcnccgaacaaacattaactcaag

SEQ ID NO: 4983 - DNA, 534 bp, Arabidopsis thaliana
  unsure at all n locations
  Clone ID: LIB22-014-Q1-E1-A3
ggncggacgtntcggacacacaacgggtgcgcggcccgcgtccgccaacgngtccgcccacgcgtccgcccacgcgtccgcaactttcagccaacaaaattagggtttcaagctgagattttctacttctgttacacaaaaatacccaatgagtaaagcttcggtgatcctatacattacggtaggaatcctggtgctcttcctcgtctcttattcaccgaagaagaagggtgaccacgatcaccaccatggtggtcacaatcaacatcaccgcttaaaactccggtcttctttcaatttcaaacccactcgtcacgatccagttccgtttgatcctcttgtcgccgacatggagcgccgccgcnagggataagggagtgggaagcgacaagttcatttgaagcattcctcaaccccgggagcttgtcctcctcaattcctcaagaaaagaaaacaacccgggtgggtgggnccattgaaacatggcaacctgggtcaacgaaatccgcaanccctgaagttgggaaanaaatt

SEQ ID NO: 4984 - DNA, 486 bp, Arabidopsis thaliana
  unsure at all n locations
  Clone ID: LIB22-014-Q1-E1-A4
gngtgaggttccttcgctttactttaaggaggattttgctcttgaggacggagctacatttcgttctgcttgccctttctcgagccttaatgagaatctagcgcttcaagagaagttgtcacagtatcttgatgtggtggagctgcatcttgtgaaggagatctctgtgaggtctgattcgttttttgaggctcaaggacagttacaggatttgaatgtgaagattgttgaagggttgtagtaggattcgtgagttgaaaagagactattcggctcctggataaggaatttggtagattcaactcgacaagattcaaagaactgaactcaactaaggattaatatgcctgggaacctgcaaacgttaaattaaagaacttaaattttggtangtttaaaccaaagctcctctcctggcaactcaaaaattgccttggtttgcccttccgcaaaanttgttcctgggaaccttttgggaaaaaaaac

SEQ ID NO: 4985 - DNA, 487 bp, Arabidopsis thaliana
  unsure at all n locations
  Clone ID: LIB22-014-Q1-E1-A8
cgtaccggtaaataattcccgggncccccacgcgtccggtagcgagggccttgcacgaaaccaaaccgccccccgccccaatcaagtaccagttgcttcgcagcgcgggtagcctacttaggttaggagggcattgcccctcagttcttactaacctccggtgtgtaatcaacatgttgctagcttcaactcggttgaataagaatcattgattctctctcctgtccatttcttattcattcanggcgctcggccggtgctcctttctcaaancaaaacgactctgaacgttanggaagataagaccacctgagcgaaccgatcaaagggacttgacttatccgaaccgaacgatagcagcttaaacttaaagctaagcctctcacgagcagcgtcgctgcncnggggaggatcatctcaaagtatggggcaaaggatnaagcgcttttactttgtctcccgggatcaacacaggttgggttgaaaa

SEQ ID NO: 4986 - DNA, 437 bp, Arabidopsis thaliana
  unsure at all n locations
  Clone ID: LIB22-014-Q1-E1-A9
taccggtcanaatcccgggncnacccacgcgtccgacacgcgtccgaanaggagaaaatccattgacgccctaacaanaagacgcccggcgaagtgtattcgtcactttctctaagtttcctgtnaacccancccactcaaacganatnnnnnnnnnnnnnnnnnnnnnnnnnnnnnnnnnnnnnnnnnnnnnnnnnnnnnnnnnnnnnnnnnnnnnnnnnnnnnnnnnnnnnnnnnnnnnnnnnnngtggcggaccggttttgtggttttttatttgaacattcccgatcttgccctgagttccacgatcagtttctttaaaccctangttttacacaancattcngtttctccagattatcgcagactccttcgttctattccttggaagtttgtaaaaggnaattccggtaaattaggggttgnccggtgtccc

SEQ ID NO: 4987 - DNA, 476 bp, Arabidopsis thaliana
  unsure at all n locations
  Clone ID: LIB22-014-Q1-E1-B11
ctgccgncggtacagacaaaggggccagcncgcgtccgcactcngagactctcacaaaatagaaacacaagatcgttaaaaagcttttagctccagatctgtggaaccgccatagctatggagttttatagaagttctagaagattacaaattcttggatctgtgattcttctgctctctattcatgtcgctcactctttttaccttcctggtgttgctcctcaggatttcgaaaagggagatgaattgaaagtgaaagtaaacaagttgacatctataaagactcagcttccatattcgtattactctcttcctttttgtcgtcctaagaagattgtggacagtactgagaatcttggtgaagttcttcgtggtgaccgaatcgaaaatgctccttaatcgtttaaaatgcgtgaggngcaaatgttgtaatgttctcngtccgtgttaagcntgatgcaaaagtctgccaaagc

SEQ ID NO: 4988 - DNA, 486 bp, Arabidopsis thaliana
  unsure at all n locations
  Clone ID: LIB22-014-Q1-E1-B12
cttctacttcgtacgnccccggtccannncancccgggtccacncacgcgtccgnacacncgtccggtaacggatctgtacttaatggtcacttgagacttccttacgctaccaaatgggacgcttcttanttctatcttaagctaagatggaacataccctgtggnccaaacagtgtgattacattcccgggagctgtttggttaaagccatggtactggtggtcatggcctgttcttccactaggtttctcatggcacgagcagcgtcgcgccactatagggtactcagccgaaatgcctttggttataatccaagcaatgttttaccttggaatcatagtggttacacgactanctcgtcctaacataaccaagctatgttatcnccgctctgaccgcaacttaacaacgattcaagctggttttaagttgatcgcgcttctctctgtaattgcaacctacatcctcncattcctcaacatcc

SEQ ID NO: 4989 - DNA, 501 bp, Arabidopsis thaliana
  unsure at all n locations
  Clone ID: LIB22-014-Q1-E1-B2
gcgagtccgacaanacccgggnggcggccacgcgtccggcantacaaaaacccttcactactctttctcagagtctcaagcatcattttcccgagaaaactatgaattcaaacattttcccaccatcgaaacaacaaaacgagcttaataatatacannaatccttctcaaatctccaatctcaatgctccaatttactcctcaacgtttcacaaacccttaatcctctcttcaacgccaacacgaacaacaacaaacctaatatattctctgctctcaattcgtttcgtgatcaagctaagcaagctttagattctagaatctctcgattcaattctggtaaggcacctgtctgggcgagaatttctgacgacggtggtggtgcgagggctcaggtgacgggttccgattcgcggaagccggaaaagnttaacctggctgatggctaatggaggagaagattgggcgggaagtttccngtttaagcngttggagttaatt

SEQ ID NO: 4990 - DNA, 479 bp, Arabidopsis thaliana
  unsure at all n locations
  Clone ID: LIB22-013-Q1-E1-H11
gntcgtaccggataaaattcccgggccnacccacgcgtcananaaaaacagggtttgggatgatgcggctcccaaacaatcgaaattggacttcacggattccatcgatgaaaatgggaacaatgatcatgtagatattgtggctgctgaccanggagaaagtatgatggacaaggaagaggttttcagcagtgatagtgaaagtgaagatgatgacgaaccaggaagtgatgagaagcctgctcaggctaagaaaaagggatggttttcttctgttttccagagtattactgggaaagcgaatcttgaaaggacagaccttggaccggcgttgaaagctctgaaggaacggctcatgaccaagaatgtggcanaaganattgctganaagctttgcgaatccantggnaactantccttgaaaggaaanaaatttgtccatcctttcaccaggatntcttcaaaccgtttcaaggaan

SEQ ID NO: 4991 - DNA, 461 bp, Arabidopsis thaliana
  unsure at all n locations
  Clone ID: LIB22-013-Q1-E1-F7
gcacacgcgtccgcagtagcagaggcacctaagcttgctgaagaggaagaggcaccaaagcccaaagccaagaaccctcttgacttgctaccaccaagccctatggttctagatgattggaagaggctttactcaaacaccaaatctaacttccgcgaggttgctattaaaggattctgggacatgtatgacccagagggatactcactatggttctgtgactacaagtacaacgatgagaacatggtgtcatttgtcacgctcaacaaggttggtgggttccttcagcgtatggacttggcacgtaaatactcctttggaaagatgctgatttgtgggtcagagggtccgttcaaggtgaaagggtttatggctgttccgttggaccanagatccaaaggttcataatgggacgaaggtgtacgacatggagctgtatgaattggactaaaggntgatat

SEQ ID NO: 4992 - DNA, 453 bp, Arabidopsis thaliana
  unsure at all n locations
  Clone ID: LIB22-013-Q1-E1-F8
gctcccctgctaagctaaccactgcacgtttccatagagaggaaagatgagtctctctccgagagattttctctctatcatcttatcttcttccgtgtaatgctctgagccaaaacccaataactaaatcaacaacaatatagaagagaagagaaagatcttatctttcttctcattcttgagtttagtcccccacaatggcgattcggaaggaggaagaaagtagagaagaacagagcaattcgtttcttcttgatgctctctactgcnaagaagagaaatgggacgatgaaggagaagaagttgangaaaactcttccttgtcttcttcntcttctccaattcgttgtttttgcaacaangatttgttctgggaaagatgaagatttgggttnnacccttctccaaaagaagaagaacaaaggactcaagctgttctcgatgaaggtttan

SEQ ID NO: 4993 - DNA, 514 bp, Arabidopsis thaliana
  unsure at all n locations
  Clone ID: LIB22-013-Q1-E1-G1
gtccagaatcangggtccacccacgcgtccgcaaaaacactttccttttcctctcatcaagaaactccctaatccgacgtcgttcgttttaattcagtgacacaatctcccacatcttcaaaccctttgaaaccagcgnnnnnnnnnnnnnnnnnnnnnnnnnnnnnnnnnnnnnnnnnnnnnnnnnnnnnnnnnnnnnnnnnnnnnnnnnnnnnnnnnnnnnnnnnnntcttccatgacagaagcatcacacttggaacgcttatgggatttagtttcactgcaactatgccgatgccatttagagcctcttcacgccgccacgtgtcaccttccgtcgcaatctcacgagcttctagctccaatgcaaagacgcaaccaccaagaagaaaagcgtcctcccttcaaaattccggtgaacctgaanccggatccgccggccgttaaatnggtgggcgggttttggccgaagaatgacnaatgaacgaangcccgcccggaaattggaatccaa

SEQ ID NO: 4994 - DNA, 438 bp, Arabidopsis thaliana
  unsure at all n locations
  Clone ID: LIB22-013-Q1-E1-G10
ggtcacctattttgagttatggacacacaaggccaaaacatgtgtgtcgggcgtgcgacccatcaacctactagcaatgggggagaaaacatagcatgtcgcaacanaagcttgattcgaggcgtcagcaaaacactgccgtctgttcccttcagtcccttagcgccccgggacgggagtgggggacggctctacgcgcaggcaacagcagcaccggctccacgaagtctgaatcgaatctttctgttggctttcccaaattcattcgtaaatcaaaatcaaagggctagaagcgagcgcttctagctgcttcgcctgcttcttcttattatggcggccatgttggcgtggcgaaaatgaacgaaaagcgagatgaacgtgctattttcaaatcggattgatagattgatcgttctgatagatctaaagagtanaaat

SEQ ID NO: 4995 - DNA, 441 bp, Arabidopsis thaliana
  unsure at all n locations
  Clone ID: LIB22-013-Q1-E1-G11
gcacgacgtcatggttttcagggactttaacctcagaattcgagctggacatagccaagctcttgtgggcgcgagtgggtcagggaagagttctgtaattgcgatgatcgagcggttttacgaccctcttgctggaaaagtcatgattgatggcaaagacatccgccggctaaacctgaaatctctaaggctcgaaatcggtcttgttcaacaagaaccagctctcttcgcagcaacgatcttcgacaacatcgcctatggtaaagatggtgcaactgaatccgaggtaattgatgcagctcgagccgcaaatgctcacggtttcatcagtggtttacctgaaggttacaaaactccagtaggcgaaagangagtgcagttatcangtggacagaaacagaggatcgcgatagcaagagctgtgctcaagaancctacaat

SEQ ID NO: 4996 - DNA, 482 bp, Arabidopsis thaliana
  unsure at all n locations
  Clone ID: LIB22-013-Q1-E1-G2
ngcccggtccaccaaattaacgggtccacncacgcgtccgaattccnttttatttctccctttactttttttataatcgcaaaaacaaatttcaatagttcttgtaagcgcaacgtgtaagtagagacatacacacatttgtagtgttttgttttgtataataacatcatcgcatatagagaaaagaagttaagacgaccgtatatatcgttttgaaaaccgggtcggataaaaaaaaaccggtttctttaaccgagtcggcgcgcatggagctatgcaatcaaaacaatcacatcaccgccgtctcgggcgatccgttgaactggaacgcgacggccgaagctttgaaagggaaccacctggatgaggtgaaacgaatggtgaaagagtatangaaaagaagcggtgaagttangaggtgagactttgacgattggtcaagttaccgccgttgctaaaagaagaagaggatctacngtggg

SEQ ID NO: 4997 - DNA, 470 bp, Arabidopsis thaliana
  unsure at all n locations
  Clone ID: LIB22-013-Q1-E1-G3
gtcnacccacgcgtccgcaccggtgatcgtctttcctttacctcgccgaccttctccgtcttctcaattacgatctatcatcaccagaatccgttttctctcttttaactccgatacaaaacttccgataatcccaaataaacgttacgaatttcagactcttttttccagtttctgtttgaattcgatttcgaaggattagattctccgttctactgagacgttagaagaattgtggctgttgtcgactgcaaggagagcgcttactttaattgctgatttcatgagacgagatggctttctttaggaactactcaaacgatactgtgtcacataatgttcttgatgaaaatgaggagcggcaaaatgctgctactttcagagttcaccttgaatgaagatgttggatggtacttanantgaagaagctttacatgaacaagggcgttcagtaacaaagtgaccanaac

SEQ ID NO: 4998 - DNA, 510 bp, Arabidopsis thaliana
  unsure at all n locations
  Clone ID: LIB22-013-Q1-E1-G4
ctgtctacctgntcgtgccggtccacaaataacgggtccacccacgcgtccgcatttcncctttcctcagctcacggtgagtctctggaacggattgtactaatctcattattttcccggtttcagaacgatttctggaacattcattccacactctgagaagaaacatgagtcacccgagaaatgcagatgatatattttctgagttctttggggtctctagaccttctggtccttctggtcccagaaatgcggatgatatatattctgagttctttggggtctctagcccttctggtccaagaaataaggatgatatattttctgagttctttgaggtctctaacccttctgggtccgagagataaggatgatatatctgctgaatactttggggtccctaacccttctgggcaatggcaacaattggaggcaganaaaggaagaagtggtggtggtggcacaatgcatcacggtgggagctaaggaaggcanctccctgttgaaaaa

SEQ ID NO: 4999 - DNA, 416 bp, Arabidopsis thaliana
  unsure at all n locations
  Clone ID: LIB22-013-Q1-E1-G6
gcaatggatcccgcttcttcttcttcctcaaatcagcgcaaccgaatcgtctcttctggggaaagaccagtgatggctgataatggcgtccaacaggtttctcacgacgatggaaggaacattgtttcttcgtcttatagttcttccgtggttccttctcctgatcccgctccttattataacgttcttcaaacccctaccaatctctatcactacgattgggatatcgcaaattctggctatgcacaaggcatcaatacttgggatggatatccacgatatgctactactacccctgaagccatgcatgtgccaccggttgtctacaatgacaattcatctcttatgtaccaatatcctggttatggattaacccttatccttctgtaatgttggagggacaaattcaantctcc

SEQ ID NO: 5000 - DNA, 459 bp, Arabidopsis thaliana
  unsure at all n locations
  Clone ID: LIB22-013-Q1-E1-G8
gatccaagatgagtatgattggcctcgagttcaagacactgacagttcatgttctgatgaagttgttagtgcccgtgagtctctctctagtgacgaagacattactgaagatattgggtatatgagtgaggtttcatgtacagttgagagagacgacggtagtagttcaagacgaatcaccaatgctactatctctacacttaattccgagtcatcagattcagattcttcagatgagagtgaagtggtacaggtctttcaatcttctgctactccggatgtgaatagtacttatccagccagttcatctattccccggacagaagaggattttgtgacgtggcaagcgtattaacccgtctagacgcccgtgcgttgctgactcaagaagtggacctcctaattcctccatcccaaggcaattaaatccggagggatagaacatgttcntgccgctga

SEQ ID NO: 5001 - DNA, 440 bp, Arabidopsis thaliana
  Clone ID: LIB22-013-Q1-E1-G9
gctttttttcgagattcagctgtaaaaccctaactagcgccatagccaaggaagctttcctcagatcgtctctccgaaattttccggttaatcgtcagttaaggggaaaattaggctatggcgatgttaggtgcacagcaagttccagcagcagcttgtactccagatatggttgggaatgcttttgtgccccagtattatcacatattgcatcaatcacctgagcatgttcacagattttaccaagagattagcaagttaggtcgtcctgaagagaatggtttaatgagcatcacttctaccttgcaagctattgacaagaagataatggcgcttggttacggtgtaatcagtgcagagatagctactgtggacacacaagaatctcatggaggtggttatattgtactggtgactggggtatttgacgggaaaagaca

SEQ ID NO: 5002 - DNA, 527 bp, Arabidopsis thaliana
  unsure at all n locations
  Clone ID: LIB22-013-Q1-E1-H1
gtgccggtccanaaattcangggtcnacccacgcgtccganacgggcaagttaaacccataactcccaaaatccatatcctctttaaaacatttttgtccaaataaaatgccttcttgttcggtaactgaaatttcaaaatgtatcgtctatccggagaagaagtccaccgtctccgatctccgtctctccgtctccgacctccctatgctctcatgtcattacattcaaaaaggcgtcctcctcaccagccctcctccttccttctccttcgacgaccttgtctcctctctccgccgttctctctcctccactctttccctcttccctgctttagccggccgtttctccaccactccccgccggtcacatttccattgtctgcaaacgacgcccgggagttgaatttcgttcgccgcttcggcnaaaacacggtnaaaactcctcctgaangttccccttaacaangttgaaagaanntttcctccnggcntttcccgttgaagttttttccgtccttccnaagcg

SEQ ID NO: 5003 - DNA, 467 bp, Arabidopsis thaliana
  unsure at all n locations
  Clone ID: LIB22-013-Q1-E1-H10
aatnttcctgccccacagggaaanaaatcccgggtctctctctctcgcncnccgggaaaaatcgctgtccaaatctccggtcatttctccgaggatctcttctatcaatccaacggttttgttttcatcttctcagatctcacagaacaatagtcaaagactgatgcagaagaagcgttagtacaaggtttttgttggaaagcaattgaatctgaattcatctttcattttcacgctttgatccaatttgagttctctcttccactgaatccctcatacgtaaaacctagggtttctaaattagggttctcctgaggtctgtttatagtgcgtaaagccatgtttaagaagatcatgaaaggggcaaatcgaaaagcctctaaagctgaggcgaatgattcgtcnaagtatgggtttgatcaacaaggtangtcangtcctggntcaatatgattgtaatcangcat

SEQ ID NO: 5004 - DNA, 456 bp, Arabidopsis thaliana
  unsure at all n locations
  Clone ID: LIB22-013-Q1-E1-F5
ganctctggctttctcttaaatccaccatcatgaggagaggaagaggctcttccgccgtcgccggacctaccgtcgttgccgccatcaacggatctgtaaaagaaatcagattcagaggcgtaaggaagagaccttggggacgattcgcagctgagatccgtgatccatggaaaaaagctcgtgtttggttaggtactttcgattccgccgaagaagctgctcgcgcttacgactccgccgctcgtaacctccgtggtcctaaagccaaaactaatttccccatcgattcttcttctcctcctcctcctaatctccgatttaatcagattcgtaatcaaaatcaaaaccaaagtcgatccgtttatggaccaacgggttattcaccgaccatcaacaacagtttcccgantgttaaccgggctactaagtagcaagcatgancaacaccgttgatc

SEQ ID NO: 5005 - DNA, 454 bp, Arabidopsis thaliana
  unsure at all n locations
  Clone ID: LIB22-013-Q1-E1-D8
gcncacgcgtccggtcatctcttttctcgtattgcaaattttaagtttgttcttgtttattctcttgagtgaattagaggtatgttttgagtgttctcatatggagtgtgttggagataggagcttcgatccaagcaaaggggaaaagtgttggcttcatgaggcttcgatgcagccttaaacgctaaaatccaggccaagcaagatggagatagagagagatgatgggcaaatcaggttcgcagcagctgctgatggatgagaagatatatgttgcagtggggagtgacttggggaacaagtccactcttgtttgggcgatacagaacactggaggcaaggagttctgtatcgtccaacgttcaccaaccactctacagaaaagaaaanggaaaagacacaaaagattctggacaaatacctacaaaaatgcaagcaaatgcaagtctgtgct

SEQ ID NO: 5006 - DNA, 443 bp, Arabidopsis thaliana
  unsure at all n locations
  Clone ID: LIB22-013-Q1-E1-E12
gcnaacctctctgtatcatcttcatcttcttctcccgtaaagctctcgcgtctatggcggtcaaatgtttctctctttatctgattctggcggcgattgtaatcggcggcgtcacctccgagtacatagagtacaacacaaaaccgagaatcgtccctgagaaaatcaatgttcacttagttcctcactcacacgacgatgtaggttggcttaagaccgttgatcagtactacgtaggctccaataactccattaggggagcttgtgttcagaatgtattggattctgtaatcgcttcattgcttgatgatgaaaatagaaagtttatttatgttgaaatggctttctttcaaagatggtggaggcaacaaagcaatgctaagaaagttaaagtcaagaagcttgttgactcctggtcaacttgagttcataaatggtggaat

SEQ ID NO: 5007 - DNA, 511 bp, Arabidopsis thaliana
  unsure at all n locations
  Clone ID: LIB22-013-Q1-E1-E2
aacgtctagttgcccgtgccggtccanaaattnacgggtccacncacgcgtccgcacacgcntccgcgcatctacaatggcatcgatgatgcaaccgcagatcatactgctgaaggaagggacggacacatctcagggcaaagcgcaactagtaagcaacatcaacgcttgcactgctgttggagatgtagttcgaaccacgctcgggccacgagggatggacaaactcattcacgacgataaaggatccgtcaccatttctaacgatggtgctaccatcatgaagctcctcgacattgttcatcctgctgctaagatcctcgtcgatatcgccaaatcccaagactcccgangtgggtgatgggacaactacagtggtcntccttgcancaaaattttttgaaaggaacnaaaccatttattgaaggatggtgttcaacctcaaaatccaattaaggattancgcactgcaagcacttggcaattgccaaaggttaagaactccctgtta

SEQ ID NO: 5008 - DNA, 505 bp, Arabidopsis thaliana
  unsure at all n locations
  Clone ID: LIB22-013-Q1-E1-E3
gtagccgtccanaaatcaagggnccacccacgcgtccgcancataactctctctctctctcccacttcccacagagagacacattcatgccaagcaatgccaggtctcgtctcagtcaaaactccttccgatacaccgccgctacgtgtagccgtacnngacacgcaacctctctcaaacccgccgcgaactccgatgaagaaaacccttcctctacaccatctcgatncaaaccatcaccaaatagatncaccgggaaaaaagattccccaaccgtatcctcctccaacgcagccgtaatcgacgtcgacgattcatctctagataatccaaatttcggtcctttccttctaaaattagctcgtgacgctattgcttctggtgaaagncctaacaaagcattagattacgcgattcgaagcaactaagtccnttgagagatgttgcgnccgccgttgctccgcctaatcccggtgggtagcgatnggtggacctgttcctgatt

SEQ ID NO: 5009 - DNA, 451 bp, Arabidopsis thaliana
  unsure at all n locations
  Clone ID: LIB22-013-Q1-E1-E5
gcncacgcgtccgaaattttgcttaagaagaagttaaaaatcggggttgtgtcagcaacttacccaacaaaagacgatgaagaaattgttccttccttggactctagtgccaatcaacttctctgccagagatgtcactgttcgttgaagagcaccagcatcgatgacaacccaccttcatatacttctagtcataatcctaagatttgcacaagatagtttgagctctgtttcaaataaagaagctcatcaaggatctgacgagaactcctctggctcgtgtaatgtcagtcaaagctctgaagctgacattgtcataatgaaacaagatgttcctctagcaataatagtggaatcggtgcaatggtagaaaaggaaaccgagatccgacttcaantgagaaantcgagttccccccgagttcaaagatantctgggggatatacaagga

SEQ ID NO: 5010 - DNA, 505 bp, Arabidopsis thaliana
  unsure at all n locations
  Clone ID: LIB22-013-Q1-E1-E6
acttctgccccgntcggtacaagtccacaaattcccgggtcgacccacgcgtccgcaaaccctaaaatnnnnnnnnnnnnnnnnnnnnnnnnnnnnnnnnnnnnnnnnnnnnnnnnnnnnnnnnnnncaccgttaaacttcaatacccatttgtcatttcccccaaatctctccgatttcttaaatctaatttggatttactttgcctgtaaaaccattcgcattgttacgcatccgattttgcagttcgaaactcgagttcaacttcaatttgaggtagatttcgagaaaaagctgaagaatttcggaacaactaagattttaacggtggaattggggagtcttgaagcttatttttcctcctgggtctcttttttcttatgtggtggtgcttgagagggtttttgtatgatataaatgctctagatcagagaaaaggnctaacatgaagttatcaaatattccgcaacgctatgtaataatcctcctaactttcctcaacaca

SEQ ID NO: 5011 - DNA, 490 bp, Arabidopsis thaliana
  unsure at all n locations
  Clone ID: LIB22-013-Q1-E1-E7
gcacacgcgtccggctcttcaggcgcttcatgatctcattacttccaagagatacagagcttggcagaaaccgcttgagaagatcatgtttaagtatcttgatctttgtgttgacttgaagaggggtcgattcgctaaggatggattgattcagtatcgtattgtttgccagcaagtgaatgtcanttccttggaggaagttatcaagcacttcctacatcttgctactgacaaagctgagcaagctcggtctcaggcggatgcccttgaggaggctcttgatgttgatgaccttgannctgataggaancctgagggatttacagccaagttattgtccanttggggaaaanggggaaaaagatanggtcngaaccggttganttgggtccacccccaaggggtttaaagttnccnggtgggggaanaacnttncnnggacaactcccttgaaaatttttggcnaaanncaacctcaaanagtttggga

SEQ ID NO: 5012 - DNA, 451 bp, Arabidopsis thaliana
  unsure at all n locations
  Clone ID: LIB22-013-Q1-E1-E8
gcatcttggtaaaggcggatttagtgaagtctataaggcatatgatttggtggaccatagatatgttgcgtgcaagcttcatggtttaaatgctcagtggagtgaagaaaagaagcaaagttacatccgccatgccaacagggaatgtgagatccataaaagtcttgtgcatcaccacattgttcggctttgggataaatttcatatcgacatgcatacattctgcaccgttctggaatattgtagtgggaaagaccttgatgctgtattaaaggcaacatctaatcttcctgagaaagaagcaaggattatcattgtgcanatagttcaaggccttgtatatctgaacaaaaagtcacagaagataatccactatgatctgaagcctggtaatgttctctttgatgagtttgggagtagcaaaagtaactgattttggtccaagcaagat

SEQ ID NO: 5013 - DNA, 437 bp, Arabidopsis thaliana
  unsure at all n locations
  Clone ID: LIB22-013-Q1-E1-E9
gcncacgcgtccgcttcaccattgccactaacgacgaactctcttgtctctgaaatggaggttccaaaggagcagatcgcgactttaatagagcatgggctttacgattctgctgaaatgctcggctgctttctcgtttcttctcctactgttagtgccgaaactagtcctcagctcaaggcggagaatttgattctactgggtgatgctttatttcatcagagagaacaccggagagctattcatacgtacaagcaagcgttgcatcattacacaaggattccgaagcaaagctccggtatttcgaggagttcattatctttatctaccagatcatctgtgaatgcctcaagcatttctgctattaatgagaacgaggtgagattcaagattgcttcatctcactttgctctaatgaaacaaaagctgcaattgct

SEQ ID NO: 5014 - DNA, 441 bp, Arabidopsis thaliana
  unsure at all n locations
  Clone ID: LIB22-013-Q1-E1-F10
gaaagaatctattgggaagaatcgagtcatgattatggagtgtttgtgaaggaattaggtgttttgagaagtaaagctgatggagctaggtctagagaagaagcttttgatggacatatggctattggtagggttttatatgagcatcagttgtttaaagaagctcttgttagcttcaagagagcttgtgaattgcaaccgactgatgtgagacctcatttcaaagctgggaactgtctttacgttttggggaaatgcaaagagtcgaaagatgagtttttgttggcgttggaagctgctgagtcgggcgggaaccaatgggcttatttgcttcctcagatttatgtcaatctcggtatcgcgcttgaaggcnaaggtaatggtttgaattgcttgtgagtattannnanaaactgcaatccaagtcctaancattttaaa

SEQ ID NO: 5015 - DNA, 436 bp, Arabidopsis thaliana
  Clone ID: LIB22-013-Q1-E1-F12
cgtccgcccacgcgtccgcggacgcgtgggctttcttctttctctaaaatcttctaagaataaccattttctaaagatatcttttaacgagacaacaaacaacagaaaaacacacaaaaacacaaaacttctgtttccctgtttctccggattctctccggctctgagctttcggcttctcctctccggagatgttactctgcttccctcttttgtgttctttttgttttctgggtgaatattgtatgaacctttgactgggatttttccgaagaagaatcccagacgacgtaatttttctccaagctatggctgttgaagagatggagaagaagatcaaaggaagccaagagacgggagctacataaaaacgacttatcaatcgaagaccatctccaagatgcgtgcttgaaattccggtaatgagttcagattc

SEQ ID NO: 5016 - DNA, 456 bp, Arabidopsis thaliana
  unsure at all n locations
  Clone ID: LIB22-013-Q1-E1-F3
cggaactcattaactttactcttctcactggtcaatcgtcggagataatcgggtgatcggcgatggagaatacggacgtcttcttggggctgcatgatttcctggagcggatgcgcaaaccctccgccggcgatttcgtcaaatccattaaaagtttcattgtttcattctcgaacaatgcaccagacccggaaaaagattgtgctatggttcaggagttcttttctaagatggaggctgctttcagggctcatccactttggtctggttgttctgaggaggaattggatagtgctggagatggcctggagaagtatgttatgacaaagctatttactcgggtgtttgcttcaaacactgangangttataactgatgagaaactatttcanaagatgtcattgggtcaacaattcaattctcccgagaanttgggtatacaaccaactttcaaaa

SEQ ID NO: 5017 - DNA, 507 bp, Arabidopsis thaliana
  unsure at all n locations
  Clone ID: LIB22-013-Q1-E1-F4
ctgtctagcttgcncgtgccggtccanaattaacgggtccacncacgcgtccgcacgttctcatctttctctctaagagattttgtaggtgacaatcaaaagtttgacaaaatggtgaagtttacagctgatgagcttcgaaggattatggactacaaacacaacatccgtaatatgtctgttattgctcatgtcgaccacgggaaatccactcttactgattctttggttgctgctgctggtatcattgcccaagaggttgctggtgatgttcgtatgactgataccagagctgatgaggctgaacgtggtatcactatcaagtccactggtatttctctctactacgaagatgactgatgaatccttgaagaatttcactgggagccaagaagacggaaacgagtacctcatcaatcctgattcanctgggcacgttgacttttcctccgaagttactgctgctctccgtatactgatggtgctcctgtggtggtcgactgcant

SEQ ID NO: 5018 - DNA, 507 bp, Arabidopsis thaliana
  unsure at all n locations
  Clone ID: LIB22-013-Q1-E1-D7
acttcccccgnccgtacaagtccanaatcccgggtccacccacgcntccgaacatttatgggagacttctcaacctgcacgggtgttgcaacattcacaatgatgcttctcagccaatacgtattcaataagtatggttggggagtagctgcaaagatcaccccaactgttctgctattgactggtgttgcgttcttctctctaatattgtttggcggcccattcgcaccacttgttgccaagcttggtatgacaccgctacttgcagctgtgtatgtccgtgcccttcanaatatcctcagcaagaatgccaagtacaacttgttcnaaccttgcaaagaaatnggctatatcccattggatgaaggacaccaaggttaaangcaaaactgcgaatgacgtggtctgcaanccattaaggaaatcaagggganctttaatacancagttcaagatcntancctttgggttaccaaccaaatcaaagccctatcctaggaatgntct

SEQ ID NO: 5019 - DNA, 455 bp, Arabidopsis thaliana
  unsure at all n locations
  Clone ID: LIB22-012-Q1-E1-C3
gnaaaaacactgataacagtttccgcgccgagattncaaacactaaggcaaaaatcgtcaacaagggaacattgtcagggctatacagtttctgttaccaccaagggatcaaactcgaacctcttgcnctacgaatacatgtctcggggaagccttggcgagttacttcacggcgggaaatcacatagcatggattggccaactcggtttgctatcgcactcggtgcagcggaaggtctcgcttacttacatcatgattgtaaaccaagaatcattcaccgtgacatcaaatcgaataacattctcatcgatgaagaatttcgaagcccatgttgggagaattccgggttaacaaaagtcatccgacatgccaactatcaaaatccgttctcaanccgtttgctggattctaacggttaaatcgctcccgantttgcatncacaatgaaagttac

SEQ ID NO: 5020 - DNA, 408 bp, Arabidopsis thaliana
  unsure at all n locations
  Clone ID: LIB22-012-Q1-E1-C4
aaccaacaatgctccaacctttctcttcctcctctgttttctcgagaatcctctggactttcttggtttaagaagattcgttggngaatnagagagaaagaaagcatccatttttctatcattgcttgcttgctatggaattgggtaaatctcgattctacttatgttgcaattgcntttctcctggtagattttccgattattccttaactggnagtgattnaccaagaagccatccccaacaatttcaattggnatcctaaaccttcctcctgaagattcctcgtaattcccnattcgatgtttaanaacttnaaattcccctccaaatcctgaaacgaatttctcccaaaaatctcngnttcctcaaaaaaaaacaaaaaaacaatgttgtgtgcatcancctcg

SEQ ID NO: 5021 - DNA, 494 bp, Arabidopsis thaliana
  unsure at all n locations
  Clone ID: LIB22-012-Q1-E1-C6
acagcantctgtaccggtacntaaattcccgggcccnacacacgcgtcaaaacacgcgtccggacggagaaggtgatcgtggtcaaaaccctagaattatggagagggactcagattctatcaaagatccgatctcagagccttcatggtttacccccangggngcttntctttgtgttttgtgttgtcaacttaatcaattatatagatcgaggagctatagcaagtaatggtatcaatgggagtcgtggttcttgcacttcgagtggtacatgttttctggcancggaatacagggagatttcaacttgagcaattttgaagatggagttctgtcatctgctttcatggttgggcttcttgttgcctctcctatatttgcttccttagctaanagtgttaatccgtttaaacttancggagttgggttgtcaatctggactctcgctgtgattggctgcngtcnttcntttgatttttggtccatcacaatc

SEQ ID NO: 5022 - DNA, 481 bp, Arabidopsis thaliana
  unsure at all n locations
  Clone ID: LIB22-012-Q1-E1-C8
tagcggtaatcaatcncgggtccacacacgcgtcagaatgtcttttctctgtctcaatctcttatttttaaatattcacatacttcaattttcatggtttttattttttttatctaaaattatataatatttgatagaaaaaaaangnngattcgtataacatcatcagagataatcncaaatacacttcttcttcttctcgaaatctcagccgttcgtttgtgtttcattggctctcaatcgaagaaaacttttagcttacaaaatctgctttgagtagtattgatttttcaattcatatggaaaatcctccattagaatctgagatcaaagaggatatgtctttgaagaatcatcctccagacnaggataangacaaatacactatcatggaacaacctagtantccacgtcatcggaaggttgttgctagatggttacctgatgaagcacagangccaattatcaatgacgctcccgt

SEQ ID NO: 5023 - DNA, 427 bp, Arabidopsis thaliana
  unsure at all n locations
  Clone ID: LIB22-012-Q1-E1-C9
gctcttttgtgagctcagatctgaccagagagaaagaaacaaccggagaagaagaagatgactgaccgagtcttcccagcttccaaaccaccaaccgccactaatggagctccaccagttggttccataccacctcctccagctccggcgactgtaaccagcaacggaacaacaaacggaatggctaatcagaaacctcaagtctacattccagctaaccgtccggtttaccgtccacagccttacagtcgccgtcatcaccaccaatctcgaccaagctgccgacgaatttgctgttgttgctgtttctggtcgattctgataattctgatcttagctctcatgactgcaatcgccgccaacgcgatgtacgtgatttaacaacctcgtccgccgtcgttctccgtccgtcaataagaatcaancg

SEQ ID NO: 5024 - DNA, 432 bp, Arabidopsis thaliana
  unsure at all n locations
  Clone ID: LIB22-012-Q1-E1-D1
gaaaacgcgtccgggataaacatgccataggctgcagatgggtttataaagtgaagttaaacgcagatggaagtttagagcgttacaaggcacggttagttgccaagggttacacacagcaggagggtgttgactttgttgacactttttccccaatggcaaagatgactattgtcaaaacattgttggttgttgcagcagcaaagaaatggagtttgcatcagttggatatatcgaatgcctttttatatggcgaccttgaagaagaaatttatatgactcttcctccgggttacacaactaaagaaggcgagactcttccaacctaaatgcagtctgttaagtttccaaaatcccccnaanggttaaaacaagcctcaagacanttgtttcccgnaatttaataacacttaaagccaataagaatncaaa

SEQ ID NO: 5025 - DNA, 476 bp, Arabidopsis thaliana
  unsure at all n locations
  Clone ID: LIB22-012-Q1-E1-D11
ntaccggtccacaaatcccgggtcnacccacgcgtccgagananccgctcgcatggtcatggcagcaatggcggcggaagatgaagttgcaaaaattgcgtgagtttgtacgttcagaatatgatcactcctgtttacgctcctgtcgctcccgagctttatacgagggtctgaaggtcgctgcaacctccgatttgatgcttgcgtatctggatttcttccttggtggggatgaaaaaaggacagaccttccacctcgacttcaccaaaggtttccaatgcccatattgtttggtggtgatggcagttacatggctcctttctcacttcaaaatgacaacattcttaccagtctgatgagtcagcttggttcgcctactacttggtataanactggtggctggtgtaaatgctcaattaactcttgtncncntggcgtctgagattaacattcaatccggttctganaatgggtt

SEQ ID NO: 5026 - DNA, 505 bp, Arabidopsis thaliana
  unsure at all n locations
  Clone ID: LIB22-012-Q1-E1-D2
attnttcagcgcctacggtctttattcccgggtcnccccacgcgtccgaannaatctctcccaaagcctaaagcgatctctgcaaatctctcgcgactctctctttcaagatgcaaatcttcgtgaaaacactcactggcaagactatcactctcgaggtnggggagcnntgacaccatcgacaatgttaaggcaaagattcaggacaaggaaggcattcctccggatnagcaaagattaatattcgccggtaaacagctagaagatggncgtaccttggccgattacaacattcagaaagaatcaacccttcatttggttntccgtttaaaangtngnatngaaatccttgtcaaagactntgaatggnaaaaccattaatttgggangttnagaactctgacactattgacaacgtnaaaagcaaagattcaaggcaangnaaggatccctncgggttaagcaananacttacttttgccggttagcaacttttaagacngga

SEQ ID NO: 5027 - DNA, 483 bp, Arabidopsis thaliana
  unsure at all n locations
  Clone ID: LIB22-012-Q1-E1-D5
taccggtaacnaattcccgggnccacccacgcgtccgaaccgttaataatggctttgttgctgccggaaatttccccgtcaacgaagacggtagctttcgtcggaagaagtcgttcggacaacaagggaaacggagaatgaatcctaggacaagtttggctcagcgtgaagagatcataagaagaactgtctatgtgtctgatattgaccaacaggtcactgaggagcagcttgctggtttgtttatcggctttggacaggttgttgactgtcgtatatgtggtgatcccaactcagtacttangtttgctttcatcgagttcactgatgaagtgggtgcaaggactgctctgaatttgtctgggacgatgcttggattccatcctgtgaaagttatgccgtctaagacatctattgcancggttaanccaaccttcctgccaagggactgaagattancgtgagatgtgtgcaagaactatc

SEQ ID NO: 5028 - DNA, 486 bp, Arabidopsis thaliana
  unsure at all n locations
  Clone ID: LIB22-012-Q1-E1-D9
ttcttgccgntccctaccggtccanaaatcccgggtcnacccacgcgtccgtattactccgacaagtgccgtgtaattcctcgccctcggctactcttttctcttcttgcctctcgtctccgccgctgattcagctgccgccgacaaaggaatatggaagaaaaagatgtgtatacgcaagatggaactgttgatattcacaaaaatcctgcaaacaaggagaaaaccggaaattggaaagcttgccgcttcattctcggaaatgagtgctgtgaaagattggcctactatggcatgggcactaaccttgtgaattatcttgagagccgtctgaatcaaggcaatgctacggctgcaaataacgtcacgaattggtctggaacatgttatataactcctttgattggagccnttaaaactgatgcntaccttgggacgatattggactaatgcaacttttgtttcatcaagtctcggtaagactct

SEQ ID NO: 5029 - DNA, 488 bp, Arabidopsis thaliana
  unsure at all n locations
  Clone ID: LIB22-012-Q1-E1-E4
ntgtaccggtccacttatcccgggtccccccacgcgtccgaaaaaattcatcattagcttgaacaaatatctagaagccatgagcaataagttctctgtagggatgagatttaagatgcgttttgagggagaggattcccctgaaagaagangggntgggncggttattggtgtgaaagactgctcccctcactggaaagactcaaaatggcgatgcttagaagttcattgggatgagcctgcatcgatttcaagacccaataaggtttcaccatgggaaattgaaccgtttgtnaattcagaaaacgttcccaaatcagttatgctgaaaaacaaaaggncccgtcaagttaatgaagtatctgcacttgatgtnngcataacagcttnaaacctttggngctctgttttgncgcaaacccatgagtttgcacaatcgtgnatcaactcacagtggngttctcctcaacaatgttatcntgatgcaa

SEQ ID NO: 5030 - DNA, 498 bp, Arabidopsis thaliana
  unsure at all n locations
  Clone ID: LIB22-012-Q1-E1-E5
gtaccggtanccaaattcccgggncnacccacgcgtcngaaaaaaccaaaaatgttatttctttcaaactttctctcatcttccttcttaatattttcatcgtagccaccatcgcagccgcagcggccgttaacgccggtaccaaaggttnggattctcggccgtccaaaaccaggcgtccctggcctttcaagaagctcaacaaaccggtggttttaatgatctcttgcgacggtttccggtttggttaccaatttaaaacggacacaccaaacatcgaccttctcatatccggaggaactgaggccaaacacggtttaatcccgggttttccccacaatgacattccaaaacaactactctatcgcaaacnggactccnaccgggttaacaacgggtataatcatgaacaaagtttaaccgattccgggttacgggaaaaagngttcaacaaanggntaacaaccaaaattgggggntaaggtaaaccgctgttgg

SEQ ID NO: 5031 - DNA, 502 bp, Arabidopsis thaliana
  unsure at all n locations
  Clone ID: LIB22-012-Q1-E1-E7
cggtaccggtaaccaaattcccgggnccacccacgcgtccgaatgagatggagagagcactgcatgacgctttatgtattgtcaagaggacccttgagtccaacacggtggttgcgggtggaggtgcagttgaatcagcattgtctgtgtanctggagcaccttgctacaaccttgggctctcgcgaacaattggccatcgctgaatttgctgatgcgctattgattataccaaaggtgcttgcagtaaacgctgctaaggatgcaaccgaattggtagctaaactaagagcgtaccaccacactgcacaaaccaaggctgataagaagcactattcaagcatgggacttgacctcgttaaacnggaacatccgcaacaattttggaacctggattgatncgaaccaagctatgaaccaaanttgaaaattancantttgcaacaagaagggaanccattaacnaattccaacnaanttgacaacatgatttaaaactggtg

SEQ ID NO: 5032 - DNA, 479 bp, Arabidopsis thaliana
  unsure at all n locations
  Clone ID: LIB22-012-Q1-E1-C11
ctaccggtccaccaatcccgggtccacccacgcgtccgaacnctctctcaatccaacaaagaaaaaaaaagtcttcttctttttttacaagtctgagaattttctacagaaacaaaaatctgattgtttttcccactttgcatctgttttgnggatgccagctacggattttcaaggatcatttggaaggtcgttgctaagtttacggcgagaccaagttgactcatcaacagtcgtctccggaagtagtagccaccacgagccaagcaccatggaggttgagctagattcgtttcaaagacaagtcgctgagaaattcatcgatctcaacgcttcttcaaacgaccttctctctctcgaatggatcggaaagcttcttgattctttcctctgttgtcaagaagagtttcgagctatcgtattcaaccaccgatctcagatttccaaatcctccgatgggaccgtttgattcaaganta

SEQ ID NO: 5033 - DNA, 461 bp, Arabidopsis thaliana
  unsure at all n locations
  Clone ID: LIB22-012-Q1-E1-A1
gnaccgacaagtgncgtnntattcctccncccccggtaaccctttnccctncttgcctctcgtctccgccgctgattcagctgccgccgacaaaggaatatggaagaaaaagatgtgtatacgcaagatggaactgttgatattcacaaaaatcctgcaaacaaggagaaaaccggaaattggaaagcttgccgcttcattctcggaaatgagtgctgtgaaagattggcctactatggcatgggcactaaccttgtgaattatcttgagagccgtctgaatcaaggcaatgctacggctgcaaataacgtcacgaaattggtccgggaacaatgttatataactccctttgaattggagcccttaanncctgaatgcctaaccttggnccaaaattnggccaattgcaactttggtttcaaccaaagtcccccggnaangacccttttgacaataacaan

SEQ ID NO: 5034 - DNA, 475 bp, Arabidopsis thaliana
  unsure at all n locations
  Clone ID: LIB22-012-Q1-E1-A11
cagcggtccagaaatcccgggtcnacccacgcgtccgnatgaaagagactttgatgggacttggagaagagaaaagagaagcgataaggcaattatgtgtttggatcgatcaccatagaagtcgttgtgaatatcttgaggaggttttgtctaagaccgttgtggctcgaggccaaagaagagtgtcgcagcgaacttaaggactcagtgccatggttttggactctggtcaatcaagaagctggtggagaggtatttttggttggggacttttggtgtacttgtgttcgattttgttgcacttttatatgtttgttaacttttgttgtattttgtaagtcaaaatttttggtttattgtgggcaaagttggtggtggtttttatgggaagtcagggaataaaaggggctcacacaaatggagtttgataattttttttccttgggcgtccggattgtataaaaacgaattaaat

SEQ ID NO: 5035 - DNA, 494 bp, Arabidopsis thaliana
  unsure at all n locations
  Clone ID: LIB22-012-Q1-E1-A3
ttcttacggggtctgncggtccacgnatcccgggtccncccacgcgtccgnanagtctctcctncccggcttcgccccctcatttcctngtgagataaaggcggagtctctctccagttattttgctcatccatcgattcttagagttcaaaatggttgatcaagttcagcaccccactattgcgcagaaagctgccgggcagttcatgcgttcaagtgtttccaaggacgttcaagtgggttaccagaggccttctatgtatcaaagacatgcaacctacggaaactactccaattctgcatttcaatttcctccgacatcccggatgtttggcaacaactggcttctccccgtgntttgtccaaaccccaagagaaaaaggggtcantaactttggcccttgaanttcngaatgggtggngtttccngcngccgtttccaaaaatgntgctgntcccaatggaantgttaagcctttggttcaaaaccaagn

SEQ ID NO: 5036 - DNA, 432 bp, Arabidopsis thaliana
  unsure at all n locations
  Clone ID: LIB22-012-Q1-E1-A5
cgcccacgcgtccgctcttaactttcgtttcttctcctaccttcttttaccaacctttcctttctcttacacacatatatatatacatatatagagagagngaagaggacaaagagttgaaagatgaagactctcatgtcttcatagaaacaagtgatatgtgcgctnnnnnnnnnnnnnnnnnnnnnnnnnnnnnnnnnnnnnnnnnnnnnnnnnnnnnnnnnnnnnnnnnnnnnnnnnnnnnnnnnnnnnnnnnnnnnnnnnnnnnnnnnnnnnnnnnnnnnnnnnnnnnnnnnnnnnntgaaactttgggagcatccggtaacgnttggttcnggttcacnaccttccccaaagaattcgtttccccaaaaangnctcaactccaactaacnncattcaancacatttntnagtttctcctccttctcc

SEQ ID NO: 5037 - DNA, 441 bp, Arabidopsis thaliana
  unsure at all n locations
  Clone ID: LIB22-012-Q1-E1-A6
tcaaatccctagattgacttgctcaacggcgatttcatctcgataattagccaatgtcttcaccnnnnnnnnnnnnnnnnnnnnnnnnnnnnnnnnnnnnnnnnnnnnnnnnnnnnnnnnnnnnnnntttcaccggtgccgacgccgataccgtcacttcctgatgatttgcttgtaagtatcttcgcacgagtctccagattgtattatccgattctctctcttgtctccaagagctttagatctctcctccgttcaccggagctttacgagacacggtcactattaggccgaaccgagagttgtctgtatttgtgtttacaggagggaaatcctgatncgaancctctctggttcactctctgcatgaaacctgacnnnnnnnnnnnnnnnnnnnnnnnnnnnnnnnnnnnnnnnnnntcaagtggtaatcttttgatc

SEQ ID NO: 5038 - DNA, 447 bp, Arabidopsis thaliana
  unsure at all n locations
  Clone ID: LIB22-012-Q1-E1-A8
gaatctttagatcgaattcaagaggttccacatgaaggaccaatgtgtgatctcttatggtctgatccagatgaccgatgcggttggggaatatctcctcgtggtgcaggcnacactttcggacaagatatcgctactcagtttaaccacaccaatggactctctctgatttcaagagcacatcaacttgtcatggaaggttttaattggtgccaagaaaagaacgttgtgactgtatttagtgccccaaactattgctaccgttgtggcaacatggctgcgattctagagatcggtgagaacatggaccaaaatttccttcagtttgatccaactccacgtcaagtcgaacccgaaaccactcgcaagactccagattattttttgtaagtaccaaaagaactaaagctgcaattccacacactagctcttcgtctcttttgcttc

SEQ ID NO: 5039 - DNA, 436 bp, Arabidopsis thaliana
  unsure at all n locations
  Clone ID: LIB22-012-Q1-E1-A9
gaatcatcttcttcttcttcaaacaaaaaatgggtttcttaaagttatctccaatgatccttctcctagcaatgatcggcgtttcatatgccatggacatgtcaatcatctcctacgacgaaaaccaccacatcaccaccgagaccagccgtagcgactcggaggttgagagaatctacgaagcgtggatggtggaacacgggaagaagaagatgaatcaaaacggtcttggtgcagagaaagatcaaagattcgagatctttaaagataatcttcgtttcatcgatgaacataacaccaaaaacctcagttataaacttggtttaacccggtttgctgatttaaccaatgaggagtaccgatctaagttacttggggctaaancgaccaaagaaggtttgaaaaccaatgattcggtatcaagccntgttggtga

SEQ ID NO: 5040 - DNA, 483 bp, Arabidopsis thaliana
  unsure at all n locations
  Clone ID: LIB22-012-Q1-E1-B11
cctgcnccctaccggtccacaaatcccgggtcnacccacgcgtccgnaagacgcgtgggttcagacagtttgatatggttaatgactgctcggaccatcatttcctttcttcggataaagggttggctcagtcccaggtcacaaagagttgggtgaagaaagtccagcaagaatggagcaatttggaggcaaatcttccgaacacgatatatgtgcgtgtgtgtgaagaaaggatggaccttctgcgtgcagccctggttggtgcccctggaacgccatatcacgatgggcttttctttttcgacataatgcttccacctcaatatcctcatgagccaccaatggtacattatcattcaggtgggatgcgactgaatccgaacctgtatgagtcaggaagaatttgcttgagtctgctgaatacatggagtggctctggcactgaantatggaacgcagggagctcctccatccttcaacttc

SEQ ID NO: 5041 - DNA, 448 bp, Arabidopsis thaliana
  unsure at all n locations
  Clone ID: LIB22-012-Q1-E1-B12
gaaaacacagagaggcgagagcgacgtagggttggtgtttcgtacggattttctcggtcaatcttagtttctccggcgagagattgcttttcaggaatcatcatggtgagaaagagaagaacggatgctccatctgaaggaggtgaaggctctgggtctcgtgaagctggtccagtctcaggtggtggacgtggttcacagcgaggtggtttccagcagggaggaggacaacaccaaggtggaaggggttatactcctcaacctcaacagggaggtcgtggtggtcgtggatatgggcaaccaccacaacagcaacaacagtatggaggaccacaagaagtacaaaggaagaggaagaaggaggactcctcatcaagggaggtcaagaaggttatgccgttggcnttggaggttggnccttcttctggacaacgcaaaagacaatcaa

SEQ ID NO: 5042 - DNA, 480 bp, Arabidopsis thaliana
  unsure at all n locations
  Clone ID: LIB22-012-Q1-E1-B7
attcccgggcccacccacgcgtcnaaaaacatgggaaagtgtacgactccgttgccgagaaggaacggcgtttaactatttttgaggacaacctccgttttatcactaaccggaacgctgagaatctcagttaccggcttggnttgaatcggtttgcggatttatctctccatgaatacggagaaatttgccatggggctgatccaagacctcctaggaaccacgtcttcatgactagcagcaaccgatacaagactagtgatggtgatgttcttcctaagtccgttgactggagaaacgaaggcgcagtgactgaagtcaaagatcaaggccttttgcaggagttgttggggccttctccactgtgggaacaatgggaaggcttaacaagaattgtgactgggagaacctaataacttttgtcctgancaagaatttgattaaattgttacaanngaaaacaaatggttnccggaggag

SEQ ID NO: 5043 - DNA, 470 bp, Arabidopsis thaliana
  unsure at all n locations
  Clone ID: LIB22-012-Q1-E1-B9
canccagcggtccacaaatcccgggtcnacccacgcgtccgatcntcttcctctctctcacgcagctgctttgattaactcttcaggtccagcttaagagttttgtgaagatggtcttagtgctatacgagacagcggcggggtttgccctctttaaagttaaagatgaaggaaagatggctaacgtcgaggatttgtgtaaagagttcgacactccagactcagcacgaaagatggttaagctaaaagcttttgagaagtttgacaatacatctgaagctctcgaagctgtggctaaattgctggagggagctccaagcaaaggtctgcgcaagtttttgaaagctaattgtcaaggtgaaaccttggctgtggctgattcaaagcttgggaatgttatcaagggagaaactgaaaattgattgcantcacaacaatgctgttatggagcttcaactngggtaaaaatc

SEQ ID NO: 5044 - DNA, 454 bp, Arabidopsis thaliana
  unsure at all n locations
  Clone ID: LIB22-012-Q1-E1-C1
gnaaacgcgtccggccaacccgtccgctcaaaaaaggattagcataaccttttgtttgaaaatgaggttttccaagtctctcatcctgattaccttatcggctttggtcatttcnnttgccgaagctaatgatccaagtccacttcaagacttttgtgtggccattggcgacctcaaaaatggtgtttttgtgaatggtaagttttgcaaggatccaaagcaagcaaaggcagaagatttcttttactcaggcctcaaccaagcaggaaccactaataataaagtcaaatccaacgtgacaacagtcaatgtcgatnaagatccaagggttaaacacttgggaaaaacccttggccgcatagactaatgcgccaaaatggcaaaaacccggctcaaaaaaaacctccgtgncaatgaagattccttggtccctggttnaaggggaacaattaaa

SEQ ID NO: 5045 - DNA, 487 bp, Arabidopsis thaliana
  unsure at all n locations
  Clone ID: LIB22-012-Q1-E1-C10
cctgccggncctaccggtccnccaatcccggggccccccangcgtccggaacaagattcgcttctctccccgttgccgtccgtccccaccgctgagtgatagatcgaaacagagaaacacacacggcgaagaagatttcaccatattttgtctaagtggattcngttgagagagagagatggctatgtctcaggtggtgaacacgtacccgctttcgaactacagcttcggaactaaggaacccaagctggaaaaggacacctccgtcgccgaccggctcgctcgtatgaaaatcaactatatgaaagagggcatgaggactagcgttgaagggattctactggtgcaagaacacaaccatcctcatatacttctgctacaaattggtaacacattctgcaaacttcaagtggacgcctgaagcctggtgaaatgaactgatggtctgaaaagaaactgacaattaacttggagggaattcggtgct

SEQ ID NO: 5046 - DNA, 686 bp, Arabidopsis thaliana
  unsure at all n locations
  Clone ID: LIB22-011-Q1-K1-H8
aatccanggaagcctgtaccggnccaaaattcccgnggctcncatgcntnttaggtgcttggggaaaaagactantccgctccagaaaaagaaattaaagtcaaggggccctccccgcattctctccctaaggaccaataaataaactgacgaagtttgggccccagcattcaaatactctcccgctctgctcccgaaaatttttttaagcagacttaatactacctacactctctctctcactctcgtacaagtcatggagtgacgctggtgcgtactaacggtccacgtagagttgcgannnnnnnnnnnnnnnnnnnnnnnnnnnnnnnnnnnnnnnnnnnnnnnnnnntaacggaaaccgttagtcgtcggacctacgtcttctggtcatcgaccgcgctctcggcccacatcgcggagatcgcttcgttgccggaagaagcaaatttgctcgtataagagttaagttataagcttaatccttaccactaacggaccgttccccaataagcacatacgggcgacgatctacaacgttcccagtaacgtaaacgtttatccccgntaggcgccganangacataccccataactaagaagacttcaccatcnactagncttaaaacggagccananggtcaagtcggacacgnacgatccnataacggacactcggtcccgtt

SEQ ID NO: 5047 - DNA, 635 bp, Arabidopsis thaliana
  unsure at all n locations
  Clone ID: LIB22-011-Q1-K1-G3
gcccacgcgtncgcggacgcgtgggccgaaactttctctnctntctctctctaatgtctctatnaagaaagcttcttgttatcttcttcacatggataacagctctatccatgtcgaaaccaatcttcgtntcatccgataacatgaatttcacattcaaatccttnacaatccgtaacctcacattcctcggagattcacatctccgaaacggtgtcgttgggctcacaagagagctaggtgttcccgatacaagctccggtacagtaatctacaacaatccgatccgtttctacgatccggattcaaacaccacggcgtctttctccactcacttctccttcaccgttcaaaacttaaacccagatccaacctccgncggtgacggactcgctttcttcctctctcacgacaacgatactttaggaagtcccggtggttacttaggtctcgtcaattcctctcagccgatgaagaatcgattcggcgntatcgaatcgatacgaaantggatcctcanttcaacgatcccaatggnaatcacattgggttagatggttgataggttggactcaatctcaacnttagatcctttggttttggnttaaaatgganctcaaatctgggaaatngat

SEQ ID NO: 5048 - DNA, 686 bp, Arabidopsis thaliana
  unsure at all n locations
  Clone ID: LIB22-011-Q1-K1-G5
cgnagcaccttggttgaaactttgggctgctttatgtgcttgtttatgtgcntgtggctgttgcgggccgatagtcaccaaggtagacttgctcagagccacggaccatactaataggtcggataatcccgacggattcgtagccggagaagctgtagccgaagtttaaccacacgaggaagtacccgtcactcctaagaagcctaatccaaacgcctaggtcgctaacgcaccgtcggacaacgctaggagtaccgagtgcgtagccgagcccgtaccttgggctgaagaagacctcgcccggagttaagctgtcaaggtgtaatctagggaaggatcagctagcgacgtaaccgagcttcccacttgcgtcgacgacgttatctaccctccggaggctacatgcgctctcgaagacatcgacgctcacgacgatccggctaaacattcctcgacggccagatagaaggcgaaggatttaaggccgacagcgagtctactcacgtacacgtaaagaccgactggccaggcgagaccgaagaacctacctcgacgttaaatgccgtcaactcataatacggccggcgactgctcgcacgatgaatctctcacgangtccgtaaaaacaactcacgtgcctacactaaatcggggtaagncatttgnatatccgcgaagccgtatta

SEQ ID NO: 5049 - DNA, 684 bp, Arabidopsis thaliana
  unsure at all n locations
  Clone ID: LIB22-011-Q1-K1-G6
ngnatccccgacagcggggggggaggnaaatcncgttggntngaaacntngngctgnttagtgcntgctctcccgctttactacccctattgtcctcttcttaactatctacatcatagaccttggggnaaataataacggccggactcccggaactcgactaaatctccctaacggttattccaactgaaaaatctgatactccactcgatgatcctgacttaattgttgcagctattgaattgccattcttcttggcaatcaacggaactggagtcgacaaaggaggaggaggaggagaaagagagacggcctctggcaggaacacatatataatgctatctgtcgcaatggaattggaggccaatgacgaacctattggagacaaagaagtccacacggtcagcgcctccgtctgccattggaaaatcccggccgaatgaattaaaaattacccaggccacttccacaatccggaccctgatcacggcgtgtccggctagccataataccccctgaccaacaactccggagacttgcccaccgaaagcaatcacggcgcatatctaagattccccgaaaccggcgcgccggaccggcccgtctgntcccgggagaccganagagacgaccaccggggccataccttaacgnggnatcgaagtaatcctacggnaccccaac

SEQ ID NO: 5050 - DNA, 674 bp, Arabidopsis thaliana
  unsure at all n locations
  Clone ID: LIB22-011-Q1-K1-G7
ggcttggaanctttgggctgctttatgtgcttgtctcctcctctcttgggcttaaaaacggaactgctctcccctctctcctcttacagtctcgatgtcccttctcgttcttattactacgcctctgtcctccttctccttgatcctgaaggccctgacgtcgaagatgatgacgccctagaagaccttatcgagtcctattatctctcttgcttcttctcctcgatctagctcgagctaatggcctcggactcggatttactctttgacctcgacctcatcttcgtactcaaactcgacttctttatctagattgcgaagttcctgcttcttactcttcctgaccatcgggacgaagacgagcctgaaggaccgttggaggatgagaaactcatggagctcttggccccccttgacgatgttcttctcttcgttgacttatagatgttggactccgagctcgtcctagaaatcttagacatcgataccttgaagaagacgtaactgcatatcgcggagactgcccgtgctctcacaccgacggccatgtcactaaccatcctatcggcaaatgcgaaaacgagaattctgtcccggtccgggtccctaaacccgggtccaaagacatgaaccccgagaagaatcctagcccgtccggagccggcgaaggagaa

SEQ ID NO: 5051 - DNA, 690 bp, Arabidopsis thaliana
  unsure at all n locations
  Clone ID: LIB22-011-Q1-K1-G8
ggnaatcccaccgcaagcctnttggtnngaanctttgggctgnttatgtgcttggtgnagatctcttantgaaaaaacggtccgcagatctccccgggtcctcagggccgtcngctactcaaggactcttgccgtctaatgagggcccctccttgcggccccgaaggacccgaaacacgtcgacctatacgaacgggcgaagaccgatgggaacaaagtaattcccggcacaatggactatgtgtaggattacccaggagacgcggctcacgcggagccattcgacgcaggatacctggcgctataagggaagagccccggagtagccgaaagcgcgaaagtaatcagtgacactaacctcttagctctgggcaaggcggccgaagctaacgaggagtcgattgagcttttcggaccggcgaatctcatttgcacgaataaggacggactacaaaagccgagtcgagcgacgtaggtgaggtagagaagtcgacggacctagataagctctcaagcctcgtgaagaagaagatgttaagtatcgagtccccctcaccccccttagtacttcctcttaatccntattgtaatatagacggcggccctctaaactgaggactaaaatgagacctcttactcccgcttccggatcgaaaaccttactctctggctcttcccccctcccctacg

SEQ ID NO: 5052 - DNA, 709 bp, Arabidopsis thaliana
  unsure at all n locations
  Clone ID: LIB22-011-Q1-K1-H12
tgggcttaaattctccgggtcntcccacgcgtccggttgaagaagaaagcacctgtcttaagtgataaagattttaatcctgagtttttccaaagactagaaagaaggcaatccgtggaagtagtagttcctcgtagatgtaaaaacaatgatgaggaagaatcaggactcgatgatctcaatgccatgggatcttcaaatcgcctcaagaacacccaagcagatgataaacaggtaaaaggtaggtttgatgggaacggatcacaagcaaggacatctggtgatgataaggctggtgttgtaaacggaaaagagacacctggacatcacgctcctgtctccaatactgataaccaatctgaaggatccttcacaagtaatagaggaaattggtcagccatccagaggcagttgttgcagctagagagacaacaaacaaatcttatgaacatgctccaagagtttattggtggctcacatgacagtatggtgacccttgganggcanagtaaggggnttagaaaggattgntgaagacatggcaagagatctttcgatatcatcangtcgtanggctnatctcacagctgggtttggcaaatataatagttttgcttactatccactggaagtttaatggtcgaacttcaagggaaaagangcttacaaacagattggagctntgaaggggaaaatgtggaatcttgca

SEQ ID NO: 5053 - DNA, 651 bp, Arabidopsis thaliana
  unsure at all n locations
  Clone ID: LIB22-011-Q1-K1-H2
ttgggctgntttatgtgcttgaaaaatataatctaaatgacctatgggccctatccggaactgcccggcccctctacccttgaaacacaaaaagacggttaaagnnnnnnnnnnnnnnnnnnnnnnnnnnnnnnnnnnnnnnnnnnnnnnnnnnnnnnnnnnnnnnnnnnnnnnnnnnactggcgccaatcatggaatctctggaaattctttattattgatctaggcggtcaatcccactaagatataaatcctgaccgacagtgctaagactcctgacgcgaactttgacacttcatgcgttcctgtcggaatcggcactcttgctgccgctattgccttcaatggcgacaccttggtgccggtcaatggaagataagtctgctggcgggccctggccaataccccgttgccctacttctagatgaagaccaagcacactctagctggaaacgagacctcgtctattggagacaacaatacgactaacaactctccattggtgacgaggaactccaataatgtcccggcctgcgtcggcgctagagacgccaaaggcataattggatatcccatccaatactacagtcacgattcggttggcgtattaagtatggcagaactaaggttgggccgggataaaaggtncac

SEQ ID NO: 5054 - DNA, 659 bp, Arabidopsis thaliana
  unsure at all n locations
  Clone ID: LIB22-011-Q1-K1-H3
gattttgggatttagggtttcgcgatttggaagcggattcatggtgagtttcttgttattggncgtaattccagagaaattttggtatctatgattcatgactgcgcgattcatcttctcgaattgaaacagagagtagttgggtcggaatagctttcaacactgtagcatttgtagcattgtcttttgtaatgtattctctgattctccatggaagaaggttggtccaatcgcagaaatgcttgagtttgagtgtttcagtgcaaaatgcatttgttttgtccaattccttctcttctgctagagctgctgatgtgagcattagagatggtcgaaaagggaagaactttacagtctcttacctcgttgattcattgggtttatctaaaaagctcgcttgaatccatctcaaggaaagttagctttgaggacaagggcaatcctgattctgntctaaagtctggttaagaagttaccggntcacagattctcagatctctaccatcanttccngattatnccgntattgcntggaancagatgcctaagaaaagccntttggtccccaagccttcaaaaatctgcaatctaaaangaacctttaaacctcttgagaaccccttganaatgggttcttcnagtnccccagaaatcttaag

SEQ ID NO: 5055 - DNA, 693 bp, Arabidopsis thaliana
  unsure at all n locations
  Clone ID: LIB22-011-Q1-K1-H7
ncccccgacagcggggaggagngaagnancttggtncgaaacttgggtgctttatgtgcttggtaggtcatctattatgaggacctanacgctatantgtggccagaggaatcgccggggtaccgtattcgagcactcncttattggctagctactcgagaaaattgacgctcccgggcctggcacatccccgtcagagtctactataggaacgagagtctctgagcccggtaagctcgccagttagaaaggagtcacgtcagaacgggcgaggaagtcatataaggaaacgaaagcagaggagtcagcagattgagaatcggggataattcatgacagaacagaagccggagagacgtcataagcggtatcgtctcgtatctagccctccttagtctatagatttaaaacgctcgaagcagcctagacgtccgaaggagacggaccagtcgagagacgggtcgtcctatacgattacctataccctcattacgttaatacgctccataggatcaccattctcatcgacggtaataattaaattaaatactcggccggtcttctaggacccgaagacgaagacgacnactaagtgccagactacctgtacggaatcaccggcttaagcancaaacnccggatatagaaagaattggccccacactttacgatcctaaccccggcccgaganga

SEQ ID NO: 5056 - DNA, 609 bp, Arabidopsis thaliana
  unsure at all n locations
  Clone ID: LIB22-011-Q1-K1-G10
gcccacgcgtccgcgtgaagagagtaatgggcatcacgagactagcccatcaatcccaagctntatgcaagcaactaaatcggcgaaagcaaagctaaggcttcaaggctcaccaaagtctgcggagcaagatggaactgagaaagccactgttcccagacgtcactctctaccatctccaggtaatggtaggatcacttctcactctccaagaacaacgagactcgcaaactcaggtgacaaaaccgggaataagaaggagaaacctcttctgtcgtcccgagaaggaaacgccaagacaactccagcagagcggaagaggtgattggttccagcggaaagtgaagcctttatcgttcttgattctatagcagcgacaataccaaacatgaagaatgcaaccatcttatctatttaaaagctagagattatgagtctgtgattgtgttttgtgtgtttatgttggccaagtgttatgttggcggctaaatttctacaattgngantgtgtccgagcccgatnaagttcattacaaggntttttggatcatcttcttcttctgggttttcgnncattactttgantacttttgaagatctaaacntttt

SEQ ID NO: 5057 - DNA, 698 bp, Arabidopsis thaliana
  unsure at all n locations
  Clone ID: LIB22-011-Q1-K1-A6
tggaatcccctgttnggctcttggttgganctttgggctgnttntgtgcttgtgattccatcgatatcgacgtcggattcacgctcttacccgaatatggcgaagcccncgctccggatgacggcggcgaggcggactccgactccggaaatcatgaaaggccctcagacactaaaccaataagagataacaatactatcatcgggaaaacccactagtacgccaccgtcaaagagaggaaaggagaccacccgggaaagatcgcctaggccgccttctacgctatcgacgtaacctaagaccggactgagagagccgtggccaccttcgccgacggagaagaggacttcgtcgacgcccgtgccaccgaaccaggcggaataacaggcgacaccgaacttgtgttccccactgaggtgtccggctaacctctccattgcgcaggtttagggaaccctcgctcggcttacgctattctgcgttcgcgtccaacgccgncggcgaatagaaaatcaaatttgatatagtacancgctaaggggtcatnaggaccgggtccgattttggacactccatccgcaggaattttaaagttttccgnagacnacggggaaaggaaaaatcagtctanccccgnttcgcnttgtccgagcacactcctatcctctccacganggctttnattaccccgggtgcac

SEQ ID NO: 5058 - DNA, 670 bp, Arabidopsis thaliana
  unsure at all n locations
  Clone ID: LIB22-011-Q1-K1-A7
ggaaatccgtngcggtccanatcgcgctgcttantgcttgttaggtgcntgaatcgcaanttttanatagccaccggttgctggacctaacggangggncagtcactagagtactctgattgctggcccctcgcctcaccttaggctctggtggtgacctttattgaaaattcttaagcgatggcccttctaagtcgttcgtgctgctcaccttggtggatagttgaaaaccagcagtgaacctcatccttccctacttaactctagttgccaatgctctcgtctaagtcctttctattgtcgacccctttgtttccctagaaatcacatcgaaagagggaagaaacaatggaaaagagaaagtagagaatactgcgcggtatgagagcctgacacgtagacgtgatagataataatcctcctaataaaagggccgcgctgcccggactatcggctctagcggcctagggaaaagtatcgccgtccgcgtatcaagcaaagtaccggccgaaagagtaatccatccatatatctgatggtgataacgcttgcnatggntccaattgcgattctatccctaaagtagagtattggattgaaataccagaagaaccggcgaggngtcaancggccgtcgtnctggactaccggacagtagcccgacctcttg

SEQ ID NO: 5059 - DNA, 671 bp, Arabidopsis thaliana
  unsure at all n locations
  Clone ID: LIB22-011-Q1-K1-A9
ggaatgcataaccgaggctggaaatcggtttactgtgtgacgaaacgggatgctttccgtggcacagctcctattaacttgacggataggcttcaccaggttctccgttgggctactggctcggtggagatctttttctcccgtaacaacgctcttctcgcaagctcgaaaatgaaaatactccagagaattgcctacttaaacgtcggtatctacccgttcacatcgatcttcctcatcgtatactgtttcctaccagcgctctccctcttctctggtcagttcatcgtccagacgctcaacgtcactttcctagtctaccttctcatcatctccatcactctctgcttactggccctcctcgagatcaaatggtcaggaatctcactcgaggaatggtggagaaacgaacagttttggctcattggaggaacaagtgctcatctcgcagctgtgcttcaaggtttgctcaaagttgtagcaggagtcgaaatctcttcacgctcacgagtaaatccggaggagatgatatagacgacgagtttgcggatttgtacatggtgaaatggacttcacttatgatcccttcgattaccatcattatggngaatctgatancgaatgcggttggattcaacaggacgatttacaagtgtgggtcctcntggagt

SEQ ID NO: 5060 - DNA, 663 bp, Arabidopsis thaliana
  unsure at all n locations
  Clone ID: LIB22-011-Q1-K1-B1
gntgaaagggaaaatcttcccggtccggaattcccgggtcgacccacgcgtccggggacattgtattntgatgagaagtctgttgatgcaagtcaaggcccgatctcaacaactgnatcagttattanagggctcacgtcatttgcagcttcagaatccacaggattgaaccttncaggtgataagatagntggtctggccaaattctttctgggtgttggaattcctggtgatgccaaggacttcttcaaccaaatagatgcactagcttgtttggaagacatcaagttttctgttccactcatcttgnctcttccatccactgtcatttcattgacaaagaaagagcctctgaaggttaaagttagcactgtactgggttccgaaggcaccagctcttagtgtgaagcttacacaagctctaagttctaaagtcantggattcatctgnaattaataaccaggagcttaaagtttgacgctgacagtgcaacgtacttcctggactcctttcccaagaactttgacattggaaaatatacttttgtatttaagattgngctggatgaatcagcacatgagaaaatntncntaactgaagctcaaaccaaatgcctatagctgccacangagctattancattggaaatgcacaaattgctg

SEQ ID NO: 5061 - DNA, 660 bp, Arabidopsis thaliana
  unsure at all n locations
  Clone ID: LIB22-011-Q1-K1-B11
gcccacgcgtccgtcaaagttgaattttctcagctctcactctctttttctctctctttacttctactgtatcaagaagctccgttttgcttagccatagtgcgtctagggtttggttggtgggaagaaggttccgatcatggcgtcggtgtcgtcgtcggatcaaggacctaagacnnnnnnnnnnnnnnnnnnnnnnnnnnnnnnnnnnnnnnnnnnnnnnnnnnnnnnnnnnnnnnnnatgttgttgtatagaggttttaagaaggcgaagaaggagagaggttgtacagctaaggagcgtattagtaaaatgcctccgtgcactgctgggaaaaggagttccatataccggggagtcaccagacatagatggacaggtcgttatgaagctcacctttgggataagagtacctggaaccaaaaccagaacaagaagggaaaacaagtttatctaggagcatatgatgatgaagaggctgctgctagagcttacgaccttgctgccttaaaatattggggtcctgggacacttataaatttttccgtgactgattatccanggatttagaagaaatgccaaatctctcanggaagaatccttgctctttactagaaaagcacggttctctagggatagcgaaattcgtggactnaagc

SEQ ID NO: 5062 - DNA, 623 bp, Arabidopsis thaliana
  unsure at all n locations
  Clone ID: LIB22-011-Q1-K1-B3
ggaagaaagcttggatccagattgagagagattcagagagtcacatcaccacactccatcttcagatctcatgatttgaactattccgacgtttcggtgttggaagcaactaagtgacaaatggaatccgaaggagaaaccgcgggaaagccgatgaagaacattgttccgcagacttgccagatctgtagtgacaatgttggcaagactgttgatggagatcgttttgtggcttgtgatatttgttcattcccagtttgtcggccttgctacgagtatgagaggaaagatgggaatcaatcttgtcctcagtgcaaaaccagatacaagaggctcaaaggtagtcctgctattcctggtgataaagacgaggatggcttagctgatgaaggtactgttgagttcaactaccctcagaaggagaaaatttcagagcggatgcttggttggcatcttactcgtgggaagggagaggaaatgggggaaccccagtatgataaagaggtctntcacaatcatcttcctcgtctnacgagcagacnagatctttangagagttttctgctggctacctgaacgcctttntggatcttctactatcgcttggggaaaacgccttncta

SEQ ID NO: 5063 - DNA, 659 bp, Arabidopsis thaliana
  unsure at all n locations
  Clone ID: LIB22-011-Q1-K1-B4
acgcaactttntggttgaanctntgggctnnttatgtgcttgttatgtgcntggntaacctaacggcctacgaccacgtcatantaatcaacggnatncttangtgccgtctggtgccnttaataataaatatagcggacgctctcctggcgctagactcccccgaacctacacgtctgggcttctctgcaaataagaccggcactatcttctaaagagccggttagctcaccgataaacggccatctcatggtctataatcccgcagatcgccctagtccaacgagtccaagtccataaccttctagaaagtcaggtcacattatcatcatacatttgcccccacccggcgtgaagactagaccgtcccgtacaaccttaagcccaaagacggagacgacgcattcttcccagcgaccggacccagttgtcttctaaggacgcggtaaggatcatatccgcgcccgtatccgaccactcccctaagataataaanaagaagctagttgatgacacttgcagatgacccccatccgatcgnagaangttaagtcgaaccgagaaaaaagaacntaggaaacgtatccncagagcactgcgggaaacgtanggaagctacgaatcggaaatcccncggcggaaatatcccaagtttcggc

SEQ ID NO: 5064 - DNA, 693 bp, Arabidopsis thaliana
  unsure at all n locations
  Clone ID: LIB22-011-Q1-K1-B5
acaaggaaccacgaagctctnggttcgaanttngggctgnttagtgcttgtccaatataagactcacgttccgcttctcttcctgcagttacctccggtctcgcggtccctcctatagtttaaccaactcttgccaatattaataacaacgacgaccttccaccaatcatgagttagacccgttacggagtctatgattaagatctacgttaagtctctccgcttgaacctatgatgccgctgtctctaaagtctaattgttccgattcaccgtatgcgcccccgaagaatctggcgcggtggtccgagagtatgacgattacggcgagtgaggtcaggacttgtctgaatggcgccagagataaggtaggccccgtcgatcgtgaggagacgacggatgcactaaaggactggacgacgagcctgacggaggaatcctgtggaggaaatcacaactccgagctacatctaaatgcctacatccggtcgagtagcgcgtccataaatcatacgatacgcccagaaagcaccagcgacgctcntgctaatctcaagtaaacagctaagttataatcctgaggatccggccctcagggtaaggancggtctcagttactcccgntcntgntccggtcggtaaaagatgactccaaaaacggatacccttaactgncccttgctgcggtccatcgn

SEQ ID NO: 5065 - DNA, 632 bp, Arabidopsis thaliana
  unsure at all n locations
  Clone ID: LIB22-011-Q1-K1-B6
cccccgacagnggggaggagananacncttggttngacctttgggctgnttatgtgcttgananaacggttgcccgaagtctccntggaactaacggcgactcaactattagactacggggnagttcngaataagtccattcaattgagtgtcactataaggaagaagtaggagtagctgcaactcctgtcccttaattactccctctagagaaagaccctcctgacttggataacaaactccttcccggagaaactaagccgaattgcgcctagcccttccgcacgaggaaaactggcaaaggcgacgcagtcatcgccaatgaagtcccttctaagaactccgaagtcactaccgacttaagaattctaccctaagtcctcgcggaaacggtcgcgaggagcagaaaatagacagcgcctataggataccttctaggaggcgtaatcgtaactccagtaatagcccggcacccggagaaacatcctacatgtaacttaaacgcccattccgattctgccgcgcgataccggatcctcccgggcggcgatctcactcctanctattatccggganaaaaaaaacgggatttggctcccgngnatcccggtccaaagaactgacaccgnttc

SEQ ID NO: 5066 - DNA, 694 bp, Arabidopsis thaliana
  unsure at all n locations
  Clone ID: LIB22-011-Q1-K1-A3
tgttatttctaancggggggntgaaaggaantattccntgncttnaaattcncgggtctacccacgcgtccgctttcccgaagcggatctcttcgtctgtgtgatcggaggatctgcaagagttccttacccntacaaactcagagagagactgagagatattcgttacgcaatttattatggcttctgtaagcaaatcgaatcatctcgaagaagatgatgatgctgaagaagaggtgcaacatttcgatgatttcactctagcttcttcctgggaaaggttcatctcagacattgaagcaacttgtcgtcaatggttagctgatggtcccaaaaacctggtggaaaagggtgctgttgcagtggaggattcaaagaatctgtttacggtcaaacaccgaacttaagaatgttgcaaagagctattgtatggagttctactttcaaattgataataatggtagccaacaagctggaattggtaattggaacagtaattcacatgatctccagctttgctttggggtgaaggattttctgttgattgctccacaaagtgccagtggggtgcttcttgatacaccagagtctagcaagcttctgaatgccgttgctattgctttgnctaactgtggcaacttgtggccagcctttgtccctgtgcatgacccttnacgcaaagcatatattggaa

SEQ ID NO: 5067 - DNA, 612 bp, Arabidopsis thaliana
  unsure at all n locations
  Clone ID: LIB22-011-Q1-E1-G3
gcnnacgcgtccgcggacgcgtgggccgaaactttctcttctctctctctctaatgtctcgntcaanaaagcttcttgttatcttcttcacatggataacagctctatccatgtcnaaaccaatcttcgtatcatccgataacatgaatttcacattcaaatccttnacaatccgtaacctcacattccncggagattcacatctccgaaacggtgtcgttgggctcacaaganagctaggtgttcccgatacaagctccggtacagtaatctacaacaatccgatccgtttctacnatccggattcaaacaccacggggtctttctccactcacttctccttcancgttcanaacttanagccagatncaacctccgccggtgacngactcgctttcctcctctctcangacancnatactttaggaagtcncggtggttacttaggctcgtcaattctctaagccgattgaagaatcgattcgtcgcatcgaattcgatacgnanttggttcccatttaacgatccaannggtaatcaattggtttananttgnaatttgaccattctnacttanntctttgcttntctaaattgatccaatcnggaaat

SEQ ID NO: 5068 - DNA, 630 bp, Arabidopsis thaliana
  unsure at all n locations
  Clone ID: LIB22-011-Q1-E1-G5
aaggggggccaagggaagaangtaccggtccagaattcccgggtcgacccacgcgtccgcccacgcgtccgcggacgcgtgggttgacagctattaaggcagatccgtctagagtggnggattacatcaacaggctggacaactttgatggacctgcagttggagaagtcgcagttgaagcccaattatatgaggaagcatttgctatcttcaagaagttcaacttaaatgttcaggctgtcaatgtattgctggataatgtcaggagcattgagcgtgcagttgagtttgcattccgggtcgaagaagattctgtttgganccaagtcgctaaggcncaactcatggaaggactagtcagtgatgcaattgagtcctttatccgtgctgatgatgccactcatttcttggaggtcatacgtgtctctgaagatactgatgtctangatgacttggtcaaataccttctgatggttagacanaaggtgaaggaacccaaggttgatantgagctcatctatgcatatgcaaatattgatcggttangtgagattgaananttcagtctgatnccaaacgttgctaatcnacaacatgttggtgatcatccgtatgacgaagctctctatn

SEQ ID NO: 5069 - DNA, 691 bp, Arabidopsis thaliana
  unsure at all n locations
  Clone ID: LIB22-011-Q1-E1-G8
tgcgctcanaaattcccggggctacccacgcgtccggggagatctctccaacgaaaaaatggcttgtanactcttttgggcttctaaggttgggtctcatctaaggatctccgntgctcaacgagggttttcttccgtggttttgaangatttgaaatatgctgattcacatgaatgggtgaanattgacgggaataaagcaacctttggtataacggatcacgcgcatgaccatttaggagatgtggtctatgtgganttacctgatgtatgacattcggtgtcacaagggaagagttttggagcagttgaaagtgtgaaancaactagcgatatcaattctccantctcgggtaaggtggttgaagtcaatgatgagctgaccgantcccctggattggtgaactctagcccgtatgaacaaggatggatcataaaagttganctgagtgatgcangcgangcagagaanctgatggattcagacaagtactccaagttctgccaanaataanacgccaagcactgaactttttctattttttccaacatccttctccaancttccaancncaacacaanattgtttgttttcccaaatccaaggattaaaaaccaagatttcctccatcctttgtccccttggactgaaaattcccaacctctccgttcctccctttttttcctttca

SEQ ID NO: 5070 - DNA, 664 bp, Arabidopsis thaliana
  unsure at all n locations
  Clone ID: LIB22-011-Q1-E1-H12
aagaaagcacctgtcttaagtgataaagattttaatcctgagtttttccaaagactagaaagaaggcaatccgtggaagtagtagttcctcgtagatgtaaaaacaatgatgaggaagaatcaggactcgatgatctcaatgccatgggatcttcaaatcgcctcaagaacacccaagcagatgataaacaggtaaaaggtangtttgatgggaacggatcacaagcaatgacatctggtgatgataaggctggtgttgtaaacggaaaagagacacctggacatcacgctcctgtctccaatactgataaccaatctgaaggatccttcacaagtaatagaggaaattggtcagccatccagangcagttgttgcagctaganagacaacaaacaaatcttatgaacatgctccaaganttnattgggtggctcacatgacagtatggtgaccttggagggcaaagtaaggggtttaagaaaggattgttgaagacatggcaagagatctttcgatatcatcaggtcgtagggctaatctcacagctgggtttggcaaatataatagttttgctaactatcnaactggaaagtataatggtcaactccaagggaaagangctcacaancagatggacctatganggggaaaattttggaattc

SEQ ID NO: 5071 - DNA, 698 bp, Arabidopsis thaliana
  unsure at all n locations
  Clone ID: LIB22-011-Q1-E1-H4
ggaattttcgccgggncgtagggtccanattcncgggncnacccacgcgtccgcggangcgtgggatcagcttcaagcttaagagagcttcgagtagcgaaagcgacgatttcttctccatcgtgagagcaaatctccagagccgttttctcttcttcttcttcctcctcgcgccgtctctgaaactccatcatcgtatcaatcaaattgcttcctcctccaanttgaanaacaatggaattggattcgganaacaanttgttgaagacgggtttggttatagtggcgacacttgttatagccaaactcatcttctctttcttcacttctgattctaagaanaagcgtcttcctcctactcttaaagcttggcctcnattggttggaagtcttatcaaattcttgaaangacctattattatgcttaggagaggaataccctaagcttggaagtgtgtttactgttaatcttgttcacaaaaagattacttttcgtattggtcctgaagtctctgctcattttttcaaaagcttctgaatctgatcttagtcagcaggaantgtatcaagttcaatgtccctaanttttggtccctggaanttgttttcgangtttgaantaatccggttcgtcanggaacaatttcggttcntcactgaaggcacttanagttaacnagttgaaaggggtaagttga

SEQ ID NO: 5072 - DNA, 636 bp, Arabidopsis thaliana
  unsure at all n locations
  Clone ID: LIB22-011-Q1-E1-H5
ctctctctctctctttcctccatctctctgtgttcttcttacagacaccgagnggggcggatcctgatctgtcgnctcctttgatccaccatcaatcctccgatcaacctgaagttgttatctctatcgccgacgacgacgacgacgagtcaggactcaatcttcttccagccgttgttgaccctcgtgtttcacgaggttttgagtttgaccatcttaatccttatggctttctcagcgagtcagagcctccggttctcggtccgacgacggtggatccattccggaacaatacacctggagttagcggattgtacgaagcgattaagctcgtgatttgtcttccgattgctctgattagacttgttctctttgctgctagcttagctgttggttacttggctacaaaattggcacttgctggctggaaagataaagagaaccctatgcctctttggagatgcagaatcatgtggattactcggatctgtaccaaatgtatcctcntctcttttggctatcaatggataanaaggaaagggaaacctgctcgganaaaagattgctcccgaatggtgtatcaaatcangtttcctaaaattgaaccaatcctccnacttccaangaattatcaac

SEQ ID NO: 5073 - DNA, 642 bp, Arabidopsis thaliana
  unsure at all n locations
  Clone ID: LIB22-011-Q1-K1-A1
ttgggctgnttatgtgcttgtaagggtagcccccctccgacaccttccctaatcccttcgacacgcgatcttcgtggcaaagaaaactctaaaaagagaaaagacccatccgagcgccaacgtcggcatcggaatagaagcctctcgtaaaggacgtagctactaatcaaaggagaaaccgtggagcgtagggaagccgaggcccgtacacgaagtagacgccccgaagcggctgaatatcgatcccagtcccctccacatggttcttctaagcaacacagccggcggatccccttcctaactcgtgttcgcctatgacgccgactagagggatacacccctccctcactcccccttaggaaagtagtaaaaaatcaaggtacctaagtgggaggcagcacccgccgccgatacaagcaaaagcacgatcggaaaattctctgaggacgcaaaaaacgtgacactcatagtctcactcaagtccgacttcggagacctccctaacaccactatccctagtaacgacatcgtctcacccctgatactaacggagctagctatcctcgacgtcgccgaaagaggtaccgagcggacgaataagaatcccgctgctgtaaacggctaaatacgtctttcctttcc

SEQ ID NO: 5074 - DNA, 670 bp, Arabidopsis thaliana
  unsure at all n locations
  Clone ID: LIB22-011-Q1-K1-A10
cgtgtaagtgtagcgctattgctcctgatgatgatcagatatcatcactggagaaggctttgtctgagtgggatcacgaggactccactcggttacttgttatcattcaaggattgagggatcaatatgtggcctaccaaagaaggcgtgtgggtcaagttgatgatgatcgagttaagtttgagattagcaccgtcttaactcgcaagggaattgaaatgcaaatggcttcaggagttgacaagccagaggaagtcaagtttgcagtacctcttgtgatggatatgaacataaacaaaatggtggttggctgcccttggaagcatcagcagaagatttatcttcaggtagtatacccgattcttcggaaatatgaagcagcaccgtcagcacctcgtttgaaattagtatcatattatgatttaaaatcgctattctctgntgaggatgttaaactttctccatggatggacgggatgtgcttggctgaatatcttcccatcttgaagaaacacttgagagacagatccatgaanctggtgctgcaattgatttaaaggaggagttttattgaggcattaaagtcttaatctgggaagacctcttgaaccgatcctaccttttgncgtanggntacattccttaatgccttggacaatttactttcatg

SEQ ID NO: 5075 - DNA, 667 bp, Arabidopsis thaliana
  unsure at all n locations
  Clone ID: LIB22-011-Q1-K1-A11
cccattggcttgnaacctttgggctanccncgcntccgcaatggaggaagctcaccagctggagtcgagatccgatgacctaagtcaacggagaagctactggagatggaggaagcaggattttttcccggaattctcttttcagagcttctctacctacaaatcagctctctccgccacttgtccacgcctcgccgatcgtcttctctctcgctcttccgatgcgtacgagctcgatgcagcccgccgcgaaagcgagaaccctatgcgtcgttgtctcacttggtgggacttgctctggcttagctttggttctgttgttggttcgggtgtgttcgtgatcacgggtcangaggctcgagttggagctggtcctgctgttgttctctcctacgctatctctggtgtctctgcattgctctcagttctctgttatgctgagtttggagttgagattcctgtcgctggaggntctttctcttatcttanggttgaattgggggattttattgcctttattgctgctgggaatattcttcttgaggctatggttgggngctgctggattanggaggncatgggcttcgtatctactngnttgggcnagaangattctgatattttcggataaaagtcnattnctttgnttaagggttngaacttttgg

SEQ ID NO: 5076 - DNA, 633 bp, Arabidopsis thaliana
  unsure at all n locations
  Clone ID: LIB22-011-Q1-E1-C8
gggaaagaggaggagaaagcggcgcagagcgtggcggtgaccgtggtgacttcgggcggggnttcagcggtgnacntggnggttnccgtggccgtnatcgtggtccaagatgccgtggaatacgtggatgccgtgcctcggaagaaacgaaatgggttccagtgaccaaactatgtcntctagtggctgacaataanatatcgaanctagagcagatctatcttcattctctcccantanacgagtaccaaatcatacatcatcttgttggtcctacgttganangacgacgttatgaanatcatgcctgttcanaaacanaccatagctggtcaaatgactagattcaatgcctttgttgttgttggtgatggaaatggtcatgttggtttgggtntcaagtgttctaaggaatttgctantgccattanacgagctattaatcctgctaagctatcantggttcccgtgangataggttattgngggaataagattgggaanccacacactgtgccttgtaaaggtactggggaaatgttggtctgttactgttagaatggtcctgccccgataggtctggtattgttccgcaanggtcctaaagaaggtctcaatccccggnaatgatta

SEQ ID NO: 5077 - DNA, 428 bp, Arabidopsis thaliana
  unsure at all n locations
  Clone ID: LIB22-010-Q1-E1-G4
aagccttnggaancnnaacaagaaactnnctngggcngcngnaaaacatggtggagtagtatacattctggaacttttattgcctttgcaaaaagaaattcccttgcagcaaagagctgcagcggcttctttgttggggaagctcgtcgcacaaccaatgcatgggcctagagttgctatcacacttgtgagattccttcctgacggtcttgtatctataattcgtgatggacctggggaggctgttgtccatgcacttgagcggaccactgagactccagaacttgtgtggacaccagcaatggcagcatctttatccgcacagattgcaaccatggcatcagatatttatcgtgaacaacagaagggttctgttattgaatgggatgtaccagaacaatcantggtcaacaagaaatganagacaa

SEQ ID NO: 5078 - DNA, 443 bp, Arabidopsis thaliana
  unsure at all n locations
  Clone ID: LIB22-010-Q1-E1-G7
caaaatcttccctcaaactcagatccgattcttctaattctttgtccccccagagattcttcttctttctccaagtaaaagaaaacaactttctttctcttttcttgcgaaagtcctcaactttcaccactaaatcagcttccttcaatcactgtgtttgctttggacccagtttctgatttagcgactagggttttgattggaaccgtattaagtatatgagaatcgggttttactggtgaatcggattatcatcggaattcggaaaaagatggatcggaatcaaaagatggatcacgttatcggcggggaagtttaagttgggtaggaagcttggaagtggatcattcggtgaactttatttagggatcaatattcaaactggagaagaagtcgcagttaagctggaacctgtgaagacgangcatcctcaactgcagtat

SEQ ID NO: 5079 - DNA, 498 bp, Arabidopsis thaliana
  unsure at all n locations
  Clone ID: LIB22-010-Q1-E1-H10
gtacgccccganacggtcacgagantcncgggtcgacccaagcgtccgaaggacgcgtgggcggacgcgtgggccgcttataaactttctctcttctgaaaacagatctctctactttgcttcttcactcgacttgtatctatcatccatggcttccgagaatcntttccgaagcatattgaaggcgttagagaancctgatggtggtgaattcggtaactactacagcttacctgctttgaangatcccaggatnnataaactaccttattccattaggatagttcttgaatctgccatacgtaactgtgatgagttccaagttaagancanagatgttgagaagattcttgattgggagaatacttctcccaagcaggttgagattccgttcaancctgctcgggttcttcttcaggactttacnggngttccngcngttgttgatcttgcttgcatgaaaaatgccatgagaaaatcccggtgggaatccaanaa

SEQ ID NO: 5080 - DNA, 454 bp, Arabidopsis thaliana
  unsure at all n locations
  Clone ID: LIB22-010-Q1-E1-H12
gaangacgcgtgggttcgtcatcatcagatggagattctcgtggacctttagaagccaatggtgttcttaaggggaaagatcagaaacctcttggatctattcacgttccttctcctaatttcgatatggtttactctgtgttatctcaacgaggctattaccctgactcacctgataaggagaatcaagacacttactgcatcaaaacagagcttcaaggtaacccgaatgttcatttcttcggtgtctttgatggtcacggtgtgttgggtacgcantgttcgaattttgttaaggagaaggttgtggaaatgttgtccgaaagaaccaactccgcctnaagattcggagaaagcttaaaagtccgcctttttgaaggttaatgaanaattacaccatantgaaatcnacnattccatgaatggnactactggcaatacggtcctgttgttg

SEQ ID NO: 5081 - DNA, 454 bp, Arabidopsis thaliana
  unsure at all n locations
  Clone ID: LIB22-010-Q1-E1-H2
cgnccgagaaaaagaggtttgctgtttctgtacaacggtacagggacatgggttccgcagagaaaatgaacccctttgcagagcaagaagcttgggaggaccatcagattgaaaacgcagcattaaaatttggtgcaaagaataaggaggtctcagacaattacgagtttgtatttgaagaccaaatagacttcataaaggcatctgtgttggctggtgataattatgaagatgaaatgcatgctaaaccatctcaagattctgctgggaaatcggcttttcatatgcttcaggaggatagaaaagctctgccaatttatacatatcgtgatcaacttcttaatgctgtgaaagatcatcaggttcttatcattgtgggggaacgggttctggcaagactacacagataccccaatatcttcacgaagctggttacacaaagcttggaaanggt

SEQ ID NO: 5082 - DNA, 436 bp, Arabidopsis thaliana
  unsure at all n locations
  Clone ID: LIB22-010-Q1-E1-H5
taaangaggtttcttcttanagaaatgaatttctcttattcttccttgtcaacttggacaaccctaatgacattgggttgtcttctgcttcattcatccatttccagtgctcagctaaccccanctttctatgacaatacatgtcnaagcgtctttancatcgtacggganaccatagtaaacgagctaagatcggatcctcgtatcgctgcaagcatcnttcgtcttcacttccacgactgtttcgtcaatggctgtgatgcatcnatcctgttagacaacacaacatcctttcgaacagagaaagatgcngctccaaacncanactcggntcgangatttncagtgatcgatagaatgaaagcatcagtagagacagcatgtccaangactgtttcatgcgcagatatacttaccatcgcagctcaanaagctg

SEQ ID NO: 5083 - DNA, 485 bp, Arabidopsis thaliana
  unsure at all n locations
  Clone ID: LIB22-010-Q1-E1-H8
cccctngtcgtcaagaaaccgggtcgncccacgcgtccggnaatctccgttgaagctttccacaaatctcaaatttgtttggagactctcaaatgtatccttctctcgacgatgatttcgtctctgatttgttttgcttcgatcaaagactgatcaagaggatacctttccagattttgtgtcatatggtgtgaatttgcagcaggagccagatgaagtctttagtattggagcttctcaattggatttgtcctcgtataatggagttttgtcgctagagccagaacaggtggggcaacaagattgnnnnnnnnnnnnnnnnnnnnnnnnnnnnnnnnnnnnnnnnnnnnnnnnnnnnnnnnnnnnnnnnnnnnnnnnnnnnnnnnnngacgattgctccagaaagcgggcaaggactgggatcgtgtancagaggaggaggaactaaagcgtgtcntgaaaaggttgaaggagggagaagctaa

SEQ ID NO: 5084 - DNA, 686 bp, Arabidopsis thaliana
  unsure at all n locations
  Clone ID: LIB22-011-Q1-E1-A1
aanatggggggacggaaggggaannnncttaccgggtccgaaaattcccggggtcgacccacgcgtccgcaagggcagttttttcttgatattcctttcaactttcctgagtatgtgactcctgcggnggnagaaaatctcaaaangagaaaagatttacttgagtgttaatgctggtactggaacagaagttctctgcaaaggatgcagtcatcaactaaaggagaaattgcggagtgcagggaagttgaggtttgcatatgaagcagatgttttgaagtggtcgaacactgactttagcttttcttatacggcctcctcaagtaatatagttggtggacttttccttcaatctgcgcctgttcacgatgttgatcagagggacatattttctttctatctttttccaggaaagcagcagaaaactaaggcattcaagcgggaggtagtatttgttgttgacataagtaaaagtatgactggnaaacctctcnaggatgtaaaaaatgcgatatctacagctctatctaagcttgatnctggagattctttcaatattatcactttcagcaatgatactgctctattttcgacatcaatggagtcagtcacttctgatgctgttgaaagangcattgagtggatgaacaagaactttgtcgtcgcagatggtacaaacatgctcc

SEQ ID NO: 5085 - DNA, 612 bp, Arabidopsis thaliana
  unsure at all n locations
  Clone ID: LIB22-011-Q1-E1-A9
ggaatgcataaccgaggctggaaatcggtttactgtgtgacgaaacgggatgctttccgtggnacagctcctattaacttgacggataggcttcaccaggttctccgttgggctactggctcggtgganatctttttctcccgtaacaacgctcttctcgcaagctcgaaaatgaaaatactccagagaattgcctacttaaacgtcngtatctacccgttcacatcgatcttcctcatcgtatactgtttcctaccagcgctctccctcttctctggtcagttcatcgtccagacgctcaacgtcactttcctagtctaccttctcatcatctccatcactctctgcttactggccctcctcgagatcaaatggtcaggaatctcactcnaggaatggtggataaacgancagttttggctcattggaggaacaagtgctcatctcgcanctgtgcttcaaggtttgctcaaagttgtancangagtccaaatctccttcangctcacgaataaatccgganganatgatatataccacaatttccggatttgtacatgggngaaaatgggantttaactttatgattcctcccgaatttacaaaccantt

SEQ ID NO: 5086 - DNA, 664 bp, Arabidopsis thaliana
  unsure at all n locations
  Clone ID: LIB22-011-Q1-E1-B11
gcccacgcgtccgtcaaagttgaattttctcagctctcactctctttttctctctctttaggtctactgtatcaagaagctccgttttgcttagccatagtgcgtctagggtttggttggtgggaagaaggttccgatcatggngtcggtgtcgtcgtcngatcaaggacctaagacagaagcaggatgtancggcggaggaggaggagagagctcggagacagtggcggngagtgatcaagatgttgttgtatagaggttttaagaaggcgaagnangatagaggttgtanagctaaggagcgtattagtaanatgcctccgtgcactgctgggaaaaggagttccatataccggggagtcaccagacatagatggacaggtcgttatgaagctcacctttgggataagagtacctggaancaaaaccagancaagaatggaaancaagttnatctatgagcatatgangatnaanangctgctgctagaacttacaaccttgctgccttaaaatattggggtcctgggacacttataaattttccggngactgattaaancaanggattnanaagaaatgcanatctctnaagggaataaagaccttgcatctttacnttgaagaacatnggtttcccaagggaataacccaantgtcgtga

SEQ ID NO: 5087 - DNA, 666 bp, Arabidopsis thaliana
  unsure at all n locations
  Clone ID: LIB22-011-Q1-E1-B3
tcgcnagcctttaccggtccgaaaattcccggggtcgacccacnccgtccggaagaaagcttggntccagattgagagagattcagagagtcacatcaccacactccatcntcagatctcatgatttgaactattccgacgtttcggtgttggnagcaactaagtgacaaatggaatccgagggagaaaccgcgggaaagccgatgaagaacattgttccgcagacntgccagatctgtagtgacaatgttggcaagactgttgatggagatcgttttgtggcttgtgatatttgttcattcccagtttgtcngccttgctacgantatgagaggaaagatgggaatcaatcttgtcctcagtgcaanaccagatacaagaggctcaaaggtagtcctgctattcctggtgataaagangaggatggcttagctgatgaatgnactgttgagttcanctaccctcagaaggagaaaatttcagagcggatgcttggttggcatcctactcgtgggaagggagangaaatgggggaaccccagtatgataaagaggtctctcacaatcatcttcctcgtctcacgancagacaanatacgtcanggananttttctgccgcctcancttgaacnccgcnctgtanccttctactagcgctangggaa

SEQ ID NO: 5088 - DNA, 447 bp, Arabidopsis thaliana
  unsure at all n locations
  Clone ID: LIB22-010-Q1-E1-G11
gngatatttcaaactacaatcagctcgagacccaagacgaggctcaggaagaaaccggatggaagcttgtacatggagatgtctttaggacgcccatgaactctgggttactgtgtgtttatgtcggcacaggtgttcagattttcggtatgactcttgtgacaatgatctttgcattgctgggcttcttatctccatccaacagaggagggctcacgactgccatggttctcttatgggtattcatgggcatatttgctggttactcatcttctcgtcttcacaaaatgttcaaaagggaatgagtggaaaaagaatcacctttaagactgcattcatgtttcccggtatactcctcgcgatctcctccgtcccaacanactcatatgggggaaaacgattatccgggagcaattccctttantanaatgtttgccccnggccgtc

SEQ ID NO: 5089 - DNA, 433 bp, Arabidopsis thaliana
  unsure at all n locations
  Clone ID: LIB22-009-Q1-E1-F3
gacncgtggggtgagaatggagttgcaccggatagagcacttgacccggctgttttgtctcgtctaaaacagttttctgcaatgaataaattaaagaagatggctttaaaggtgatagctgagagcctctcagaagaagagattgcgggtttaagagcaatgtttgaggcaatggatactgataacagcggtgcaatcacttttgatgaactcaaagctggcttgagaagatatggatcaaccttgaaagacaccgagatccgagatcttatggaagcggctgatgtggacaacagcggtacaatagattacagcgagtttattgcagcgacgattcatctgaataaactagagagagaagaacatcctgtccccgcatttcaatacnttgacaaagatggnaatggttacatcanccattgatgaaccgcaa

SEQ ID NO: 5090 - DNA, 437 bp, Arabidopsis thaliana
  unsure at all n locations
  Clone ID: LIB22-009-Q1-E1-F4
acncaatatctcttccccagatcctcctctctcttcttcactcttttaacgggacacttttcactgatctattcactcactcaaatcgccgccggagctaaatcaatcaacaatgacgtcgacctacacgagattcgataccgtatttctcttttctaggttcgccggcgctaagtattcgccgttattgccgtctccgtcgtttactttatctacttccggcattcatatcagaaccaaaccgaattctcgttttcactcgattatagcatcctcctcatcttcatctgtagtcgccggaactgatagcattgagattaaatcgttgccgacgaagcctattgaanggacaaaagactgggaactaacggactccgggaagaagggtgaaaagttttcatgggaagataantaatttagccaaactgggattcagg

SEQ ID NO: 5091 - DNA, 424 bp, Arabidopsis thaliana
  unsure at all n locations
  Clone ID: LIB22-009-Q1-E1-F5
agttccattctttttcacaaagccattgtgctgttttctccatttggatcaaaatggttgctgnnnnnnnnnnnnnnnnnnnnnnnnnnnnnnnnnnnnnnnnnnnnnnnnnnnnnnnnnnnnnnnnnnnnnnnnnnnnnnnnnnnnnnnnnnnnnnnnnnnnnnnngctttggtcaaacctgaatccgagacacgaaagggcctttacttcttgtcgaatcttgaccagaacatcgccgtgattgttcgtacaatctactgtttcaaatccgaggagagagggaacgaggaagcagtccaagtgatcaagaaagctctgagtcaagttcttgttcattactatcctctcgctggacgcctcaccatcagtcctgaangtaaactcacagttgactgtaccgaagaangattgtgtttgtggaa

SEQ ID NO: 5092 - DNA, 468 bp, Arabidopsis thaliana
  unsure at all n locations
  Clone ID: LIB22-009-Q1-E1-F7
gtaccaatcngnaattcccnggtcnacccacgcgtccgaattgtgccagcagacggtgtagcgccggtctggaacagcgatgttaggttctactgtgtcaaagattcttctggaaatccaactgcttatttctactttgatccctactctcgcccttcagaaaagagagacggcgcttggatggatgaagttttttctcgtagccgagtcatggcccagaagggttcctccgttagactccctgttgctcaaatggtctgcaaccaaactccacctgttggtgacaagccaagccttatgacattccgtgaggtagagactgtgttccatgaatttggccatgctcttcagcatatgcttaccaaagaggatgaggggctagtggctggtatccgggaatatcgaatgggatgcattgaattaccgtcacagtttatggagaactggtgctaccacanggatacctta

SEQ ID NO: 5093 - DNA, 475 bp, Arabidopsis thaliana
  unsure at all n locations
  Clone ID: LIB22-009-Q1-E1-F8
tctgcccgtacggtaccaatcnnnaattngcgggtcgacccacgcgtccgnttcaagattagcctctagactaataataatcttctcaataatctccacatctttcttcaccgttgaatcgattcgactattccctgattcattcgacgatgcatcttcagatttaatggaagctccagcatatcaaaacggtcttgattgctctgttttagccaaaaacagactcttgttagcttgtgatccatcagctgttcatatagctatgactctagatccagcttacttgcgtggcacggtatctgcagtacattccatcctcaaacacacttcttgccctgaaaacatcttcttccacttcattgcttcgggtacaagtcagggttccctcgccaagaccctatcctctgtttttccttccttgagtttcaaagtctatanctttgaagaaacaaggtcaagatctaatctcttcttc

SEQ ID NO: 5094 - DNA, 489 bp, Arabidopsis thaliana
  unsure at all n locations
  Clone ID: LIB22-009-Q1-E1-F9
tacngcctccacaattcccaaggtccacccacgcgtccgaaattaaaagcttcaggtgcagttttagtagcaaagcttgttacgggttctatggcttatgatgatatctggttcgggggacggactaggaatccatggaatatcgaggaattctctaccgggtcatcagctggacccgctgcatccacatcggctggtatggttccttttgctataggctcggagacagcaggctcaatgacataccctgcagcgcggtgtggcataacagcattgcgtccgacatttgggagcgttggtagaaccggagtgatgagcatatccgagagcctggataagctgggaaccttcctntaaaaaacaaccggatnccccgttaatcctgacccatccaanggaaagattcccaatgatntcccaaccaaaaaaattncctttgaanattccctccccgttgatatcacaaaactcacaattgggtntacaaaa

SEQ ID NO: 5095 - DNA, 467 bp, Arabidopsis thaliana
  unsure at all n locations
  Clone ID: LIB22-009-Q1-E1-G1
catacgggtccagcacgcgtccgaaaatatctgaatgaacagggtttcaatattgtcggctacgggtgcactacatgcatcgggaattctggggaaattaatgaatcagtgggagctgctattaccgaaaatgacattgtggcggctgctgtgctatccggtaacaggaactttgaggggcgtgttcatccactaacaagagccaattaccttgcatctcctccgttggtggttgcctatgctcttgctggcacggttaacattgactttgaaacggagcctattggcaaangaaagaatggcaaggacgtcttcttaagagatatctggccaaccacggnaagaaaattgctgaagttgttcaatccaagtgttttgccctgacatgtttccgaanaaacttcgaantcaatcaaccaaagggtaaaccccaagtttggaataaacctgtccggttcctganaaaa

SEQ ID NO: 5096 - DNA, 481 bp, Arabidopsis thaliana
  unsure at all n locations
  Clone ID: LIB22-009-Q1-E1-G10
tccaaggtcnacccaggcgtccgantcatctncttcttcttcaaacaaaaaatgggtttcttaaagttatctccaatgatccttctcctagcaatgatcggcgtttcatatgccatggacatgtcaatcatctcctacgacgaaaaccaccacatcaccaccgagaccagccgtagcgactcggaggttgagagaatctacgaagcgtggatggtggaacacgggaagaagaagatgaatcaaaacggtcttggtgcagagaaagatcaaagattcgagatctttaaagataatcttcgtttcatcgatgaacataacaccaaaaacctcagttataaacttggtttaaaccggtttgctgaattaancaatgaaggagtacgattcaagttacctgggggcaaaacgaacaaagaaggggtttggaaaccantgatnggtancaagnccntgttggtgaagcgcttcctgaatccgttga

SEQ ID NO: 5097 - DNA, 512 bp, Arabidopsis thaliana
  unsure at all n locations
  Clone ID: LIB22-009-Q1-E1-G11
ggactcccccgcacgtacgcccacaatccaagaccactcagaccgattangctggccanacatgttttccgttgtcggaggtaaggccaggtattcgtgccgttcggctccacgatcgtgccggagaggtctacaagcacgtgagactgctcatgcggtttgtcttggagcctcgttagcgcttcgtggataatgttcattcatcactcgtgtcaatgtcggtacacgttttttatgtttgtaatgttaaggtgtcggtatacattagtcagtcatactaagccatacgataataagagatgnnnnnnnnnnnnnnnnnnnnnnnnnnnnnnnnnnnnnnnnnnnnnnnnnnnnnnnnnnnnnnnnnnnnnnnnnntgtttgaacaaaaaaaaaaaaaaagggnngncgccccaaangatncaaaacctaagtnagcnttcaatgccaagtcaaaactcctccaanaatggtcaactaaattcaaatcaactgggccgtcctttttaaaacc

SEQ ID NO: 5098 - DNA, 484 bp, Arabidopsis thaliana
  unsure at all n locations
  Clone ID: LIB22-009-Q1-E1-G12
cagaatccacagtccacccaggcgtccganctctttntccgtaggaaaggggaagcaaataaattatcgaagcccactggtttcggagctgatcggtctctatttctctcttcatacatatctcaagcagataaagttgatcggatactagaatgggaggaggatttagagttttgcatttggtgaggccattcttggcttttctgcctgaggttcagagtgctgataggaaggttccattcagagagaaggttatctacactgtcatctctctcttcatctttcttgtctgcagtcagcttcctctttatggaatccattccaccaccggtgcggattcattctattggatgcgtgtcattcctgcgtccaaaccgtggaactgtcatgganctcggtaatactcctaatgttacatccggacttgtgatgcaactcctggctggttccaaagaataatganggtgacaacaatgttcgtgag

SEQ ID NO: 5099 - DNA, 428 bp, Arabidopsis thaliana
  unsure at all n locations
  Clone ID: LIB22-009-Q1-E1-G2
ttgnttgaacaatttatctgggtttttgattctcggatctactccaagacggttttcgaaattaacaagcttttcaggaaatggatcattcatcaaatagatttggcaataatggagtggaatcgattttaccgaattacaagcttggtaaaactcttggaattgggtcttttgggaaggtgaaaatagcagagcatgttgtcacagggcataaggttgctatcaaaatccttaatcgtcgtaagatcaagaacatggagatggaagagaaagtgaggagggagattaagattctacggttgtttatgcatcctcatattattcggcagtatgaggtaatagagaccacgagtgacatttatgttgtgatggagtatgtcaagtctggagaactcctttgatataatgttgagaaaggcagattacaa

SEQ ID NO: 5100 - DNA, 438 bp, Arabidopsis thaliana
  unsure at all n locations
  Clone ID: LIB22-009-Q1-E1-G5
gaaagcatgaaaaatttcctagtttctaaaacacttttttgggataaatttatctctaagctgcttgattttctttaatatgcaggagtttgtcagactgacggtgtaacggaacgggaaaagccaaacgtgagacaaacgctggtcacggcttatgatacattgctagccccacaagtcaaaacttgtatcgaagtgtcacattttcctcaagacaacgcgcgtttcgtgaaaacgcgagtaaacggcggtggaataacaacatgtattgcaacatggtttagccaactctgcattctcctccacagacttttaaaagaacggcgtcacgaatcctttgacttacttcgcattttccaagtcgtcgcggcttcgattctttgtgggcncatgttggtgggactcctgaattatccgaagacgtacatgaacggacta

SEQ ID NO: 5101 - DNA, 445 bp, Arabidopsis thaliana
  unsure at all n locations
  Clone ID: LIB22-009-Q1-E1-G6
tcnacccacgcatccgaaaaagagacctacgagccttgggtcgaactagcagagaggtttcctgaagctaagggtattttggttaattcatacacagctctcgagccaaacggttttaaatatttcgatcgttgtccggataactacccaaccatttacccaatcgggccgatattatgctccaacgaccgtccgaatttggactcatcggaacgagatcggatcataacttggctagatgaccaacccgagtcatcggtcgtgttcctctgtttcgggagcttgaagaatctcagcgctactcagatcaacgagatagctcaagccttagagatcgttgactgcaaattcatctgggtcgtttcgaaccaacccgaaggagtacgcgagcccttacgaggctctaccacacgggttcatggaccgggtcatggatcaaggcatt

SEQ ID NO: 5102 - DNA, 476 bp, Arabidopsis thaliana
  unsure at all n locations
  Clone ID: LIB22-009-Q1-E1-F12
cngaattccaaggtccacccacgcgtccgaaaaatccntgaagaaaggatcactggctgccgaatcaaaacatgtgaagtcagttgtgaaaattgaagattctactgatgatgataatgaagaattcggctatgtgagtagcagtgactcggatatggttacaccgctttcgcggatgcatatgaagggcaagaaaagagatttaattgttgacactgatgaagagaagacctcaaagaagaaagcaaagaagcacaagaagtctctcccgaattcagatatcaaatataagcaaacaagtgcactacttgatgaactgggaancatcaaagccgtctgacagtatggttgttgataatgagttgaaatttgacgaacaagggttaaactgtnaggaaaaaattcatcacttccaagccaataaagcgtgttcctaagatnaagccagagaaantgaagaaanggaatccgtgggc

SEQ ID NO: 5103 - DNA, 479 bp, Arabidopsis thaliana
  unsure at all n locations
  Clone ID: LIB22-009-Q1-E1-D10
caattccanagtccacccaggcgtccganatgaatatctcccacctctggatatgtctcgacagcctcccactcaagagttagttgcaaaggatttgcatgcaaatgactggcgattcanacatatattccggggtcaaccacggnggcatttgctacagagtgggtggagtgtgtttgttagctccaaaaggctagttgcaggcgatgcgtttatatttctaaggggcgagaatggagaattaagagttggtgtaaggcgtgcgatgcgacaacaaggaaacgtgccgtcttctgttatatctagccatagcatgcatcttggagtactggccaccgcatggcatgccatttcacaagggacaatgtttanaatcaacacaanccaagaacaagccaacctaatttaatgntccgttccattaattatatgagtccgttaaaaataactnctccaattgnaagagaatccaaattaga

SEQ ID NO: 5104 - DNA, 448 bp, Arabidopsis thaliana
  unsure at all n locations
  Clone ID: LIB22-009-Q1-E1-D11
acgcgtncgaaactgattaatcaatgttctcttaaagattaagagagccaaaacgaagcaaattaatctgccttcaatggcttcttcagcagcagccatcgtctccggttctccatttcgttcttcaccattaatccataaccatcatgcttctcgttatgctcctggatccatctccgtcgtatctctcccccgtcaagtttcccgccgtggcctctccgttaaatcggggttgatcgagccagacggaggaaaactcatgaacctcgtagtcgaagaatcacggcggcgcntgatgaaacacgaggcggaaacggttccggcaaggnttaagctgaaccgtgtgggttcaaaaatgggtacatgtgcttaacnaaggctgggcaantccncccaaaggtttcatgaaacattaangttcctccaaaaacttaattttaacncgttc

SEQ ID NO: 5105 - DNA, 403 bp, Arabidopsis thaliana
  unsure at all n locations
  Clone ID: LIB22-009-Q1-E1-D12
nnnnnnnnnnnnnnnnnnnnnnnnnnnnnnnnnnnnnnnnnnnnnnnnnnnnnnnnnnnnnnnnnnnnnnnnnnnnnnnnnnnnnnnnnnnnnnnnnnnnnnnnnnnnnnnnnnnnnnnnnnnnnngataatgggagcctatgaaacagaanaaccaactaaanatgcggcggctctagagacacagtcgccggaagatttcgatcaaccatctccgcttcgtaaaaatcatctccgtcgcttccatcgccgccggtgtacagttcgggtgggccttacagctctctcttcttactccgtacgtttcaantcctcggaatccctcacaaatggtcatctcncatttgggcnctggtggtccaattcccnggcatgantggttaaaccaaaccgtcnggtttcc

SEQ ID NO: 5106 - DNA, 428 bp, Arabidopsis thaliana
  unsure at all n locations
  Clone ID: LIB22-009-Q1-E1-D2
ctagccagagagatgacgagcaagattctagttatcggagctacaggtctcatcggaaaagtcctcgtagaggaaagcgccaagtctggccacgccactttcgctctggttagagaagcctctctctccgatcccgttaaggcccaactcgttgagagattcaaagatctcggcgttaccatactctacggaagtttaagtgataaagagagcttagtgaaggcgattaaacaagtcgatgtcgtgatatcagctgttggtcggtttcaaactgaaattcttaatcaaaccaatatcatcgatgccatcaaagaatctggaaatgttaagagattcttaccgtcggaattggtaatgacgtggatcgtacggtagcattgagccaacgctatcaagagttcatcactaaaagctcagataaggngtgg

SEQ ID NO: 5107 - DNA, 467 bp, Arabidopsis thaliana
  unsure at all n locations
  Clone ID: LIB22-009-Q1-E1-D6
gtaccaatcttnaattcgcnggtcnacccacgcntccgngacgtggtaggaggattggtcgggggatactacgacggaggaagcaacgtcaagtttcattttccgatggcattctcaatgacaatgctaagttggagtctcattgagtatagccacaaatacaaagccatcgatgagtatgatcacatgagagatgttctcaaatggggcactgattatcttcttctcactttcaacaattctgctactcgccttgatcatatctacactcaggttggtgggggactaagagactcagaatcaccagatgatatctactgttggcaaaaaccagaagacatgtcctacgaccgtcccgtcctctcttccacttcggccgctgaccttggcgcagaagtttctgcagccttagctgctgcttcaatcgtattcactgacaaaccggactacgccaaaaagctcaaaaa

SEQ ID NO: 5108 - DNA, 409 bp, Arabidopsis thaliana
  unsure at all n locations
  Clone ID: LIB22-009-Q1-E1-D7
cggacgcgtgggactgcgtcagctcaagcaaatagctcaggaggttactcagactaatagtagtgttaatgggtggggacggcgtcctgctgccttaagagctctcagccagaggctaagcagaggcttcaatgaagctgtaaatggtttcactgatgaaggatggtcagtgataggagatagcatggatgatgtcacaatcactgtaaactcttctccagacaagctaatgggtctaaatcttacatttgccaatggctttgctcctgtaagcaatgttgttttatgcncaaaacatcaatgcttttacaagaatgttcctccggcgatcctgcttcggttctgaaggagcatangtcagaatgggctgacaacaacattgatcgtatctaacaacaacaatttaaan

SEQ ID NO: 5109 - DNA, 427 bp, Arabidopsis thaliana
  unsure at all n locations
  Clone ID: LIB22-009-Q1-E1-D8
gntgtttcgaaagattttggtttgtttgttacgtatccgcttcgtcctgaagacagtctcagttctattgcgagatcttccggtgtatcggcggatattctgcagagatataatcccggtgttaattttaactccgggaatggaatcgtttatgtgcctggaagagatccaaatggtgcatttccaccattcaaatcaagtaaacaagatggtgttggtgctggagttattgctggtatagttataggagtgattgtggctttgttgttgatcttgtttatcgtatattatgcttaccggaagaataagtcgaagggtgattcgttttcttcttctattccgttgtctactaaggctgatcatgcttcttctactantctccaaagtggaggtttgggtggtgccggagtgtctcctggcattgctg

SEQ ID NO: 5110 - DNA, 499 bp, Arabidopsis thaliana
  unsure at all n locations
  Clone ID: LIB22-009-Q1-E1-D9
gtacgtacggncctgaatccaagnccacccangcgtccgaacaaaaccaaaaaaaaaaaagagaagaagaattagcttacgtgttcatcacatctgcattacgcgcaaacgaaacagattcaaattctccggcgaagttttcttattcatcaatcaatctctggattcatcaatcatgccagagatcgagattgccgccggcagcggcgacaacaacgacgccttattcggtaaatatgagctcggaaagcttctcggatgcggcgcattcgccaaagtcttccacgcacgtgatcgtcgtaccggccaaagcgtcgccgtgaaaatcctcaacaagaaaaaactcctcacaaatccagctcctagccaacaacatcaaacgcgaagatttcaatcatgaagaagaattactcatccaaacatcgtcaaagctccacgaagttatggngacaaaatcaaaagattctcctcccaatgggatttgttaaaaggaggagaa

SEQ ID NO: 5111 - DNA, 450 bp, Arabidopsis thaliana
  unsure at all n locations
  Clone ID: LIB22-009-Q1-E1-E12
gcaacgtagccctcattnattccanagtccacccacgcgtccganctctctgctcccaaattcagaaaaaaaggaacgatttttatttccggtgaatgagaattttctctcgaatttgatcgatcacatatttcatctgtgtgttttcattttgaggatgccagcaacggaatatcaaagatcattcgggaggtcttttctgaatttacggcgagacacggcggtgaactcggttgagtcaacgacggttacccccgagttgactcagatggaagcagagcttgtttcgtttcagagaaaagttgctgagaggtttatcgatctcaatgcgtctagttgtgaagatctactgtctctcgaatgggttgggaaacntcctgaatcgtttccaatcntgtcaaagaaaaatttccggttcaatantncannaatcanccgttcaatgaatta

SEQ ID NO: 5112 - DNA, 422 bp, Arabidopsis thaliana
  unsure at all n locations
  Clone ID: LIB22-009-Q1-E1-E2
accgccacttaaggccgtctcctccgcaatctccgtaaccaaaaccaccggcatcgcctgatggggagaactaaggagcaggcaacattaactcggtatccaccctgtcctaggaatcctgctaaattcaatgatataaacaaagcactccaggaaaaaggatatggtaaggctctgaaaagaaaaccttggacgggtgtgacatgccctgtctgtcttgaggttcctcacaactcggtcgtcctcctttgttcatcttaccacaaaggatgccgtccgtacatgtgtgccacgggaaaccgtttctcaaattgtctagagcagtacaaaaaggcatatgccaaggatgagaaaagtgacaaancgccagagctattgtgcccgcnttgtaagggtcaagtgaaaaggtggancgttgtgga

SEQ ID NO: 5113 - DNA, 486 bp, Arabidopsis thaliana
  unsure at all n locations
  Clone ID: LIB22-009-Q1-E1-E3
ctgntcgccccggtcaccacnnaacgggtccngccacgcgtccgaattntaaaaccctaaatccccaaatcgggaactgagattccgattcgaagatgtcgtcgtcttctccgagtggaagcggtagtgatttgactgagagaagagggatncctgccgccaaattcatccaagatgtggagacttatctctctcagtctggtctcgattctaactctgctctcgcctttcaccaaagaaaggcttcagcaatataaagttgttgagatgaaacttcttgctcaacaaagggatnttcaggctaaaatcccaaatattgaaaagtgtttaaaaggttgttgccaacttggaaaccaaagaaaggtactgggtaaggccctcctaaactgaattttganggtgtcctgaangaataatattcacggggcctgcanttgaagacacagactccantgtgttttgtgggtttggaanctaatgtcaagc

SEQ ID NO: 5114 - DNA, 422 bp, Arabidopsis thaliana
  unsure at all n locations
  Clone ID: LIB22-009-Q1-E1-E5
ggaaaatcacattattttgttttgttttctggtccactcgttttaaactacggcgatcgattttcacggcgagaaatgtcgtcggagcttggctttgctttacttaccaccttcacggtgctcttgtcgtatttaagcttttctaatgggttactgcaacctcgtaggatttctcatggattgtccaaaagtagcaagtacttgacgagggatgagctctggttcactcaaaccttagatcactactctccatctgatcatcgcaaattcagacaggagatactatgaatatcttgaccatttacgagttcctgacggacctatcnttctcaatgatttgcggcgaanggaccnttgcaatggaatcaccaataactatattantgtgtttggcaaanaantttgatgcanggaattgttca

SEQ ID NO: 5115 - DNA, 468 bp, Arabidopsis thaliana
  unsure at all n locations
  Clone ID: LIB22-009-Q1-E1-E6
ntccgtaccaaactcaaattngcnggtcnacccacgcatccganttgcttcaatcttctctttatcgctccaccagatccaagttcgcgagatttcaagctctctancaaagttcntcacttttactctcaaagctttcatctttcattcanctacttaagctccaantatggcaggatccgcaccggaaggaacacantttgatacgcgtcagtttgaccagaggctgaatgaagttctcgatggacaggatgagttcttcacctcatatgatgaggtccatgacagctttgatgccatgggtttgcaagagaatcttcataggggtanctatgcttacngtttcgaaaagncttcngctattcaacannnaggaattgtacccttttgcaagggtcctgatgtgatccagcaggcacagtctggtnctggaaaaaccgccactttctgctctggtgtcttcancaa

SEQ ID NO: 5116 - DNA, 496 bp, Arabidopsis thaliana
  unsure at all n locations
  Clone ID: LIB22-009-Q1-E1-F11
gtagcccccacaaattccanagtccacccaggcgtccggaagaaacaaaaaaagctgaaagatgtggttttttggatcgaaaggagcatctggattctcgtctcgttcaactgcagaggaagtcacacatggtgttgatgggactggtctcactgccatagtcacaggagcatcaagtggtataggagtagagacagcgcgtgttctttcactgcgtggtgtgcatgtggttatggcggtgaggaacactgactctgggtgctaaagttaaggaagatattgtcaagcaagtccctggagctaaactcgatgtcatgggagttaagattccaactcaattcaatcctgtcaaggaaatttgcgtcctgagtncaaatctactggtcctccaatcaacctccttgatcaacaatgccgggattatggcatgtccttttaagctctctaaggacaacatccagctgcaattcccaaacaatcaattaagtcaatttct

SEQ ID NO: 5117 - DNA, 477 bp, Arabidopsis thaliana
  unsure at all n locations
  Clone ID: LIB22-009-Q1-E1-D1
ctgntcgggcccggtctggntnaacgggtcnagcacgcgtccgantcancttcttcttcttcaaacaaaaaatgggtttcttaaagttatctccaatgatccttctcctagcaatgatcggcgtttcatatgccatggacatgtcaatcatctcctacgacgaaaaccaccacatcaccaccgagaccagccgtagcgactcggaggttgagagaatctacgaagcgtggatggtggaacacgggaagaagaagatgaatcaaaacggtcttggtgcagagaaagatcaaagattcgagatctttaaagataatcttcgtttcatcgatgaacataacaccaaaaacctcagttataaacttgggttaacccggtttgctgatttaaccaatgaggagtaccgattcangttacctggtgctaaaacgancaaagaaggttttgaaaacaantgttcggtatcaaggcccntgttgg

SEQ ID NO: 5118 - DNA, 507 bp, Arabidopsis thaliana
  unsure at all n locations
  Clone ID: LIB22-009-Q1-E1-A9
ncgtaccggcccaccaattcccgngnccacccacgcgtccgaaagacgcgtgggcggacgcgtgggtgatgacgcaatcttggaggaaagaataaccgggcgatggatccacccatcgagtggcaggagttaccacaccaaatttgctcctcccaaaacccctggagttgatgatattactggagagcctctgatccaacgtaaagatgataacgctgatgttctaaagtcgaggcttgcagctttccacagtcaaactcaaccggtgattgattactacgcaaagaaggccgttctcacaaacatccaggccgagaaggctccccaagaagttacatcanaggttaaaaaagcattgtcatgatcaaagactcctcaagcaaatcatctcctccgggntanaatccaatccttttccttactaacaaagagaagaagacacatctatatnatccaactcatcctggcnggaattgacaattttttcctttaaatcccttgcgcctt

SEQ ID NO: 5119 - DNA, 455 bp, Arabidopsis thaliana
  unsure at all n locations
  Clone ID: LIB22-009-Q1-E1-B1
ggtccanaaatagacgggtcgagccacgcgtccgntctcnctccaaattccatgtctgtgtctctttcctcctccgccgtataattcgccggaaaaattatctccctttgattttcgaacacctccgcgaactatgcgcttcttttgcccttatcctccaactacttgtcggatctgcaattcttcttgtcaattcccaaccctaatcggagctaatcacacctctgctcgtttctcttctcgttagtctctgctccatctcctcctcagatttaagggatatttgcttccaatttaacaaacaaaccaagagctattcttcgttctttaatctctccgtcttgtaaagtagttttagcagtgagatacatacaaatggagacttcatggggaaaccaagcttctacgggaaataanggtcgcgtgcttcncnttgggggtctacaacggtggga

SEQ ID NO: 5120 - DNA, 460 bp, Arabidopsis thaliana
  unsure at all n locations
  Clone ID: LIB22-009-Q1-E1-B11
ccaggcgtccgnacacgcgtncgacctctctcctctctcctctctctcccccctggagagattattcattccctccaatggatctccgtcggaggcctcctaaaccaccggttaccaacaacaacaactccaacggatctttccgttcttatcagcctcgcacttccgatgacgatcatcgtcgccgggctacaacaattgctcctccaccgaaagcatccgacgcgcttcctcttccgttatatctcacaaacgccgttttcttcacgctcttcttctccgtcgcgtattacctcctccancggtggcgtgacaagatcgttacaatacgctcttcangtcgtcactatcanagaactcggcgccattaatgctcccattgcntcgtttaactanctccnaaggttttttggtaatgaatttggttaatcatttaactcaagtncctccgggtgaagcc

SEQ ID NO: 5121 - DNA, 479 bp, Arabidopsis thaliana
  unsure at all n locations
  Clone ID: LIB22-009-Q1-E1-B12
gtacgcctccacaattccaaggtcnacccangcgtccgnaaaggggaagcaaataaattatcgaagcccactggtttcggagctgatcggtctctatttctctcttcatacatatctcaagcagataaagttgatcggatactagaatgggaggaggatttagagttttgcatttggtgaggccattcttggcttttctgcctgaggttcagagtgctgataggaaggttccattcagagagaaggttatctacactgtcatctctctcttcatctttcttgtctgcagtcagcttcctctttatggaatccattccaccaccggtgcggatccattctattggatgcgtgtcattcctgcgttcaancgttgaactgtcaatggaaccccgtaataccctaatggtacatccggacttgtnaatcaactcctggctggtttcaanattaatgaaggtnacaacaatgttcctnaagga

SEQ ID NO: 5122 - DNA, 473 bp, Arabidopsis thaliana
  unsure at all n locations
  Clone ID: LIB22-009-Q1-E1-B2
cccggtcntggaaacgggtcnagcacgcgtccgaaccaatgttgttgcattcgaagcttttatagaagaagtaatctctctttttctctatttctctgtattactttctcttttttttttcgtgatggagaaaaacacaccggtgaggaaaccacacatgtcgacggcggatctactcacttggccggagaatcaaccgtttgagtctcccgccgccgtatcttctcgctccgccgccagatcgcaccagccgtcggatggaataagcaaagtcgtatttggaggacaagttacagatgaagaagttgagagcttgaacaagaggaagccttgttcaaattacaagatgaaaagaagatnacanggaatgggataatccctgtggtatgaagaaaattgatgantctgannttagcaagtggctaaattccgccaacaaaanggnaaatccaagaactttcaagcaaccaaca

SEQ ID NO: 5123 - DNA, 435 bp, Arabidopsis thaliana
  unsure at all n locations
  Clone ID: LIB22-009-Q1-E1-B4
ttaagaaaaacgtttcattcttgttttatgtgtgattgttgttctgtttttgatttgagaaacaaaaacgatggagatgatgaagattgatcctttattcgatcgtgccagtgagcttaaagctttcgatgaaacgaaaacgggtgtgaaaggactcgtcgactccggagtttcacaagttccacgcatctttcatcatccaactgtcaaattatcaaccccaaaaccacttccctcggacctgctacatctcaagacgatcccaacgatcgatctcggaggacgggacttccaggacgcgattaagcgcaataacgcgattgaagagattaaagaagcagcagcgaagtggggtttccttccaagtgattaancatggagtttccgcttgaacttcttgagaaagatgaaaaaaaggantcgtgacttccaacg

SEQ ID NO: 5124 - DNA, 300 bp, Arabidopsis thaliana
  unsure at all n locations
  Clone ID: LIB22-009-Q1-E1-B6
gtaccanactgcaaattcgcnggtccacccacgcntccgancacgtggcgtcaggctcttgtccgagaccannnnnnnnnnnnnnnnnnnnnnnnnnnnnnnnnnnnnnnnnnnnnnnnnnnnnnnnnnnnnnnnnnnnnnnnnnnnnnnnnnnnnnnnnnnnnnnnnnnnnnnnnnnnnnnnnnnnnnnnnnnnntgtctgtcaatgttttggattcnnnnnnnnnnnnnnnnnnnnnnnnnnnnnnnnnnnnnnnnnnnnnnnnnnnnnnnnnnnnnnnnnnnnnnnnnnnnngggcg

SEQ ID NO: 5125 - DNA, 471 bp, Arabidopsis thaliana
  unsure at all n locations
  Clone ID: LIB22-009-Q1-E1-B8
ttctatcntggtcgagtgggtacatactgngaattngccggccacccacgcatccnaagaaagatcaaggcagcatatcagtttttcctttatactttacttggatctctttttatgctattagctattctgttgattcttttccaaacaggaaccaccgatttacnggtattattaaccacagaatttagtgagcggcgccaaatctttctatggattgcttttttcgcctctttcgccgtcaaagtgcctatggtacnagttcatatttggttacctgaagctcatgtanaggcacctacggcaggatccgtcatcttggcaggaattcttttaaaatttggaacctacgggtttttaagattttcantacccatgtntcncgaagcgacactttgttttactcctttcanttatactttaaagcgcgantgctanaanatatacgtccttgaaccactttaagncaga

SEQ ID NO: 5126 - DNA, 425 bp, Arabidopsis thaliana
  unsure at all n locations
  Clone ID: LIB22-009-Q1-E1-B9
cnggcgtccgcacacgcgtccgaccgcgacgaatccgtcggaaaccggaatcaccatggattttcctccgacgaagcttgattatcatgtagacatgttcaatcttcagtctcattccagatttctctccttatttaaggcgcaagatggacgcatagctctaatactagaatcaacggtgtttcatccacaaggtggtggccagccgtcagacaccggtttaattgttttctccggttcggatttgaaattttccgttcaagatgttcgatngaaagacgggattgttccccaatacggggttttcnaaaggtccaatcctgaaanttggaattgatantgagaaanggaaaagaattttacttaactgnttatgaatcaanggngttaactccantccaagtttcactcacttggncacttgc

SEQ ID NO: 5127 - DNA, 492 bp, Arabidopsis thaliana
  unsure at all n locations
  Clone ID: LIB22-009-Q1-E1-C10
gtacggctccacaattcccaggtcnacccacgcgtccggttaatcgtagcaaagaactacactcagtggtgaaaatggagaatcaagagcctgatatcgagaaattgcctcgagacgatgttcctgatagagaaccagaccataagaagctcaagatttcgaccaccggccaggaaactgattcctcggctgttaccaccggcggaagcaatgtcgctgagcgtagagcgccgaaatacagacgccggaaagtcgcaatcgtgtttgcgttctgcggagtagggtatcagggaatgcaaaagaatcccggcgccaaaaccattgaaggcgagctcgaagaggctttgttccatgccggagcagtacctgatgctgatcggaacaaaccangaanttacgaattgggcacattcggctanaacggntaanggattaattccggtggganaattggttccgggccntttcaagttggttccccnggattttggg

SEQ ID NO: 5128 - DNA, 449 bp, Arabidopsis thaliana
  unsure at all n locations
  Clone ID: LIB22-009-Q1-E1-C12
tacgcctccanaaattccaaggtcnacccangcgtccgcncacgcgtccgcaccagcaacacaagttattttcaaaagatgatgcnnnnnnnnnnnnnnnnnnnnnnnnnnnnnnnnnnnnnnnnnnnnnnnnnnnnnnnnnnnnnnnnnnnnnnnnnnnnnnngtcgtattggtgttacagttgtacacgattcatcagcgtttgggaagatcaagacgcaaacgctggagtcttatgtccttattgcaacggtggattcatcgaagagattgaagattcttctaattccaccgtcgcggcgattccggcttcgactccggaagttagatcggttgaggaaacacatagatctataattagacgtcgtagatctaatcgccggacgtcctttaatccggtaatcgtcttacacggcggangaagaaggagganccggttaaaaaattt

SEQ ID NO: 5129 - DNA, 419 bp, Arabidopsis thaliana
  unsure at all n locations
  Clone ID: LIB22-009-Q1-E1-C5
naaaaagggaaaattaccagacaagagtnnnnnnnnnnnnnnnnnnnnnnnnnnnnnnnnnnnnnnnnnnnnnnnnnnnnnnnnnnnnnnngaaaatctagaagaagagaaagctacaaaaatctcaacatcgagtttccaatttggttcatgcaggtaagagttttggctacagagcaaccatgctaacttgcgccttctcccaaaatcttatccactaatctcggtaaggaaagtgatgttggcaaaatggtgaagaaaggaanttggttttctgctatcaaaagggtttttaatccanattccaaagagaanctagccaatcangaaacagagagaaagantggnaaannaanagaanaaaaaangttttngggaaactnaaggnatggggaagaccaattcaatttctcccanct

SEQ ID NO: 5130 - DNA, 437 bp, Arabidopsis thaliana
  unsure at all n locations
  Clone ID: LIB22-009-Q1-E1-C6
tctttctcctctgtctctgactcttcgcgaaaaccctaattagctttgtggtcttgttgttttcgccatggaagacgacggcaagagcagccccaagttaccgatccctgnaaagagaaatatactaatcaccantgctttgccttacgtcaacancgttcctcanctcngaaacatcatcggntgtgttctgancgctgaggtgtatgctagatactgtcgtctccgtggctataatgcgatttacatatgtggaacngatnaatatgggactgcaactgagaccanagctttgggagggagaattgcatnccnaaagganatctgtgacnagtaccatgccattcataaaagaagtttatgactgggtttgggtataanttttgacaaagtttggggcaaaattnaantccaagacaagactggggggtgtgcca

SEQ ID NO: 5131 - DNA, 483 bp, Arabidopsis thaliana
  unsure at all n locations
  Clone ID: LIB22-009-Q1-E1-C9
caaagtcnacccaggcgtccganctcgcaancttcgctcttctctttgctctctctctctcaacgcggttcagatccgagtttgggagattcaagctccctgaaaaaagccctttactctcgcttaccaactttgctccagcatggcaggatctgcaccagaaggcacacagtttgatgcacgtcagtttgaccagaaactcaatgaagtacttgagggacaagatgagttcttcacatcctatgatgatgttcatgagagctttgatgccatgggtcttcaagagaaccttctcaggggtanttatgccttaatgggttttgagaaagccttctggcaatcaacaaanaaggaaaccgccccctccggtaagggccttgangttaatcaacanggtcaattctgggaatggggaaaacaacaacttttctggcccggngttcttgcaacaaactggaantncncccttaaccaatgtcaagg

SEQ ID NO: 5132 - DNA, 439 bp, Arabidopsis thaliana
  unsure at all n locations
  Clone ID: LIB22-009-Q1-E1-A7
ttcncggggcttttgttttgaagnaaaaaagaaatccaagtcagatggaaatggatcatctgaagaaggtatgtcgaaaaaggagattgctcttcagcaagcacttgatcagattaccagttcatttggcaaagggtccataatgtatctcggtcgtgctgtttctcctagaaatgtcccggttttctctaccggatcttttgcccttgatgtagctttgggagttggtggccttcctaaggggcgtgttgtggagatatatggtcctgaagcatcgggaaagacaacacttgctcttcatgttattgcagaagcacaaaaacaaggaggaacctgtgtctttgtagatgctgagcatgctcttgattcgtcacttgctaaggcaatcggtgtaatacaanaaatctgcttcaacacagctgattgtggcnaacaaggc

SEQ ID NO: 5133 - DNA, 430 bp, Arabidopsis thaliana
  unsure at all n locations
  Clone ID: LIB22-007-Q1-E1-C4
gattggttttagcatgatttctgatgcagaaaagaagggtcttatcaaaccangananagtgtgctgattgagccaacaagtggaaacactggagttgggttagcattcacggcagctgccaaaggctacagagcttattattacaatgccagcttctatgagtactgagagaagantcattctcttagcttttggagttnagttggttttaactgacccagctaagggcatgaaaggactatccaaaagggcngaagaaatttggcgaaacaccantgggtnaatncctcaacaatttnnggaacctggcaaacctaaagttcactatganaatncgggaactgaaaaatgggaaagnaccgggggcaaatccaatggcnttgttccgggaattgntactggtggtaccaattacaggtgctgggaatt

SEQ ID NO: 5134 - DNA, 410 bp, Arabidopsis thaliana
  Clone ID: LIB22-007-Q1-E1-C7
cctaacgctgtgcaggagctaagagctgacaagcagtacaatctccaaatgctcaaggaacgctaccagattggtccagaccagattgaggctttgtaccagtacgccaagtttcagtttgaatgtggcaactattctggtgctgctgattatctttaccagtacaggaccctgtgctctaaccttgagaggagtttgagtgccttgtggggaaagctcgcatctgaaatattgatgcaaaactgggatattgctcttgaagagcttaaccgtctcaaagagattattgactcaaagagtttttcatcgccgttaaaccaggtgcagaacaggatttggttgatgcattggggtctgtatatcttttttaaccatgataatggaaggacacagatcattgatctttttaa

SEQ ID NO: 5135 - DNA, 422 bp, Arabidopsis thaliana
  unsure at all n locations
  Clone ID: LIB22-007-Q1-E1-D11
ggaaaaaatgtcaggccatggaagcactgattctccagctgcatgaaatcggcgccgtgaaattcggcaatttcaagctcaaatctggaatcttttctccggtttacatcgaccttcgtctcatcgtctcttatccatccctcttaacacagatctctcaaactctcatctcttctcttccaccttctgcaaccttcgacgtcgtctgtggtgttccttacactgctctccctatcgccactgttgtctctgtttccaatggtatccctatgcttatgcggcgtaaggagattaaagacnatggaacatctaaagctattgaangaatcttcgaaaaggatcaaacttgtttgataattgaagatcttgtaactagtggtgcntctgttctcgagactgctgctctcttcgtgctgtggggt

SEQ ID NO: 5136 - DNA, 432 bp, Arabidopsis thaliana
  unsure at all n locations
  Clone ID: LIB22-007-Q1-E1-D5
ggaaaataggatctccttcttccccgattctcagcgttgtctccagctcaggctcattggatccgaaaattagtggatcacttggatctcgaatccttccggctactcaaagatcatccccatcggagaatcttctcctccataggaaaatgtcgtctaattccctgaggcatgtcgagtccatgtcccagctaccctcaggtgccggaaagatctctcaattaaacgccgtcgtgttaggagaatcccttgcatcggaggagaatgatctcgtctttcccagcaaggaattctccggccaggctcttgtttcctcccctcaacagtacatggaaatgcataagaggtcgatggatgaccctgctgctttttggtctgatattgcgtctgagttttactgggaaagcanaaatggggtgaccaagtgtttcc

SEQ ID NO: 5137 - DNA, 471 bp, Arabidopsis thaliana
  unsure at all n locations
  Clone ID: LIB22-007-Q1-E1-E10
cccatgtacggtaangaattcccggntcgacccacgcgtcagcaaatttttcagcagcgaaaatggcaaacatcagcgtagtgacgacagcgactaacaaccaggtgattctccgtaactacgtgagtggattccctaaagaatccgacctctacatcgccgcaaccaccgttgacttacgtgtacctcccggatccatggcggttctagtcaagaatctctacttatcttgcgatcctttcagccgcattcgcatggaaaaacccgacccttcgtcacctgcttccgtcgctcgcgcttactctatcggcaagccaatctctggatttggagtggctaaagcaatagattcatgtcatccaaattacaaaacaaggagatttactttggggaagagttggatggggaagagtatagtgttattactccaactccttcttcacatttcaagattcatcacactgatgttcc

SEQ ID NO: 5138 - DNA, 436 bp, Arabidopsis thaliana
  unsure at all n locations
  Clone ID: LIB22-007-Q1-E1-E12
gcgtattttcaaggattggcaaatgtggactatgaaccatcgaggcaacctatctcgaaacttgagtttgagtttgagaggaggaaattgactcgcgatgacgtgagggaactcatgtacagagagattttggcgtatcatccacagatgttgcaagagtatctacaaggagaagagaacataaactcncantttctatacccaagcggagttgatcagttcaaacaagantttgcccgactcnaagaacacaacgacgatgaagaggaacacaactccccaccacatcagagaaagtacacgtcactccctatagaacgggtgttgctcatcagaagacnanngttctgattcagttcatgctcaatcgtcttcagcttcngntggtgtttacaccctccacaggactccancacacagcnaacgggcttatcat

SEQ ID NO: 5139 - DNA, 433 bp, Arabidopsis thaliana
  unsure at all n locations
  Clone ID: LIB22-007-Q1-E1-E3
gcggacgcgtggggaaaagctaaccacaagaggaggagagaaactcgataacaaacaagagaaagagaaagcgagattctaaaatctaatctcgtgcttccaattcaaataattttgtctccttagcggatcgatcgtagattataaagctccgccgtcgcctccgccgcaatcgacggcggtgtctacgtcgctttcgtttcgtgcgtaacaggaggagcagcagcaaaataagtcagcttaagtaacgccgtctttgatttgacttgagataagtattttggtgatatggcattgatgatgtttccgcatttgctcgacgttgacgaaaagtaaaatgctggcgaattggaagaaaccacatacagattgatgctctcttcaatcgactcntttgtaaatttgttgaaacttacggggtcnaaaggtgtgt

SEQ ID NO: 5140 - DNA, 453 bp, Arabidopsis thaliana
  unsure at all n locations
  Clone ID: LIB22-007-Q1-E1-E5
gcccacgcgtccggtgagttctgctgaagatgcttgtatccgcgtctggagctttactcctcaataagacttgacgtaaattataaagatctctggacaagtcctatcttgtctctttggaaagcttctactacttttgaaggctttttttgtgaatcttccgtttggccgtggctgtgttgatgtgtgtgtctgttttttttttttgtctgcatatcttttgtcaaaaatgaatgctctgttttggtctgaaactgagatcttgagtcagattttttttcattatcaagaagattactgataaaanananaaangangannaaaaaaaaaaaaagggcggcnncctccaaaanggattccaaagccttaacgttacgccggtgcaaatgccaaanntcaaaaagcctccttcctaaaaattggccanccnaaaaatttcaagtttcaccgng

SEQ ID NO: 5141 - DNA, 424 bp, Arabidopsis thaliana
  Clone ID: LIB22-007-Q1-E1-F10
gaaaaaaactgatttgtttactctgttaatcagagaactttctctgagaaaataacaggaattcagttagttcttagttcctatcaatcaccagctgaataaattcgtttttaaaagagaacgaagaaattcaaaaaacccaattctgctttttcccgataacttcgatcgtcttcgcttgggttttgtgtaatttgagtctgtgaattgaaccgagccccaccaaagtaaatgctccataacgttgaaaacattttcttctttatacaagaatttcaaattgtttcactttctccataggggtttttggggttctctgtttttctttgacgaattttgattttgcaaattcaggaaaaaagtttaaacctttaatcgttgtttaaaggatcgatttttaatttcctactcaaattgggatcag

SEQ ID NO: 5142 - DNA, 436 bp, Arabidopsis thaliana
  unsure at all n locations
  Clone ID: LIB22-007-Q1-E1-F3
gnnnnnnnnnnnnnnnnnnnnnnnnnnnnnnnnnnnnnnnnnnnnnnnnnnnnnnnnnnnnnnnnnnnnnnnnnnnnnnnnnnnnnnnnnnnnnnnnnnngtttccctcacatcatcctcctcctccgcctgatgagttgtttgacatttcgactacagttgatcctagctatcttatttcactgataaggaaactccttccaattgattcgggaagtgacgaacgacataatgatcatatgaatacggataatgtggttcaaggtgtagtagctatatctggaaatggggttgttgagacttccaatggtgatccagagagcatggacattggagataatcatgatgaatccacttatgaggtgggggagacggttagttcatgtccaacgccgggaatgcaaagacgggtcatccggcatgggaaaatnaatgg

SEQ ID NO: 5143 - DNA, 398 bp, Arabidopsis thaliana
  unsure at all n locations
  Clone ID: LIB22-007-Q1-E1-F5
tttggcaccttagattctagtaaagtttctgcgccaggtcaaccaacgatcaaggatctgttggatctttacaactttagaagaatttgccctgacacaaaggtatatggaattattggcaagcctgtcagccacagcaaatcacctattgttcacaatcaagctttcaantcanttgattttaatggagtatatgtccacctgttagttgataatcttgtaagctttcttcaagcatactcatcctctgatttcgctggattcagctgtacaattccgcacanagaagctgcattgcantgttgtgatgaagttgattcattggcaaagtctataggagctgtgaacnctanacnaaaggncaaaaangtgaccngnaagttgttggggttacanca

SEQ ID NO: 5144 - DNA, 471 bp, Arabidopsis thaliana
  unsure at all n locations
  Clone ID: LIB22-007-Q1-E1-G11
tccgccgcgtgtagggaangaattcggnggtcgaacacgcgtcngtttnctcgagaaaangaaaaaaaaagatggtaggaagaagaaaagctttactcttttctctctgtttcttcntcctcnctcttccttccttcncttcccttccatccttccaaaccctattcccnaattctcattcccttccttgtgcttctcccgtctcattccaaccngactccgactccgagtcactgctagaatccgaatttgaanccggatccgactccgagtcntcntcttccattactcgaaaactngangacatcgatgctcnctcctccaacataacannngacgagctattcagctcncgtcnccaacgtgactcccggcgcgtgaaaatctatcgccacactcgccgctcaaatccccgggaaagaaacgtgactcacgcgccacgaccgggtggattcagnaagctcagtcgtc

SEQ ID NO: 5145 - DNA, 434 bp, Arabidopsis thaliana
  unsure at all n locations
  Clone ID: LIB22-007-Q1-E1-G2
gggcaagctgggaggtacatgaagagttatcaaactctctgtgagaagtatccttctttcagagatagatcagagaatgcagatcttgtggtggaaatttctttgcagccatggaaggtgtttaagccagatggggtgattctgttctcagacattctcactccattgtctggaatgaacatacctttcgacattggtaaagggaaagggcccatcatctttaacccgcctcaatcaagctgccnacgttgcccaaagttaaagaattcgtancaaaagaatctgttccttaatgttgganaagcantcaaaangantaagaaatgangtgaacaatgaaaccgctgttccgggaattgttgggagctccaattacancttcctccgaagttaatcnaaangnggtccancnaagaacttcacaccngattaaa

SEQ ID NO: 5146 - DNA, 231 bp, Arabidopsis thaliana
  unsure at all n locations
  Clone ID: LIB22-007-Q1-E1-G5
gcccacgcgtccgggacaaatcagacagaattgtccgnnngttcnannnaactcgctgctacatgatgtggtcgaaatcgttgactttgtcagctctatgtaacataacgttgtctcgatatatgtggcaaccaaaaatatgttttatgaaataaagtgttctcaaaatgtttatgaagaacatttcgtcttnnnnnnnnnnnnnnnnnnnnnnnnnnnnnnnnnngggcg

SEQ ID NO: 5147 - DNA, 428 bp, Arabidopsis thaliana
  Clone ID: LIB22-007-Q1-E1-G7
gaacagcttcaatactatgccagtctccttcgaaaacccagctcggagtcctttacacggccataactctagcctctataggaacaggtgggacacggttcacattagcaactgctggtgcgaaccagtatgaaaaaactaaagaccaaggaagctttttcaactggtttttcttcacaacatatctagccggagctataagtgcaaccgccattgtctacaccgaagacaatatcagctggacccttgggtttggtctgtctgtagccgctaatttcttcagttttttggttttcgtctcggggaaaagattctacaagcatgacaagcctttgggaagtcccttcacaagtctactatgcgtcattttcgcagcattacgcaaaagaaaagctgtggtttccaccaacgaaaaagactaccacaat

SEQ ID NO: 5148 - DNA, 437 bp, Arabidopsis thaliana
  unsure at all n locations
  Clone ID: LIB22-007-Q1-E1-C1
ggcttggttgtttaccgatagtgagacaagagtttaagacaggtgagaattgtatggagatggttaacttcatggtgaaaacacacaatgaaaggcttagtcgtttgctcgttgcgataaccgtaccgttactgtaccgtggcttccggtacagcctctttgatttcaatggtgaaattctccggaggatcaatgaaccatcactccatggatatactgatacaacgacttcttgctgcggaactggatcgagaaatgcatacgggtgcggttatagtaacgtgcatgctaagctctgcagctaccanaaatcatttttgttcctcgacgggcgtcacaacaccgagaaaaccgatgaaagaagttgctaatccgttttaatcccggagacaaacatgtcgtccctccgatgaatataaaaggatctcgtaggtaaa

SEQ ID NO: 5149 - DNA, 449 bp, Arabidopsis thaliana
  unsure at all n locations
  Clone ID: LIB22-006-Q1-E1-H7
cattgaatatttggtttgcaatggaaagagattttctgggtttgagcgacaagcagtatctaagtaataacgttaagcatgaggttaacgatgatgctgtcgaagaacgagggttaagtacgaaggcagctagagaatgggggaagtcaaaggtttttgctacttcaagtttcatgccttcttcagatttccaggaggctaaggcgtttccgggtgcataccagtggggatcagtttctgcggccaatgttttccgcagatgccaatttggtggtgcgtttcaaaacgcgacgccgcttttactaggcggttcagttcctttaccaactcatccttctcttgttccacgagtgggcttcctccggatcatcctcctcaagctcacaatccttttatggcggnactataagcntccttaatgacatatctccccgataaggctcaancca

SEQ ID NO: 5150 - DNA, 470 bp, Arabidopsis thaliana
  unsure at all n locations
  Clone ID: LIB22-006-Q1-E1-H8
cgcagtanggacagaatccgggtcgacccacgcgtccgccaaacaccaaatcnnnnnnnnnnnnnnnnnnnnnnnnnnnnnnnnnnnnnnnagcagatcaaatgatgcttgttcgatctgtatttcgatctcagttgcgancctctgtctcgggtggtctgcaatcggcttcttgctattcttcattatctgntgcttcagctgaagctgagangactatcagagaangtcccagaancnattggagtacagatgaaatcaagtctgtntatgattctcntcttcatgacctcctcttcnatggaactcaggttcatagacatgttcataacttcacggangtacancantgtaccctcctctccataaagactggtggtgtatgaagacngtcatantgtcctcagtctcgagatatancactggacttaaggcacanagaccatgtcnaagacgtgtcattgatgcgc

SEQ ID NO: 5151 - DNA, 638 bp, Arabidopsis thaliana
  unsure at all n locations
  Clone ID: LIB22-006-Q1-E1-H9
ggccccaacggggttaaccccggggggttccccnaagagaaaatttccccccgggggggggtncncaaannccccaanagggccgcgttncccgnggggccaaanccccncggggttncnaatncccnggccccngggggttttnnccaaatncccaaatgtgggcngaaattggggcnggcccgttaaaacaaatnggggggaaaaacccaaaactttggggcccctnccggggccgggaaggccaaacctttcaatccaatccttcaaataatttggcaatccaactcctaaccccttccttgggcaatgaagaacgggttggtncctgggcctttccaagcaattaacatccgttaatgctccgggaactactgttttgattgccaacacactaagtgtcaccaaatgggtggagatcctggtgataaagcgcgggttatccagactatattgtttatgtcgggcataaacacgttgctacaaacgcttatcgggacaaggcttcccacggttatgggaatatccttcccgttagntccttcccgttattgtcnataatcaagagattacaacaatggtcaantcgatcccganaaacagagaattccgacatactaatgagaaacggtacaaag

SEQ ID NO: 5152 - DNA, 461 bp, Arabidopsis thaliana
  unsure at all n locations
  Clone ID: LIB22-007-Q1-E1-A10
accggtaangaattcccggncngntcntgggttgtcatcaattcgcgaatttganacacgcacaccctaaagagagatccacgctcgtttcaaggggttcacagatgccacaaccaccgatgatgcggcagtcgtcagcttcttccactaacatcaatcccgactaccaccacccatctggccccttcgaccccaatgtagacagttttggggcgaaacgaatgagaaagcatacacagagaagagctgttgattacaccagcaccgttgttagatatattcaggctcgaacatggcagcgagactcaanggatatgaccactctgcaaccaaccccagctgcagcagttgatatgcttcccacagttgcctattcggataatccttcaacaagctttgctgcaaagtttgttcacgcatctctaaacaagaaccgttgttcaatcaaccgtgtantgtgg

SEQ ID NO: 5153 - DNA, 482 bp, Arabidopsis thaliana
  unsure at all n locations
  Clone ID: LIB22-007-Q1-E1-A11
ttgccggccgcnagtagcggnaaaagaattcgcgggtcganccacgcgtccggtttcacttcannanactcggctgcaaaaaancaaaantgagctctcaaatctgcanatctgcttccaaagcatgccaaatctcttctctcgttcagctaaaaatgctcgcttcttctctgaaggacgagccantggtgctgcagcagcggtttcggcgtcaggaaaaattcctttgtatgcatctaactttgcacagatcatcaggttctggtgttgcttctaagagttggctcactggacgcttatgctcntcctgctgcaacttatatgattcaagatcaatgangttcttgcngctnagatggaacgancttttattgctancaagcctgatggtgtgcaaagagnactgatatcagagatcatttcacgattcgaacncantggattcaaagctaagttggtagcaaaatcaatgttccctctaa

SEQ ID NO: 5154 - DNA, 472 bp, Arabidopsis thaliana
  unsure at all n locations
  Clone ID: LIB22-007-Q1-E1-A12
ttacngcccatgtaccggtaangaattcccggntcgacccacgcgtcagctgaaagaatcaagtgctgcagaactcaagctatcttcagcaatcattatggccggagtgttatgtttcctanctgccttaatctcgagcgcangtggaatcggcggtggaggtttattcattcctatcatgactatagttgcaggggttgacttgaaaaccgcgtcaagcttctctgcttttatggtaaccgggggatcaattgctaatgtaatcagcaatctctttggtggtaaagcattgcttgattacgacttagccttgcttcttgagccttgtatgcttttaggagtaagtattggtgttatctgcaacaagagttttgcctgaatggctcatcactgttccttttcgctgtgttccctcggcttggtccaancttgaagaanttgtanaanntggagtcaantttggaaaactttg

SEQ ID NO: 5155 - DNA, 462 bp, Arabidopsis thaliana
  unsure at all n locations
  Clone ID: LIB22-007-Q1-E1-A3
acnacgggtcgacccacgcgtccgctgagagaatggaggcgaaaagtagcaatcgatgcagtttctggcttccgaagaagaaaagatcatgcgcgaatactcgaatcgagagttctatgttttgtggaaaccatagccagagattggaaggtcaatggattccatgccctattgatccttctcactctgtgttgcaggagaatctcgaatggcatgtaaagagatgtcctttacttaaacaaactgtagaattgtctggtcaacgattttatcagaagggtattaatgctgggaacgacgaagaagaagaaaagatgggatcttgttctcttgttactcagagatgaagagaaatcctgctccatantatgagtgtttcnaaagtttcatcaacttattaaagaaaaattgaggatgttcaatggcggtatttgtaaagatatccgaagattcgtatttgtc

SEQ ID NO: 5156 - DNA, 432 bp, Arabidopsis thaliana
  Clone ID: LIB22-007-Q1-E1-A5
ggctgactcttcttctaactttctatttcttccaagaataacaaacttttttctcataagaaacaaaacaagaattctacaaaacttctcattaaacctctgttttcttgtttctcttctgctctgtattttcgataattctctctgttttgtatcctttcttattttctgtgaatctgtttttttatggaaatttaattcaaaggcttattagaggaagaaagaaagaaaaagaaaaaaaaaacccactggagctatggctgttgaagataacaagaacagtgaaagcaaaaatcatcaagaggtagagcttcataggaacgacttaggcctcgaagattcatcatcgccaagaggtgttctcggaatggtttcagattccgacaacagcagcaagtagttgcaagctcctggtcctctgatgataaatca

SEQ ID NO: 5157 - DNA, 422 bp, Arabidopsis thaliana
  unsure at all n locations
  Clone ID: LIB22-007-Q1-E1-A6
gntttggccaangaaattactactcaagcaaagcctgtgaatagaattggttttattggtcttggagcaatgggttttggcatggcagcacacctgttgaaatcaaatttttctgtctgtggttatgacgtatacaagccaacacttgtcagatttgagaatgccgggggattggcggcaaattctccagctgaagtgacgaaagatgtagatgttcttgtaattatggtaacaaacgaggttcaggctgaggatgtcttgtatggacatcttggagcggttgaagctataccatctggagcaactgttgtacttgcgtcaacagtatctcccgcgtttgttagccaacttgaaaggcgtctagaaaatgagggaaaagacctaaagnctagttgatgcctcctgtgtctggtggtgtcaan

SEQ ID NO: 5158 - DNA, 414 bp, Arabidopsis thaliana
  Clone ID: LIB22-007-Q1-E1-B11
gtggattctctggattgttcccagattcgagttacgatgcttacaatttcgcaattctgacaagtgtaccagatgctgttctatggtgtgatgttcagctaaccaaagatgctcttggtatttgcttccctgatttaacaatgagaaattcttcatctattgaagctgtttaccctactcgacaaaaatcttacccggttaacggagttcctacttccggttggttcaccattgatttctccttgaaagatctcaaagatgttaacttgatccgaggtattttatctcggtcagaaaagttcgatggtaattctaacccgattatgacggttcaaagcgtatccacgcagatgaaaccatcattcttctggttaaatgttcagcacgatgcgttctacgcgcaacacaatttga

SEQ ID NO: 5159 - DNA, 425 bp, Arabidopsis thaliana
  unsure at all n locations
  Clone ID: LIB22-007-Q1-E1-B12
gcttcgaataaatttctagggtttttcttttctctaaagttttcatttttatttcaatgagagctcgaagaaggagaatatgggtttgagaactgataatattatggcttcgtttcgaggtggaatcggggtttctaatggctgagtcaactcggtgattctgtgttatagtcacgagcaaatataaaaaagtttgtaactttcttgtttttttaggtgtgtgtgttcagagaaaaggtcgaatcttttttcggtgtttgtaaaagggaaagttgtaatcttaaagtctgtttttctttcttgtgttttgggtatttaactcataaaagccgaaggagtaatataaaggatangttttgtctttgtgtgcccttttgagattgcatgaagaaaaaaagcctcantgtgttttgaangaaacagaa

SEQ ID NO: 5160 - DNA, 432 bp, Arabidopsis thaliana
  unsure at all n locations
  Clone ID: LIB22-007-Q1-E1-B4
gagaaaacgagaggcaagggtcaggcataatatgctctctcactagcctaagaatttgtagaagcgaaaaccatggattagggtttttcagtttcctctttcaatcgattaacccacagaacaaagtatctcttaccttcgggtttagatattctcttcgtctccgtctatatatcatttctcaaagtcgacttacgaatttgactcaggagatatttcgtttgtgattttgttaaggctagcttcaattctattcanattaatcaatggattctcagaatgctcgtggcgccttggacaatcccttgttgggggattaagntaccccttanggngcgcttttggnggtcctaaggngaactccaataatgaacaatgcttggacttcacnagggtttgctcaaggccggangttgagcatatcnttcttgg

SEQ ID NO: 5161 - DNA, 429 bp, Arabidopsis thaliana
  unsure at all n locations
  Clone ID: LIB22-007-Q1-E1-B5
ggnacaaactcgttaaatttgtncnantataattttttttaaaacactcgttataatatattaaagtttcacccaaaccgagaaaagagagaatctgtgcatgttgctcagaaaatcttcaaagcgtaatctgggcttacgttagctctcacgaacccccaaggatcttcnatatatgttttttcatttccccataaaatctttcattatctaaaaaatattattatcgtatcttttttcttctatatattcttcctcctcaatcttgattcttgtttcttgagtattctttgatgaatcgtgaaatgacgtcaagctttcntctcctgacgttcgccatatgtaaactgatcatagccgtgggtctaaacgtgggccccagtgagcnccnccgcatccggagccanagatgtcgacgggcaantcaac

SEQ ID NO: 5162 - DNA, 419 bp, Arabidopsis thaliana
  Clone ID: LIB22-007-Q1-E1-B9
gcccacgcgtccgctcagcctctccttcttcgtttcctaaactcatttttcttcgctctctttagattctttttttctcatatctctccttgatcctctgttttttattctgaggttgtttttcggagaaggaatcacctaaaccctttcaaatctcttcttctaccaaatatatttttttggatgaaaaaaacttctaccaaattctcagattttatttccttgagggttttgtgttttttttgcatggtctaagttgatttctgaaatttaagtatatcttgtttacgataatatagaaaaaaattattggtgtttttgtgtgtttataatttatcttgggtcaatgataatagtggacgacgagtcggtgtcttaagggtttactttttgtaaagaaaatttcctgttgaataatg

SEQ ID NO: 5163 - DNA, 433 bp, Arabidopsis thaliana
  Clone ID: LIB22-006-Q1-E1-H6
ctccgtggatcaatcgcagccgttcattctgttcttcgccacgcgtcttgtccagagaacgtcttcttccatttcatcgctgctgagtttgactctgcgagtcctcgtgttctgagtcaactcgtgaggtcgacttttccttcgttgaactttaaagtctacatttttagggaagatacggtgatcaatctcatatcttcttcgattagactagctttggagaatccgttgaactatgctcggaactatctcggagatattcttgatcgaagtgttgaacgagtcatttatcttgactcggatgttataactgtggatgatatcacaaagctttggaacacggttttgaccgggtcacgagtcatcggagctccggagtattgtcacgcgaacttcaccagtattcacttccgggttctggcagacccggctt

SEQ ID NO: 5164 - DNA, 461 bp, Arabidopsis thaliana
  unsure at all n locations
  Clone ID: LIB22-006-Q1-E1-G1
gcccacgcgtccgtctcttctctttgcgcagtcaatttgctacaacttagaaaatggcggcggctacttcatccatcgctccttctctttcatgcccatctccttcttcttcatccaaaaccctttggtcttccaaagccagaaccttggctctacccaatatcggtttcctctcgtcttcttccaagtctctgaggtcgcttactgccaccgtcgctggaaatggcgccactggatcctcccttgccgctcgcatggtttcttcgtctgcggtcaaagcccctgtttctctcgattttgagacatctgtcttcaaaaaggagaaagtttctcttgctggttaacaaagagtacattgtgagaaggaagaaagagactgttcaagcaatctcccaaaatgccttcaaaggggaataancaagatttggtgttaantggctggggggatttcaagggacctg

SEQ ID NO: 5165 - DNA, 429 bp, Arabidopsis thaliana
  Clone ID: LIB22-006-Q1-E1-G11
gcagctatccggcctgtttcagaggatgatacagtagtagaagagctatcaattgttcctagcggttcagatccgtctgcttctactaaagaatacatctgtgagtcgcaaacactcgttgaccggaaaagacactgtgagaacgaagctgtggaggaaccagagccaaaacgaagactgaaaaaagataactcacagagttcagattctgtctccaaacctggaaagaaaaacaaattcgtagtacacgcagctggtgatgttggtatctgtggtgatggatacaggtggcgtaaatacgggcagaaaatggtgaaaggaaatcctcatccaaggaactactaccgatgcacttcagcgggatgtccagtttcgtaaacacattgagacagcagtccgagaacacaaaagcagtaataatcacataca

SEQ ID NO: 5166 - DNA, 496 bp, Arabidopsis thaliana
  unsure at all n locations
  Clone ID: LIB22-006-Q1-E1-G2
ctgttttgccngccgctacggtcaaaaattcccggggtcgacccacgcgtccgcggacgcgtgggcggacgcgtgggtgtaaatctctctttgaaggttcctaactcgttaatcgtaactcacagtgactcgttcgagtcaaagtctctgtctttagctcaaaccatggctagtaacaaccctcacgacaacctttctgaccaaactccttctgatgatttcttcgagcaaatcctcggccttcctaacttctcagcctcttctgccgccggtttatctggagttgacggaggattaggtggtggagcaccgcctatgatgctgcagttgggttccggagaagaaggaagtcacatgggtggcttaggaggaagtggaccaactgggtttcacaatcagatgtttcctttggggttaagtcttgatnaagggaaaggactgggtttcttagacctgaaggaggacatggaagtgggaaaagatctcagatgatgtt

SEQ ID NO: 5167 - DNA, 444 bp, Arabidopsis thaliana
  Clone ID: LIB22-006-Q1-E1-G3
gctttttcaaattgtcgtctaaagtctctaaaaccaccatcgaagtcttgacagagagaattcgaatcggacagagaatttcttccgtagtttttcttgtaagcgaaaaagaagtttagttagctcgtgtgagagaagggtgtaatgagctgttttggttggtgtgggagtgaggattttcgcaacgctactgacactggcccaaggccagcgcataacccagcaggttacaatggaggccactaccaaagagctgatccacccatgaaccagcctgttattcccatgcagcctatttctgtaccagccattccagtggatgagctgagagatataactgataactatggtcaaagaccttgatcggcaagggttctaatggaagattgtttaatggtgtcctaaaaaccgtgtgcaactgcaacaagaacttgaccctagtaa

SEQ ID NO: 5168 - DNA, 458 bp, Arabidopsis thaliana
  unsure at all n locations
  Clone ID: LIB22-006-Q1-E1-G5
gcttcttctctcttcctcatatttattactctctctttcacaaacacacagaaaataaataaataaaattaattaatgtgagaaaatcaattcaaaaatttggacatacgtatcatctgagagaagaagggtttggtgaataccggcgggtggaaccgacggcgatggcgaagaccggtgttttcgattcggatccgacggcgattgctaaagccaaggaactgaagcgtgagatgaagaagttgctgattaagatcgatgacgaagatgatttgggtgttcagacgattgatcagttacaggacgctttgtctgcgttgagagaagcgacgatgaggaagatggcgaaaatctcccccgttagagaatgctccaagactgtgtcttggncctgaaggagttccgttggtcctccccccnaatgaaccttatgaagggattccgtcgttttgggctcc

SEQ ID NO: 5169 - DNA, 441 bp, Arabidopsis thaliana
  unsure at all n locations
  Clone ID: LIB22-006-Q1-E1-G6
attgcttaatgctagtatttgattatcttgttaatataattttcgttacggttctttagacgttaatgcaacgatcccatgctccttcctgcaggttgaaaaatgacaccggagacggatgctctcaaagttcagatcctacctaagcaccagtcattgccctacacagtcacgaaggccaagtcgaaatcattgatcctgctagttgtcgtttccgtgactatcacgttagggttattattatatgttttcaactcaaattctgttatatcttccggaagtttgcttagtcggagatgtaagctccggtacagcgtccttatcgacgcagggagttcanggacccgggttcatgtgttcgggtactgggtttgagtccgggaaancccgttttcgatttcngagagaaacattacgctaatccgaagttgactcctggtt

SEQ ID NO: 5170 - DNA, 447 bp, Arabidopsis thaliana
  unsure at all n locations
  Clone ID: LIB22-006-Q1-E1-G7
aaaagagctctgctttgagatcttagccattaagttctcttgatgatgtctggttcaagattagcctctagactaataataatcttctcaataatctccacatctttcttcaccgttgaatcgattcgactattccctgattcattcgacgatgcatcttcagatttaatggaagctccagcatatcaaaacggtcttgattgctctgttttagccaaaaacagactcttgttagcttgtgatccatcagctgttcatatagctatgactctagatccagcttacttgcgtggcacggtatctgcagtacattccatcctcaaacacacttcttgccctgaaaacatcttcttccacttcaattgcttcggggtacaaagtcangggtccctccgccaaagaaccctaacctccggttttttccctccttggagtttcaaaagtccn

SEQ ID NO: 5171 - DNA, 436 bp, Arabidopsis thaliana
  unsure at all n locations
  Clone ID: LIB22-006-Q1-E1-G8
gcccacgcgtccgtgaaagctttcgctgcactcgctgttgtgtgcgttctcttgcctcttgtanctggccatggatgggttaccaatccacaacctagaggttacaccggtactcaggatggtgctanccaaactgctgcctgtggtattgcaggaacataccctcaagttgtttctctgaccaacggagattacttgaacgtttcttggacaatcggaggcggacacgatggaaatggagttggaccaaacacttgcagattcgcttggtctctttccgatacctctactaccgatttcaatagccacgttctcattgacggcctcaactgctcaagctggaaacaaattcanatctttccaagtcaacactgcagtgactactccatctactgcttacttgcaatttanatngtccgcctggtgaatggnggtg

SEQ ID NO: 5172 - DNA, 434 bp, Arabidopsis thaliana
  unsure at all n locations
  Clone ID: LIB22-006-Q1-E1-G9
aaattctgacanaagagatgatggaatgggataatcagctacaacccaataaccatcactcttctaatcttcaangggatcgacgttaatggcggctccggcgccggaggangaatgtacgtgaaggtgatgaccgatgagcagtatgaaactctcaggaaacagattgctatttacggcaccatttgtgagcgtcttgttgagatgcataaaactctcactgctcaacaagatcttgcaggatggagaatgggacgactatatgcagacccaatgatgtcatctttaggtcataagatgacagcctagacagaaggtggactcctacgccantccaagcttcaagantcctgggaacgttataattccgattaaaggcacngggaaacaacctaagcaaagcaagaaagatttaanagacattaccagaaaga

SEQ ID NO: 5173 - DNA, 427 bp, Arabidopsis thaliana
  Clone ID: LIB22-006-Q1-E1-H11
gaaccctctctctctctctctctctatcatcatcatcgcagaggagacgatcttacgcgacgaatccttgagagattgagagggacaagcgagttttgacccaaggattgttgacggtctatattgaacaagtaaacaaggatgcgtaagtggatctgttgtacatgtcaaatagaagactcaaatgaagagcaacaactgaaaagttcacagcagcaatctgatgcaaatcataagaattcaaaaccagcacctgttgcaaaacatgaggttaagaaggaagctcttcccatcgaggtccctcccttgtctttgggatgaggtcaaggaaaagactgaaaattttgggttcaaggcactgattggtgaagggtcttatgggagagtatattatgcgacactaaatgatggtgtggcggttgctctg

SEQ ID NO: 5174 - DNA, 478 bp, Arabidopsis thaliana
  unsure at all n locations
  Clone ID: LIB22-006-Q1-E1-H12
tttacgccngccagtaccggtccaagaattcccggggtcgacccacgcgtccggtcaaaaacactctaaaacaaaaccatgactttgttccatagactcgatctcatcgatccgtacacgtgtacaccactcatcgtccgtgaaacctccattgttgaaccttcatcattgttcctagggtttccttccttcatcgacgaagacattgaagatctcttcgagttttcatcacctaatcctctcgatctattcgaaaccgtgacggatctggttaagattaagaaatctccgtcgtcttgcaagtacaaggtgattcgtcggagattagagccggagtatccattgaaagtatctttgtgaccgtgttctgatttggaatcaagtttgatanattggtaatcctaagagtgataagaagtatacattgacaaaggagataaagggaaatggtgaaaggaatataaatgggaaggcggan

SEQ ID NO: 5175 - DNA, 505 bp, Arabidopsis thaliana
  unsure at all n locations
  Clone ID: LIB22-006-Q1-E1-H3
nttttgccgcccgtacggcnagaatccgggtcgacccacgcgtccggaaaatttcagatgaaaactttggaattagctttacctccatctccaccgtctttagttccttcttttaactacaattccaccgcacgaagcgtcgggaatgatgtcagaaccaacttcgatgttcaactttttctaaggaaacctaaacaccaaaaatcagaacctgtcgtcgttattcaacaacctcagattcaaccgcaaaatccaagttctcgttgttctacttctgatattctcagactaatggattctctttctttaccaggaaacgaagatatttactcttgtcttgccaaagaatcagccagagaaaacgatcaacgtggagctcacgagctacaagtgcatatcatgaaagtccaagtantaagacccacgattaactttaancaatcgtcctcctttggatgcatgtttccgtgtggggcgtttaagatattacacgccaagatgttcc

SEQ ID NO: 5176 - DNA, 433 bp, Arabidopsis thaliana
  unsure at all n locations
  Clone ID: LIB22-006-Q1-E1-H4
cgcatcgacgttacgccaccatctaatctctttanacctccgtcagctgggtttatctcgccggtctcgtttacttcaaacaagggtttaggggtttcatctaccactttctaccaatgcaaagcttgtaactttgaggtatacatggctgcttctgatcaacaccggtctcgccgtcacgacgagagctcttcaagacccaacaagaagaagaaggtaagcagaaacccagaaacaaatctcctcttcaatctcaattcatgctccaagtccaaggacctctcagctgcattagcactttatgatgcagccatcacttccagtgaagtacgtctcaaccagcaacattttcaaacgcttctgtacctatgctcaacttccattactgacatatctcctcaatacttgccaattgaccgtggttccaagattt

SEQ ID NO: 5177 - DNA, 423 bp, Arabidopsis thaliana
  unsure at all n locations
  Clone ID: LIB22-006-Q1-E1-H5
gcaacaattcaaactctctctttctcctttcaccaaacaatacaagagatctgatctcattcacctaaacacaacttcttgaaaaccaatggatcaaatcgaagcaatgttgtgcggcggaggagagaagacaaaagtggcggttactacgaagactttggcagatccattgaattggggtttagcagcggatcaaatgaaaggaagtcatttagatgaagtgaagaagatggtcgaagagtatcgtagaccagtcgtgaatcttggcggagaaacactgacgatcggacaagttgctgccatctccaccgtaggaggcagcgttaaggttgagttagcggagacttcaagagccggtgtgaaagctancagtgattgggttatggagagcatgaacaaaggtactgacagttacgggngtca

SEQ ID NO: 5178 - DNA, 485 bp, Arabidopsis thaliana
  unsure at all n locations
  Clone ID: LIB22-006-Q1-E1-F9
ctgttacgccngcccgtaccggtccaaaaantcccgggtccanccaagcntncgnnnaaanaattccccggctttaaattncaaattngcccggatnnatncanaattaanatnccccnctncgttttggttttnctttnggattcaaaagctcctcttaaatcctggtaaatcaacaatggcccgccaccactgagaatctccctcaactcaaatccgccgtcgatggccttactgagatgagtgagagtgagaagagcggattcatcagcctggtttcacgttacctgagcggtgaggcacaacacattgagtggagtaagatccagactcctaccgatgaaatcgttgttccctacgagaaaatgaccctgtctcccaagatgttgccgagaccaagaatctgttggacaaaacttgttgtgttgaagcttaatggaggtcctgggaacaacaatgggatgcactgggcccgaaatccgtta

SEQ ID NO: 5179 - DNA, 444 bp, Arabidopsis thaliana
  unsure at all n locations
  Clone ID: LIB22-005-Q1-E1-E8
gatccttgtttacaatctcttctctggctatcttagagggatttttgattgagattttaaaattttctgagttggattagttggttggtaaagagatggatccggatacggtgaagtcgaccctctcgaatctggcattcgggaatgtattggcggcagctgctagagattataaaaaggaagttcttgcaaatgaaaaggcacaaggatcaagacctgtcaacgaggaagttgatcttgacgaattgatggatgatccagagctagaaaagnttgcacgcagataggattgcagcactcaggagagaaattggaaaagagagaagcattcaaaagacaaaggacatggtgaatacccgagaaattaacgaaaggcgactttcntggggaanaagtcccaaaggagttgaaaaagttatatgtcacnttcaacacaaaggagtt

SEQ ID NO: 5180 - DNA, 414 bp, Arabidopsis thaliana
  unsure at all n locations
  Clone ID: LIB22-005-Q1-E1-F1
cgtgggcggacgcgtgggcagatttcaagaaacccttaaaannnnnnnnnnnnnnnnnnnnnnnnnnnnnnnnnnnnnnnnnnnnnnnnnnnnnnnnnnnnnnnnnnnnnnnnnnnnnnnnnnnnnnnnnnnnnnnnnnnnnnnnnnnnnnnnnnnnnnnaaaagactcttnctnnnnnnnnnnnnnnnnnnnnnnnnnnnnnnnnnnnnnnnnnnnnnnnnnnnnnnnnnnnnnnnnnnnnnnnnnnnnnnnnnnnnnnnnnnnnnagatggggaaaggtgagagtgagcttgancttggtctaaggctgagtcatggcggtggaacngggggcaaagattggtaaatcaagtggtggnnngngcnttggggaaaacgttgnaaggctttgacggcaaagatttcctcggttn

SEQ ID NO: 5181 - DNA, 409 bp, Arabidopsis thaliana
  unsure at all n locations
  Clone ID: LIB22-005-Q1-E1-F11
cgcctctctctctctctcgcttcttcaatcattcatcactccgacgtcagattcaaaatcctccatgatcgatcccaattgatcaatcaataaccttatcttcttcatcttctctgtcagtatctgaatctgcatctggaagcgtgatttcatcatcatgtatttaaccgcttcatcttccgcttcttcctccatcatccgagctgcttcttctcgctcttcttctcttttctctttccgatcggttttanctccctccgtttcatctacttctccgtcgtctcttctcgctcgtagatcttttggtancatttcccctgctttccgtcgctgggagcnattcctttcactcgaaaccatctccgtttcgcttcacctctnagataagaggctgtttctccagtcttag

SEQ ID NO: 5182 - DNA, 452 bp, Arabidopsis thaliana
  unsure at all n locations
  Clone ID: LIB22-005-Q1-E1-F2
gcccgtgacccgattcaaatccgagatgcccagttgaagattatcgagaggcgtggaaagaaggcgaatcatcatgttnnnnnnnnnnnnnnnnnnnnnnnnnnnnnnnnnnnnnnnnnnnnnnnnnnnnnnnnnnnnnnnnnnnnnnnnnnnnnnnnnnnnnnnnnnnnnnnnnnnnnnnnnnnnnnnnnnnnnnnnnnnnnnnnnnnnnnnnnnnnnnnnnnnnnnnnagatatagatcttaatttgtccctagatgagttctttaggagatatactagtgaggataacgagagcttttcgaagantcntgaagaanggtaaatangaaagaangaaaggagaaattatggntttccccctttaaaggtgaaaaaggangatggtaaatccaattgagggatntnaaagaagaagataaggattacagattgggtaatngtacatcctga

SEQ ID NO: 5183 - DNA, 435 bp, Arabidopsis thaliana
  unsure at all n locations
  Clone ID: LIB22-005-Q1-E1-F4
ggatggctctaacttctcagatgtgcagaggtctgtttctggcagtggagttgcatcctcatattctaaggctaacaacaatgtacctgcgactaggaatcaaaactctagctccaattcgcattacacgagtatgtaccagcctgcatccatgacaggttatgcagctcagggttactacgacagagtgtctccaaacaagtcatatggtcagtatggtagcacggtgaggtctggtatgggttatggttcttctggatatggttcaagaacaaatgaaagaggatggctcaatacagacaacaaatatagaagccggggaaggggtaacagttacttctatggaaatgagaacattgatggcttgaatgaactaaacanggggccctagagccaagggcacnaatggcacagaagaagttanctcaaaagaag

SEQ ID NO: 5184 - DNA, 417 bp, Arabidopsis thaliana
  unsure at all n locations
  Clone ID: LIB22-005-Q1-E1-F8
ttacttacatnagacaattttagcaattagctttcaagatctcatctcnttattctntctctctatctcttctcctcangaagcctaaaaatctcganannanagntcccaagtttcgnatttcaacgatgtgaatctctctctctttcgggtttattttgtttcccgatatggtttagaatttgtgatttaaatggaagctgacgtgtcaatttcctgaaaaaacccttatcgcgaaattttccagattagcaaaanncacaagattgaaacttttttcgatttgtttggagaaganncacggtaggaacgacgacgatgaatcgtgctttgggcccacgtttaaatgtttgtactgtttcctgtttancttcangcanagttnatttgatgaggaataacatnactctctctttt

SEQ ID NO: 5185 - DNA, 455 bp, Arabidopsis thaliana
  unsure at all n locations
  Clone ID: LIB22-005-Q1-E1-G1
gctcttctccgttcatcttccggtagatctgccgccaaattagtcaaccgaaaccccaggcttccttctccttcacccgcgcgtcacgccgctccatgtagctacctcctcggccgcgtcgccgagtatgcgacctcttcaccggcaagctctgctgcgccatcctctgctcctgctaaggatgaggggaaaaagacctatgattacggtggcaaaggtgcgatcgggcgtgtttgtcaaggtcatcggtgccattgtcatgtgagattcgaggatcaggaaggattgcctccgatnatgacatctccttgaaggttaangattaacccaaaaagggctggtggctttaaggtgtcccaatcaatttgggtcaaaatgttcttaaggaacaattgctaatgggatggtaatgaaaggtccttgtccgttggaaaggnaaggttccaaacactggg

SEQ ID NO: 5186 - DNA, 412 bp, Arabidopsis thaliana
  unsure at all n locations
  Clone ID: LIB22-005-Q1-E1-G11
ggctttcaacaccttcttcagtgaaaccggtgcaggtaagcacgtcccacgtgctgtctttgttgatcttgagccaactgtgatcgacgaggtcaggactggtacttaccgtcagcttttccaccctgaacaactcatcagcggtaaagaagatgcagctaacaatttcgcccgtggtcattacaccattgggaaagagattgttgacctgtgcttagaccgtatcagaaagcttgctgataactgtactggtctccaaggattcctcgtcttcaacgctgttggtggagggactggatctggtcttggatctctcctccttgagagacttctgttgactaagggaaaaagtccaaagttgggtttcacagtttacccatctccacangtctctacctccgttgttgagcct

SEQ ID NO: 5187 - DNA, 421 bp, Arabidopsis thaliana
  Clone ID: LIB22-005-Q1-E1-G12
gcccacgcgtccgcagattctgaaaacaaagttatgtcctaacaagacgacgaatccgatgtggaacgaagatcttgtttttgtagctgcagagccatttgaagaacagttcttcttgacggtcgaaaacaaggtgacaccagctaaagatgaagtcatggggaggctgatctcacctttgagcgtatttgagaaaaggttagatcacagagctgttcattccaaatggtacaacctcgaaaagtttgggtttggggctctggaaggagacaagagacacgagctcaagttctccagccgaatccacctacgagtttgccttgaaggaggttaccatgtaatggacgagtcaactctgtacatcagtgacgtgaaacctacggcaaggcaactatggaagtctcctaatggcatccttgaa

SEQ ID NO: 5188 - DNA, 440 bp, Arabidopsis thaliana
  unsure at all n locations
  Clone ID: LIB22-005-Q1-E1-G2
gggatgcacaaaaggagcacaagggagtacaatgttctgcaaagcacacggtggtggaaaacggtgtacacactcaggttgcaccaaaggagcagaaggaagcacgccgttctgtaaaggacatggaggaggtaaaagatgtgcctttcaaggagatgatccttgctccaagagtgttcacggaggtaccaatttctgtgtggcacatggcggtggtaagagatgtgcggttcccgaatgcacaaagagtgctagaggaagaactgatttctgtgtcagacatggtggaggaaagagatgtcagtctgaaggctgtggcaaaagtgctcaaggtagtaccgacttttgcaaagcacatggagganggaaaaggtgtgcgtggggtcaacccgagactgagtatgcgggacagtcttcttctggtccttgtacctcgtttg

SEQ ID NO: 5189 - DNA, 487 bp, Arabidopsis thaliana
  unsure at all n locations
  Clone ID: LIB22-005-Q1-E1-G3
caaatcttctttatttgttattctcaatccttccttcatccccaggtttctttcgattcgttgagtcattcaatttttccatcactgggtttttctctctgaatccgatcggagaatccagtcgattactaatctagcgctctctttttttctactcgatgacttatcacgaagaagacgatacagtttctgaatttcgagttagagttgaagaagatggagttgataaattaggtcattatgttaaacttactgaagatttcgaagtacatcgacaagaaacagaacaagaatccttcatcatcaaccgtcttcctccttccntcaatgtgggacaagaaaaccgattcggtttggggttttgggatttaaaaaccctgggnccnttttccntcnacntttttcaaaannggccntttgggggtccnccgcctggggtttaacaaaaaatggggnnnaanaaaccccttttaaaatccaanggggg

SEQ ID NO: 5190 - DNA, 403 bp, Arabidopsis thaliana
  unsure at all n locations
  Clone ID: LIB22-005-Q1-E1-G4
gggaacttgaaaagagtgattgtgcagccttgcgtaacaatcttgtagtagcgatgacagacttttgtgttcactatacagccatgattgagtgttacataccgaagattactaaacgtcttcgggatccttgtgaagttgttanaaggcaaaccttcatacttctctcaaggttactacagagagactacgtgaaatggagaggagttctcttccttcgattccttctatcgctagtggatgaatctgaaaagatacgtcgacttgcagactttttatttggnagcatccttaaagtaaangcgccacttctaaccttacaacagtttcttggaagccaatttatgtcntaaacgactgccaagcccacactgggcataataatccaagnttctaaacaatc

SEQ ID NO: 5191 - DNA, 427 bp, Arabidopsis thaliana
  unsure at all n locations
  Clone ID: LIB22-005-Q1-E1-G7
gggccgggctcgattggcagtttacaaaaagaggtatattacatataaaagtggatattttccatgataagtgaacatggccaattcnttacgagganaagtattgaatctttataagaatctgctgtatcttggacgagactatccaaacggagcagnctanttcaaaaggcgtctgaanaangttttccttaanaacaannatgtgaaggacccatagaagatcaaggaacttattgaaaggggcaaatttgtaactgaaagaactagaagcattatacttccttaggaaatacaganctatgaaacaacgcnattactcagataccaacaaaactaaatgatcagtattactatcatttgactgaagatcattgccanctgtttatgtnccagctatgacaaaaataacatttacagtgtcaan

SEQ ID NO: 5192 - DNA, 440 bp, Arabidopsis thaliana
  unsure at all n locations
  Clone ID: LIB22-005-Q1-E1-H1
ttgacggatcttgtcttccatgacatcttagcaactactctttcgcttagtcatgttagcttaagaaggtgccatcttcttactgaccacgcaattcaaaagctggcatcaagtctcaagctggagaatcttgacctcagagggtgcagaaacctgagggatgaaaccttgacagctgtatctcatctgccaaaactgaaggttttacttcttgatggcgctgatattagcgacacagggctttcgtacctaaaagagggagttttggactccctagtttctttatctgtcagagggtgcagaaatttaaccgataaagttcaaggtcaacttaantttgacgggttctcaaaaactgggcgtttgcgggaactccaactttgtcctaatcctcccaaatccaacnggtgctggcaattttgctccaacaaaatcctggg

SEQ ID NO: 5193 - DNA, 430 bp, Arabidopsis thaliana
  unsure at all n locations
  Clone ID: LIB22-005-Q1-E1-E7
gnnnnnnnnnnnnnnnnnnnnnnnnnnnnnnnnnnnnnnnnnnnnnnaaagtggtggagctaaccatgaaatcgactcaccatcacagagctccactaatatctgcttcttcctcatcttcatcttcttcccaaaaccattcattcgtctctaggctcctccttctccttactctacttccagtttcccttgcttgtctcgcctttatcctccaatggcgangcggtggtctcgccgatcctgcctctgcttctgttcgttcctctacgtcggttcctggcggctccgatctcaatcacgaagtctttcccggcatggagactgtttcatctgtctccccaaagtctcaccaatcctcctccgactgcttaaatctagctcgcagctcttctccttcntttccttaatatgctgaatggaagtttggtgt

SEQ ID NO: 5194 - DNA, 407 bp, Arabidopsis thaliana
  unsure at all n locations
  Clone ID: LIB22-005-Q1-E1-C11
atatccatccaactgtgtgaattagatattttctcttatctcttctctttgttcgatcaaaaattcaattttcccgagatttttgtttctctcgatcgattcaacacctaaagattgaagcttttgctcgtgggttatgtaaagtttccacctttcgtcttctttctgatctgtgagcaaaaatgggacaacagcaatcaaaaggggaattgctgtatcagcaagttagttatggtaactctgaaggaattcgagctcttcatcgagatggtggagaccttgagtggatggatagagaaggaaaaactccgttgatcttggcttgtatgaactccgagctatttgatgttgctaagactttgattgagttgggttctaatgttaatgcttancgtcctggtcgtcaa

SEQ ID NO: 5195 - DNA, 418 bp, Arabidopsis thaliana
  Clone ID: LIB22-005-Q1-E1-C12
gctcctcgatttcgatgacgatagagccgacgcaatcgccgtcttcggagccggaggttcactctggagaggacttcgttcacatcgatgaccctaggcctaccggcgatatctctttaagcgacagcatagttaatgtggagaaggatgaactgctcgacgaagcggcggaggaagaatttagaggctccgattctgtgtttagcggcggcgatggcggtggagcggatgatgatggcggcgagtgttcatcggaggctactaaagtggagctaccggaggaattggcgaaaagtgttgtgattctgacgtgcgagtcaacagcggatggtggatcttgcgatgtgtacttggttggtactgctcatgtatcaaagcaatcctgtcttgaagttgaaagcaataatcagcatcttga

SEQ ID NO: 5196 - DNA, 452 bp, Arabidopsis thaliana
  unsure at all n locations
  Clone ID: LIB22-005-Q1-E1-C4
gggaaattgcttggtatatgggtctggagcttgggaaggttagcataaagagatttgctgatggagagatctatgttcagctcaaagaaagtgttagaggttgcgatgtctttttggtgcagcctacttgcactccaactaatgagaatctcatggagctattgatcatggtggatgcttgccgaagagcatcagctaagaaagtcacagctgtgattccgtattttggatacgcaagagctgatagaaagacacaagggcgtgaatctattgctgccaaattggtagcaaaccttataacaaaancccggtgcaagataagggtcctgggcttgttatnctcaatcaaaggacaatccatgggttaatttgacataccaatgggatnatgtccaantgccaacctggtgatacttgattaaccntgctaacaaagtcaatttccccctgaa

SEQ ID NO: 5197 - DNA, 438 bp, Arabidopsis thaliana
  unsure at all n locations
  Clone ID: LIB22-005-Q1-E1-C5
gcttcgatatctccgccttcattctcctcagagccaactgtcctgagatttcgatttcgatttctccgatctctcttcctccgtcgccggcgaaaccatgtctcagtctattcaattctccactccttcacacactcctcaccttctccatctccctcactcacaattcaaccgtcctctctcctctatctccttccgtcgcttccctctaacaaccatcaaatacacttcnnnnnnnnnnnnnnnnnnnnnnnnnnnnnnnnnnnnnnnnnnnnnnnnnnnnnnnnnnnnnnnnnngcaagtacttctctcacctaacggtactgggtgctgtgaagtctgatgagagattccgttgtcgctacggcgggttacgactgatagtctggggattgagggttgatactgtgaagggaagctgagcttaanggagaatgg

SEQ ID NO: 5198 - DNA, 437 bp, Arabidopsis thaliana
  unsure at all n locations
  Clone ID: LIB22-005-Q1-E1-C6
gcccacgcgtcngatctctctctatctctctcatttcttcctgcgtcaatggcgactcaaggtcaggttatcacttgcaaagctgcggtggcttangagccnaacaagcctctggtcatcgaagatgtgcaagtggctccacctcaaactggtgaggttcggatcaagatcctcnacactgctctttgtcacaccgacgcttacacttggagcggcaaggatcctgaaggtctctttccntgtantctaggtcatgaggctgctgngattgttgagagtgttggtgaaggagtaactgaagttcaaactggagatcatgttatcccttgttatcaanctgagtgtcgtgaatgcaanttttgcanatctgggaagacnaactttgtggcaangtganatctgctactgggtgttgggaatatgatgaatgaccgtaa

SEQ ID NO: 5199 - DNA, 415 bp, Arabidopsis thaliana
  Clone ID: LIB22-005-Q1-E1-C9
gctttcttaagtaaacaaatctttagagagagtggaaaaaatgaattcgaagatcatcgaagctttcttcatcgttgctctcttcactacctcatgcctcgctcaagctccagctccttctccaaccaccaccgtcactcctcctcccgttgccactccaccacccgccgcaactcccgctccgaccaccactccaccacctgccgtctcccctgcccccacctcttctcctccgtcttcagctccttctccgtcgtctgatgcccctaccgcttctccacctgcaccggaaggtcccggagttagccccggcgaactagccccgacaccttccgatgcttccgctcctcaactaacgccggctttaaccaacaaaagctttcgtcgtcggttcacttgtcgccgcgattaatta

SEQ ID NO: 5200 - DNA, 411 bp, Arabidopsis thaliana
  unsure at all n locations
  Clone ID: LIB22-005-Q1-E1-D12
cgtccgcgtgttctaacctcattcctccataacccctnnnnnnnnnnnnnnnnnnnnnnnnnnnnnnnnnnnnnnnnnnnnnnnnnnnnnnnnnnnnnnnnnnnnnnnnaaaatggctgaaccaatcaccaaggagcagcctcctccacctgctccggaccctaattccacctaccctcctccgtccgattttgattccatctcgatccctccgttagatgatcatttctccgatcagactccgattggtgaactaatgtccgatctggggtttcccgatggtgaattcgagctcactttcgacggtatggacgatctttacttccctgctgagaatgagtcgtttctcatccctatcaatacgtcnaatcaagaacagtttggtgatttcactccggagtctgaaagttc

SEQ ID NO: 5201 - DNA, 442 bp, Arabidopsis thaliana
  unsure at all n locations
  Clone ID: LIB22-005-Q1-E1-D2
gattttaatgctttgtcctacaaatttattgctgtacttgttgcgagttttgcattagcacgtaacatgcaaagatcagagattgataggcgtatgcaagatgatatcatagcggcaaaccgtctatgcttgggaagccgtgcttggcgaaaactaattcgttacttggcagagatgcgatgcttttttgggccttttggagatggaatatgcagtcctgaacgcgttttctggaaacttgattctatggaaagcttttcgaggatgagacagtctataaggaggaattattctgggactgatcatcacggggcagcagcagattatgacgatcagacagaaacaaaaagtgataatggtaacaanggttctcaatcaaatcctccctgttgttgctgctgaaagtaatattaatggaaataacgtatgaagangatgaaca

SEQ ID NO: 5202 - DNA, 444 bp, Arabidopsis thaliana
  unsure at all n locations
  Clone ID: LIB22-005-Q1-E1-D3
gattccgaccactgtactccggcgaaaacctcaatttctggggatggattagaaaaagagagcgactttaagaagcaactgaactctgagatagatccacaagcttcttcctcgcaaaacgatgcaataactatggaagatggagccgtctctgtaaacaatagggatctgcaagagataaaggaatcatccttctctaaaggaagtgagcaatatcgagttgatggagcccttgaagaaagtttgaattttgaggagaaggaacaagaatctgaagctcagagactattggaagcagagaagagaagattgctggctgaaatcgaacttgggtcaatccttaaggaagaagtgttgatgtggatacgtttgcccaaagatcgaaagagacgatggataatgatgtttgataagantgaantgggttgatnatactgcctttgg

SEQ ID NO: 5203 - DNA, 498 bp, Arabidopsis thaliana
  unsure at all n locations
  Clone ID: LIB22-005-Q1-E1-D4
aactgttactttgccagtcccggtccagaatncncgggtcgacccacgcgtccgcggacgcgtgggcttcctcttccttcttcttcttctaccttcttctcgtaaaggttttgctacacactggagctcgcaaatctggctatcgaaaaccacaatcacaaactcaacttcggggccttcaaggccaatcacaagaaagtcatgggacnnnnnnnnnnnnnnnnnnnnnnnnnnnnnnnnnnnngtccaccgtggctaatgccaatgctacgagggagttacttcgtcccttgttccatccatgtcgattcaaacaaaaacgaatgcaatttgttctgtcttgattgtgctggaaatgccttttgctcttactgtttagtcaaacataaagancatcgtgttgttcaaatacgaaagatnttccgtaacataacgttgtgaaaatgaatgaagatacaagaagttcataaacatcgcctgtgttcaaacatatantat

SEQ ID NO: 5204 - DNA, 435 bp, Arabidopsis thaliana
  unsure at all n locations
  Clone ID: LIB22-005-Q1-E1-D5
gctgttttccttgttctccaagccagatctctctccataaatctctcttcatctctctctttccaccaaacatccgcgatcctcgattctcaattccgtgtctgttttttttcttcacttagcgatggcgatgatagagcaaaggccgaagacgaagatcgtttgtactctaggtccagcttccagatctgttccgatggtcgagaagcttcttagggctggtatgaacgttgctcgtttcaatttctctcatggatctcatgaataccatcaagagactctcgataatcttcatcaagctatgcttaacactgggattctctgtgccgtcatgctcgacaccaaggggtccaagaaatccgaancgggttcttgaaagatgggaaaccaatccagctgaaacaaggacaagagatcactatttcgactgactnt

SEQ ID NO: 5205 - DNA, 454 bp, Arabidopsis thaliana
  unsure at all n locations
  Clone ID: LIB22-005-Q1-E1-E1
acttctgacagagactcatggcggnagcttgcggagtgagaaggattaagctaggaagccaaggccttgangtatcggngcaaggtcntggntgcatgggtctctctgctttctacggtactcccaagccggnaaccgaagctatcgctctcatccaccacgccattcactccggcgtcactttccttgacacctccgatatctacggtcctgagaccaacgagcttctcctcancaaggctctcaacgatggggtgagagaaaaagtggaacttgcgaccaaatatggaatcaggtatgcatatgggaaagtagaattttangggagattctgcttangtaagaaactgcgttttgaanggctaattttaatgccaagtaaatgtttgcctgcaattgattcncctaantaatcaagcaatccgaaatttggtaactccntggtcccctattc

SEQ ID NO: 5206 - DNA, 432 bp, Arabidopsis thaliana
  unsure at all n locations
  Clone ID: LIB22-005-Q1-E1-E3
cgtgggctgaaagttgcgattaacggttttggaaggattggtaggaactttcttaggtgttggcatggtcgtaaagactctcctctcgaagttgttgtacttaacgacagtggtggtgtcaagaatgcatcccacttgcttaagtatgactccatgcttggaaccttcaaggctgaagtgaaaattgtggacaatgaaactattagtgttgatggtaagctcatcaaagttgtctccaacagagaccctcttaagcttccatgggctgagctcggcattgacattgttatcgagggaacangagtgtttgttgatgggccaggagcaaggaaagcatatccaaanccggagcctccaaaagttatcatcactgcancaaccaaangtgctgatatccctacctaagttatgggaatcaatgagcaaagacta

SEQ ID NO: 5207 - DNA, 435 bp, Arabidopsis thaliana
  unsure at all n locations
  Clone ID: LIB22-005-Q1-E1-E5
gccatctccttcctccgatcttcgtctccaattcggaatcttcctatcacaatttcaaggctcctttaacccttgatcatcaccgattcaatcaattcggaatcacaatttcaaatcgagagaatttcaatttctcttgtaaaaccctaaattatgtacagcaatttcaaggaacaagcgatcgagtacgtgaagcaagcggttcatgaagacaatgctgggaattacaataaagctttccctctatacatgaacgcgcttgagtacttcaaaactcatctcaagtatgagaagaaccctaagatcagagaagctattacccanaaattcaccgagtatctccgtcgtgctgagggagattcgtgctgttctcgatgaangtggatngggtcaagatctaacngtgatgcaagccgtcgcaacganggccaaaaa

SEQ ID NO: 5208 - DNA, 417 bp, Arabidopsis thaliana
  Clone ID: LIB22-005-Q1-E1-C10
gcacaaacatttttcttgaattcagagtttttctgatcaaaagctccctctctctctcaccatggatccgagactacaacatgctgctgaaaccggaagcatcaatgacttttatgctctgattgaggagaatccttacattcttgataacatcaatgccgtgccatttgttaacactccgctccatgtagctgcagcttctgacaacattccatttgccatggagatgctgaatcttaagccatcgtttgccagaaagctgaacacaagtggctacagtccattgcatcttgctgtggaaaaagatcatagagagtttataacatggctgctttggcgtgatcccggacttgttcgcgttaaagggagagaaggaatcacacctttccatctcttagcgattagaggagacgtaaa

SEQ ID NO: 5209 - DNA, 464 bp, Arabidopsis thaliana
  unsure at all n locations
  Clone ID: LIB22-004-Q1-E1-H4
tagctnctcagggtcacaanatcncgggtcgacccacgcgtccgagganactctctggtcagagacggcgatgattctacgccgatggggtttccttcaagttgcggaaacacgcncngtgactaaattgttccgaangacgacgacatacngantttcgtngtntctcctctgctaantacttgtcgancttctctcatatgctcttgtctcaaaagcaaatcctcccaagaaactactcagattgaacagttggggaatggagaagggttctcagttttggcatcagagattccatgggaggatgataacatatggagcacatttgctctttacatgttctctctgcatattcctctcagttttgggggtttatccattgttgccaanatactccaccggcaggttcttgatcctcaaacncaagtgctatcacttgtggttctccaaaaggtanaaatttc

SEQ ID NO: 5210 - DNA, 422 bp, Arabidopsis thaliana
  unsure at all n locations
  Clone ID: LIB22-004-Q1-E1-H5
gctaatctagtaaatagacaaagaaaacaacatggctgattctaagatgaagctccactgtggctttatctggggtaattcggcagctctcttttgtatcaatgagaaaggtcttgactttgagcttgtcttcgtagattggcttgctggtgaagccaaaaccaaaacttttctctctactctcaacccatttggtgaagtcccggttcttgaagatggagatctcaaacttttcgaaccaaaggcgatcacgcgatacctagccgagcaatacaaagacgttggaacaaatctattaccagatgatcccaaaaagagagcaatcatgtcgatgtggatggaagtagatagcaatcaatttcttcctatagcatcaacactcatcaaagaactcatcatcaatccatatcaagggttaancc

SEQ ID NO: 5211 - DNA, 457 bp, Arabidopsis thaliana
  unsure at all n locations
  Clone ID: LIB22-004-Q1-E1-H9
gnaccggtccagaattaacgggtcgacccacgcgtccganttcctcatcttcttgttgaaagtaatggcaagactcacgagnnnnnnnnnnnnnnnnnnnnnnnnnnnnnnnnnnnnnnnnnnnnnnnncgacaagagctatggaggcaaacttttcccgggttattacgcccattcatgcccacaagtcaatgagatcgtgagatcagttgtagctaaagctgttgctagagagacacgtatggctgcttccttgttgagacttcatttccacgactgtttcgttcagggttgtgatggctctttgcttctagacagcagtggaagggtagcgactgagaaaaactcaaaccctaacagcaaatcaactcgtgggtttgacgtanttgaccaaatcaaagctgaactggagaaacaatgccctggaactggtttcttgcgctgatgttcctaaccc

SEQ ID NO: 5212 - DNA, 488 bp, Arabidopsis thaliana
  unsure at all n locations
  Clone ID: LIB22-005-Q1-E1-A1
ttatcngccaggccccggtcaagnaanccggggccgacccacgcgtcngctcagatctgagaannnnnnnnnnnnnnnnnnnnnnnnnnnnnnnnnnnnnnnnnnnnnnnnnnnaaacaacaatggcgacaccaggagcttcctcagcaagagatgaattcgtatacatggcgaaactcgccgaacaagcagaagcgttacgaagaaatggttgaattcatggagaaagtcgcgaaagctgttgacaaagacgaactcaccgtcgaagaacgtaatctcctctccgtcgcttacaaaaacgtcatcggagctcgtcgtgcttcgtggagaatcatttcatcgattcgaacaaaaaggaggagtctcgcggtaacgatgaccacgtttcgttgatccgtgactacaagaaagcaaaatcgaaaacgggactttccngatatcngtgacggnatccttaaancttctcgatacgaattcncgttccccgg

SEQ ID NO: 5213 - DNA, 428 bp, Arabidopsis thaliana
  Clone ID: LIB22-005-Q1-E1-A2
tgaaagatggtttttttattctcaaggagaagtttcgaaaagggatcaatcctcaggagaaggttaagatcgagagagagcccatgaagttgtttatggagaatggtattgaagagcttgctaagaaatctatggaagagcttgatagtgaaaagtcttctaaagatgatattgatgttagactcaagtggcttggtctctttcaccgtagaaagcatcagtatgggaagtttatgatgaggttgaagttaccaaatggtgtgactacaagtgcacagactcggtatttagcgagtgtgattaggaagtatggtgaagatgggtgtgctgatgtgactactagacagaattggcaaattcgtggtgttgtgttgcctgatgtgcctgaaatcttgaaaagtcctgcctctgttgggttaacgagtctc

SEQ ID NO: 5214 - DNA, 431 bp, Arabidopsis thaliana
  unsure at all n locations
  Clone ID: LIB22-005-Q1-E1-A3
ccgttacttcgatcccaccgattcgaatcattctctctctctttcttgatctgaaaattgagtcccaattccagcaaaattatcaatcgantttctgatcaactgagcgcgacggtggtggcgacggtggtggcgacggtgacagcgatcgacggttatggcttcgaagactaaaactagtttgtccgaaacaacaaatactactactcctaccgggaaatcatctccagcaactccaagaatagcaaanagaacagttaataaatccgaaactagtaataataattctcatctactactactccacattcacgtctttctcttgatcgttctctccaaattccaaatcttccggttgagagangatnaccaangcttcaactcctcctgagaaatctcaagcgggnagtacaagcggtgaaaaggaacag

SEQ ID NO: 5215 - DNA, 434 bp, Arabidopsis thaliana
  Clone ID: LIB22-005-Q1-E1-B1
gcggacgcgtgggtgataatatgatggacgatgttccccttgctcaacgatcttcaaatgagcactatgacgaggctacggaggatagctgcagccgcaagctcgaagctgctgtttcgaaatgggatgagactgatgctatagtcgtctctggtgccaagcttacgggaagcgaagtacttgataaagatgcagtaaaaaaaatgtttgctgtaggcacagcttctctaggacatgtaccagtgctggatgtgggccgtttttccagtgagattgctgaagctcgtctagcacttttccagaagcaggttgagatcactaagaaacatcgaggggatgcaaacgttaggtatgcctggcttcctgcaaagagggaagttttatcagcagtgatgatgcaaggacttggagttggtggagcattatcaagaaat

SEQ ID NO: 5216 - DNA, 415 bp, Arabidopsis thaliana
  Clone ID: LIB22-005-Q1-E1-B12
gcttcttcagtcgtaaaaccgccgcgtctctgctgacccttctcttctcatttcatcgacgggagaaaatccgataccatctgagatttccaacagtgaaattaagatgtcaacaggaatatccactgatctacacgtccattttggagctctgaatttctcaaaaacctacaaatctggtttaagcaatcgaacggtgtctttttcgagagtcgggtatgctcagaacaggaaattgagctgcagtgtttccaacacagagaatgtagctcctaaggatgatgaaagaggaaaggatagacctttggttaagatgtgtggcatcacatcagccagagatgcagctatggcagttgaggctggtgccgatttattgggatgattatttggccacattcaaaacgatccaattctc

SEQ ID NO: 5217 - DNA, 427 bp, Arabidopsis thaliana
  Clone ID: LIB22-005-Q1-E1-B3
gactcagctcatacagttcacccgttggctggtcaaggagtaaatctaggatttgcagatgcgtgtgctctctccaaagctatagcagagggcattgctcttggtactgatataggcgaggcgaatctgctcaaacgttatgaagcagagagaaaacctgcaaatatagcaatgatggcggttttagacggaatccagaagatctactcgttggatttcggaccgctgaatgctctaagagcagctgcattccacggggctcactacatttcgccgcttaaaaagcgtatcatatcttatgcttcaggagagcaatctttgccgctattttcttgaagaatgcgaaggattgttcgctttgttctcaaaatactccgcatcatctcctcctttgccctaaatagaaatttaatggggactgaaaaca

SEQ ID NO: 5218 - DNA, 479 bp, Arabidopsis thaliana
  unsure at all n locations
  Clone ID: LIB22-005-Q1-E1-B5
atttgcccgnccaggtgcaagtaaacgggtccnggcnggcnncccaanncaaananattttttttctgnncaaaaattcgtntcaaaatttaacatattttttttattatgagaacaaatcctactacttcaaatccagaggtttcgatacgtgaaaaaaaaaacctgggacgtatcgcccaaatcattggtccggtactggatgtagccttccccccgggcaaaatgcctaatatttacaatgctctggtggttaagggtcgagatactcttggtcaagaaattaatgtgacttgtgaagtacagcaattattaggaaataatcgagttagagctgtagctatgagtgcgacagatggtttaaagagacgaatggacgtggttgatatgggaaatcctcnaagtgttccagtcggcggagcgactctaggacgaattttcaacgtgcttggggaacccgttgataatttagtctnata

SEQ ID NO: 5219 - DNA, 435 bp, Arabidopsis thaliana
  unsure at all n locations
  Clone ID: LIB22-005-Q1-E1-B6
ggagattcattactggagtgcttctccttcaccaaggacctatccacaagtttcagctctctacttctttcaaacaatgtcgtccagatattgatcagtggttgctttttctttcgaggaacgggattaaggagcttgttcttaagttaggtgaaggagaattcagggttcctgcatgtctctttaactgtttgaaattgacctgtttggagttatgtcattgtgagtttgatccgcctcagtatttcaaagggttttcgtatctgaagagtttaaaccttcaccagatccttgttgctcctgaggttattgaaagtctgatctcaggatgtccgcttctcgaagttcctgtcttgtctaactttgacagttgggttttgagtataacaactccgaatcccatgtacttgtaccnagacnggcgaattcaaagac

SEQ ID NO: 5220 - DNA, 437 bp, Arabidopsis thaliana
  unsure at all n locations
  Clone ID: LIB22-005-Q1-E1-B8
gcgcaaaatcatttgcacgttctacgcaactccataatttcaattcctctcgacgtttcacggcgaagcttcagatctacttttccccagctcagtatggagacggttgattctcggaacaaattgcattcccggttacgtttatgggaattccccgatcagtacatcatcgagccagctgatggctcaggctcttcatgtttggatattangtcgtgttgatgcttccatgaagctcatcgatcaagtcccagaaagcaattccgtgcgtgtccctaaaatccgttccatttttggtgtggttgggatgttgaagctccttgcaggatcatacttggtggttgtaactgagagtgaacgtgttggatcgtttctggggcatcctatattcaagagttacaacgcttaaggttcttccttgtgatattcacttaaaa

SEQ ID NO: 5221 - DNA, 440 bp, Arabidopsis thaliana
  unsure at all n locations
  Clone ID: LIB22-005-Q1-E1-C1
gcagtgacgtggcttggattccttgctccggctgcgttggctgtccttctaacacggccttttcccctgctaagtctacatccttcaagaacgttagctgcagcgctcctcagtgtaagcaggtaccaaaccccacgtgtggagcacgcgcgtgctctttcaacctcacctatggaagctcctccattgcggctaacctctctcaagacacgatacgtcttgccgccgatccgatcaaagcctttacattcggatgcgtcaacaaagtcgccggtggaggaaccatcccaccacctcaaggcttgttgggcttgggacgangcccactttcactcatgtcacangctcaatctatttacaaagtccactttctcttactgtttgccaagtttcaaggcccctgaacttctccggttctctcanactccggccctaactcc

SEQ ID NO: 5222 - DNA, 475 bp, Arabidopsis thaliana
  unsure at all n locations
  Clone ID: LIB22-004-Q1-E1-H12
cgttacgttgnccggcccggtccaaaataacgggtcgacccacgcgtccggaaaggaatatttgaaggaggacttgagagtgcagacagaggaggtactgttgatgaagaagatgttgaaggggattggggtgaggaacttgacattaatgttgatggaatggagaacatccttctctcttcctctaccctcatttccaccgccgatgacctagacgacctctctctcttccaccgcgccgtcgtctcttcctccaccaacaacaaccgtcgtctcatctccctctctccaaatccacccccaaagatcgctttcctcttcctaacaaactccgatctaaccttcttacctctctgggaaagcttcttccaaggtcaccaagatctctacaacgtttacatccacgcagattcaacctcctccgtctctcctcttctcgattcttcatcaatcaacgctaaattcatcccgggga

SEQ ID NO: 5223 - DNA, 420 bp, Arabidopsis thaliana
  unsure at all n locations
  Clone ID: LIB22-003-Q1-E1-D4
gaaantaaacaaagctatctaagataatgaaaacacanaccaaagtgatgggaggacatgtcntgcttactgttttcactctttgtatgctttgttcaggggttagggcacagctaagccctgacatttatgctaaatcgtgccccaatctagttcaaattgtccgtaaacaagttgccatcgccctgaatgccgagatacggatggctgcttctctcattcgtcttcatttccacgactgctttgttaatgggtgtgatgcgtcgttattgttggatggagctgacagcgagaaactcgcgatcccaaacattaactctgctagaggatttgaagtaattgatacaatcaaagccgctgtgggaaacgcatgtcccggtggttgttcctgggccgaaaacctcaactttgccgcccnga

SEQ ID NO: 5224 - DNA, 486 bp, Arabidopsis thaliana
  unsure at all n locations
  Clone ID: LIB22-003-Q1-E1-D5
aattcctgccggacctacaggtgangngnaattcccggggtccgacccacgcgtcnnatattgacaaggctcgaacaggcatactgtgggaatatcggatttgagtatatgcacattgcagatcgagataaatgtaactggttgagagaaaagattgagacaccaactccttggcggtacaacagggagcgccgtgaggtgattctcgatcggcttgcatggagtactcagttcgagaatttcttagctaccaagtggacaacagccaaaagatttggacttgagggaggagaatcattaattcctggaatgaaggagatgtttgacagagcagcagatcttggagtagagagtattgttattggaatgtctcacagaggaagattgaatgttctgggtaatgttgttcggaagccactccgtcagatatttagtgagttcagtggtggtattangcctgtanatgaagttggctacactggaact

SEQ ID NO: 5225 - DNA, 435 bp, Arabidopsis thaliana
  unsure at all n locations
  Clone ID: LIB22-003-Q1-E1-D6
tagatttaagaaacaaaataataagatggttagggcaaatatagtgagcatggttctgttgatgcatgccatcgttgggtttccttttcatgcgaggggattaagtangacttactacatgatgagctgtcctttcgctgaacagattgtgaagaacagtgttaacaatgctcttcaagccgatcccactttagccgctggtcttatccgtatgttgttccacgactgtttcatcgagggatgtgatgcgtcaattctgctanattcaacgaaagacaacactgcggaaaaggattcncctgcgaatccgantcnaagttggtaacaagattatccattgattcnaangggnaaaatcnagaatanatgttcaaagantttgtnncaaggnccagttaaanttgccaatggntggcaaaanatgcggtctttttg

SEQ ID NO: 5226 - DNA, 418 bp, Arabidopsis thaliana
  unsure at all n locations
  Clone ID: LIB22-003-Q1-E1-D7
naanttttttcgcatcggcttcttccttttgctactagctctcctctcttctccgaaaatggcgttacaaaacaaagaagaagagaaaaagaaagtgaagaagttgcaaaagagttacttcgatgttctcggaatctgttgtacatcggaaagttcctataatcgagaatattctcaagtcacttgacggcgttaaagaatattccgtcatcgttccctcgagaaccgtgattgttgttcacgacagtctcctcatctctcccttccaaattgctaaggnactaaacgaagctangttagaagcaaacgtgaagggttaacggagaaactagcttcaagaacaaaatggccganncccnttcgccgtaattttccggnttaaatncncctccnancccttcccaaaatttgtccaaan

SEQ ID NO: 5227 - DNA, 424 bp, Arabidopsis thaliana
  unsure at all n locations
  Clone ID: LIB22-003-Q1-E1-D9
agaatctatggttgctcgagtcctcaattcgctgcaaaagcaattgaattagcagctaaagaactcaaagatgttgcaggaggaaaagttaaccaggcacatcttgatcgtgccaaggcagccacaaaatctgcagttctgatgaatttggaatctcggatgattgcagcagaagacattggtagacagatacttacatacggagagaggaaaccagttgatcaattcttgaagtcagtagaccaactaaccttgaaagacattgcagacttcaccagcaaggttatttcaaagcctttgacaatgggttcctttggagatgtgttggctgttccgagctatgacacaataagcagcaaatttcgttgaagcaaaacaaacaatttgccaaatcaacaatattttgggacntgttaaataaaga

SEQ ID NO: 5228 - DNA, 432 bp, Arabidopsis thaliana
  unsure at all n locations
  Clone ID: LIB22-003-Q1-E1-E2
nagattaccggagaacaanagtgttaganntnaccccaggttgccggtnaaantgtatattcagatgacagatggagttcctccgccaccagagcaaagttcgttagaccaccgggattgacgagcttgagagacaagaaagagatcgatgattggcttccgataacttcatcgagaaacgcgaaatggtggtactccacgtttcacaacgtgactgccatggttggagctggcgtccttggtctccctttcttcatggcccaactcggatggggaccaggcatagcagtcctgatactatcatggntaataacactttacacgttaaggcaaatggggganattcatganaatgggtcccgggaaaacnctttnttcccaacaangaacttggccatttcncatttggcaaangtcttggcctttaaaaaa

SEQ ID NO: 5229 - DNA, 425 bp, Arabidopsis thaliana
  unsure at all n locations
  Clone ID: LIB22-003-Q1-E1-F12
tcaatcaatttaattctcgttaaacccttctctcaatcnaccacaattccaaaaaaaaaggttcgagttcgtgacaatnggctacgacaattacatggaagtggngaaaaaaatccgcaaagtcgtcaaatttcacagcttgattctctctcaacccaaccacacaatcgcaatctctcttctagacacgctcgctcgtcgtctaggtctcggcttcaagcaacacgaaccaggtgcttttctcctcaagttcccacacgtgtttgagatatacgagcacccagttcaaagaatcctctattgtcgattaacccgtaaagctttggatnaaatccgtcacgaacacgaagctgttctcgaccaaatacccgacgccgtgacccgggttgaggaaactcgttatgatgtcgaatacgggtcggttc

SEQ ID NO: 5230 - DNA, 426 bp, Arabidopsis thaliana
  unsure at all n locations
  Clone ID: LIB22-003-Q1-E1-F6
ncaactctctatctctctctcgcnccattctctancanaatgacaggtgccacaccggaaaaccgnanggnnccgtcgccaccaccggtganacatgtgccggagtcagttctgccggctaaaccaccaaagaggaacaattatgcattcgcgtgtgctatcttagcttccatgacttctatcctccttggttatgatataggagtgatgagtggagcaatgatttatatgaagagagatttgaagattaatgatttacaaatcgggattctcgctggaagcctcaacatctantcacttataggatcttgcgccgccggaagaanctctgactgggattgggccggcgttacactatcgtgttgggtgggagncatattctcggggngctatccttaagggatggtccctaactaagctttctca

SEQ ID NO: 5231 - DNA, 429 bp, Arabidopsis thaliana
  unsure at all n locations
  Clone ID: LIB22-003-Q1-E1-G1
gaannacgcgtgggcgaagccgacttcacgtcacgattacttacttccacgttacattttgtcgtgttttcttccttccgtttccttctctggcaagtctgcttcgtacgtactctctcttcattcccacttcacactttctactttttaccaaatcctatcctcaactctaattcccaccatttctgatccacgatttcaaattgggtggttggaagcagtgtttgtgctgtaattggatctgatctgatcggattcgattgaaatttggatcccatggagaagcacgaggaggaaaacggtctttgcaaggcggaatctgttgatggtagccttgatgtttgggagttgtcanaattctgattcctcctccgctgatcacttgtccgttaaggtccaagggatcttgggaagtacggtgattggaan

SEQ ID NO: 5232 - DNA, 466 bp, Arabidopsis thaliana
  unsure at all n locations
  Clone ID: LIB22-003-Q1-E1-G11
cacggtccngaaatccggggtcgacccacgcgtccgaacangcgtccgtctcaatgttcaaagaaccgtcaaggacttaatcgcagcaggtgctgctggttgcttccttgaggaccaggcatggccaaagaggtgtggacatatgcgtggcaaagaggtcatacctgcggaggaacacgctgctaaaatagcatcagcaagagacgctattggagatgctgacttttttctaatcgctaggactgatgctcgtgcactttccgcaaaaacaggactttcagacgccattgaccgtgctaatctttatatggaggcaggagctgatgcttcctttgttgaggcaccgagggacgatgacgagcttaaggaaatcggaaggcgcacaaaangttacaagactgtgtaacatgcttgaangtggacgcacgccaattgcataacncctgatgaacttaaagaaatnggt

SEQ ID NO: 5233 - DNA, 441 bp, Arabidopsis thaliana
  unsure at all n locations
  Clone ID: LIB22-003-Q1-E1-G12
naccaacgcttcgaaagacgcgtgggcggacgcgtgggctgtggaggaattgggtgagctcggtggggtttcatggttgctgaagataactcgagagancgagtgcaagcgaaacaaagagaatgcgatagtgatactgcatactatatgtttcagcgacaggacaaagtggaaggagatcaaagaagaggagaatgctcatggaacgataacaaagctttcgcgtgaaggaacttcaagggcgcagaggaaagcaaacgggatattggacagactgagaaaagctatgaatctcactcatacagcctgagaaaagccttgaaatctgcaatgtaaattacctaaaatcttgtttcttttttttactttatttggctgtaagaatttttgtaaattattcatatcttangatctgaatgggtaatggtttcgtaaaaaaaa

SEQ ID NO: 5234 - DNA, 472 bp, Arabidopsis thaliana
  unsure at all n locations
  Clone ID: LIB22-003-Q1-E1-G4
cgtntcggtaccggtggtgntcncgggtccccncacgcgtccgatagaaagcaaacataaattctctgacaatcagaaaacaaaaaaaaatcagaacaactcttatcttcttcacgagactgactaaacaatcatagatttttccgttttttgggtttcgtctggtgttactctctccttctgagttatggtgaaataatggcagcagctgaagcaagagcagtgtggcaaagaacagttaatcgttgctttgtccaagaagacgctaaaagagctcccaagttaacttattgccaatcatcttcatcctcaactgcttcttcaactaagcaagtggaagtttctggttcttctcctcgagtttctgttgaaccacgggactcaatcatcttgtgcaggnttcaaggctcttcctcgaaanccgaattttcctgatttgttacccacaacancagactgtggagtcatccca

SEQ ID NO: 5235 - DNA, 452 bp, Arabidopsis thaliana
  unsure at all n locations
  Clone ID: LIB22-003-Q1-E1-G6
ctccgggctcgaaccacgcgtnagacacgatccantgagcancagcaactccatctccggagctctagattcagataagaacaatggcgattccgatgcctactcgccagctattcatcgacggcgantggngagaacccatcttgaagaagcgaatcccgatcgttaatccagctactgaagaggtcattggtgatattcctgcagctacaanggaggacgtggatgttgctgtcaacgctgctcgaagagcattatcaaggaataangggaaagattgggccaaaagcacctggagctgttcgtgctaagtatttacgtgctattgctgctaangtanatgaaagataganggatctggcaaagctctaggcgcttgattgtggtaaancantggatgaagcantatgggatatggatgatgttgcnggatgttttgaattttatgctga

SEQ ID NO: 5236 - DNA, 428 bp, Arabidopsis thaliana
  unsure at all n locations
  Clone ID: LIB22-003-Q1-E1-G8
agttctagatcgcgagcggccgtcctttttttttttttttttcaaaggtcttcaggctaaactttctgaacaggaaggtattaattcaaagcttgcggaagaactcaaggagaaggaacttctggaatccttatcaaaagaccaagaagagaagctgagaactgcaaatgagaagttggctgaagttttgaaagaaaaagaagcgcttgaagcaaatgtagcagaggtcacaagtaatgtagcaacagtaacagaggtctgcaatgaactagaagagaaactgaaganctcaagatgaaaattttcccaaaacaagatggccctnctttctcaagctttgtcaaacaactctgagcttgaacagaaactgaaatcnctggaggagcttcattctgaanctggntctgcagcancagctgctacccaaa

SEQ ID NO: 5237 - DNA, 451 bp, Arabidopsis thaliana
  unsure at all n locations
  Clone ID: LIB22-003-Q1-E1-D10
tttccctcgcncctcaccggtcngancacncgggccgcccacgcgtccaaagatattagaacttgcaaaaaatggcttccaaggctttgattctgttangtctcttctcagttcttctcgtcgtctccgaagtgtctgccgcaaggcaatcgggcatggtgaagccagagagtgaggaaactgtgcaacctgaaggttatggcggtggccacggaggacatggtggtcacggngggggaggaggccacggacatggaggacacaacggagganggggccacggacttgacggatacggaggaggtggaggacactatggaggaggtggaggacactacggaggangtggaggacactacggaggangtggaggacactacngaggangtggaggacactacggatgacgtggtgncggacacngangtngaggacactacggangttgttg

SEQ ID NO: 5238 - DNA, 483 bp, Arabidopsis thaliana
  unsure at all n locations
  Clone ID: LIB22-002-Q1-E1-H8
ccggtaaggaaatcgcgggtcgacccacgcgtccgaatccattaatcatcatcttttcttcacagagaggaaaaaaaaaaaatggcgacagattctcaaccaaaccaaaagctaacgcttccgttaaaaacaagaatcgctctcaccgttatctccaccatgaccgataacgctcaacgtcctgacggaactatcaaccgccgtttcctccgcctcttcgatttccgtgctcctcccaatcctaaacccgtcaacatcgtctccacctccgatttcgtcgtggatcaatcccgtgatctctggttccgattgtacactccacatgtctccggcgataaaatccccgtcgttgttttcttccacggcggtggtttcgctttcctcagtcctaatgcgtatccttacgataatgtatgccggagattcgctaggaaattanctgcttangtcatctccgttaactaccgtctcgctccgggagca

SEQ ID NO: 5239 - DNA, 475 bp, Arabidopsis thaliana
  unsure at all n locations
  Clone ID: LIB22-003-Q1-E1-A12
ccttccgcacgncaccggtccagnaaatcccgggtcnaccacgcgtccgantgattatcttctcttcccctgtaagtactccgatctaattatttgttcctatcagacatcccccaatttctacgatcggatttattcgtcgatcaagaagctggctaagttgtattgttggtgattgtatagtttttattattattcgagagaatgaacagtagaagctgtatctgtgtctctgcgatgaaaccctgttgtagatttcttattagttttagaagttcctcgcttttcggtttttctcccccgaactctggcaaattcatcaattcgtcgaagttacactgtacaaagattgattccaagaagtattaaatctggtatcattgccgtcggattggtccgggatngggaaggcttttggtgaatcccgattccaataagctgggggaagaggaggtttaaaagttttaanaaccta

SEQ ID NO: 5240 - DNA, 439 bp, Arabidopsis thaliana
  unsure at all n locations
  Clone ID: LIB22-003-Q1-E1-A4
gaaagaccattcttcaacgccgctaaaaccttcgggnggaaccgtttcnctgactcnaccgcagttttcgccgttgttcccacatttctcacaccgtttatctccgctttcgaaatggttcgttcctcttaatggacctctcttcttatcttctcctccttggaaacttctccagtctgcgacacctttgcactggcgcggaaacggctctgttttgaaaaaagtcgaagctctgaatcttagattggatcgaattagaagcagaactaggtttccgagacagttagggttacaagtctgtggtaccaaacatattgacggtggatngcaacgattccaaaggaagaaagatgggtgggaaaatttagtcaagaagtttggttaatgtgccgaatatgatatcaatgggcaagattataaccnggtcctgtgctttggg

SEQ ID NO: 5241 - DNA, 474 bp, Arabidopsis thaliana
  unsure at all n locations
  Clone ID: LIB22-003-Q1-E1-A5
gtaccggtctnaaaaaaaannngggnccccacccacgcgtcaganctacctctactgtgaagacgttgctgaggcttttgaagttgttcttcacaagggagaagttggccatgtttacaatattgggacgaanaaggagaggagagtgaatgatgttgccaaagacatctgcaaactcttcaacatggaccctgaggcgaacatcaagtttgtcgacaacagaccttttaacgatcagaggtacttccttgacgatcagaagctcaaaaagttgggatggtcagagagaaccacgtgggaagaagggttgaagaaaactatggattggtacacacagaacccggagtggtggggtgatgtttctggagcattgcttcctcatccaaggatgctgatgatgcctggtgggcgacactttgatggctccgaggacaattcgctggcagctactttatctgaaaaancaatcaaacc

SEQ ID NO: 5242 - DNA, 463 bp, Arabidopsis thaliana
  unsure at all n locations
  Clone ID: LIB22-003-Q1-E1-B12
aatccggggccgaccaagccgtcgaaagaatcaacaatagatccttcttccatggcagatctctctagtgaagtcttatttgaccggttactgtttgtacnccatgggctgttaagcaatcaccagccaaaatggctaaagccaaggccttcctctaatgaatcatccagagactttaccttgtttgatcgcgatgcagcagagagcttacagaatgagctttcgcggatgcagttaccagacaccattagatggcggatccaagcagcgatgccaatcctccttccttctctacgctgttctctctcaagccancctcattccgttccgccaaacgcactcaacacttttcaaccctccggattcantggccggctggccggtaccaatcaaaagnaantcccctggcaaaatcgaaaaaatttggaatgggangnancaaacaaggggaaatttaaacccg

SEQ ID NO: 5243 - DNA, 474 bp, Arabidopsis thaliana
  unsure at all n locations
  Clone ID: LIB22-003-Q1-E1-B4
aattctagccgtccgtacggtcnngnttcccgggtcncccacgcgtccgaaantgctttcaccannccactcgacgggagtctccaacgccttcctcctcattctccactctcacaccaccaacttctgattccagatctcaacgatgcaaagctccgccgnattctccntctctccgtcgcttcctctcctaaaaccacgtcggctctctctccgccaccatcccataaccaccgccgcttcttcaagcgatctaaacgtttctccaaatgttgtctctattccttctttatctcgtcgatcttggcgtctcgcttcgtctgattcgcctctccgtgcttggtccggtgttccttctccgatctctcactccttagacacgaatcgtttcagaaccgccgctactgcaattcctgaaagtgctgaaggaaggtgataacaagtgggaaaanttgacaaaggtttnggaacttg

SEQ ID NO: 5244 - DNA, 426 bp, Arabidopsis thaliana
  unsure at all n locations
  Clone ID: LIB22-003-Q1-E1-B5
attatgaacnnaaattcaaattcaactatgatcgaattctaaacacaattatgaagtaacgacgatgaactcnangctttgtcatttggggacttcgatggatacgattcgctgcgattccgntatcttcngatctcctacttcctcttgtacactgggaagacaagattcgggtatctgtaacagtaacttgaatctggtaagatatggacaaaatcaatggattgcctgatgatttgctggtgaagattttatcgtatgttccaacggatattgctgtatccactancattttgtctaagcgatgggagtttctttggatgtggttgcctaatctcgactacacttctcggtggtgtagaaagcccggtgacgttggacttagggactttatccacaggaatctgccattacatanagctcccg

SEQ ID NO: 5245 - DNA, 455 bp, Arabidopsis thaliana
  unsure at all n locations
  Clone ID: LIB22-003-Q1-E1-C1
ngtaccggtggtatctcgggccccccacgcgtccaaanagtttgtcagtattggaactatcttgatctttctggtaacatgttctctggcaagatcccggtttcattgcagagtttgaagctaaaccagctgaatctgtcttanngggcggttancgggtgacttaccgccttctttagcgaaagatatgtataagaatagcttcattgggaacccgggattgtgtggggatatcaagggattgtgtggctctgagaatgaagctaagaagagaggctatgtatggcttcttanatcgattttcgtacttgctgcgatggtgcttcttgcgggtgttgcttggttctactcaagttcaggactttcaanaaagcaaganccatgggagagatttaagttgactctaatgtcgtttccanaanctcnggntcaatttagcattaaaantccttgaa

SEQ ID NO: 5246 - DNA, 423 bp, Arabidopsis thaliana
  unsure at all n locations
  Clone ID: LIB22-003-Q1-E1-C12
tccgtgacccgttcacccgccacgtctacaccaacatgtttgatgcactcatggactcgacatactcagccatgaaagctcttggatacggtgatgttaacattgtcgttggcganactggctggccatctgcttgtgacgcaccttggtgctcgcctgcgaatgctgcttggttcaacctcaacattatcaaacgtgcacaaggccaagggacacctctcatgcctaacagacggttcgagacatacattttcggtctcttcaacgaagaaggcaaacccggtccgaccgcagagcgtaactggggacttttccgagcagatttctccccggtttacgatgttggtcttctccgaaaacggacaaggcggtggangccgcccaacaattgcccgcactaatactgccggcggttaatggtgt

SEQ ID NO: 5247 - DNA, 478 bp, Arabidopsis thaliana
  unsure at all n locations
  Clone ID: LIB22-003-Q1-E1-C2
cgtaccggtcaggaatcccgggtccacccacgcgtccgaaacacgcgtccggnacaaacaactggaacaaggnnaatggtnnaagttcaaanggaacattacaacatggttngtaagaagggttcaaacaagttgtagacttgcttcaagggactccttataatcagcagattgctaattgctgcaagggtggtgttatgaactcatgggttcaagaccctgccactgcggctagctccttccagattagtgttggtgctgctggaaccacaaacaaaaccgttagggtcccaagaaacttcactctcatgggacctggtccaagttacacttgtggtccaacaaaagattgtcaagaccaacaaaatttgtcacgactgacacacgcagaancactcaaagctatgatgacatgggacattacntncacatactcncaatttccttgcncaaanaactccaaanttgccgggtttcc

SEQ ID NO: 5248 - DNA, 452 bp, Arabidopsis thaliana
  unsure at all n locations
  Clone ID: LIB22-003-Q1-E1-C3
cncgggtcccccacgcgtccnaaaacgcctggggggtaaggtgatngataagataaatgtgtatgcattcggcgttgttctcctcgagttactttcgggaagaaaaccgattagcagcggatgtccaaagggacaagagagtctagtcatgtgggccaaaccaattctagatgatggaaagtattctcagttattagacccgagtttgcgggataacaacaacaataatgatgaccaaatgcagaggatggcgttagctgctactctttgtattcgacgtagtcctcaagctagaccgaaaatgagcatcgtattaaagctacttaaaggtgatgaagacacgcttgagtgggcaatgcancaagtgaatagttcatcagaggagtcagagatgctcaaagatgagcaatgccaaagatctaacttgcaatcacaccttaacttaacacttc

SEQ ID NO: 5249 - DNA, 277 bp, Arabidopsis thaliana
  unsure at all n locations
  Clone ID: LIB22-003-Q1-E1-C4
attcccgggtccnccccacgcgtccganaaagtgatgtgatnatttgagcctgaccagacactaacacaagaagctgaaaatgaaaagccaaaaatccctcagatttgatgctttgcttcaaaccgcttgtttgaattttcaannctctcacacatgtattagtaatttaatcagcgagtgaaataatagagtttcagaagagtaaaatgcatgtgaatagntctgattatttatggtaatgtgagcattagagttaaaaaaaaaaaaaaaagggcg

SEQ ID NO: 5250 - DNA, 404 bp, Arabidopsis thaliana
  unsure at all n locations
  Clone ID: LIB22-003-Q1-E1-C7
ggttttaggtcaccgtacaaagtcaacgttttcagagcagtttaccgaagcgggtttgtggttttgaccactgtgatatccatgcttatgccgtttttcaacgacgtcgtagggattttaggtgcgttagggttttggcctttgacggtttactttccggtggagatgtatataagacagaggaaggttgagagatggagtatgaagtgggtttgtctgcagatgttgagctgtggttgtttgatgatcacgttggtcgccggagttggctccatcgccggagtaatgctagaccttaaggtttacaagccgttcaagactacttactaaacaaaccatgatgatgatgaagaagaagaagtggtggaganaaaaacannagatataaattttaatatatttca

SEQ ID NO: 5251 - DNA, 474 bp, Arabidopsis thaliana
  unsure at all n locations
  Clone ID: LIB22-003-Q1-E1-C9
gccaccggtccatacaacccgggtccgaccangccgtccgaagaagacaaaagcatttgatcgaccgacattagtagcaacaanaacaagaaaccgggagctagagcaaccgcatgaaaaccgggagtattggtaaattgcacaagtttcttgaatcaaaaccgggtccgggttcttgctcaagaacacctctacttaacaagaaaaaaccatctcatcgaccgacaataacaacaataaaaccggtcccggtacgtgtatcaagagaagaaatcaccgggaggaaaccggaagctcggtagattgctcaagtttcttgaatcaaaaccggtctggttcttgctcaagaacactgcaatcgggttataatcaaaaccaaaccgaatctaaccggtcttgtcctgattacttcaagtggattcacgaaggatttaaaaccatgggagagaaacanggattacaaaagaaatggng

SEQ ID NO: 5252 - DNA, 442 bp, Arabidopsis thaliana
  unsure at all n locations
  Clone ID: LIB22-002-Q1-E1-H7
gctatcatcggaaactgagggaacagagatcattcatcgccgcggttgatatagagaaagatggggaagacaattcaagtgtttggattccctaatggtgtgagcgcagaagaagttaagaagtttcttgaaagactcactggttcaggcactgtttacgcaatcaaagttagacaaccaaagaaaggtggtccaagagtctatgccattgttcaattcacatctgagagacatacgaggctgatcatcactgcggcagcagaacgtctttactatggaagatcttatctcaaggcttttgaagttgaacaagacattgttccaaaagccaagagcttcattacacaccatctctgggtttaaaagatgttctttggatgtcaagtctcgactaagaagtttttaactctanggaagtgctcaagatgtttgtgtcccgttt

SEQ ID NO: 5253 - DNA, 466 bp, Arabidopsis thaliana
  unsure at all n locations
  Clone ID: LIB22-002-Q1-E1-F4
tcccggtccgganataacgggtcgacccacgcgtccggaaaagacgacggagaaatggcggaggagcagaaaatgaagcagctaagccgattctggatttgggctttatcttccattgctttccgattgatcttgatctccttcccgggaaatctcaatctctcttcccgtccggaggtctctacccctctcaccagcattcgccgccttgctgaaggttattggttgaagcaggcatcgatgtcaccatatgcaggatctatgtatcatggctcaccattgctgctctcggttcttggacctctcacagttcaaaggattaaagggcaaccaagtcacctcttgtgcaagcttggtttttgttattgcagatatattaagttcaatgcttcttcgagctattggtcagnaactccagatggcttatggactgaatgccaagatacttggttttcctangtcatca

SEQ ID NO: 5254 - DNA, 443 bp, Arabidopsis thaliana
  unsure at all n locations
  Clone ID: LIB22-002-Q1-E1-F5
tgctgcagctgcttcgtatcctgctggtggagctgctttgaaatcttcaagtggaactgcttcgaagcccaaagagacgaagaagaggaaacaggaagaaccatctacgcaaaagggtgcaaggaaaagcaaaatagatgaggaaactaagaggaatgacgaggagactgagaatgacaacacggaagaagagaatggaaacgatgaggaggatgagaatggaaacgatgaggaagatgagaatgacgatgaaaatacagaagagaatgggaatgatgaggagaacgacgatgaaaatacggaagagaatgggaatgatgaggagaacgagaaggaggatgaggaaaacagcatggaagagaatgggaatgagaacgaagagaacgggaatgangaccatagcatggaagaaaatgggaaccggggttggtgaaagataatga

SEQ ID NO: 5255 - DNA, 503 bp, Arabidopsis thaliana
  unsure at all n locations
  Clone ID: LIB22-002-Q1-E1-F6
agaattttggccgcctaccggtangaattccgggtcgacccacgcgtccgcccacgcgtccgccaaaaggaagtctttacgacgttctccacggtgttagcccgaaagaaaatgtgctagactggtctgcacggtacaatgtagcacttggtgtcgctcatggactagcctatctacactatgactgccatcccccgattgttcaccgtgacatcaaaccagagaacatactcatggactcagatttggagcctcacattggggatttcggtttggctcgccttcttgatgactcaacggtttcaactgcaactgttacaggcaccaccggctacattgcaccagaaaacgctttcaaaaccgtgagggggaagagaatcaagacgtttacagttatgggagtcgtgttacttgagctgggttacaaggaananaacgggtggacaaatccttcccggggaaagttacaaggtatnagtaagcctggggtganatttgccttt

SEQ ID NO: 5256 - DNA, 450 bp, Arabidopsis thaliana
  unsure at all n locations
  Clone ID: LIB22-002-Q1-E1-G1
gcccacgcgtccnnnnnnnnnnnnnnnnnnnnnnnnnnnnnnnnnnnnnnnnnnnnnnnnnnnnnnnnnnnnnnnnnnnnnnnnnnnnnnnnnnnnnnnnnnnnnnnnnnnnnnnnnnnnnnnnnnnnnnnnnnnnnnnnnngataatgggagcctatgaaacagaaaaaccaactaaagatgcggcggctctagagacacagtcgccggaagatttcgatcaaccatctccgcttcgtaaaatcatctccgtcgcttccatcgccgccggtgtacagttcgggtgggccttacagctctctcttcttactccgtacgttcaactcctcggaatccctcacaaatggtcatctctcatttggctctgtggtccagtctccggcatgattgttcaaccaatcgtcggtttccacaagtgaccgatgtaggttcaaatttggtccgccgtcg

SEQ ID NO: 5257 - DNA, 402 bp, Arabidopsis thaliana
  unsure at all n locations
  Clone ID: LIB22-002-Q1-E1-G11
gctaagctccacctccaacaacattgctcccagtaactggnaatttggccagacntactccggcaagaacttccgcgtctgatttctataatatgaanaagagtcgtgtggcggaagatactaaagcttttttttatatcaaatatatatatttacgtgtctttgacttagtttacnatttggaattggggttttaccanttttcccttattttctcagggaaagtattgggattgcttggtttgcaagttagggtttactttanagattagggctatattgttttttttgttttntttggtgtgttgtgtcttgtttggtatgtantcntgtagngaggctgaagcggctgcataaagaangggttgggataaagattcatgtaacccgcagctctcnttt

SEQ ID NO: 5258 - DNA, 495 bp, Arabidopsis thaliana
  unsure at all n locations
  Clone ID: LIB22-002-Q1-E1-G4
gaatgtctggcngccggtcggganataacgggtcgacccacgcgtncgnctnaaaacgntnaatggttntcccctccgatnattagtctctttaatctttctcagcctcttcttgttcgtgatctctcttcctccggaaaaagatgtcggccggtaacggaaatgctactaacggtgacggagggtttagtttccctaaaggaccggtgatgccgaagataacgaccggagcagcaaagagaggtagcggagtctgccacgacgatagtggtccgacggtgaatgccacaaccatcgatgagcttcattcgttacagaagaaacgttctgctcctaccacaccgatcaaccaaaacgccgccgctgcttttgccgccgtctccgaggaggagccgtcagaagattcangnttcaatctatcagtgcatcngttagcatngttaacgaagagantcaggaccaaanggtggtganagggagatccggcngagaata

SEQ ID NO: 5259 - DNA, 451 bp, Arabidopsis thaliana
  unsure at all n locations
  Clone ID: LIB22-002-Q1-E1-G6
gggctaacttgacaaagaatctggagcaagtttctgagactcttgcggctgcgaaaaggcatttaacacaaaggattcagaatctggatgataaggtagaaaagcagatcgatctctcgaaggaaatcaatagccaggttatttctgctcgtgagaatatcagctcacttgagatggatttggaatcattgcataatttgattactggactggatgggaagttggacacgctggaatacaagcaggatgtcacaaatgttttcatgctaaacttgtataactattttggaggcaagagcacaaagctgcctgaaatggaacagcttcagcttcctgtaaaccaagagggctcgtaatttgcttgcagatgttgaaactaaagggtctgaaaaacttggctgaanaactgttttaaaagcaaatggcacacangtgacaaccacagtgaaac

SEQ ID NO: 5260 - DNA, 440 bp, Arabidopsis thaliana
  Clone ID: LIB22-002-Q1-E1-G7
gactttctctctgtgtgcaatttcgaaatcgataaagacttcaactttcggttctaacaatgacaatttccgtatagtttgattttgtccacctctttcaccgattacctgatttcatcgctggcgttagtcatcaaatgggagctcgttgctcaaagttctcattctgcttgttcccttctcacttcaaatccgcttcagttctcgagtctcctgatatcgagaatggaggaaaagtgtggccgacttttaaggaattcaaattggagcagctgaaatctgcgaccggaggtttctcttcagacaacattgtatcaagaacacggcgagaaagctccaaacgttgtctacagaggaaggcttgatgatggtcgtttgattgctgtcaaacgattcaatcgccttgcttgggctgattatccacaatttccggatgaaac

SEQ ID NO: 5261 - DNA, 487 bp, Arabidopsis thaliana
  unsure at all n locations
  Clone ID: LIB22-002-Q1-E1-H12
gcccnggcctaccgnaccggaattcncgcggtcgacccacgcgtccgggcnccgtggtggtatgcaagattttcgttaaaaccctaacgggaaagacgattactcttgaggtgganagttctgacaccatcgacaacgtcaangccaacgatccaagacanagacggtattcctccggaccancaagaggctgatcttcgccggaaagcagttggtggatggcanaactcttgctgacnacaatatccatgaangagtccanccttcatcttgttctcaggctccgtggnggtatgcagattttcgtnaagacgttgactgggaaaactancactttgggtggtggagagttctgacancattgataacgtgaaagccacggattnaanacaangaagggtattcctccgggacaanaagagattgatnctccgccggggaaacancttgaacattggcagaacntttgggcgactacaaaattcaa

SEQ ID NO: 5262 - DNA, 485 bp, Arabidopsis thaliana
  unsure at all n locations
  Clone ID: LIB22-002-Q1-E1-H2
gccggtnaataacgggtcgnacnaacccntcggccaacgcgtccgccgagaagaccaagtctctctaggcctcctaaggaatttttttgagtgttgagtaaataaaaatggagataacaaacgtgatggaatatgagaagatcgcaaaggagaaattaccanagatggtttatgattactatgcatctggtgctgaagatcaatggactcttcaagagaatcgaaacgctttctctaggattctatttaggcctcggattcttatcgatgtaagcaagattgatgtgagcacaacggttttagggtttaatatttctatgccaattatgattgctcctactgcaatgcagaaaatggctcatcctgatggcgagcttgcaaccgcgaagagctacttctgctgccnggaacaatcatgacttaacctcatgggcnacnttgtatgttgaaggaanttgcttcaaccgggccaagggatccgtttt

SEQ ID NO: 5263 - DNA, 448 bp, Arabidopsis thaliana
  unsure at all n locations
  Clone ID: LIB22-002-Q1-E1-H3
gctcactttctagttcttgttccctttcgaatcaagtgatcatggctcaagaagagatacagaaacctactgcctctgttccagtggttaaggaggaaactcctgccccggttaaggaggttgaggtgccggttactacggagaaagctgtggctgcgcctgctccggaagctacggaggagaaagttgtgtctgaggtggcggtgcctgaaacagaggtgacggcggtgaaagaggaggaggttgcgacgggaaaggagatcttgcaatcggagtcgtttaangaggaangctatttggcttctgaattacaggaagctgagaanaatgctttggctgagttaaaggagttggttanggangctttgaacaaacgtgaattcaccgcgccaacgccaacaacaagctccgggtaaaaggaaaannaaagttganggagaaagaaaac

SEQ ID NO: 5264 - DNA, 422 bp, Arabidopsis thaliana
  unsure at all n locations
  Clone ID: LIB22-002-Q1-E1-H4
tcaaggagganccggattgtnctcaaaantcaatnccaatttggctgaaagacttcnaacggggttgacaaaaaaaaacgaaatcccgggaagatgtggaatcagaagcatgatttggagtcggctcaagacgcctctctacccgatgatgtcggagagcccggagctccgatggtctttcatccgcaaggtctattccatcatctccatccaagctgctcgttacaatcgccgtcgctgccaccgtcgttaaggttcattctatttctgtattcttcaccaccaccaccgccggnttcgctctctacatacttcttatattgactccattgatcgtnatgtgtcctttgtagtactatcaccaagaagcancctgtgaactatctgttactcggggatttcaacgtcgctccntgcctttg

SEQ ID NO: 5265 - DNA, 503 bp, Arabidopsis thaliana
  unsure at all n locations
  Clone ID: LIB22-002-Q1-E1-H6
gaattttctggggggnctaccggtaagagatcccgggtcgacccacgcgtccgttttttattaaccagccctctctcttcttccccaaatctccattttctctgcaaatcccaaatccatcacaaaccctaattttagtctctcaaaatctccaccgtttctaccaccgtcaatgtggcggccgtggcgtaaatcgtcggttaagattcacgacacatactctccaaccaccgcttccttcaaagacatnnnnnnnnnnnnnnnnnnnnnnnnnnnnnnnnnnnnnnnnnnnnnnnnnnnnnnnnnaaaaaccgcttctagagtcttccaccgagtccgtgcagctaatttgatcctcaaatcgtggccaactcgtcaatctaatcacctcctccgcgcagattccgaacctatcaatccaagccggaatcaaaatccagaatcagattcgaaganncgaaaagcaaaaancgaancaagatgtacgganttcaaatccaagg

SEQ ID NO: 5266 - DNA, 449 bp, Arabidopsis thaliana
  Clone ID: LIB22-002-Q1-E1-F3
gactactcatattgcttatattttcctacaacactctctcaacaaaaaaacaaaaaaaaaagacgttctttctttgtttgtatttagaagaaaaatggctaccaattacaacgagaagcttcttcttaattatgttcccgtttacgttatgcttccgttgggagttgtgaatgtggaaaatgtatttgcggacccagaaacgcttgaaacgcagcttaaacgtctcaaagaagaagctggcgttgatggcgttatggtcgatgtttggtggggaatcatagaatccaaaggtcccaaacaatatgattggacggcctacaaaacgctgttccagctgatcgcacgtttgggactcaaaatccaagcaatcatgtcttttcaccaatgtggtggaaacgttggcgacatcgttactaaccccgattccacaatgggttcgcgatgtcggt

SEQ ID NO: 5267 - DNA, 524 bp, Arabidopsis thaliana
  unsure at all n locations
  Clone ID: LIB22-083-Q1-E2-A8
actgtctccctggccctaccngtccgganattcccgggtcgacccacgcgtccgcatnggctctcgcttggacataccgtagacagaatttgttacgggaaattgtcaagtaccgtgcagatatagtttgtctacaagaggtacagaatgatcattttgaggagttttttcttcctgagctggataaacacggataccaaggtctttttaagaggaaaacaaatgaggttttcatcggtaatacaaacacaattgatgggtgcgctactttcttcagaagagacaggttctcacatgtaaaaaaatatgaggttgagttcaacaaggctgcacagtctttgactgaggctattatccctgtttcccagaagnaaaaatgctttgaancggttggtcaaggataatgttgctttaatagttgtactggaagcaaaattcggtagccagctgctgacaacctgggaagcgccagctactttgtgtggctaacaacncatgttaaacgttcctcatgaattgaaaga

SEQ ID NO: 5268 - DNA, 438 bp, Arabidopsis thaliana
  unsure at all n locations
  Clone ID: LIB22-001-Q1-E1-B3
gganaaatnnaancnncatnagggacaanccnanagagaagagagagaccggncnaancacaaagcccttaaagataggaagatactttgtcatagctttgctatttctcaaaaaaaaatgagggacgacagagaaagaggagagggtgatttgtcatggcctttgatcggagagaaaagtagtgtcaaggaagaagtgaagaagcagctatggctttcaggcccactcatcgccgtgagtcttcttcagttttgtctacaagttatctccgtcatgttcgttggccatcttggctctcttcctctctccgccgcatccatcgccacctctttcgcctccgtcaccggtttcagcttcctcatgggaacagcaagtgcgttaagatacgctttgtggccaancgtacggagcaaagaatacggnatgttaggaataca

SEQ ID NO: 5269 - DNA, 438 bp, Arabidopsis thaliana
  unsure at all n locations
  Clone ID: LIB22-001-Q1-E1-B4
ggaanaanccgncaacgcctttatatattacacacacattttatgtgtanctctgtgtttcagaatcagacctaagccattgttgaagcctttcctcatttctccatttagatcaagaaatatggcaaaccgtccacacgttccgaagtttggggactggaacaaccaagaccaaccattcacggtcgtctttgacaacgcaaggacgaacaaacgacaagacttgtatgaatctatagagaaaccagagaccaaacctcaagagctagctcctcctcctcctcagcctgctcgtagaattcaaaaaccggaagcaccaaaaccggttaagcaagacacgccgagagcacctccaccaaccgaaaaaaacagagtcaaagctccaccggcagatcaactctacggaggcgggggcagtggaggcggaggcaaggagtg

SEQ ID NO: 5270 - DNA, 436 bp, Arabidopsis thaliana
  unsure at all n locations
  Clone ID: LIB22-001-Q1-E1-B7
ggaacatcatcaccattacgtaccaaagcatcaagtagacgagatgagatccgaaccagcgcggccctcgaagctagtccatgcgcattccattgcttcggctcagcctgctgatttcgcgcttaaggagacaagcccgcatctcggtggtggaagagtcgttggtgggcgtgttatacacaaagacaaaaccgctacgagtacttatgatcttgtcgagagaatgtatttcctttatgtccgcgttgtcaaagctcgtgagcttcctataatggatataacaggaagtgttgatccattcgtcgaggtgagagtggggaactacaaaggaatcacaagacattttgagaagagacaacatccggaatggaaccaagtgtttgcattcgcgaaagagcgaatgcaagcctcggtgttgggaagtantgggttaagg

SEQ ID NO: 5271 - DNA, 429 bp, Arabidopsis thaliana
  unsure at all n locations
  Clone ID: LIB22-001-Q1-E1-C4
ncgnanccttncgatttggnnnnnnnnnnnnnnnnnnnnnnnnnnnnnnnnnnnnnnnnnnnnnnnnnnnnnnnnnnnnnnnnnnnnnnnnnccggaagcgacggatctcgctactgcgacagctggagattagccgccgagaccaataacgtcggaacttgggatctgattccgtcaatctgcgtggattccgtcgccgagtatcttaacggagaccagtttttatccgattacagtgtcatcgtcgattatgctctcgcgtttgcgaaatcggttgaaatttccggcgacggcaaggacgtgtggatcttcgatatcgacgagacgcttctcacgaatattgactactacaagggtcaaggttacgggtctgaaccgtatgacgataataaatttaatgantgggtgggaacaaaggaacaactcca

SEQ ID NO: 5272 - DNA, 434 bp, Arabidopsis thaliana
  unsure at all n locations
  Clone ID: LIB22-001-Q1-E1-C5
gctccttcctcggctgtaacaagatagagaagaagatgaatatggaagtggatacagtaacaaggaagcctcgtatcttactagctgcaagtggaagtgtggcttcaattaagttcagtaatctctgccattgtttctcagaatgggctgaagtcaaagccgtcgcttcaaaatcatctctcaatttcgttganaaaccttctctacctcagaatgtgactctctatacagatgaagatgaatggtctanctggaacaagattggtgatcccgttcttcatatcgaagctcanacgctgggctgatgttatgatcattgctcctttgtctgctaacacattanccaagattgctggtgggttaagtgataatctantgacatgtatagtaagagcatgggattatagcaaaccgttgtttgttgcaccggcgat

SEQ ID NO: 5273 - DNA, 435 bp, Arabidopsis thaliana
  Clone ID: LIB22-001-Q1-E1-C6
ggaaagaaagcccacccgggaatctccgacccgaccgagaaatgggatcgtcagcgaatacagaaaccaacggcaacgcaccgccaccgtcgtcgaatcaaaagcctccggctacgaacggcgttgatgggtctcatcctcctcctcctcctttaactcctgatcaagctattatagagtcggatccgtcgaagaagaggaaaatggggatgcttcctctagaagtgggtactcgtgtgatgtgtcggtggagagacgggaaacaccatccggtgaaagtaattgagcgccggcggatacataacggcggtcaaaatgattacgaagtattacgttcattacactgagtttaataggaggctggatgaatggactcagctggaccaactggaccttgattcaagtagaatgcgctgtagatgaaaaatggaagac

SEQ ID NO: 5274 - DNA, 417 bp, Arabidopsis thaliana
  unsure at all n locations
  Clone ID: LIB22-001-Q1-E1-C7
gcttcaattctctgtttcctccaaaatggctacaccaaacgaagtatcagctcttttcctcatcaagaagtatctcctcgacgaattgtctccgttgcctactactgccaccaccaatcgatggatgaacgatttcacgtcatttgatcaaaccggtttcgagttttctgaatttgaaaccaaaccggaaataatcgatctcgtcactcccaaaccggagatttttgatttcgatgtgaaatctgaaattccatctgaatcgaacgattccttcacgttccaatcgaatcctcctcgcgttactgttcaatccaatcgaaaaccgccgttgaagatcgcaccaccgaaccgaaccaagtggattcaattcgcaaccggaaatcctaaaccggaacttcccgtaccggttgttncagc

SEQ ID NO: 5275 - DNA, 430 bp, Arabidopsis thaliana
  unsure at all n locations
  Clone ID: LIB22-001-Q1-E1-C8
gctaatctatcacaaacccttccacattgcttttgtcagtctgtaaaattctctttgaatcagtgaatcactcacttaaatccaaaacagtttttttttctttctttctttatttgcttgttgtggaatcaatagctgtctccgggaaaannnnnnnnnnnnnnnnnnnnnnnnnnnnnnnnnnnnnnnnnnnnnnnnnnnnaataattatccccgagccaacatttattgtcgattcggtttatttcgtctccttcgtcttccactcttactagtgcatgctctgaatctgtatgtaatgggagttcaacagtctggatccattatcctagccgggtcgggtcaaggtctttgagtaagagagacaattcgttttgattcggtgtanaagacatcatgaatactggtggtcgggntcattgctgggctc

SEQ ID NO: 5276 - DNA, 437 bp, Arabidopsis thaliana
  unsure at all n locations
  Clone ID: LIB22-001-Q1-E1-D5
ggaaagatatagagaannnnnnnnnnnnnnnnnnnnnnnnnnnnnnnnnnnnnnnnnnnnnnnnnnnnnnnnnnnnnnnnnnnnnnnnnnnnnnnnnngaaaaaaaaagctttgaaattctctctcgacaatggtgtcggaccaggatctagcgaaaggagtcgagactttgcttcgacaatccgaccctagctctctcacatcgttaagcagtattgttcagcagcttgaagctaagttagggttagacctcacggagaagacgactttcatcagagatcagatcaatatcctcctccgtgctcaccaaaacccttctgcctccgtcgcctccgcttcatccgtacaacaatctcaactcctcctccggcgtcttctcaccaacaagcaagaatttgcattccggcgtcaatgttccctccgaanggcgaaaaggg

SEQ ID NO: 5277 - DNA, 432 bp, Arabidopsis thaliana
  unsure at all n locations
  Clone ID: LIB22-001-Q1-E1-D7
gcccacgcgtccgcccacgcgtccgcccacgcgtccggctttctctgcccttcaatggattgcctctggaacaaacagcaccattgccctcagtgtgggaacaaggtacttttatatgtcttcttcatgcctgctactcgtgtgcgttttttttttctctgtatggaagattgtttcattcatatgattgatttgtttacaggttgctgactttgagaaatcagatccctgcctggtgatggatccgccacagtggaagcaacctagtttcgcactcccagcatgataagatgcattcttttctcttgtgattaatattgcttgtgaagttgagtcgttctgttgcatgtactggaaaaaaactaagatncagaataaccctatagaatgtgtgagaaatgaaatatttaatcctctgtatcgtttcactga

SEQ ID NO: 5278 - DNA, 456 bp, Arabidopsis thaliana
  unsure at all n locations
  Clone ID: LIB22-001-Q1-E1-D8
gcggacgcgtgggctcgaagcgagtgagatatggcaacaaagaccgatgattttgcaccatttccagttaaagatcagcttcccggagtcgaattttgtgtctcgagctctccaaattggccggaaggaatagttcttgggtttcaacattacattgtaatgcttggaactactgtaatcataccttccatactcgtccctctaatgggtggtggcgacgtggagaaagcggaagtcataaacacagtattgttcgtgtcaggaataaacacgttgttgcagagtttgttcggaagtccacttcctgtggtcatgggaagctccttaatgccttaacctcaatccctggctccttaacaatcaactttcctccttatccgattcaacttactaactccaatcctcatcctcaagattttgaaagaagactaatgaanaagctaattcaaagggagc

SEQ ID NO: 5279 - DNA, 440 bp, Arabidopsis thaliana
  unsure at all n locations
  Clone ID: LIB22-001-Q1-E1-E1
gnannaaancnaaaacnaaaatngaaacnaatcnattnccctnctcctnctnctncngttnnnaggttcggngcccggcnccgtcanctcaattccggctcagaattcggacaacctgaagctctctttatgcatctccgacatcggggaggcaccggtggttctgttttctctcatcttgttcaagctccagaggatcctattcttggggtgacagttgcatacaacaaagatcctagcccagttaagctgaatttaggagttggtgcttaccgaactgaggagggaaaacctttggttcttaatgttgtgaggaaagctgagcagcagcttatcaatgacagaacaagaatcaaggagtatcttcccattgttggattggttgagttcaacaagttaagcgctaagctcatactaagcgctgacagtcctgctaatcg

SEQ ID NO: 5280 - DNA, 435 bp, Arabidopsis thaliana
  Clone ID: LIB22-001-Q1-E1-E2
gcgcattttctctactgtcttctccactggcgactcatatggagcagcaatatggcagattcctgagccatatggtcaatcgaattcttcaacattggaatgtgttgcttcccttgatgcacatgttggtaagattaattgcgttctttggtgtccctctggaaattctgacaagttaatcagcatggatgaacaaaatcttgtcttctggagtttagactcttcaaagaaaagtgcggaggttttatctaaggagtcagctggtatgcgtcattctttatctggtggagcatggaatccacatgatgtgaattctgttgcagcaacttctgaatcatctatccagttttgggacttacgtactaagaaagaagaataattcaattgaacgtgcccatgtacgtaatgttgactacaatcccaaagagaagaaca

SEQ ID NO: 5281 - DNA, 436 bp, Arabidopsis thaliana
  unsure at all n locations
  Clone ID: LIB22-005-Q1-E1-F6
acgcgtccgcccacgcgtccggggtaaaagtcatgaagaaactcctctgagtnnnnnnnnnnnnnnnnnnnnnnnnnnnnnnnnnnnnnnnnnnnnnnnnnnnnnnnnnnaatgggtggtttaatcgatctgaacgtgatggagacggaggaagacgaaacgcaaacgcaaacaccgtcttcagcttctgggtctgtctctcctacttcgtcttcttcagcttctgtgtctgtggtgtcttcgaattctgctggtggaggggtttgtttggagctgtggcatgcttgtgctggaccccttatctctctaccaaaaagangaagccttgtgttgtatttccctcaaggacatttggaacaagcccccgatttctccgccgcgatttangggctccctcctcaacgtgttctgtcgtaatctcgatgttaagcttcac

SEQ ID NO: 5282 - DNA, 469 bp, Arabidopsis thaliana
  unsure at all n locations
  Clone ID: LIB22-014-Q1-E1-E5
acgcgtccgctcgttgaagatagttccatcgacnatgttanctcatggaacnaagatggttcctctttcancgtatggaatccganagatttcgctaaanatttgcttcctaaacacttcaaacacaacaatttctctagtttcgttcgtcagctcaacacttacggattcaaaaaagttgtaccggatcgatgggagttttcaaacgatttctttaagagaggagaaaaacgtcttctccgtgagatccaacgtcggaaaataacancgacgcatcaaacagtttgttggcccttcgtccngaataatcgaanccataccaatgggtgtttcaacgtcaaantccggggaaagataataatgattaacaagggtatgtcctccncctcgtnctcctggnaattgnnaacaaacgaaagancaacnggaaaggngggttaacnattggtttattggaaaaaaacaanaa

SEQ ID NO: 5283 - DNA, 443 bp, Arabidopsis thaliana
  unsure at all n locations
  Clone ID: LIB22-014-Q1-E1-H11
accgggtccanccacgcgtccgggagaagaggaagacgatcaacggagacgatttgctctgggctatgactactctaggttttgaggattatgttgagccattgaaagtttacttgcagaggtttagggagatcgaaggggagaggactggactagggaggccacagacnnnnnnnnnnnnnnnnnnnnnnnnnnnnnnnnnnnnnnnnnnnnnnnnnnnnnnnnnnnnnnnnnnnnnnnngatgcagtatcaccaacatcatcagtttcttcaccagcagaaccatatgtatggagccacaggtggcggtagcgacagtggaggtgganctgcctccggtaggacaaggacttaacaaaagattggtgaaatggattccccccctgtatatagatacataaatacatgtttacacatgcctaattttaacaacccatattan

SEQ ID NO: 5284 - DNA, 442 bp, Arabidopsis thaliana
  unsure at all n locations
  Clone ID: LIB22-025-Q1-E1-E4
cacgcgtccacgnaacgcgtgggcggacgcgtgggcggacgcgtgggctcctgagaaccagcaccaaaggagtgataacattggtccacctccacctaatcgacaaagaaggaataatgcttctggaactctgccagataatcgccaaagagttgcatctaggacgcggcctgtgaatcaggggaaaagggtagcgaaggagganaatgttgtgttgacagacccaaacttgcctcaacttgttcaagagttacaggagaagcttgtcaagagttctattgagtgtatgatttgttatgacaaggttgggaggtctgccaatatctggtcatgctccagctgttattccatcttccatatcaactgtatcaagaagtgggctcgagcaacaacttcagttgatttgctagctgagaaaaaccaaggtgataactggagattc

SEQ ID NO: 5285 - DNA, 467 bp, Arabidopsis thaliana
  unsure at all n locations
  Clone ID: LIB22-045-Q1-E1-B1
aagtttcccgggaacgacccacgcgtccgaatgagaccataaactcatcgagggaagcaaatgagtcaaatctctcggattctgcagttacaagtatggattactttctaagttcgtcggcttattctcctggtggcatggtcatgcctatcaagtggaatgcagcagcaatggatattggctgctgcaaacttaatatatgatcagcagataggggacaagacatgatttggttcaccaagtcttttgtcttgtcccttatctttcagccaaacggaaagagaacttgtgtcttgggaaaaaagacattgagtttccttggtttataagattggtccttttaccatccgtttggctgtaaacaggcaaatcatcnttggctcatgcttcatcaagttcttatcctccgtctggttttcctctacgcatccttcaaaaagattctctgaactantgaataacatttc

SEQ ID NO: 5286 - DNA, 514 bp, Arabidopsis thaliana
  unsure at all n locations
  Clone ID: LIB22-059-Q1-E1-A4
ncccggtccgggaaaaccgggtccacccacgcgtcggcncccgngttttgttttctttgtctccgatttttttcgcnnnnnnnnnnnnnnnnnnnnnnnnnnnnnnnnnnnnnnnnnnnnnnnnnnnnntctgtaaccgattttaaagatctcaatttttangggttgttgatttttcaatttctgggttaattttttttanggttttcatttgggaatcatgtcggatgcgtattgtacggattgtaaaaaggagacggagttggttgtcgatcactcagccggagataccctttgctccgaagtgtggtttggttttggaatctcactccattgatgagacctctgagtggcgtaccttcgctaatgaatcttccaacagcgatcccaatcgtgtcggtggtccaaccaacccgcttctcgctgataagtgctttaaccactgttatcgctaagccaatgggtcaacctgggtgaattcctggcctcctcctctcgggaaggtggcaanaat

SEQ ID NO: 5287 - DNA, 384 bp, Arabidopsis thaliana
  unsure at all n locations
  Clone ID: LIB22-074-Q1-E1-D8
acncgtccnaagagactctcgccgtctaatgggaagctgttggtctgatggctcttacgctggtggaggaatggtcggtgttggtggtggggctaattcctccgccgccactcctaacgacgccgttgactactatctcaagtctcgtggctacaatggcctcttttctcagatcgagttatctttctctgcttccaatttgcgagaccgggacgtgatttcaaagagtgatgcaatggtggttgtttatacaaaaggaagagatggaacacttgctgaattgtttcgtagtgaanttgttttgaattctttgaatcctaaatggattaaggaattttantattggttatcanttcgagantgtgcaaacattgcctgtntcgt

SEQ ID NO: 5288 - DNA, 486 bp, Arabidopsis thaliana
  unsure at all n locations
  Clone ID: LIB22-083-Q1-E2-F7
acgcgtccgagacccacaataatgccaaggagattcgttacagaggcgttaggaagcgtccttggggccgttatgccgccgagatccgagatccgggcaagaaaacccgcgtctggcttggcactttcgatacggctgaagaggcggcgcgtgcttacgatacggcggcgcgtgattttcgtggtgctaaggctaagaccaatttcccaacttttctcgagctgagtgaccagaaggtccctaccggtttcgcgcgtagccctagccagagcaacacgctcgactgtgcttctcctcccgacttagttgtgccttcaaccaaggctgggaaatgttccccccgcaactcgaagcttaatctcgggcggaggangcggcggctcgtgttaacaagattcccgatgtcgcgtcctgtctacttttggacctgaatggggatcggtaacgttaggtcgtggtcaagcctcctcctgtgacaatcggcgt

(The sequence listing continues in the following parts.)
